United States Patent Application Publication US 2006/0107345 A1 - sequence listing, part 5

SEQ ID NO: 16843 - DNA, 1033 bp, Glycine max
agtgtatatattttggctgaatcattaaaatctcttctgaaagagttgtaccttgatgattgccaaggcattgatgctgcactaattgtgccagcactaattgagcttgaacatttagaagtgttgtcagtagctggcattcaaacggtttgtgatgaatttgtcaagaactacattgttgctcgtggacaaaacatgaaagagcttgttttgaaggactgtataaacttgactgatgcatcaatcaaagccattgttgagcactgtccaggattatgtgtgcttgatcttatgaacctgcacaaattaacagatttatctataggacatcttgcaaatggttgtcgtgcacttcatacactgaaactttgccgtaacccattcagtgatgaagcaattgctgcatttgtggagaccaccggagggtccttaaaagaattgtcacttaacaacattaagaaggttggttaccacacaaccttatcacttgcaaaccatgcaaaaaatttgcattctctagatctatcttggtgcagaaatttgacagacaatgcactgggtttgattgtggatagctgtttggcactgaggtcacttaaactttttggatgcagtcaggtaacagatgcttttctcaatggccactcaaaccttcagatccagataattggtttgaaaatgtctcctgtgttggaacatgtcaaagtgccagatcctcatcaaggtgctttgaattattcatcagtctccgtagatttggtataaattaggatcggaatctaaatttgtagcggcattttgcataactatgtctacgaagatatttccagtaatcccagatcagacgaaaaccttctctgctaacatggcctttaattggaaggggttttgactgttgtctgagttgcccgttctgtgatgcctgttgaaggaatcttaactgtattacattttcctttacaaacattaatatatgtactaactatttttcagccttaatataaaaagaaaatatatccagccttactatttc

SEQ ID NO: 16844 - protein, 254 aa, Glycine max
SVYILAESLKSLLKELYLDDCQGIDAALIVPALIELEHLEVLSVAGIQTVCDEFVKNYIVARGQNMKELVLKDCINLTDASIKAIVEHCPGLCVLDLMNLHKLTDLSIGHLANGCRALHTLKLCRNPFSDEAIAAFVETTGGSLKELSLNNIKKVGYHTTLSLANHAKNLHSLDLSWCRNLTDNALGLIVDSCLALRSLKLFGCSQVTDAFLNGHSNLQIQIIGLKMSPVLEHVKVPDPHQGALNYSSVSVDLV

SEQ ID NO: 16845 - protein, 189 aa, Glycine max
MKELVLKDCINLTDASIKAIVEHCPGLCVLDLMNLHKLTDLSIGHLANGCRALHTLKLCRNPFSDEAIAAFVETTGGSLKELSLNNIKKVGYHTTLSLANHAKNLHSLDLSWCRNLTDNALGLIVDSCLALRSLKLFGCSQVTDAFLNGHSNLQIQIIGLKMSPVLEHVKVPDPHQGALNYSSVSVDLV

SEQ ID NO: 16846 - protein, 157 aa, Glycine max
MNLHKLTDLSIGHLANGCRALHTLKLCRNPFSDEAIAAFVETTGGSLKELSLNNIKKVGYHTTLSLANHAKNLHSLDLSWCRNLTDNALGLIVDSCLALRSLKLFGCSQVTDAFLNGHSNLQIQIIGLKMSPVLEHVKVPDPHQGALNYSSVSVDLV

SEQ ID NO: 16847 - DNA, 1191 bp, Glycine max
aagtttcaaacgccgcaaccaccacacaattcctacacatttctactctttagtttctccaattttctttctcaattctcaacaatggccactacaacacaacttcacttaccccctggattcagattccatccaacagatgaagaactcgtcatccactacctttgtcgcaaatgcgcttcgcaacatatcgcggttcccataatcgccgaaattgatctgtacaagtacgacccttgggaccttccaggaatggctttgtacggagagaaagagtggtattttttcacgccgagggaccgcaagtacccgaacggttcgcggccgaaccggtccgcgggaaccgggtactggaaggcaaccggagcggataaaccagttggtaaaccgaaaccggttgggatcaagaaagcgttggttttttacgctggaaaagcgcccaagggagagaaaactaactggatcatgcacgagtatcgtcttgcagacgtggatcgttccgttcgcaaaaagaacagcttaaggctggatgactgggtgctgtgccgaatttacaacaagaaaggtgcaattgaaaagcaacaactaccaccaccgagtggggtccgcaaaattgaatgttccgaaatggaggacgagaagccggagattctgccgccagatccgccgtatacggcggcgacggtggcggattgcctgtacttcgaggcttccgactcggtgccccggctgcacacgacggactcgagctgctccgagcaggtggtgtcggcggagtttgcgagcgaggtgcagagcgagccgaagaggggcagcaacaacaacaacgagtttgcatataattacgtggatgccactctcgggaataatcagatgtcgccgctgcaggatattttcatgtacctctccaagtccttctgcaattaacacgcaccaccaccacgacgagacgacgtcgttctgtgttgtgtgtatgcattatgcatttttgcagtagctgctccactgcaccatttgcacggaagcacgagactgagtgaagatccgtgagtgtgtccgtgctggttcgtgtagacgattattacaaaaaaaaacaaaaaagcaccaagatgaagaagaagaaagattcttatatgaacatgatgaattatgagtatattaaattaatgaagtattaatacatcattgagc

SEQ ID NO: 16848 - protein, 308 aa, Glycine max
KFQTPQPPHNSYTFLLFSFSNFLSQFSTMATTTQLHLPPGFRFHPTDEELVIHYLCRKCASQHIAVPIIAEIDLYKYDPWDLPGMALYGEKEWYFFTPRDRKYPNGSRPNRSAGTGYWKATGADKPVGKPKPVGIKKALVFYAGKAPKGEKTNWIMHEYRLADVDRSVRKKNSLRLDDWVLCRIYNKKGAIEKQQLPPPSGVRKIECSEMEDEKPEILPPDPPYTAATVADCLYFEASDSVPRLHTTDSSCSEQVVSAEFASEVQSEPKRGSNNNNEFAYNYVDATLGNNQMSPLQDIFMYLSKSFCN

SEQ ID NO: 16849 - protein, 280 aa, Glycine max
MATTTQLHLPPGFRFHPTDEELVIHYLCRKCASQHIAVPIIAEIDLYKYDPWDLPGMALYGEKEWYFFTPRDRKYPNGSRPNRSAGTGYWKATGADKPVGKPKPVGIKKALVFYAGKAPKGEKTNWIMHEYRLADVDRSVRKKNSLRLDDWVLCRIYNKKGAIEKQQLPPPSGVRKIECSEMEDEKPEILPPDPPYTAATVADCLYFEASDSVPRLHTTDSSCSEQVVSAEFASEVQSEPKRGSNNNNEFAYNYVDATLGNNQMSPLQDIFMYLSKSFCN

SEQ ID NO: 16850 - protein, 224 aa, Glycine max
MALYGEKEWYFFTPRDRKYPNGSRPNRSAGTGYWKATGADKPVGKPKPVGIKKALVFYAGKAPKGEKTNWIMHEYRLADVDRSVRKKNSLRLDDWVLCRIYNKKGAIEKQQLPPPSGVRKIECSEMEDEKPEILPPDPPYTAATVADCLYFEASDSVPRLHTTDSSCSEQVVSAEFASEVQSEPKRGSNNNNEFAYNYVDATLGNNQMSPLQDIFMYLSKSFCN

SEQ ID NO: 16851 - DNA, 1206 bp, Glycine max
acaaacttgatccttgctgttgtttatgacagtttcaagagtgagcttgtaaaacaagtttttgagaaggatcgtttgagaagaactatgttggacaaagcttttgatctcttggatacgcataaagttagtagtctcaacaaaaatcaatgcattaggctctttgaggagctgaacaagtacaggactttgccaaaaatctctcgggaagactttgaattaatatttgatgagctcgatgatagtcatgatataaagattaacaaggatgaatttgcggatatttgcaatgccattgctttaaaatttcagaaggaagattttatgtcttactttgagtatttagcattctaccattcacccagctcaaagagattaaaagaatttgtgaggagtcctatgtttggatacctagtgtcctttgttctcgtaataaatctggttgctgttattattgagacaacgcttgatatagaaaacaattctgctcaaaaggcgtggcaagtggttgagttcgttttcgggtggatatatttaatagaaatggttttaaagatttatgcatttggatttgagaactattggcgagatggtcaaaatcgctttgattttattgtcacagtgataattgccattggagaaactgtaacttttgctgtacctgatgatgatcttcctttcatctcaaatggagaatggattcgttaccttcttcttgcaagaatgttgagattaataaggatcctaatgtatgtcaagcgataccgagcctttgtggcaactttcttgactctcataccaagtttgatgccatacctagggatcatattttgtaccttgtgtatttattgttcaattggtgtacagatttttggtggaatcgttaatgctggaaaccccgaattggaattaacagctcttgctgaaaatgactatttggttttcaatttcaatgattacccaaatggaattgtgacacttttcaattttcttgtcacggcaacctgggacgaagttatgacgagctacaaggaattaactgggacttcttggacttatttgtacttcattagcttctacttaattactgttttgctgcttttgaacttgattattgcttttgtcttggaggcattctttgccgaaatggaacttgagtcatcagaaacttgtgaaggaaatggcaaggaagttgaaggagataaa

SEQ ID NO: 16852 - protein, 402 aa, Glycine max
TNLILAVVYDSFKSELVKQVFEKDRLRRTMLDKAFDLLDTHKVSSLNKNQCIRLFEELNKYRTLPKISREDFELIFDELDDSHDIKINKDEFADICNAIALKFQKEDFMSYFEYLAFYHSPSSKRLKEFVRSPMFGYLVSFVLVINLVAVIIETTLDIENNSAQKAWQVVEFVFGWIYLIEMVLKIYAFGFENYWRDGQNRFDFIVTVIIAIGETVTFAVPDDDLPFISNGEWIRYLLLARMLRLIRILMYVKRYRAFVATFLTLIPSLMPYLGIIFCTLCIYCSIGVQIFGGIVNAGNPELELTALAENDYLVFNFNDYPNGIVTLFNFLVTATWDEVMTSYKELTGTSWTYLYFISFYLITVLLLLNLIIAFVLEAFFAEMELESSETCEGNGKEVEGDK

SEQ ID NO: 16853 - protein, 373 aa, Glycine max
MLDKAFDLLDTHKVSSLNKNQCIRLFEELNKYRTLPKISREDFELIFDELDDSHDIKINKDEFADICNAIALKFQKEDFMSYFEYLAFYHSPSSKRLKEFVRSPMFGYLVSFVLVINLVAVIIETTLDIENNSAQKAWQVVEFVFGWIYLIEMVLKIYAFGFENYWRDGQNRFDFIVTVIIAIGETVTFAVPDDDLPFISNGEWIRYLLLARMLRLIRILMYVKRYRAFVATFLTLIPSLMPYLGIIFCTLCIYCSIGVQIFGGIVNAGNPELELTALAENDYLVFNFNDYPNGIVTLFNFLVTATWDEVMTSYKELTGTSWTYLYFISFYLITVLLLLNLIIAFVLEAFFAEMELESSETCEGNGKEVEGDK

SEQ ID NO: 16854 - protein, 294 aa, Glycine max
MSYFEYLAFYHSPSSKRLKEFVRSPMFGYLVSFVLVINLVAVIIETTLDIENNSAQKAWQVVEFVFGWIYLIEMVLKIYAFGFENYWRDGQNRFDFIVTVIIAIGETVTFAVPDDDLPFISNGEWIRYLLLARMLRLIRILMYVKRYRAFVATFLTLIPSLMPYLGIIFCTLCIYCSIGVQIFGGIVNAGNPELELTALAENDYLVFNFNDYPNGIVTLFNFLVTATWDEVMTSYKELTGTSWTYLYFISFYLITVLLLLNLIIAFVLEAFFAEMELESSETCEGNGKEVEGDK

SEQ ID NO: 16855 - DNA, 1995 bp, Glycine max
aatttgtctttgttcatcctctactgtgggaaaatgctttggaaccagttttgatgttgttaaagcttaatgtgggatatcccttttgtattattcacaggaaatatccatttgtttctttgccagtttatgttcagtgaaaaggctggcttgatgccactcccattggtagatgtcacatgaatactcagtactatcagtgccaacatttccatctttcttcttccagcctttgctttgtcttggttggtatagaagtgacaatccagccgcactcttaacgtggataatgatttcatttttgaatattgataacctagtcccctggagtagtgttaatattctttttggcagtgaacacacagtccactgtcaagttacctagttaatgaagtgaagggttataatttgatccaaaggaatctgccaaggtgcagatgatgtggagtttttatgttcttccttttggtaagtttcagttcttggaggagtcaaatgctgaactgcgttttaaggttggagtgtctattgattggatcagtatagttggatttggttcagagagttcttcaaggattcaagtgaccattcaatgctattggtttctatttactgcttgaggctgtcaagtaccccagtgccaccttatagtaatatgtggaattcttgtatatacactagttttgatgtgttctcctcttggagtagtgctgattggagctgcattaatcgattttgttgttgctgatttcaattggtctgcggcagtatagaagaaatcaacgatgcattggtgtttacctggcttgatggggtgactgaatatgcctttagaagttttaggattatttctaaatgtgttcctacatgcaggtccctaaagcttacttcctgcttctagatagttggtaatcttatctgagggtagctagtaccatgggagaagtggcagtaatgcactctgagcctctgcagttcgagtgcaatgacattactgtgaatatgactgagaaggaagtgtatcctccagaatcaaatgtggatcacttgcctggagaagaatcgagtcaatcaacagaccacaaaaatatcaattacttgcaagagaaaggatttatggaatatggatgtcagcattaccggagaagatgccgtattagggccccctgttgcaatgagatttttgattgccgccattgtcacaatgaggcaaaaaatgatatcaacattgatctgaagcttagacatgatattccacgacacgaagtcaaacaggtgatttgttcactttgtgggactgaacaagaggttcagcaaaactgtataaattgtggtgtttgtatgggaaaatacttctgtggaacatgcaagctttttgatgatgatatatctaagcagcagtaccattgctgtggctgtggaatttgcagaactggaggaagcgaaaatttcttccattgctacaagtgtggttgttgctactcaactcttctgaaaaacagtcacccttgtgtagaaggagcaatgcatcatgattgccctgtttgttttgagtatttgtttgaatcaagaaacgatgtcactgttatgccatgtggacatacgatccataagagctgcctgaatgaaatgagagaacatttccagtatgcatgccctctctgctcaaagtcagtctgtgacatgtcaaaggtttgggagaaatttgaccttgagattgctgctacacgaatgcctgagcaatatcaaaataaaatggtttggatcctgtgcaatgactgtggtaaaacttctcacgttcagttccattttgtggctcaaaagtgtccgaactgcaaatcctacaacacacgacaaacatgaggcggagcaggtggccacgattattcattggcttcatcaaaagccttcactcgagagctctcttgatgttgtcgtgacttgtgaaggcagtgaaaatagatgtgcatccattgggtacgtggatgtgcacgt

SEQ ID NO: 16856 - protein, 308 aa, Glycine max
MGEVAVMHSEPLQFECNDITVNMTEKEVYPPESNVDHLPGEESSQSTDHKNINYLQEKGFMEYGCQHYRRRCRIRAPCCNEIFDCRHCHNEAKNDINIDLKLRHDIPRHEVKQVICSLCGTEQEVQQNCINCGVCMGKYFCGTCKLFDDDISKQQYHCCGCGICRTGGSENFFHCYKCGCCYSTLLKNSHPCVEGAMHHDCPVCFEYLFESRNDVTVMPCGHTIHKSCLNEMREHFQYACPLCSKSVCDMSKVWEKFDLEIAATRMPEQYQNKMVWILCNDCGKTSHVQFHFVAQKCPNCKSYNTRQT

SEQ ID NO: 16857 - protein, 302 aa, Glycine max
MHSEPLQFECNDITVNMTEKEVYPPESNVDHLPGEESSQSTDHKNINYLQEKGFMEYGCQHYRRRCRIRAPCCNEIFDCRHCHNEAKNDINIDLKLRHDIPRHEVKQVICSLCGTEQEVQQNCINCGVCMGKYFCGTCKLFDDDISKQQYHCCGCGICRTGGSENFFHCYKCGCCYSTLLKNSHPCVEGAMHHDCPVCFEYLFESRNDVTVMPCGHTIHKSCLNEMREHFQYACPLCSKSVCDMSKVWEKFDLEIAATRMPEQYQNKMVWILCNDCGKTSHVQFHFVAQKCPNCKSYNTRQT

SEQ ID NO: 16858 - protein, 286 aa, Glycine max
MTEKEVYPPESNVDHLPGEESSQSTDHKNINYLQEKGFMEYGCQHYRRRCRIRAPCCNEIFDCRHCHNEAKNDINIDLKLRHDIPRHEVKQVICSLCGTEQEVQQNCINCGVCMGKYFCGTCKLFDDDISKQQYHCCGCGICRTGGSENFFHCYKCGCCYSTLLKNSHPCVEGAMHHDCPVCFEYLFESRNDVTVMPCGHTIHKSCLNEMREHFQYACPLCSKSVCDMSKVWEKFDLEIAATRMPEQYQNKMVWILCNDCGKTSHVQFHFVAQKCPNCKSYNTRQT

SEQ ID NO: 16859 - DNA, 1970 bp, Glycine max
ataatttgtcgtattgcaaggaaattaattgactatgatggaagaaattcaatacaatacgttatttacattattggaattgtctatatttattatttaaattggtttgtattgccgatggacattgttaaaaacttccaaatgcttaatcgtggatttatttaactcattattctttgattatttttgcgtttttgaatcaaattactttattttgaattgtgtttgttttttaaagtctttgggcttatttgtttttcaaacaagggtgcagcaagaccagagatttggatagtgaggagctattggagcagttgcctgctttgcagcaactgttgtatcaactttttgccagagtcttggcatcacttagcaatagtcatgaaaatgtaatttttgagctaatcggttcaatttggatcattatatcaatatcactatcaccagccaatttaatatatttgtatgttttttcaataattttttcatactttctttaattatgagatatatgtcccatttgtatcaattattattgcaacactctcaaagtttatgtattattccaaattctaaattctaacatttagcaaataaatttacttaatcaaatcataattttgctattaaagaaaaaagcaaatataatgctgaacaacccatacgcacggcacaccagtgtcagaatgaaaatgttattttactattttgaaaagacacattgatattaaaaaaaaactacattttataattttaaatgtaataaattaattcaattttaatagtgtactacgtactattctacattctacttgtctacttgtctctctttcctcctgttcttttcatccgtccatccaaaaagggccagaaacttctcggtcgcatcatcgcgttcagcttcagccatggcggcctagcctaattaattcaaaagtcaaaaccctaaatcccaacccatcaattttcctctctcttcactttaccaatccaaatggcctctagactcgccctccgcttcagatcccatctcctccgcaccgcctccctccttcaaaccttgccgccgccgcccctctccctccaccgcctcctctccacttcccgccgcgcgcctccgcgctccaaaaaatcagtcgacatcggcgcgcgcgcgcgtcagctccagacgcggcgcctctggacctacgcgctcaccttcggcggcctcgcgggcttcgtcgtgatcgtcctcaacaacttccaagaccagctcgtcttctacgtcaccccaaccgaagccctcgaaaaatacgccaccaaccccacaaaagcgcggttccggttgggaggccttgttctcgaaggcagcgtggtttacccggcgtcgtcgcctgaggtggagttcgtcgtcaccgatctcatctccgacatggtggtacggtacgagggatcgttgccggatttgttcagggaagggcactctgtggttgtggaagggctcgtgaaaccgtttacggaggagatcaggaaggaggtgtcggtgaagaacgtttccgagaaggcgaggaagatagagtgctatttttcggctaccgaggttctcgccaagcatgatgagaagtacatgcctaaagaagttgctgctgctattgagaagaataagaagattattgaggatgctgccactgccaccgtggccgccgccgccaccgcggagggaccgaagacaccatagatcgatggtcatggtcgtggtgttaatcagttttgaaattacttacagatacagtgttatgatttttttgatggatgttgattatttaactataggatgagattactattatttttgagtaataattaggatgaacacgggagagcagagggaatttttttaaaactgaggcaattgtttcttgttgttgtaattcattaatgtgggaggatatttcttaataaaatgtttaatcgaaaaaaaaaaaaaaaat

SEQ ID NO: 16860 - protein, 240 aa, Glycine max
MASRLALRFRSHLLRTASLLQTLPPPPLSLHRLLSTSRRAPPRSKKSVDIGARARQLQTRRLWTYALTFGGLAGFVVIVLNNFQDQLVFYVTPTEALEKYATNPTKARFRLGGLVLEGSVVYPASSPEVEFVVTDLISDMVVRYEGSLPDLFREGHSVVVEGLVKPFTEEIRKEVSVKNVSEKARKIECYFSATEVLAKHDEKYMPKEVAAAIEKNKKIIEDAATATVAAAATAEGPKTP

SEQ ID NO: 16861 - DNA, 1235 bp, Glycine max
actgagtgaaaaaccacaacctagaaagaaatgaagaaaatacagcactctgaacaaaaagcaacggaaccaaccaaaaaggattcaaagggcaacaaacaagaaggcacagactcagagtcagagcaataccaaaacgaagaaaatcaactccacacgctttcggaaccatcaccatccttctctctccgttcccgcaaatccccttcgccaccactccactccctctctgactcccccatctccgatgcccacctctcccctgcgccgcagaagccgccgcccgattcctcgccggactcctcgatctccgacggccacttcacgatcggtgaacagcgcctctccccggcgccgccgaccgtggtgacggctcatcggttgaaggtggagcccgcggtgttgaccagggtcgatcccggcgccgaagagggtttcgtgaaagacgtcgaacaagccaccggcagcgccggtagtcgacgcctcagaccggatatgaccggtttgttgaggtcgaaaaaaatcgccacgtggagcaagctcttgctgggtcttcgagtaaccgcttttgttttctgcttggcgtctttctcggtgttggccactgataagaaacagggctgggctatcgactctttctatttatacaaggaattcaggtatagtttgtcagtgaatgttattgggtttgtgcattccgcgttgcagatatgtgatcttgggcggtactttgcaacgggaaagcacttggtggagcaccagctaaggggttatttcactttcgcgctggatcagatcttgacataccttctaatgtcagcatcatcatcagctgccactagagcttatgattgggtttccaattggggtgaggacaagttcccctacatggcaaatgcatctgtggctttgtccttggttgcttttgtggcctttgccttagcctctcttgtctctggttctattgttgtaaggttcacataatttatacaagtactatgtgtgaggtgtgcaaactcttatctgagatactggattaagctttatcctttctcgattgaaaatcgtcccatattttcagaaggcagactgactcactttgtacagaagggaaactcactttatttctctgtcaactttaatttgtatagatgcaggtggatttacagcttgctgaactggcttgtatatgaacttttgcattattgagatggtattaagcttacttttttatc

SEQ ID NO: 16862 - protein, 317 aa, Glycine max
MKKIQHSEQKATEPTKKDSKGNKQEGTDSESEQYQNEENQLHTLSEPSPSFSLRSRKSPSPPLHSLSDSPISDAHLSPAPQKPPPDSSPDSSISDGHFTIGEQRLSPAPPTVVTAHRLKVEPAVLTRVDPGAEEGFVKDVEQATGSAGSRRLRPDMTGLLRSKKIATWSKLLLGLRVTAFVFCLASFSVLATDKKQGWAIDSFYLYKEFRYSLSVNVIGFVHSALQICDLGRYFATGKHLVEHQLRGYFTFALDQILTYLLMSASSSAATRAYDWVSNWGEDKFPYMANASVALSLVAFVAFALASLVSGSIVVRFT

SEQ ID NO: 16863 - protein, 162 aa, Glycine max
MTGLLRSKKIATWSKLLLGLRVTAFVFCLASFSVLATDKKQGWAIDSFYLYKEFRYSLSVNVIGFVHSALQICDLGRYFATGKHLVEHQLRGYFTFALDQILTYLLMSASSSAATRAYDWVSNWGEDKFPYMANASVALSLVAFVAFALASLVSGSIVVRFT

SEQ ID NO: 16864 - DNA, 1698 bp, Glycine max
aggacacacaccaaaaaaacaagatgctgagcagccgcatatggcagaggagagctttgatctccgcccggaccttattttctgcctccgcttctcattcctcatcatcttcccctgcgatcccgtttcgcttctccaaagctaatgcttcttcttcttcacatctgattttcaattttgcacgtgtgaacatatattggttttctactcaacccgcccttgagcttcccgcaagcaagattgtggacgtgccattggcacaaacgggtgaaggcatcgcagaatgtgagcttctcaaatggtatgtccaagagggggattatgttgaagactttcaaccactttgcgaagttcaaagtgataaagctaccatagaaattactagtcgttacaaaggaaaaatttctagctttctctacgttcctggtgatattgtgaaggttggagaaactctattaaagatattagttgacgagtctgcatttccttcagggactccttgtgattctgaaaatgcaaagtcacctgattctgatcagacattagtaaatgagtctgtgcttactactgtagttgacgattctgacaatgccaagttgatagattctgatcctggaaaagggagacaaactggagttctatcaacacctgctataagaagtctagcaaagcaacatggtatagatataactgaagtctgtggaactgaaaagatggaagggttttgaaagaagacgtgctcaattttgctgtcaagaaaggaatcattaaaaatccatctactgtcttgcattctgattctggagaacagcttcagggagctgaaggatacaactgcaatgtcgcaactaaattttataggtcgtctgaggacaggacacttccccttaggggattccaaagagcaatggtaaagtcaatgtccctggctgctaaagtcccacattttcattatgtggatgagataaattgtgatgcccttgtggagcttaaaacatcttttcagaaaaataatccttatccagatgttaagtacactttccttccaatattaatcaaatcactatcaatggccctcagtaagtacccctttatgaacagttgcttcaaagaggatgcattggaggttgtcctcaaaggttcacacaacgttggaattgccatggcgacaccacatggtttagttgtgccaaacataaaaaatgttcagtctctttccataatggagataaccaaagatctggcaaggttacaacaattggcttcagataacaagttaacttctgaggaaatatatggtggtactatcactttgagcaacattggagcaattggtggaaagtttggttccccacttatcaatctgcctgaagtctctattattgccattggtagaattcagatagttccacggtttgctgataatggaaatgtgtatcctgcatcactcatgaatgttaatattggtgcagatcacagagtcttggacggagcaaccgttgcaagattttgcaacgagtggaagcaattaattgaaaatcccgagctcctcacgctgcatttgaaatgaaattttcgttacatgaagggagaattattgaaattgtaattttagatggttaatctttatattcattacaatgagaaatatacgaaccaaagcatttaaaactgatccaaaaaaaaaaaaaaaaaaag

SEQ ID NO: 16865 - protein, 241 aa, Glycine max
DTHQKNKMLSSRIWQRRALISARTLFSASASHSSSSSPAIPFRFSKANASSSSHLIFNFARVNIYWFSTQPALELPASKIVDVPLAQTGEGIAECELLKWYVQEGDYVEDFQPLCEVQSDKATIEITSRYKGKISSFLYVPGDIVKVGETLLKILVDESAFPSGTPCDSENAKSPDSDQTLVNESVLTTVVDDSDNAKLIDSDPGKGRQTGVLSTPAIRSLAKQHGIDITEVCGTEKMEGF

SEQ ID NO: 16866 - protein, 234 aa, Glycine max
MLSSRIWQRRALISARTLFSASASHSSSSSPAIPFRFSKANASSSSHLIFNFARVNIYWFSTQPALELPASKIVDVPLAQTGEGIAECELLKWYVQEGDYVEDFQPLCEVQSDKATIEITSRYKGKISSFLYVPGDIVKVGETLLKILVDESAFPSGTPCDSENAKSPDSDQTLVNESVLTTVVDDSDNAKLIDSDPGKGRQTGVLSTPAIRSLAKQHGIDITEVCGTEKMEGF

SEQ ID NO: 16867 - protein, 220 aa, Glycine max
MVKSMSLAAKVPHFHYVDEINCDALVELKTSFQKNNPYPDVKYTFLPILIKSLSMALSKYPFMNSCFKEDALEVVLKGSHNVGIAMATPHGLVVPNIKNVQSLSIMEITKDLARLQQLASDNKLTSEEIYGGTITLSNIGAIGGKFGSPLINLPEVSIIAIGRIQIVPRFADNGNVYPASLMNVNIGADHRVLDGATVARFCNEWKQLIENPELLTLHLK

SEQ ID NO: 16868 - DNA, 1896 bp, Glycine max
gtacaatcccacatcctcaagatatatattggcttgttccggcgtgcagagaatctcacaggtgcggaatatgaagccatagacatgatactactgaagaaacacgaaatggtcttcaattttgtctctgcactaataacaacaatattgctctccggagccatagttgaagttaagggtcttccacttcacacggattcacgatggatcgtcaacgaagatgggcagagggtcaagctggcatgtgtgaattgggtgtcccatttggaagctgtggtggccgaagggctcagcaaaaagcccgtggatgtcatttcaaatggaataaagtccatgggcttcaactgtgtcaggctcacttggcctatagttttggtcactaatgactctcttgcttctctcaccgttagaagctcctttcagaaccttgccctccttgaatccattgctggtgtccaaaccaacaacccctccattatcgatcttcccctcatccaagcttttcaggcagtggtgaaaagtctcggtgacaacgatgtgatggtgatattggacaaccacataacccagccagggtggtgctgcagtaactccgacggcaatggcttcttcggtgacaaattttttgacccaaaccagtggatattgggcctcaccaagatggcctccctcttcaatggagtcactaatgtggtgggcatgagcttgaggaatgagctccgagggcccaaacagaatgtcaacgattggtacaagtacatggtgaaaggagcagaagcgattcatgcagcaaatccggatgttcttgttattttatccggcctgaattttgataaagacttatctttcattcaaaatcggccagtgagcctcacatttaaggggaaattagtatatgaggcacactggtatgccttcactgatggtcaagcttgggttaatgggaatccaaaccaagtatgtggacaagtggcaggaaatatgatgagaacctcaggctttttagtgaaccaaggatggccattgtttattagtgagtttggtggagacttgagaggtaccaacgtgaatgacaaccgctaccttaactgcttcttggcagtggcagctgagcttgacttggattgggccttgtggacacttgttggtagctactactttagacaaggagttataggaatggaagagttttatgggattcttagttgggactggacccaagttagaaataccactttcttaaacagaatctctgccctccaacttccatttcgaggtccaggaataacaagaggcaatccatacaaattgatattccatcctttgaccggtttgtgtgtcataagaaagtcattactagacccattgacattgggtccttgctatttatctgatggctggaaatacacaccccagaaaattctatcaataaaaggaacttacttctgcatacaagcagagaatgaagggatgcctgcaaaacttgggataatatgctcagatcctaactctagatgggaaatgatctcagattcgaagttgcatctctcatctaaactcagcgatgattctaatgtatgcttagatgtagacgataacaacaacattgtgaccaatgcttgcaaatgcttgagcagagatcgtacatgtgaccctagtagccaatggttcaaacttattgacagcggaaggagatcaatgttgacaacctcaacatcatccatgctaaattcatcagacctttatggaaaccattaagctcagcataagttgttttaagaatattactgtaaatttctctaaccatgtacttatgttttaatggcaggaaagtgatgcattaaacatgtccatatgtatgactattgaattcaatacataatataccactattag

SEQ ID NO: 16869 - protein, 585 aa, Glycine max
VQSHILKIYIGLFRRAENLTGAEYEAIDMILLKKHEMVFNFVSALITTILLSGAIVEVKGLPLHTDSRWIVNEDGQRVKLACVNWVSHLEAVVAEGLSKKPVDVISNGIKSMGFNCVRLTWPIVLVTNDSLASLTVRSSFQNLALLESIAGVQTNNPSIIDLPLIQAFQAVVKSLGDNDVMVILDNHITQPGWCCSNSDGNGFFGDKFFDPNQWILGLTKMASLFNGVTNVVGMSLRNELRGPKQNVNDWYKYMVKGAEAIHAANPDVLVILSGLNFDKDLSFIQNRPVSLTFKGKLVYEAHWYAFTDGQAWVNGNPNQVCGQVAGNMMRTSGFLVNQGWPLFISEFGGDLRGTNVNDNRYLNCFLAVAAELDLDWALWTLVGSYYFRQGVIGMEEFYGILSWDWTQVRNTTFLNRISALQLPFRGPGITRGNPYKLIFHPLTGLCVIRKSLLDPLTLGPCYLSDGWKYTPQKILSIKGTYFCIQAENEGMPAKLGIICSDPNSRWEMISDSKLHLSSKLSDDSNVCLDVDDNNNIVTNACKCLSRDRTCDPSSQWFKLIDSGRRSMLTTSTSSMLNSSDLYGNH

SEQ ID NO: 16870 - protein, 557 aa, Glycine max
MILLKKHEMVFNFVSALITTILLSGAIVEVKGLPLHTDSRWIVNEDGQRVKLACVNWVSHLEAVVAEGLSKKPVDVISNGIKSMGFNCVRLTWPIVLVTNDSLASLTVRSSFQNLALLESIAGVQTNNPSIIDLPLIQAFQAVVKSLGDNDVMVILDNHITQPGWCCSNSDGNGFFGDKFFDPNQWILGLTKMASLFNGVTNVVGMSLRNELRGPKQNVNDWYKYMVKGAEAIHAANPDVLVILSGLNFDKDLSFIQNRPVSLTFKGKLVYEAHWYAFTDGQAWVNGNPNQVCGQVAGNMMRTSGFLVNQGWPLFISEFGGDLRGTNVNDNRYLNCFLAVAAELDLDWALWTLVGSYYFRQGVIGMEEFYGILSWDWTQVRNTTFLNRISALQLPFRGPGITRGNPYKLIFHPLTGLCVIRKSLLDPLTLGPCYLSDGWKYTPQKILSIKGTYFCIQAENEGMPAKLGIICSDPNSRWEMISDSKLHLSSKLSDDSNVCLDVDDNNNIVTNACKCLSRDRTCDPSSQWFKLIDSGRRSMLTTSTSSMLNSSDLYGNH

SEQ ID NO: 16871 - protein, 549 aa, Glycine max
MVFNFVSALITTILLSGAIVEVKGLPLHTDSRWIVNEDGQRVKLACVNWVSHLEAVVAEGLSKKPVDVISNGIKSMGFNCVRLTWPIVLVTNDSLASLTVRSSFQNLALLESIAGVQTNNPSIIDLPLIQAFQAVVKSLGDNDVMVILDNHITQPGWCCSNSDGNGFFGDKFFDPNQWILGLTKMASLFNGVTNVVGMSLRNELRGPKQNVNDWYKYMVKGAEAIHAANPDVLVILSGLNFDKDLSFIQNRPVSLTFKGKLVYEAHWYAFTDGQAWVNGNPNQVCGQVAGNMMRTSGFLVNQGWPLFISEFGGDLRGTNVNDNRYLNCFLAVAAELDLDWALWTLVGSYYFRQGVIGMEEFYGILSWDWTQVRNTTFLNRISALQLPFRGPGITRGNPYKLIFHPLTGLCVIRKSLLDPLTLGPCYLSDGWKYTPQKILSIKGTYFCIQAENEGMPAKLGIICSDPNSRWEMISDSKLHLSSKLSDDSNVCLDVDDNNNIVTNACKCLSRDRTCDPSSQWFKLIDSGRRSMLTTSTSSMLNSSDLYGNH

SEQ ID NO: 16872 - DNA, 1541 bp, Glycine max
tagtgttctctctgttcatgttcgaggaacggatttgaagaccaacacactgttgcgtggatgccttcatcttgtagatcttgcaggaagtgaaagagtggatcgttctgaagcaactggagacaggcttaaggaggctcaacatataaataaatcactatctgcactaggagatgtaatatttgctctatcacagaagagttcacacgtgccatatagaaatagtaaattgacccaacttcttcagagttcgttaggtaattgttgccattattggtatcaatttacagtattgttatatttggtttcatttgtttgcattttgatttaagcatattgcagtcatggcttactaaattgcaatagctttgtccgttgtatatgataggtggtcaagcgaaaacccttatgtttgtacagcttaatcctgatgttgcttcatattctgaaactgtaagcaccttgaagtttgctgaacgggtttctggcgtggagttaggcgctgctcgtagcaacaaagaggggagggatgtgagagaacttatggagcagttggcatctctcaaggatgcaattgcaaggaaggatgaagagattgaacggttacagtcactcaaggctaaccataatggtgcaaagcttggtatgatctcagtaagacatgggtcatcatctccaaggagacattccatagggactccccgaattagcacgagacttgcaggagcaaggagctttggagtcaatggaaaggcagcttctgacatggataactgctcagagtatagtgataagcattcagaaactggttctcatcaatcaatggatgatttcaggaacaagtccagttcccttcggttgaagttaaccagagatcatatcagtcaaaatgtcaatgaagacattgacctcttaagatttggagatgcggattcagaggagagattaagtgacatatctgatggtggtctttcaatgggaaccgaaactgaaggttcaatcagcagtattgtggagtacactcttttccctgaacttgagaaggcagctgaaattacaccaatgaaggacaccacaaccgacaaccttccagctgagagcacagaaaagcctattatgccatccaaaattcccaaagcttctcaagtcccacaaaaagtgcagtcaaaacattctaggcattcaatgaacaaaacctcctcgaaggttctgtcaagtgttagaaaacccgcagccagtagctcttcttcggtgaagccccctaaacgatggcaatagttaggatgccagttggatgcagtagagtgcttatttatagctatagccggtaggaacttttttatttatgttaggtgatcattctaattacactttactcaaggctcaagggtcagctcagttcagcttcaatctgttatggaatgaggcgaattgcaaattgtaaccagtctgtatgtaagcatcatggccttttatgtcatatcaccgaatctgctgtatttacaactttccattcagtaatgttatctacgatgttgtac

SEQ ID NO: 16873 - protein, 298 aa, Glycine max
MIGGQAKTLMFVQLNPDVASYSETVSTLKFAERVSGVELGAARSNKEGRDVRELMEQLASLKDAIARKDEEIERLQSLKANHNGAKLGMISVRHGSSSPRRHSIGTPRISTRLAGARSFGVNGKAASDMDNCSEYSDKHSETGSHQSMDDFRNKSSSLRLKLTRDHISQNVNEDIDLLRFGDADSEERLSDISDGGLSMGTETEGSISSIVEYTLFPELEKAAEITPMKDTTTDNLPAESTEKPIMPSKIPKASQVPQKVQSKHSRHSMNKTSSKVLSSVRKPAASSSSSVKPPKRWQ

SEQ ID NO: 16874 - protein, 289 aa, Glycine max
MFVQLNPDVASYSETVSTLKFAERVSGVELGAARSNKEGRDVRELMEQLASLKDAIARKDEEIERLQSLKANHNGAKLGMISVRHGSSSPRRHSIGTPRISTRLAGARSFGVNGKAASDMDNCSEYSDKHSETGSHQSMDDFRNKSSSLRLKLTRDHISQNVNEDIDLLRFGDADSEERLSDISDGGLSMGTETEGSISSIVEYTLFPELEKAAEITPMKDTTTDNLPAESTEKPIMPSKIPKASQVPQKVQSKHSRHSMNKTSSKVLSSVRKPAASSSSSVKPPKRWQ

SEQ ID NO: 16875 - protein, 244 aa, Glycine max
MEQLASLKDAIARKDEEIERLQSLKANHNGAKLGMISVRHGSSSPRRHSIGTPRISTRLAGARSFGVNGKAASDMDNCSEYSDKHSETGSHQSMDDFRNKSSSLRLKLTRDHISQNVNEDIDLLRFGDADSEERLSDISDGGLSMGTETEGSISSIVEYTLFPELEKAAEITPMKDTTTDNLPAESTEKPIMPSKIPKASQVPQKVQSKHSRHSMNKTSSKVLSSVRKPAASSSSSVKPPKRWQ

SEQ ID NO: 16876 - DNA, 1302 bp, Glycine max
agtcaaaatttgatgagaagaccggcacttctcacgtcaatggagcacacgatactgctaagcttgctggccttcttgagaacttcattaagaaatatgtccagtgttatggttgtggaaatcctgaaactgagatcataattactaagaatcaaatgatccagctgaaatgcgcagcttgtggttttgtgtctgatgttgatatgagagacaagctgactaccttcatcattaagaaccctccagaagttaagaaaggatccaaagacaagaaggccatgaggagagctgagaaggagagactgaaggaaggtgaattagctgatgaggaacagaagaaagtgaagaaagaggttaagaagaaaggctcttcatcttctaaggatggcactaaatccacctcttcaaagaagaaagcaagtggctctgatgaagaccgcacttcacctactcacagtcaaattgatgagaaagaggaggctctagatgaggatgatgacgatgatgtgcaatggcagacagatacgtcacttgatgctgctcgtcaacgtatccaagaacaattaagtgctgtgacagctgatatggttatgctttctacagatgaaccagagaagaaaaaagaagcaagtaatggaaatgatggttctcagaatggtaactcaatgcactgcaggaccttggttggtgaagtgaaagcaaatttgaagaaaggtgttggagcaaatgaattgctgtcgcaacttgcagcacatcctgtacctgctcaagaaaagatgagtgctctggttgaagctttgttcgagggaactgagaaaggttttgctaaagaagctgataaaaagaagaactacttttctgttgctgttgcggatgagggatcccagccgttgttgcttcatgctattgaagagttttcttgcaagtctacttcaaatgctttgaaggaggttgccctggttctaaaggcactctacgatgctgatgtgttagaggaagaacacatagtgcagtggtatcaaaagggactgaagggtgataacaagaactctaggatttggaagaatgctcaacctttcattgattggcttcagaatgcagaatcagaaactgaggaagaataatttgtcctacattctccgttacttatgtttgcttgcttgtgttatgtcctttatttccaattaagggtcttattggtcccatgtgttgttcaactactatacttgctaaaaatttggtgtgaggggtgcatggttgctggactagtatagcatgtacgcgtcagtgagttttgtgttg

SEQ ID NO: 16877 - protein, 373 aa, Glycine max
SKFDEKTGTSHVNGAHDTAKLAGLLENFIKKYVQCYGCGNPETEIIITKNQMIQLKCAACGFVSDVDMRDKLTTFIIKNPPEVKKGSKDKKAMRRAEKERLKEGELADEEQKKVKKEVKKKGSSSSKDGTKSTSSKKKASGSDEDRTSPTHSQIDEKEEALDEDDDDDVQWQTDTSLDAARQRIQEQLSAVTADMVMLSTDEPEKKKEASNGNDGSQNGNSMHCRTLVGEVKANLKKGVGANELLSQLAAHPVPAQEKMSALVEALFEGTEKGFAKEADKKKNYFSVAVADEGSQPLLLHAIEEFSCKSTSNALKEVALVLKALYDADVLEEEHIVQWYQKGLKGDNKNSRIWKNAQPFIDWLQNAESETEEE

SEQ ID NO: 16878 - protein, 322 aa, Glycine max
MIQLKCAACGFVSDVDMRDKLTTFIIKNPPEVKKGSKDKKAMRRAEKERLKEGELADEEQKKVKKEVKKKGSSSSKDGTKSTSSKKKASGSDEDRTSPTHSQIDEKEEALDEDDDDDVQWQTDTSLDAARQRIQEQLSAVTADMVMLSTDEPEKKKEASNGNDGSQNGNSMHCRTLVGEVKANLKKGVGANELLSQLAAHPVPAQEKMSALVEALFEGTEKGFAKEADKKKNYFSVAVADEGSQPLLLHAIEEFSCKSTSNALKEVALVLKALYDADVLEEEHIVQWYQKGLKGDNKNSRIWKNAQPFIDWLQNAESETEEE

SEQ ID NO: 16879 - protein, 306 aa, Glycine max
MRDKLTTFIIKNPPEVKKGSKDKKAMRRAEKERLKEGELADEEQKKVKKEVKKKGSSSSKDGTKSTSSKKKASGSDEDRTSPTHSQIDEKEEALDEDDDDDVQWQTDTSLDAARQRIQEQLSAVTADMVMLSTDEPEKKKEASNGNDGSQNGNSMHCRTLVGEVKANLKKGVGANELLSQLAAHPVPAQEKMSALVEALFEGTEKGFAKEADKKKNYFSVAVADEGSQPLLLHAIEEFSCKSTSNALKEVALVLKALYDADVLEEEHIVQWYQKGLKGDNKNSRIWKNAQPFIDWLQNAESETEEE

SEQ ID NO: 16880 - DNA, 1786 bp, Glycine max
gtgttgttagagcgagctctgttttaatattgtttggtggtgaggatgcaaaaaggaggaaattgaatgatctacatatgttcgatctcaagtccttaacatggcttccacttcactacacgggaacagcaccttctccaagattcaaccatgtagctgctctttatgatgataaaattctttatatatttggaggatcatcaaaatccaggaccttaaatgatttatattcacttgactttgaaactatggcatggtcacgagtgaagatgcgaggttttcatccgtcacctagagctggttgttgcggtgtcctttgtggtactaaatggtatatcacaggtggtggaagccggaaaaaaagacacggagagactgtgatatttgatattgtaaaaaatgaatggtctgtggcaatcacttcgcctccatcttctatcactacaaacaagggtttcagcatggtactcgtgcagcacaaggaaaaggattttcttgttgcatttgggggatccaaaaaagagccatcaaatcaggtttgacagaaagtatgaagttaatatttgagttcattctttaacctttttcttcttgacctcaaatcaggtagaggtgttgataatggaaaagaatgaatcagcactagggagacaatcagctcccagtaaatgttcagcatctgtactacttgaaaaacattcatcatccactagattggccccccaacttaatgattgttctcaacgtttagttgactcagttgctagacaaaatctagcttctgcaattgaacatggttccggcaggagatctctatcagaatccctggttgttgatcccaattttcccccaaccaacacctcccttcgtaagcaatttgatcacgatgaagaatacaatactgatctcaagatggacaagaactcagatgaaaattctttccctcgggcagtagatcacagaacaaacgaaaatgaccatggtaaacagatgaatagtagtggagccaagaacattacggaggaacaacaggcactgttatctggaattccaatccaacaaaacctagtatttgaaaatgacatgctagaaagtgataacgtgtcatttactgaaaacattaaatcaggatcactgactacttcaaatgtctatcattgctatgaaagtaaattggcttccctgataaggaaaaatggaactctggagggacaattagcagcttccttagcaagcaaagaagccgcagagaaaagtttggcatctgttctcaaaagtagacaggaaatggagaggaaattggcggaatcacataaggagatggaattgatgagagagaagctgaccagtctagagttggcccaggaagaggccaacaacctatcaaacattgtgcactctgacaatgtacggcttgagcatgatgtggccttcctcaaggctgttttagatgatacacagaaggagttgcactcaacaagaggagttattgcaggagaaagagcaagagcattccaactacagtatgaagtttttcatctcaaacagagattgcaatcaatggaaaatcgagcatctactacaccgagaaaaccgttccatgtgcagtgaggtgatgtttgtttgaagttgcttattccacttaattcgatgtgtacatatatttgaaccaatgaatcaccgttagtagttcttctggaaggttctaaaagtgagagcaacttgttttagaatgtcaagtaaattattgataagaaaattaatgtttaatattacgtattcatgc

SEQ ID NO: 16881 - protein, 329 aa, Glycine max
MEKNESALGRQSAPSKCSASVLLEKHSSSTRLAPQLNDCSQRLVDSVARQNLASAIEHGSGRRSLSESLVVDPNFPPTNTSLRKQFDHDEEYNTDLKMDKNSDENSFPRAVDHRTNENDHGKQMNSSGAKNITEEQQALLSGIPIQQNLVFENDMLESDNVSFTENIKSGSLTTSNVYHCYESKLASLIRKNGTLEGQLAASLASKEAAEKSLASVLKSRQEMERKLAESHKEMELMREKLTSLELAQEEANNLSNIVHSDNVRLEHDVAFLKAVLDDTQKELHSTRGVIAGERARAFQLQYEVFHLKQRLQSMENRASTTPRKPFHVQ

SEQ ID NO: 16882 - protein, 232 aa, Glycine max
MDKNSDENSFPRAVDHRTNENDHGKQMNSSGAKNITEEQQALLSGIPIQQNLVFENDMLESDNVSFTENIKSGSLTTSNVYHCYESKLASLIRKNGTLEGQLAASLASKEAAEKSLASVLKSRQEMERKLAESHKEMELMREKLTSLELAQEEANNLSNIVHSDNVRLEHDVAFLKAVLDDTQKELHSTRGVIAGERARAFQLQYEVFHLKQRLQSMENRASTTPRKPFHVQ

SEQ ID NO: 16883 - protein, 206 aa, Glycine max
MNSSGAKNITEEQQALLSGIPIQQNLVFENDMLESDNVSFTENIKSGSLTTSNVYHCYESKLASLIRKNGTLEGQLAASLASKEAAEKSLASVLKSRQEMERKLAESHKEMELMREKLTSLELAQEEANNLSNIVHSDNVRLEHDVAFLKAVLDDTQKELHSTRGVIAGERARAFQLQYEVFHLKQRLQSMENRASTTPRKPFHVQ

SEQ ID NO: 16884 - DNA, 2448 bp, Glycine max
aaaaatgctgtacctgctcagaatgctggtgctactaagcctgtggttgaagaaattgaaaatggaaagcaggctaagcctcacttgaatagggaaccaagaaagtctgctgtgcctcctaagcctagtgatgagaacctccgatccccaatttgctgtatcatggggcatgtcgatactggcaaaaccaagctgctggattgtattcgaggtactaatgttcaggaaggtgaggctggcggcatcacacaacagattggtgctacatacttccctgctgagaacatacgtgaaagaacaaaggaactgaaagctgatgcaaagctgaaagttcccggtctactggttattgataccccagggcatgagtcatttactaacttgaggtctcggggttcaggtctatgtgatattgcaattttggttgttgacattatgcatgggttagagcaacaaacaatagaatcactaaatctattaaaaatgaggaatacagaattcattgttgccttgaataaggttgacaggctttatgggtggaaaacatgtcgcaatgctccaattgttaaagcaatgaagcagcagactaaggatgtccaaaatgagtttaatatgaggctcactcagattattactgaattcaaagaacaagggctgaataccgagttgtattataaaaacaaagaaatgggagaaacattcagcattgtgcctacaagtgcaataagtggtgaaggaattcccgatttgttattactattgattcaatggacccaaaaaacaatggttgagaaacttacatacagtgaagaagtgcagtgcactgttttagaggtgaaggtagttgaaggccatggaactactattgatgttgttttagttaatggtgttcttcatgaaggagaacaaatagttgtctgcggaatgcagggtccaattgttaccacaattcgagctttattgacacctcatccgatgaaggaacttcgtgtcaagggaacatatcttcatcacaaagaaatcaaagctgcaatgggtataaaaatcactgcccagggccttgaacatgccattgccggcactggtttatatgtggtgaagcctgatgatgatttggaagatgttaaagaatcagccatggaagatatgcggtctgtcatgagcaggattgacaggactggtgagggtgtttgtgtacaggcatctacccttggctccttggaagcattactggagtttttgaaaactccagaagtgagtatcccagttagtggtataagcataggccctgtacataaaaaggatgtaatgaaggccagtgtaatgcttgaaaaaaagcgagagtatgcagctatattggcatttgatgtcaaagttactcctgaggctagggaattggcagatgaattgggagtgaagatatttattgctgatatcatttatcatctgtttgaccaatttaaagcttatattgacaacattaaggaggagaaaaagagagaagctgctgatgaggcagtcttcccatgtgttatgagtatcttaccaaattgcattttcaacaagaaggacccaattgttttgggagttgatatccttgaaggcattttaaagattgggactccaatttgcattccttctagagagttcattgatattggtcgcattgcctccattgagaataaccataaacctgttgattatgcaaagaagggacagaaagtagccattaagattgttggcagcaattctgaagagcaacaaaaaatgttcgggaggcattttgagattgatgatgaacttgtaagccatatttcacggagatctattgatatactcaaaactaattatcgggatgaactaaatatggaggagtggaggttggttgtgaaattgaagaatcttttcaagatacaatgacgagacttatgtgtgggcattcatttcagaaaaaaaaaggttttagtgaatttttggttttatgcaacactttgaaggatttgttgaggatgctgttgaatccaccacgggagaccattaaagatgatgcaatgattcagatagagatgtctgtgccatggagaggcaaaagtaaattacacagacgaaactccaattctttgccaggtgagaagctcgggtcaaaagggtgcggaaaaactggcaaggtccaaattttgtgaattactaccatttatatacatatctgtggtatacatggaaggaaataagggttctaaatgcaattcagtgaggaaaagcaaatttttacggaagtaattgatttgaccaaaacattgttcacttttgatttccgaatttactattgtacaaaatttttccatttgtggctgaaaggcactttattttccgatgtatccttttggtgtttcctaccaagcatttggttatggaaactggtattaatggcaaaggttcaactaagcc

SEQ ID NO: 16885 - protein, 639 aa, Glycine max
KNAVPAQNAGATKPVVEEIENGKQAKPHLNREPRKSAVPPKPSDENLRSPICCIMGHVDTGKTKLLDCIRGTNVQEGEAGGITQQIGATYFPAENIRERTKELKADAKLKVPGLLVIDTPGHESFTNLRSRGSGLCDIAILVVDIMHGLEQQTIESLNLLKMRNTEFIVALNKVDRLYGWKTCRNAPIVKAMKQQTKDVQNEFNMRLTQIITEFKEQGLNTELYYKNKEMGETFSIVPTSAISGEGIPDLLLLLIQWTQKTMVEKLTYSEEVQCTVLEVKVVEGHGTTIDVVLVNGVLHEGEQIVVCGMQGPIVTTIRALLTPHPMKELRVKGTYLHHKEIKAAMGIKITAQGLEHAIAGTGLYVVKPDDDLEDVKESAMEDMRSVMSRIDRTGEGVCVQASTLGSLEALLEFLKTPEVSIPVSGISIGPVHKKDVMKASVMLEKKREYAAILAFDVKVTPEARELADELGVKIFIADIIYHLFDQFKAYIDNIKEEKKREAADEAVFPCVMSILPNCIFNKKDPIVLGVDILEGILKIGTPICIPSREFIDIGRIASIENNHKPVDYAKKGQKVAIKIVGSNSEEQQKMFGRHFEIDDELVSHISRRSIDILKTNYRDELNMEEWRLVVKLKNLFKIQ

SEQ ID NO: 16886 - protein, 585 aa, Glycine max
MGHVDTGKTKLLDCIRGTNVQEGEAGGITQQIGATYFPAENIRERTKELKADAKLKVPGLLVIDTPGHESFTNLRSRGSGLCDIAILVVDIMHGLEQQTIESLNLLKMRNTEFIVALNKVDRLYGWKTCRNAPIVKAMKQQTKDVQNEFNMRLTQIITEFKEQGLNTELYYKNKEMGETFSIVPTSAISGEGIPDLLLLLIQWTQKTMVEKLTYSEEVQCTVLEVKVVEGHGTTIDVVLVNGVLHEGEQIVVCGMQGPIVTTIRALLTPHPMKELRVKGTYLHHKEIKAAMGIKITAQGLEHAIAGTGLYVVKPDDDLEDVKESAMEDMRSVMSRIDRTGEGVCVQASTLGSLEALLEFLKTPEVSIPVSGISIGPVHKKDVMKASVMLEKKREYAAILAFDVKVTPEARELADELGVKIFIADIIYHLFDQFKAYIDNIKEEKKREAADEAVFPCVMSILPNCIFNKKDPIVLGVDILEGILKIGTPICIPSREFIDIGRIASIENNHKPVDYAKKGQKVAIKIVGSNSEEQQKMFGRHFEIDDELVSHISRRSIDILKTNYRDELNMEEWRLVVKLKNLFKIQ

SEQ ID NO: 16887 - protein, 494 aa, Glycine max
MHGLEQQTIESLNLLKMRNTEFIVALNKVDRLYGWKTCRNAPIVKAMKQQTKDVQNEFNMRLTQIITEFKEQGLNTELYYKNKEMGETFSIVPTSAISGEGIPDLLLLLIQWTQKTMVEKLTYSEEVQCTVLEVKVVEGHGTTIDVVLVNGVLHEGEQIVVCGMQGPIVTTIRALLTPHPMKELRVKGTYLHHKEIKAAMGIKITAQGLEHAIAGTGLYVVKPDDDLEDVKESAMEDMRSVMSRIDRTGEGVCVQASTLGSLEALLEFLKTPEVSIPVSGISIGPVHKKDVMKASVMLEKKREYAAILAFDVKVTPEARELADELGVKIFIADIIYHLFDQFKAYIDNIKEEKKREAADEAVFPCVMSILPNCIFNKKDPIVLGVDILEGILKIGTPICIPSREFIDIGRIASIENNHKPVDYAKKGQKVAIKIVGSNSEEQQKMFGRHFEIDDELVSHISRRSIDILKTNYRDELNMEEWRLVVKLKNLFKIQ

SEQ ID NO: 16888 - DNA, 1837 bp, Glycine max
aaatagcattgattctgtagaatcaaattgattcaaaactattgtatatatacacacttgagactatgaaataaacaagccaaatattctctattattgttattcatcatggtatcagtaagtttggtactgatctctcattccaaacctaatctctagcgccgccctcattctcgttactgaatcccaaaaactcttgaatcaaattcaactttcctcatccatggctggctcgaatcctccctctccaccatcttctgttacacatcctgcactcacagtccccaacattaccaattttatcaaaattaagttagatatagaaaagagtcagtacaacacttggtcagaattgttcaaaatccatgcaagagcctaccaagttattgatcacattattccctcctctgctgatgatacacgtgatatatctttccaacaaacagaccccaagctttggtcacgccttgatgctgttgttctccaatggatctacggaactatttccgatgatttgctgaacacaatcattgaacgtgacacgacggcagaaatggcgtggaaccgcttgtttgaaatcttctttgataataagcattccagagcactctatctcgaacaagaattttcgcgagtgcagatggaacaattccctaatgcttcatcatactgtcaacatttgaaaacactatctgatcaattgtcaaatgttggtgcgccagtatcaaatgaaagattggtgttgcaacttatttctggactaacagatgcctatgccgccgtcggatcacagattcgacatggagaaactctcccgcccttctacaaagcccgttcaatgattgttttagaggaaacagcaaaggcgaaaaaggctgcaaccgttacagacaattctgcgtttctcgcttctcaagatgtcagcactgttaataattcttctcaacagaattataacaatacaccaaacagcaccaatcatggaggtcgtggcagcgacaatacagcctctaaccgcggtcgtggtagcaaccgtggtggccgtggtaatcgtggtaggggtcgcaacggaggtcgcaataatcggtcacaatattaccaatatccgcaacaacaacagtgggctgttccaccttgggctgcaccgtggcaaccatgggccacgccaccatgtccgtacccaactacgccaaattggcaacatcagtccactcctcgccagcaaggaattcttggaccaaagcctccacaagctcatatggcagccacatcagcaaataatgctcaaccatcatatgcatcaaccgacattcaagctgcgatgcatactctttctatggctcctcctgatgatcagtggtacatggataccggggccacctctcacatgactgcaaatggaggattttcagacagggattattttaatgagatgtgatagctcaggcgatctatatccactcacctcaagaccaaccactacctacccatccaattttgtcgctttatccaaagaattatggcacaatcgtttaggacatccaggcattccagtttttaattctctacaaagaaacaattttattttatgtaataagcttccaaagcattctttttgtcattcctgtcctcttggaaaacacacaaaattacctttttatgaatcttcttcttatactatgatgccttttgatattgttcacagtgatatttggacgtcccctgtgctcagctcaggtggacatcgttattatgctttgttcctagatgacttcacgaattttttgtggacttttccaattgcaaataaatctcaagtccattccatctttattcg

SEQ ID NO: 16889 - protein, 404 aa, Glycine max
MAGSNPPSPPSSVTHPALTVPNITNFIKIKLDIEKSQYNTWSELFKIHARAYQVIDHIIPSSADDTRDISFQQTDPKLWSRLDAVVLQWIYGTISDDLLNTIIERDTTAEMAWNRLFEIFFDNKHSRALYLEQEFSRVQMEQFPNASSYCQHLKTLSDQLSNVGAPVSNERLVLQLISGLTDAYAAVGSQIRHGETLPPFYKARSMIVLEETAKAKKAATVTDNSAFLASQDVSTVNNSSQQNYNNTPNSTNHGGRGSDNTASNRGRGSNRGGRGNRGRGRNGGRNNRSQYYQYPQQQQWAVPPWAAPWQPWATPPCPYPTTPNWQHQSTPRQQGILGPKPPQAHMAATSANNAQPSYASTDIQAAMHTLSMAPPDDQWYMDTGATSHMTANGGFSDRDYFNEM

SEQ ID NO: 16890 - protein, 294 aa, Glycine max
MAWNRLFEIFFDNKHSRALYLEQEFSRVQMEQFPNASSYCQHLKTLSDQLSNVGAPVSNERLVLQLISGLTDAYAAVGSQIRHGETLPPFYKARSMIVLEETAKAKKAATVTDNSAFLASQDVSTVNNSSQQNYNNTPNSTNHGGRGSDNTASNRGRGSNRGGRGNRGRGRNGGRNNRSQYYQYPQQQQWAVPPWAAPWQPWATPPCPYPTTPNWQHQSTPRQQGILGPKPPQAHMAATSANNAQPSYASTDIQAAMHTLSMAPPDDQWYMDTGATSHMTANGGFSDRDYFNEM

SEQ ID NO: 16891 - protein, 265 aa, Glycine max
MEQFPNASSYCQHLKTLSDQLSNVGAPVSNERLVLQLISGLTDAYAAVGSQIRHGETLPPFYKARSMIVLEETAKAKKAATVTDNSAFLASQDVSTVNNSSQQNYNNTPNSTNHGGRGSDNTASNRGRGSNRGGRGNRGRGRNGGRNNRSQYYQYPQQQQWAVPPWAAPWQPWATPPCPYPTTPNWQHQSTPRQQGILGPKPPQAHMAATSANNAQPSYASTDIQAAMHTLSMAPPDDQWYMDTGATSHMTANGGFSDRDYFNEM

SEQ ID NO: 16892 - DNA, 2206 bp, Glycine max
gaagatggcaacgttcacataccacgtagaaacagttcaatcattcttagccctaagcagacttcacatactcatccacttagtggcagtgttgtctctctgttactaccgcatcacccacttcttcctccaacctccaacagcgccatggcttctcatgactgctgcggagcttcttctctcgctgctctggttcttcaaccaagccttccggtggcgaccggtgtcgcggagcgtcatgactgagaagcttccgagtgaggagaagctgccggggcttgacatcttcgtgtgcacgctcgatcccgagaaggagcccaccgtggaggtcattgacaccatcatctccgccgtgtccatggattacccctccgacaagctttccgtctatctctccgacgacggcgggtgcgacgtgactctctatgggatccgagaggctgctgagttcgccaaggagtgggttccgttctgtaaaaagtatggggtgaagtcaaggtgtcccaaagtcttcttctctccctttggggatgaggatcaagagactcttcgggacgatcaattcagaacacagagagacctcgtcaaggctaaatacgagaaaatgcagaaaaatatcgagaaatttggttcagaccctaaaagtcgtcgtattgtgagtgacagacaacctcgtattgagattataaatgaccaaccgggaatgccacttattgtttatgtgtctcgcgaaagaaggccatcccttcctcacaaattcaaaggaggagccgtcaacacattgctcagagtctcaggtttaatcagtaatggaccttatgttctagtaatggactgtgatatgtatagcaatgatccaacctctgccaaacaagccatgtgcttctttcttgatcctgaaacgtccaaatatattgcatttgttcaattccctcaaatgtttcacaaccttagcaaaaaggacatttatgatagtcaagctagaactgcttttaagacaatgtggcaaggcatggatggactaagaggtccaggtctttctggcagcggcaattacttaagtagaagtgctttactatttggaagtccaaaccaaaaagatgactatctgcaagatgcacaaaagtacttcggcaagtctaccgcctacattgaatcactgaaggccatccgtggacagaaaagtagcaaaaagaatatttcaagagatgaaatgttaagagaagctcaagtagtggcctcttgttcctacgaaaataacacaaattggggcacagaggtgggattctcatatggcatattactagagagttctattactggctatattcttcacagcagaggatggaaatcagcatatctttacccgaaaacaccatgtttcttaggttgtgctcccactgacatcaaggaaggcatgcttcagttggttaagtggttgtctgaacttttgttgcttggtgtctcctccaaatacagcccattcacttatggattttcaagaatgtccatacttcacacattcacttattgcttcatcacaatgtcatccctttatgctgttgtcttcatcctctacggcattgtacctcaagtatgcctcctcaaaggaatccctgtgtttccaaaggccacagacccttggtttgccgtgtttgcatttgtgtatgtatctactcagattcaacatttgattgagattctctctggggatggatctgtgacaatgtggtgggatgaacaaagaatttggattctgaagtcagttaccagcatatttgcaattatagatggaatcaagaagtggttggggttgagcaaggtgaaattcaacttgtcaaacaaagccattgacaaagagaagctcaagaaatatgagcaaggtagattcgatttccaaggtgcagctgtgttcatggctccattggttctattactcacagccaacattgttagcttcttagttggtatatggagactatttaatttcaatgtgaaggattttgaagaaatgtttggtcaacttttcttagttacctatgtaatggttcttagttatccacttcttgaggccatggtaacaatgaaaagcaagagtggatagtgaaatttggtcacaaataattaggctcattcaagagtctaaattgattatgtatcttgagatgaaattgcttaatgcaatcttgttcgttcagtttaaaag

SEQ ID NO: 16893 - protein, 700 aa, Glycine max
KMATFTYHVETVQSFLALSRLHILIHLVAVLSLCYYRITHFFLQPPTAPWLLMTAAELLLSLLWFFNQAFRWRPVSRSVMTEKLPSEEKLPGLDIFVCTLDPEKEPTVEVIDTIISAVSMDYPSDKLSVYLSDDGGCDVTLYGIREAAEFAKEWVPFCKKYGVKSRCPKVFFSPFGDEDQETLRDDQFRTQRDLVKAKYEKMQKNIEKFGSDPKSRRIVSDRQPRIEIINDQPGMPLIVYVSRERRPSLPHKFKGGAVNTLLRVSGLISNGPYVLVMDCDMYSNDPTSAKQAMCFFLDPETSKYIAFVQFPQMFHNLSKKDIYDSQARTAFKTMWQGMDGLRGPGLSGSGNYLSRSALLFGSPNQKDDYLQDAQKYFGKSTAYIESLKAIRGQKSSKKNISRDEMLREAQVVASCSYENNTNWGTEVGFSYGILLESSITGYILHSRGWKSAYLYPKTPCFLGCAPTDIKEGMLQLVKWLSELLLLGVSSKYSPFTYGFSRMSILHTFTYCFITMSSLYAVVFILYGIVPQVCLLKGIPVFPKATDPWFAVFAFVYVSTQIQHLIEILSGDGSVTMWWDEQRIWILKSVTSIFAIIDGIKKWLGLSKVKFNLSNKAIDKEKLKKYEQGRFDFQGAAVFMAPLVLLLTANIVSFLVGIWRLFNFNVKDFEEMFGQLFLVTYVMVLSYPLLEAMVTMKSKSG

SEQ ID NO: 16894 - protein, 699 aa, Glycine max
MATFTYHVETVQSFLALSRLHILIHLVAVLSLCYYRITHFFLQPPTAPWLLMTAAELLLSLLWFFNQAFRWRPVSRSVMTEKLPSEEKLPGLDIFVCTLDPEKEPTVEVIDTIISAVSMDYPSDKLSVYLSDDGGCDVTLYGIREAAEFAKEWVPFCKKYGVKSRCPKVFFSPFGDEDQETLRDDQFRTQRDLVKAKYEKMQKNIEKFGSDPKSRRIVSDRQPRIEIINDQPGMPLIVYVSRERRPSLPHKFKGGAVNTLLRVSGLISNGPYVLVMDCDMYSNDPTSAKQAMCFFLDPETSKYIAFVQFPQMFHNLSKKDIYDSQARTAFKTMWQGMDGLRGPGLSGSGNYLSRSALLFGSPNQKDDYLQDAQKYFGKSTAYIESLKAIRGQKSSKKNISRDEMLREAQVVASCSYENNTNWGTEVGFSYGILLESSITGYILHSRGWKSAYLYPKTPCFLGCAPTDIKEGMLQLVKWLSELLLLGVSSKYSPFTYGFSRMSILHTFTYCFITMSSLYAVVFILYGIVPQVCLLKGIPVFPKATDPWFAVFAFVYVSTQIQHLIEILSGDGSVTMWWDEQRIWILKSVTSIFAIIDGIKKWLGLSKVKFNLSNKAIDKEKLKKYEQGRFDFQGAAVFMAPLVLLLTANIVSFLVGIWRLFNFNVKDFEEMFGQLFLVTYVMVLSYPLLEAMVTMKSKSG

SEQ ID NO: 16895 - protein, 648 aa, Glycine max
MTAAELLLSLLWFFNQAFRWRPVSRSVMTEKLPSEEKLPGLDIFVCTLDPEKEPTVEVIDTIISAVSMDYPSDKLSVYLSDDGGCDVTLYGIREAAEFAKEWVPFCKKYGVKSRCPKVFFSPFGDEDQETLRDDQFRTQRDLVKAKYEKMQKNIEKFGSDPKSRRIVSDRQPRIEIINDQPGMPLIVYVSRERRPSLPHKFKGGAVNTLLRVSGLISNGPYVLVMDCDMYSNDPTSAKQAMCFFLDPETSKYIAFVQFPQMFHNLSKKDIYDSQARTAFKTMWQGMDGLRGPGLSGSGNYLSRSALLFGSPNQKDDYLQDAQKYFGKSTAYIESLKAIRGQKSSKKNISRDEMLREAQVVASCSYENNTNWGTEVGFSYGILLESSITGYILHSRGWKSAYLYPKTPCFLGCAPTDIKEGMLQLVKWLSELLLLGVSSKYSPFTYGFSRMSILHTFTYCFITMSSLYAVVFILYGIVPQVCLLKGIPVFPKATDPWFAVFAFVYVSTQIQHLIEILSGDGSVTMWWDEQRIWILKSVTSIFAIIDGIKKWLGLSKVKFNLSNKAIDKEKLKKYEQGRFDFQGAAVFMAPLVLLLTANIVSFLVGIWRLFNFNVKDFEEMFGQLFLVTYVMVLSYPLLEAMVTMKSKSG

SEQ ID NO: 16896 - DNA, 1438 bp, Glycine max
attttgaggatgctgatgttaagaagaacaaaggaaacgaaggataagagaggccgatacttttctcccgcctccaattgatatccagttgattgagtgtgaacaatcagaatctgaacgggacttttatgaagcccttttcgagagatctgaagttcaatttgatcagtatgttgcacaaggaaaggttcttcaccattatgcaaatatccttgacctactaatgcagttgaggcggtgttgtaaccatccatttttagttatgtgcggaagtgatacccagaaacgtgcagatttaagcagacacgcaagaagattccttcagactaatactgaatgccccgaagaaagcaatcaaaatgatcctcggcagcaagcagagttgaacaaacttgcaagtagattacttctaaaatctgcttcttcttcgcactcgttcaacctcatgcatacattgccgaggttttggaggatattcaaaagggtgacattgtagaatgttctatatgcatggaatctccagaagatcctgtgtttacaccatgtgcacataaattttgtagagaatgtctatatagttgctggggcacctcagcgggtggtaaatgtccaatctgtcgtcaattgctccagaaagacgatctgattacttattcatctgaaagtccattcaagctcgatgttaagaacaatgtgacggagtcttcaaaggtttcaaagctatttgaattcctgcaacgtattttgaacacatcaagtgaaaagagtatcgtcttcagtcaatggacatcatttttttatctgttggagaattctttgaggaggaaaggaattggttttctgagatatgatgggaagttgactcagaagcagagggagaaagttctggatgaattcaaccagacaagagagaaaagggttatgttgatgtcactaaaagctggtggtatgggcttgaacttaactgcagcttcaaatgttttcattatggatccatggtagaaccctgcagttgaggagcaagcaataatgagaattcatcgaataggacaaaaccgaaggaagagttgtagtgagaagatttatcgttaaggacacggtggaagatcgcttgcaacaagttcaagctaggaaacaaaggttgatatctggtaccctcacagatgatgaggttcggactgctagaattcaagatctcaaaatgcttttcacacgagagtttatttatttagaaggtgatttatttgtctatttttttagatctaggaaagccaattttgtatagattgttggatccttttctacagcaaaaggcttctttttttcttttgtgtacatacatgaaatgatgatcattagactattctgaactctaacaaagaagcccactgttttgtaaatctttcagctttagtggttattttcatattggtcattc

SEQ ID NO: 16897 - protein, 163 aa, Glycine max
MESPEDPVFTPCAHKFCRECLYSCWGTSAGGKCPICRQLLQKDDLITYSSESPFKLDVKNNVTESSKVSKLFEFLQRILNTSSEKSIVFSQWTSFFYLLENSLRRKGIGFLRYDGKLTQKQREKVLDEFNQTREKRVMLMSLKAGGMGLNLTAASNVFIMDPW

SEQ ID NO: 16898 - protein, 90 aa, Glycine max
MQLRRCCNHPFLVMCGSDTQKRADLSRHARRFLQTNTECPEESNQNDPRQQAELNKLASRLLLKSASSSHSFNLMHTLPRFWRIFKRVTL

SEQ ID NO: 16899 - DNA, 1275 bp, Glycine max
attggtgaactacttgaccttgagcctgaggaagcccctgatgacgatgaggatcaattgaaaaatagaaaaagcttaaggagaaagagtgtttcacctcttgatgtttcaaaggaggaagaagaaactcttaagagtgaacaacatccaaagtctgaaacaccagcgggttgcataactaatccctcagagtattatcggatattggtagaattcaatgcactaactggagatagccatcgagacaaatggttggagaggttgcttcaacgcattcattacatgtgtgattctaatgatagcaaagaaagggacaaaggattaggaaatgtcaattctgatgaaatcaacggtggaagcaagcatagaagttcagagtcagcaaatgtctgtcaagataaggttcagaagagttccaagtcttttatttggccagatgctggtgtttcagccatggttgctctcgaaaaagcttctcatgatgctctctcatcagattctatgaagtacaaccaaaagttgcgccaattagcttttaatttccagaaaaatgcagtgttagcacgccgtctattaagtggagagttggagccttcaaaaatattaaatatgacacccaatgaattaaaggagggtttggttgctgaggaaaaaaccaaggaggagcttgacaagatccagcacttgcaaatgacagatgctcgctgctcaaaatgcatggattgtaaggtggccttgagagagattatccaagctggaaataatgaacgttatcagctggaatgtgtttcctgtggtcattcctggtatgcctcccgggatgaggtgtctatgctgaccatagatgcatcagattctaagggaaacataggcacagcgctataggccactgcaaaatttaaagatgttcagatgaagctggtgagccgctgtgaatccaatgtcagccaatggcatcttttaaaagacaagttaattgtatatcccctgaaatgatttggaaagtccaggaaaggtgacgatattgaggctatgagacgtgtatctatcccggctagtgttaagtcatagcaaaagactgtttatgaatagatatagttctcttcctatttgactctgcgcatatcatacaacaaacggttggttttgtgtaatacttcgcataaactagctggtgttacctcatacatcataagggtagtgttagccatagaagtaaatttcttagtttgacttttactttgtagtattaacttgtttcaatcattaataagc

SEQ ID NO: 16900 - protein, 294 aa, Glycine max
IGELLDLEPEEAPDDDEDQLKNRKSLRRKSVSPLDVSKEEEETLKSEQHPKSETPAGCITNPSEYYRILVEFNALTGDSHRDKWLERLLQRIHYMCDSNDSKERDKGLGNVNSDEINGGSKHRSSESANVCQDKVQKSSKSFIWPDAGVSAMVALEKASHDALSSDSMKYNQKLRQLAFNFQKNAVLARRLLSGELEPSKILNMTPNELKEGLVAEEKTKEELDKIQHLQMTDARCSKCMDCKVALREIIQAGNNERYQLECVSCGHSWYASRDEVSMLTIDASDSKGNIGTAL

SEQ ID NO: 16901 - protein, 200 aa, Glycine max
MCDSNDSKERDKGLGNVNSDEINGGSKHRSSESANVCQDKVQKSSKSFIWPDAGVSAMVALEKASHDALSSDSMKYNQKLRQLAFNFQKNAVLARRLLSGELEPSKILNMTPNELKEGLVAEEKTKEELDKIQHLQMTDARCSKCMDCKVALREIIQAGNNERYQLECVSCGHSWYASRDEVSMLTIDASDSKGNIGTAL

SEQ ID NO: 16902 - DNA, 2006 bp, Glycine max
ataaagcaaatgctcatggaagacgacacccaggagagttacagtattttccatgattccttggccctccaacacactgagagatcattttatcaagttatcactcacaactaccctccttcatcttcctccccccatcatcagagtcctgagcaaagtctctccgtttcctcaagtgattctagtagtagctgcagcactaacagtactagcagctccgccgactctcccttcagaagccttccccctctacttccacactctacttttcctattcctcataacttttttttccactcaaattcaacccaatcttcaatcagtactacacttggattcttcgacaatcccctcgctgaaatttctgattcagcatttctacaacaatttgagagaggtgtagaccaagatgctaattaagacagaagcagaaggagagccttttctggcaggaaggaaacaaaggcagcgggaagagtatgaagcagatggaagaagcaggaagcaatcggcaccatacatggatgacagtgagctatccgaattgtttgataaagtactattaggcactggcttaggaaaaggggtacctcctgacacaacccatgaaacaatattaacgaacatgtttggtggagatgctagcaaaagtgatgaggaagttgtggatcttgggacactgttgatgctatgtgcacaggctgttgcttccggtagtagtccttcatttgctaagcagttagtgatgcagattaagcagcattcttctccaataggggatgagactcagaggctagcacattactttggaaatgcccttgaagcacgtttggatggaacgggttaccagttttatagtgttcttctatcctccaaaagaacttctgccaaagacatggtaaaagcttaccgtgtatatctttcaatatgcccatttgaaaagctagcagtcatttttgccaacaattcaatttgcaacttaagtgaggatgcaaaaacaattcacatcatagactttggcatccgctatggcttcaaatggcctgcacttatcagccgtctatcaagacgccctggtgggccacccaaacttcggatcacggggatagatgtgccacaacctggtttaagaccacaagagagggtgctcgaaacagggcgcagacttgcaaattattgcaagcgtttcaatcttccatttgagttccatgctattgcacagagatgggacaccatcagagttgaggacctcaagatagagacagacgaatttgtggctgtgaactgcttgtttcagtttgagcatctacttgacgagaccgtggtgttgaataatcccagggatgctgttctgaagttgattaagaaagctaatcctgacatatttgtgcatggcattgtcaatggatcatatgatgtaccgttctttgtttcacgtttccgtgaggctctctatcattactctgcattgtttaacatgcttgacaccaacgttggtcgtgaagaccccataaggttgatgtatgagaaggagttgtttggacgggagataatgaacatcatagcttgtgaaggttgtgagagggttgagaggcctcagacatacaagcaatggcagcttcggaacatgagaaatgggtttaggccgcttcctctggatcaacgaatcattgacaaattaaagggtaggttgagagatgatgcgtacaacaataatttcttgcttgaggtggatggcaactgggtgctacaaggttggaagggacgaattctatatgcttcctcttgttgggtaccggcatagcataggcctccaacattatttattccaaattacaaaaatcttgtcctacacacaactattagtacgtctccttcaatctcactagctcatgtttgttgttttatatgataaggaaaaacaaaagttatgttagtgtctttcaatgtgtagtttgttcagtacttacatatctaacaattcaacatatttaattgacagccgt

SEQ ID NO: 16903 - protein, 464 aa, Glycine max
MLIKTEAEGEPFLAGRKQRQREEYEADGRSRKQSAPYMDDSELSELFDKVLLGTGLGKGVPPDTTHETILTNMFGGDASKSDEEVVDLGTLLMLCAQAVASGSSPSFAKQLVMQIKQHSSPIGDETQRLAHYFGNALEARLDGTGYQFYSVLLSSKRTSAKDMVKAYRVYLSICPFEKLAVIFANNSICNLSEDAKTIHIIDFGIRYGFKWPALISRLSRRPGGPPKLRITGIDVPQPGLRPQERVLETGRRLANYCKRFNLPFEFHAIAQRWDTIRVEDLKIETDEFVAVNCLFQFEHLLDETVVLNNPRDAVLKLIKKANPDIFVHGIVNGSYDVPFFVSRFREALYHYSALFNMLDTNVGREDPIRLMYEKELFGREIMNIIACEGCERVERPQTYKQWQLRNMRNGFRPLPLDQRIIDKLKGRLRDDAYNNNFLLEVDGNWVLQGWKGRILYASSCWVPA

SEQ ID NO: 16904 - protein, 427 aa, Glycine max
MDDSELSELFDKVLLGTGLGKGVPPDTTHETILTNMFGGDASKSDEEVVDLGTLLMLCAQAVASGSSPSFAKQLVMQIKQHSSPIGDETQRLAHYFGNALEARLDGTGYQFYSVLLSSKRTSAKDMVKAYRVYLSICPFEKLAVIFANNSICNLSEDAKTIHIIDFGIRYGFKWPALISRLSRRPGGPPKLRITGIDVPQPGLRPQERVLETGRRLANYCKRFNLPFEFHAIAQRWDTIRVEDLKIETDEFVAVNCLFQFEHLLDETVVLNNPRDAVLKLIKKANPDIFVHGIVNGSYDVPFFVSRFREALYHYSALFNMLDTNVGREDPIRLMYEKELFGREIMNIIACEGCERVERPQTYKQWQLRNMRNGFRPLPLDQRIIDKLKGRLRDDAYNNNFLLEVDGNWVLQGWKGRILYASSCWVPA

SEQ ID NO: 16905 - protein, 392 aa, Glycine max
MFGGDASKSDEEVVDLGTLLMLCAQAVASGSSPSFAKQLVMQIKQHSSPIGDETQRLAHYFGNALEARLDGTGYQFYSVLLSSKRTSAKDMVKAYRVYLSICPFEKLAVIFANNSICNLSEDAKTIHIIDFGIRYGFKWPALISRLSRRPGGPPKLRITGIDVPQPGLRPQERVLETGRRLANYCKRFNLPFEFHAIAQRWDTIRVEDLKIETDEFVAVNCLFQFEHLLDETVVLNNPRDAVLKLIKKANPDIFVHGIVNGSYDVPFFVSRFREALYHYSALFNMLDTNVGREDPIRLMYEKELFGREIMNIIACEGCERVERPQTYKQWQLRNMRNGFRPLPLDQRIIDKLKGRLRDDAYNNNFLLEVDGNWVLQGWKGRILYASSCWVPA

SEQ ID NO: 16906 - DNA, 1738 bp, Glycine max
ttcccgtgttcgggttctttatgctggttagggccatcgccgtcggagagacgcttgtgttcatgcataggtttgatttcgaagggatgctgaaagctgtggagaggtatagaatcacctacatgccggtgtcgccgccgctcgtggtggcgctggcgaagtcggaactcgtgaagaagtatgatatgagttcgctacggtatttgggcagcggcggcgcgccgctcgggaaggaggtcgccgaggactttagagcccaattccccaacgtggaaattgggcagggctatggtttgactgaaagtggaggaggggcagctagagtgttggggcctgatgagtctaagcgccatggttctgtgggtcgactatcagaaaatatggaggccaagatagtggaccctgttactggagaagcattatctcctggccaaaaaggggagctctggttgcgaggtccaacaatcatgaaaggttatgtaggagatgagaaggccacagctgaaacattggattcagaaggatggctgaagactggtgatctttgttattttgactctgatggtttcctctacattgtagatagactgaaggaattgatcaaatacaaagcttatcaggttccccctgctgaattggaacatatacttcacaccaatcctgaaattgctgatgctgcagtagttccgtatgtatcaagtcctttaatgttgtgttcagaagcaaataagttgtcttcaatgacaatgaattacatttgctagctttttcccaattctagttcccgtggggaatcaaagtttcactttttgactttaaactagtaattattatatatctttgactcctttaaagtgagcaaatcactttaacagttaaactaaataatctcagtcaatgagaaaatcatcggtcgatattatatgatattatatgcacacgcataacaaattataaatgtgttggaattctcaattgttgattttttcataaatgactatgattacttactttatccatgctcctcaatttagagaagtcatccaatccaaaagaaaaaaaaggtgttgctgcaattcacttcccttaacatacatgtataacatgacttggtcttgttacaaggttcactaaatctgctaatcttttgaggacaggtatcctgatgaagaggcaggacagattccaattgcctttgtagtaagaaagtctggaagcaacatcactgcagatcaggtcatggagtttgtggcaaagcaggtttcaccatacaagaagatacggcgagtttctttcatcaaatctatcccaaaatctccggctggcaaaattttgagaagagaattagttgattatgctctatcctgtggttcatccaaattgtgatcaagaaaagagcatggagaaaatgtacttggcctcgaaactattgtgacctgttcagatgcaacaaatgcacgatatcgtgtgaagcatctggcctaccatgtggttcatcgccctagtccaccactaagaatgttggtggtttctacccaaaaatcagcaatcattttattcacgcacacctttcagaaatttaatcattttaatcaactacctcggtttccctcattttatttaccaaaataaattatgcacctttaggtttgttcacaaaataatgtgtgcaagaaacattttcattcgttgtaaactatttgttcattttgtatagttgcatttatatattttcttt

SEQ ID NO: 16907 - protein, 253 aa, Glycine max
PVFGFFMLVRAIAVGETLVFMHRFDFEGMLKAVERYRITYMPVSPPLVVALAKSELVKKYDMSSLRYLGSGGAPLGKEVAEDFRAQFPNVEIGQGYGLTESGGGAARVLGPDESKRHGSVGRLSENMEAKIVDPVTGEALSPGQKGELWLRGPTIMKGYVGDEKATAETLDSEGWLKTGDLCYFDSDGFLYIVDRLKELIKYKAYQVPPAELEHILHTNPEIADAAVVPYVSSPLMLCSEANKLSSMTMNYIC

SEQ ID NO: 16908 - protein, 247 aa, Glycine max
MLVRAIAVGETLVFMHRFDFEGMLKAVERYRITYMPVSPPLVVALAKSELVKKYDMSSLRYLGSGGAPLGKEVAEDFRAQFPNVEIGQGYGLTESGGGAARVLGPDESKRHGSVGRLSENMEAKIVDPVTGEALSPGQKGELWLRGPTIMKGYVGDEKATAETLDSEGWLKTGDLCYFDSDGFLYIVDRLKELIKYKAYQVPPAELEHILHTNPEIADAAVVPYVSSPLMLCSEANKLSSMTMNYIC

SEQ ID NO: 16909 - protein, 233 aa, Glycine max
MHRFDFEGMLKAVERYRITYMPVSPPLVVALAKSELVKKYDMSSLRYLGSGGAPLGKEVAEDFRAQFPNVEIGQGYGLTESGGGAARVLGPDESKRHGSVGRLSENMEAKIVDPVTGEALSPGQKGELWLRGPTIMKGYVGDEKATAETLDSEGWLKTGDLCYFDSDGFLYIVDRLKELIKYKAYQVPPAELEHILHTNPEIADAAVVPYVSSPLMLCSEANKLSSMTMNYIC

SEQ ID NO: 16910 - DNA, 602 bp, Glycine max
tcttactgctggattctcagcttcagttgctgctactgcttcacatagttttgatactacaagaagtagatcacaatgtactgtgctgccgaagtacatctccatggagagaaagattctgaagtggaaacgaccaggaaccaagtttgaaagaattactggcatccatccttctgacagaggtgtcttgttccgtggtattggttggcgaatggctcgctctgggctggcatcattcattattgtaggaagttatttatttgttgctgatcagcttggttctagtttgacttaattaccacatattcataccccgattttggttaataagtaattgtaatgtttaatatatttttttctggagaagtcatgtaatttgggatgctgctctgtgctagttagtaaagaaaaatagagcggagacagtacttgatgtacccggattgtagtccagatagaaaaagataatttgttcaatacatataaatgatccttgatgtggggattcacaatgggaatttgattttttaattctcttgtacaagagtttgtaccttccaatgactggtaattaaataagaatatacattttctgcttgttc

SEQ ID NO: 16911 - protein, 97 aa, Glycine max
LTAGFSASVAATASHSFDTTRSRSQCTVLPKYISMERKILKWKRPGTKFERITGIHPSDRGVLFRGIGWRMARSGLASFIIVGSYLFVADQLGSSLT

SEQ ID NO: 16912 - protein, 63 aa, Glycine max
MERKILKWKRPGTKFERITGIHPSDRGVLFRGIGWRMARSGLASFIIVGSYLFVADQLGSSLT

SEQ ID NO: 16913 - DNA, 1431 bp, Glycine max
ggccccccccccgttgctgcacatatttctgaactatttagacggtcaaaagcttgcatgcgtgctctgtctgttttgatgcgttacaaatgggatgatgaaattcactctagggcttcgtcattgtacactctcatagatattcacagaaaagcagttgcatccatagttaacaaggcagagccattgggagcaacctttattcatacccctatttgtaaagacccctgtgatagaagtaaaagaaaaaatcagtgtgaaaatagtaggtgccttgatcctgggcagacatctacttcgacttctgaggattcatcccgctcaaaattcagcaaaaaaagtgagagaacttcatattcaaatgaagcatcaggatgtacctttgaaaaagctaccacaagtctcccatttgatgcttctgatctagccaatttcttaactatggacaggcatataggatttaattgcagtgcccaaatttttctgagatcgaggcttgcagagaagcaacagttatgtttctctgtagtatcactactatggcagaagttgattggatctcctgaaactcaaccttgtgcagaaagcacttctgctcaacaggggtggagacaggttgctgatgcattatgcaaggttgtatctgcatctcctacgaaagcagctatggcagttgttcttcaggccgagaaggaattgcagccatggattgccaaagatgacaatctaggtcagaagttgtggagaatcaatcagcggattgtaaaattgataactgaactattgaggaatcatgataatttggaatcattagtaattgtggcaagtgcatcagatttactactacgagccacagatggaatgctggtggatggagaagcttgcactttaccacagctgaagctattggaagcaacggcgaaagcggttcaaccagtgattgagttgggagaatctggacttggagtggcagatgggctttcaaacctgttaaagtgtcgcctaccagctacaatcagatgcctttctcatccaagtgcacatgtccgtgctctgagcagttcggttattcgtgacattttgcatactagttcaattggatcgagtcctaagccactgcaaaagaatggcatccatgatcagtacttaaattttgatgtcattgactggcgagctgacgtagaaaactgcttgacatgggaagctcacagccggctttcaaatggattgtctattgaatatcttaacacagctgcggatgacttaggctttgctatttctatctgaaatgaaatgagaccatatgtaatcatcttagtaatttatgtttaggaacttaaattaagcttttcatgacagatattatctcaagatttgtataaaaccttgatgtaatctatgtttaggaacttaaatggtttgcaaataagt

SEQ ID NO: 16914 - protein, 428 aa, Glycine max
GPPPVAAHISELFRRSKACMRALSVLMRYKWDDEIHSRASSLYTLIDIHRKAVASIVNKAEPLGATFIHTPICKDPCDRSKRKNQCENSRCLDPGQTSTSTSEDSSRSKFSKKSERTSYSNEASGCTFEKATTSLPFDASDLANFLTMDRHIGFNCSAQIFLRSRLAEKQQLCFSVVSLLWQKLIGSPETQPCAESTSAQQGWRQVADALCKVVSASPTKAAMAVVLQAEKELQPWIAKDDNLGQKLWRINQRIVKLITELLRNHDNLESLVIVASASDLLLRATDGMLVDGEACTLPQLKLLEATAKAVQPVIELGESGLGVADGLSNLLKCRLPATIRCLSHPSAHVRALSSSVIRDILHTSSIGSSPKPLQKNGIHDQYLNFDVIDWRADVENCLTWEAHSRLSNGLSIEYLNTAADDLGFAISI

SEQ ID NO: 16915 - protein, 409 aa, Glycine max
MRALSVLMRYKWDDEIHSRASSLYTLIDIHRKAVASIVNKAEPLGATFIHTPICKDPCDRSKRKNQCENSRCLDPGQTSTSTSEDSSRSKFSKKSERTSYSNEASGCTFEKATTSLPFDASDLANFLTMDRHIGFNCSAQIFLRSRLAEKQQLCFSVVSLLWQKLIGSPETQPCAESTSAQQGWRQVADALCKVVSASPTKAAMAVVLQAEKELQPWIAKDDNLGQKLWRINQRIVKLITELLRNHDNLESLVIVASASDLLLRATDGMLVDGEACTLPQLKLLEATAKAVQPVIELGESGLGVADGLSNLLKCRLPATIRCLSHPSAHVRALSSSVIRDILHTSSIGSSPKPLQKNGIHDQYLNFDVIDWRADVENCLTWEAHSRLSNGLSIEYLNTAADDLGFAISI

SEQ ID NO: 16916 - protein, 402 aa, Glycine max
MRYKWDDEIHSRASSLYTLIDIHRKAVASIVNKAEPLGATFIHTPICKDPCDRSKRKNQCENSRCLDPGQTSTSTSEDSSRSKFSKKSERTSYSNEASGCTFEKATTSLPFDASDLANFLTMDRHIGFNCSAQIFLRSRLAEKQQLCFSVVSLLWQKLIGSPETQPCAESTSAQQGWRQVADALCKVVSASPTKAAMAVVLQAEKELQPWIAKDDNLGQKLWRINQRIVKLITELLRNHDNLESLVIVASASDLLLRATDGMLVDGEACTLPQLKLLEATAKAVQPVIELGESGLGVADGLSNLLKCRLPATIRCLSHPSAHVRALSSSVIRDILHTSSIGSSPKPLQKNGIHDQYLNFDVIDWRADVENCLTWEAHSRLSNGLSIEYLNTAADDLGFAISI

SEQ ID NO: 16917 - DNA, 1302 bp, Glycine max
tcactctcatccacttccactgcatcctagtccaagcacaaacctcaccctcagacattgcagcactcaaagccttcaaggcctcaatcaaaccctcctccatcactccctggtcatgcctcgcctcatggaacttcacaaccgacccatgctcactccctcgccgaacctccttcatctgcggcctcacctgcacccaagactccacaagaatcaaccaaatcactctcgacccagcagggtactcaggcacactcaccccactaatctctcaactcacacaactcaccacacttgacctcgctgataacaacttctttggcccaatcccctcttcaatctctttactctcaaacctccaaaccttaacccttcgatccaattccttctcgggcacaatccctccctccataaccaccctcaaatcactcctatctctcgacctcgcacacaattccctctctgggtatctcccaaactcaatgaactccctcaccacactccgcagactcgatctcagcttcaacaaactaaccggttcaatcccaaagctcccatccaacttgctcgaactcgcgatcaaggccaattctctatctgggcctctccaaaaacagagctttgaagggatgaaccagttggaagtggtggagctcagcgagaacgcgctcaccggaaccgtggagtcgtggttcttccttttgccgtcgctgcagcaagtggacttggccaacaacaccttcacgggggtgcagatctcgaggccactcgcggcccgtggaggaagcagcagcagcagtggcaacagcaacctcgtcgcgctgaacctcgggtttaacagaatccgaggctacgcgcccgcgaatctcggcgcgtatcccgcgctgtctttcctgtcgattcggtacaacgcgctgcgtggcgcgatcccgctggagtacgggcagatcaagtccatgaagaggctgttcctcgacgggaactttttcgtcggaaagccgccggcggggctggtggcggccggaacagcggtttccggcagcctgggggacaattgcctgcaggcgtgcccagggtcgtcgcagctgtgctcccccgcgcagaaacctagctctgtttgcaagcaagcctaccgtggtagaccaacaccgtaatctgatgtcggttaaaattaaaaagaaaaacaattaaatagatttctattatacttttctttttctagtattttttataaaggttctttgtatgtagaaaagctgtgttagtgttactatctgaataaaagatgatgttgtaaagtgc

SEQ ID NO: 16918 - protein, 383 aa, Glycine max
TLIHFHCILVQAQTSPSDIAALKAFKASIKPSSITPWSCLASWNFTTDPCSLPRRTSFICGLTCTQDSTRINQITLDPAGYSGTLTPLISQLTQLTTLDLADNNFFGPIPSSISLLSNLQTLTLRSNSFSGTIPPSITTLKSLLSLDLAHNSLSGYLPNSMNSLTTLRRLDLSFNKLTGSIPKLPSNLLELAIKANSLSGPLQKQSFEGMNQLEVVELSENALTGTVESWFFLLPSLQQVDLANNTFTGVQISRPLAARGGSSSSSGNSNLVALNLGFNRIRGYAPANLGAYPALSFLSIRYNALRGAIPLEYGQIKSMKRLFLDGNFFVGKPPAGLVAAGTAVSGSLGDNCLQACPGSSQLCSPAQKPSSVCKQAYRGRPTP

SEQ ID NO: 16919 - protein, 223 aa, Glycine max
MNSLTTLRRLDLSFNKLTGSIPKLPSNLLELAIKANSLSGPLQKQSFEGMNQLEVVELSENALTGTVESWFFLLPSLQQVDLANNTFTGVQISRPLAARGGSSSSSGNSNLVALNLGFNRIRGYAPANLGAYPALSFLSIRYNALRGAIPLEYGQIKSMKRLFLDGNFFVGKPPAGLVAAGTAVSGSLGDNCLQACPGSSQLCSPAQKPSSVCKQAYRGRPTP

SEQ ID NO: 16920 - DNA, 1692 bp, Glycine max
tctttatgttgcttcagagaatggacatgctttggttgttagtgagatactgaagtacttggacctgcaaactgcttctattgcagccaaaaatggctatgatccattccatattgctgcaaagcagggccatcttgaggtgctgagagaactactgcactcctttcccaacttggccatgaccacagatttgtccaactcaactgctttacacacagctgcgactcaaggtcatattgatgtggttaatcttcttctggaatcagattctaaccttgctaaaatagccaggaataatggtaaaactgtccttcactctgcggctagaatggggcatttggaagttgtgaaagctttactgaacaaggatcgaagcactggatttaggactgataagaaaggtcaaactgcactacacatggctgtgaaagggcaaaatgaagaaattttgctggaattggtaaaacctgacccagcagttttgagtctggaagataataaaggaaatacagcattgcacattgccacaaagaagggccgtactcagaatgtacactgcttgttatcaatggagggtatcaacatcaatgctacaaacaaggctggagagactcctcttgatgttgcagaaaaatttggaagtccagaacttgtctccatattgagggatgctggggctgccaattctactgatcaaaggaaacctccaaatgcatcaaagcaactcaagcagactgtcagtgacataaagcatgatgtacaatcccaactccagcagacacgtcagactggcatgagggtccagaaaattgcaaagaagctgaaaaagctccacattagtggcctgaacaatgcgataacctctgctactgttgttgccgttcttattgctacagttgcttttgcagccatcttcacagtccctggtcaatacgttgaaggcaaaacacatggatttacacttggacaagcaaatatagcaaacaatgcagctttcctaatattttttgtgtttgacagcctggcattgttcatctctctggcagtagtggtggttcaaacttctgtcgttgtgattgagcaaaaggcaaagaagcagcttgtttttgtcattaacaagctcatgtggatggcttgccttttcatttccattgccttcatttctcttacatacgtggtggtgggatcacagtccagatggcttgcaatatatgctacagtgattggaagcttgataatgctctctacaattggctccatgtgctattgtgtaattttgcacaggatggaggagacaaaattgagagccgagagtcgatcgttctccatgtctcatgcatcagaccaagagattttgaacagtgaatacaagagaatgtacgcactgtagtctgtagtgtagttgatatatctgaatggaatggcttgtatttctagcatattcttgaagtgataataggtagtttacactatcggcatcagattacgaaattagactacagataccgtgagaaaagagggaaaggaagaaaatgggtggggaattctcgtcacatccactcgtaagtataaaggatgttgtcaaatttagcatgacgtcagtgaaatgattatggtgttaaagaatgaagacttgagatgatatatccatttgtatttactcttctgttctattataaactagacttggcc

SEQ ID NO: 16921 - protein, 462 aa, Glycine max
LYVASENGHALVVSEILKYLDLQTASIAAKNGYDPFHIAAKQGHLEVLRELLHSFPNLAMTTDLSNSTALHTAATQGHIDVVNLLLESDSNLAKIARNNGKTVLHSAARMGHLEVVKALLNKDRSTGFRTDKKGQTALHMAVKGQNEEILLELVKPDPAVLSLEDNKGNTALHIATKKGRTQNVHCLLSMEGININATNKAGETPLDVAEKFGSPELVSILRDAGAANSTDQRKPPNASKQLKQTVSDIKHDVQSQLQQTRQTGMRVQKIAKKLKKLHISGLNNAITSATVVAVLIATVAFAAIFTVPGQYVEGKTHGFTLGQANIANNAAFLIFFVFDSLALFISLAVVVVQTSVVVIEQKAKKQLVFVINKLMWMACLFISIAFISLTYVVVGSQSRWLAIYATVIGSLIMLSTIGSMCYCVILHRMEETKLRAESRSFSMSHASDQEILNSEYKRMYAL

SEQ ID NO: 16922 - protein, 403 aa, Glycine max
MTTDLSNSTALHTAATQGHIDVVNLLLESDSNLAKIARNNGKTVLHSAARMGHLEVVKALLNKDRSTGFRTDKKGQTALHMAVKGQNEEILLELVKPDPAVLSLEDNKGNTALHIATKKGRTQNVHCLLSMEGININATNKAGETPLDVAEKFGSPELVSILRDAGAANSTDQRKPPNASKQLKQTVSDIKHDVQSQLQQTRQTGMRVQKIAKKLKKLHISGLNNAITSATVVAVLIATVAFAAIFTVPGQYVEGKTHGFTLGQANIANNAAFLIFFVFDSLALFISLAVVVVQTSVVVIEQKAKKQLVFVINKLMWMACLFISIAFISLTYVVVGSQSRWLAIYATVIGSLIMLSTIGSMCYCVILHRMEETKLRAESRSFSMSHASDQEILNSEYKRMYAL

SEQ ID NO: 16923 - protein, 353 aa, Glycine max
MGHLEVVKALLNKDRSTGFRTDKKGQTALHMAVKGQNEEILLELVKPDPAVLSLEDNKGNTALHIATKKGRTQNVHCLLSMEGININATNKAGETPLDVAEKFGSPELVSILRDAGAANSTDQRKPPNASKQLKQTVSDIKHDVQSQLQQTRQTGMRVQKIAKKLKKLHISGLNNAITSATVVAVLIATVAFAAIFTVPGQYVEGKTHGFTLGQANIANNAAFLIFFVFDSLALFISLAVVVVQTSVVVIEQKAKKQLVFVINKLMWMACLFISIAFISLTYVVVGSQSRWLAIYATVIGSLIMLSTIGSMCYCVILHRMEETKLRAESRSFSMSHASDQEILNSEYKRMYAL

SEQ ID NO: 16924 - DNA, 1197 bp, Glycine max
aacggttcacggttcatcccgctcaaagcaagagtggcgtagaaacagaatgtaatagagaagagattgcagtcgaaccggaacgcaagatagaagaggctgtggtcgaaccggttccggttcagaccgaggtcactgttggtttaattagtccggttcaagatgacacgtgtgtaggaaccgcagagaagatagaagaggctactacggtagaatccgataaaaacgttgaagaggaaatcgctgagggcaatgaaggaacacaagagttggatgattctgcggagaagaggaacgtgaaaagcgttgaagaaatcagcgtagaaccttcaactgaaattgaagcttctgttacagatagcggcgtaaaagagaacttcgatgatgatgatgatgattgggaagggattgaaaggagcgagttggagaaagagtttatggcggctacgaaatttgttagtggcgaggaaaatcgattggggggtgctggaagcaatttgaggatggagttgtatgggcttcacaaggttgccaccgaagggccatgccgtgaacctcaaccaatggctctcaagctcgccgcacgtgccaagtggaatgcttggcaaaaactggggaacatgaatccagaggttgcaatggagcagtatgtcagccttctttcggataaatttcccggatggatgaaagatacttctgctggaataggtgaacatgaaaccacaaggcctgaagtttctgagtctgctgcttctgatttgagcacaactttgtctaatcaacaacaaatgatcacaactgaaagggagcttgaacaagagtctgattccaaggaccgtagcccacttacagtgtcagatttggagaacagtgttaacaaatgatggcatctctctgctaatatcccgcgcaacgggacattctcctgcatttatttcgtcaaaaagaaagagtgattcaagtatataaggaagtacgagagattcttgggctgtttgttttctgctttgttccttaaattatttgttgatcatgatgtgttctattgttcttcaatatgctcaagttgttaatatattttttgtacataaataaatgtgtgtataggatcatatgcgcagccgaagattacgtacttatggttgttaaaaactaatttatcaatatcatgtcactcctgtggcatttcagaatgtt

SEQ ID NO: 16925 - protein, 293 aa, Glycine max
RFTVHPAQSKSGVETECNREEIAVEPERKIEEAVVEPVPVQTEVTVGLISPVQDDTCVGTAEKIEEATTVESDKNVEEEIAEGNEGTQELDDSAEKRNVKSVEEISVEPSTEIEASVTDSGVKENFDDDDDDWEGIERSELEKEFMAATKFVSGEENRLGGAGSNLRMELYGLHKVATEGPCREPQPMALKLAARAKWNAWQKLGNMNPEVAMEQYVSLLSDKFPGWMKDTSAGIGEHETTRPEVSESAASDLSTTLSNQQQMITTERELEQESDSKDRSPLTVSDLENSVNK

SEQ ID NO: 16926 - protein, 148 aa, Glycine max
MAATKFVSGEENRLGGAGSNLRMELYGLHKVATEGPCREPQPMALKLAARAKWNAWQKLGNMNPEVAMEQYVSLLSDKFPGWMKDTSAGIGEHETTRPEVSESAASDLSTTLSNQQQMITTERELEQESDSKDRSPLTVSDLENSVNK

SEQ ID NO: 16927 - DNA, 1670 bp, Glycine max
attttataagggtggattcaactacagattttggtgatctagatggggatagttggactgatcaagagactttgctgctgcttgaagcagtggaggtttacaatgagaattggaatgaaattgctgagcatgttggcaccaagtcgaaagcacaatgcattcttcattttctccgtttacctgtagaagatggaaagttggaaaatatcaatgtttcaagtttgtctttgtcatccattgtgaagaatcaagaggataatggaagattgcattgttgctcaaatggggattctgcaggacctgtacataacagccaagattctgatggcaggcttccttttgcaaattctggaaatccagttatggcactggttgcctttttagcctctgctgttggaccaagagttgctgcaacttgtgctcatgcagcattagctgcattgtcaaggaataattccgggagcacgtcacatatagaagcaccggataatgataataggacaaattcagaaagcgtgcataatagagatggtggccatgatggagaggttgcaaattcaaatcagaaaaatggtgagttatggttgctgcatttttcagttgctgatgtgtaattaaatccccattgtctggtaaaatgctaatacctagtgtgtaattctttgagaaatgtcttttttttttttcttttgaattcagaggacaagtcaaaagtacttggttcatgtggtcaaaatgagggagggtcaaccctgctatctgctgagaaaatcaaagatgctgccaaagaaggcctctctgctgcagcaatgaaagctaaattgtttgctgatcatgaagagcgagaaattcagaggctatgtgccaatattgttaataataagttgaaaagattggaactgaagctgaagcagtttgcagaaattgaaacacagttgatgagagaatgtgaacaagttgagaaggtgaagcagaggttggcttctgatcggtcccatattgtatcaacacgtcttggaaatggtggaaccactccgccaatgaatgttgcaggtgctggtccatccatggttaacaacaacagcaatggtaggcaacaaatgatttctgcttcttcctcacaacctagcatctcaggatatggcaatagccaaccagttcatccacatatgtccttcgtcccacggccttcaatgtttgggttggggcaaaggctgccactttctatgattcaacaacaacattcagcttcttcagatccgatgttcaatggccccggtaatttgcagcctactcccaatcattcagtgtcgaggccggtgtgaaggactaactctggtttaggttaattaggaactccatggtagatttgaaatatctagtttacaattttagttgaaaaatcatgatctggtctcagttactttttgtctccactgtcttttgctgttgtaaaatctaattccatgttacttggatatgcctctattatatcgtttgtgtcacgggcacagggtgcaatctgtttgtggattcttgttgtccctgtccaatgtttgtctgcaatggtcaaagacagacgcttattcttctttatttatcatacaaaacgacttcacgtgcggggaagtacaaaaaaatagtggaagataatcattgatcacgtacag

SEQ ID NO: 16928 - protein, 203 aa, Glycine max
FIRVDSTTDFGDLDGDSWTDQETLLLLEAVEVYNENWNEIAEHVGTKSKAQCILHFLRLPVEDGKLENINVSSLSLSSIVKNQEDNGRLHCCSNGDSAGPVHNSQDSDGRLPFANSGNPVMALVAFLASAVGPRVAATCAHAALAALSRNNSGSTSHIEAPDNDNRTNSESVHNRDGGHDGEVANSNQKNGELWLLHFSVADV

SEQ ID NO: 16929 - protein, 171 aa, Glycine max
MKAKLFADHEEREIQRLCANIVNNKLKRLELKLKQFAEIETQLMRECEQVEKVKQRLASDRSHIVSTRLGNGGTTPPMNVAGAGPSMVNNNSNGRQQMISASSSQPSISGYGNSQPVHPHMSFVPRPSMFGLGQRLPLSMIQQQHSASSDPMFNGPGNLQPTPNHSVSRPV

SEQ ID NO: 16930 - protein, 128 aa, Glycine max
MRECEQVEKVKQRLASDRSHIVSTRLGNGGTTPPMNVAGAGPSMVNNNSNGRQQMISASSSQPSISGYGNSQPVHPHMSFVPRPSMFGLGQRLPLSMIQQQHSASSDPMFNGPGNLQPTPNHSVSRPV

SEQ ID NO: 16931 - DNA, 1265 bp, Glycine max
aaaaggattttgaaatgaagctttttattggtggggttgtacacaataatgaagatactcctgtcaaggatgaatttatacgtcttccagctgaaataaaaaatattgaaaaggattcttttgtctttcattttgctagtggaaatgtagattatggtatcaaagaagataaaattcccaacatcaaagtagcagccctagcagcacaaggaatctccgagcttatgcctcctgatgttgctaatgcattttggagttctgacaaagtctcttctaaggtctccaaaagcatgcgtgatattgtcagagttgctatgagtcaagcacagaaaagaacaagattatctggggatacaaattttagccggattatctgttcaagaggggattctgatccttttgatggactctatgttggtgcatttggtccttatggcatggaaatagtgcatttgaggcgaaaatttggacattggaatgaagtgaacaatgaaaacaacacttcagatgttggattctttgaatatgtagaggctgtgaagttaactggggatcttaatgttccagctggccaggtgacattccgtgctaaaattggaagaggcaatcgcaacaccaaccgagggatgtatcctgatgatttaggagtggttgctagttataaaggccagggaagaatagctgactatggttatcgaaatccaaagtgggtcgagggagaactgctccaacttaatggcaagggcatgggaccatacatgaaaggtgcagatcttggtttcctttatgtcgtgcctgagcaaagttttctcgtcttgttccaccggttgaaactacccgagtgagccatggttgatggtaccctaatcctgtctaatttacttatcatctgatgcgaggaagaacatgaaggattctgatactagcgtgttgagattactgttaccttttttttttgagtggtagttttacccaacaggcaggcacttgatattttattagcccttctatgagttcattttttgttgttccttttaccaatctctttgctatctgtcatcttgtgtatataaatttggctgaccaacaaaatagtgtgataggaactctgaaagtaccataagggatcttttttgtgaatattgtggtttatggctgtgtgcttcctttcttgtttggacttctcgtttgtggaagtcccactagtctgcatgtatgaaagggagcatttactaattaaatttgatgataaagaacttcagacc

SEQ ID NO: 16932 - protein, 280 aa, Glycine max
KDFEMKLFIGGVVHNNEDTPVKDEFIRLPAEIKNIEKDSFVFHFASGNVDYGIKEDKIPNIKVAALAAQGISELMPPDVANAFWSSDKVSSKVSKSMRDIVRVAMSQAQKRTRLSGDTNFSRIICSRGDSDPFDGLYVGAFGPYGMEIVHLRRKFGHWNEVNNENNTSDVGFFEYVEAVKLTGDLNVPAGQVTFRAKIGRGNRNTNRGMYPDDLGVVASYKGQGRIADYGYRNPKWVEGELLQLNGKGMGPYMKGADLGFLYVVPEQSFLVLFHRLKLPE

SEQ ID NO: 16933 - protein, 276 aa, Glycine max
MKLFIGGVVHNNEDTPVKDEFIRLPAEIKNIEKDSFVFHFASGNVDYGIKEDKIPNIKVAALAAQGISELMPPDVANAFWSSDKVSSKVSKSMRDIVRVAMSQAQKRTRLSGDTNFSRIICSRGDSDPFDGLYVGAFGPYGMEIVHLRRKFGHWNEVNNENNTSDVGFFEYVEAVKLTGDLNVPAGQVTFRAKIGRGNRNTNRGMYPDDLGVVASYKGQGRIADYGYRNPKWVEGELLQLNGKGMGPYMKGADLGFLYVVPEQSFLVLFHRLKLPE

SEQ ID NO: 16934 - protein, 206 aa, Glycine max
MPPDVANAFWSSDKVSSKVSKSMRDIVRVAMSQAQKRTRLSGDTNFSRIICSRGDSDPFDGLYVGAFGPYGMEIVHLRRKFGHWNEVNNENNTSDVGFFEYVEAVKLTGDLNVPAGQVTFRAKIGRGNRNTNRGMYPDDLGVVASYKGQGRIADYGYRNPKWVEGELLQLNGKGMGPYMKGADLGFLYVVPEQSFLVLFHRLKLPE

SEQ ID NO: 16935 - DNA, 1325 bp, Glycine max
aactgagagtattgatctttcaaaggataagcttgcattgcaaaggcttcgggaagctgctgagaaagccaaaatagaactgtcttcaacatctcaaacagaaattaatcttcctttcatcactgctgatgcatctggtgcaaagcatctgaacatcacattgactagatctaagtttgaggctttggtaaaccacttgattgaaaggacaaaggcaccgtgtaagagctgtttgaaggatgctaacatatctatcaaggaagttgatgaggttcttcttgttggaggaatgactcgtgtgcctaaagtccaggaggtggtttcagcgatctttggaaagagtcctagcaaaggagtaaatcctgatgaggcagttgccatgggagcagctattcagggtggtatcctacgtggagatgttaaagagctactactcctagatgtcactccactttctctgggtattgagactttgggtggtatctttaccaggttgattaaccgcaacaccacaattcctacaaaaaagagtcaggtgttttcaacagcagctgacaatcagactcaggttggtatcaaggtgctacaaggtgagagggaaatggctgtagacaacaaatcgcttggagaatttgagcttgttggcattcctcctgccccaagaggcatgcctcagattgaagtcacatttgacatagatgccaatgggattgttactgtctctgccaaagacaagtctactgggaaagaacaacaaatcaccatccgttcatctggaggactctcagaagatgagattgataagatggtcaaagaagcagagttgcacgctcagaaagaccaggaaagaaaggctctcattgacatcagaaacagtgcagatacaagcatctacagcattgagaagagtttaggtgagtacagagataagatccccagtgaagtggccaaagagattgaagatgcagtatcggatttgagaacagcaatggcaggagacaatgctgacgaaattaaggcaaagcttgatgctgcaaacaaagctgtctccaagattggagagcacatttcaggtggttctagtggcggttcctcagccggaggttctcagggtggtgaacaggctcccgaggccgagtatgaggaagtcaagaaatgagacatttaggcttggttttgtagcatttgtttcttattaatcatcacataattggaagaatacaaggttacttattttgtatctaatgttgaaagccattttttctggaaggctctttaatttgtagcacttttggagtctgaagtccgaacacggctgtttgaac

SEQ ID NO: 16936 - protein, 385 aa, Glycine max
TESIDLSKDKLALQRLREAAEKAKIELSSTSQTEINLPFITADASGAKHLNITLTRSKFEALVNHLIERTKAPCKSCLKDANISIKEVDEVLLVGGMTRVPKVQEVVSAIFGKSPSKGVNPDEAVAMGAAIQGGILRGDVKELLLLDVTPLSLGIETLGGIFTRLINRNTTIPTKKSQVFSTAADNQTQVGIKVLQGEREMAVDNKSLGEFELVGIPPAPRGMPQIEVTFDIDANGIVTVSAKDKSTGKEQQITIRSSGGLSEDEIDKMVKEAELHAQKDQERKALIDIRNSADTSIYSIEKSLGEYRDKIPSEVAKEIEDAVSDLRTAMAGDNADEIKAKLDAANKAVSKIGEHISGGSSGGSSAGGSQGGEQAPEAEYEEVKK

SEQ ID NO: 16937 - protein, 289 aa, Glycine max
MTRVPKVQEVVSAIFGKSPSKGVNPDEAVAMGAAIQGGILRGDVKELLLLDVTPLSLGIETLGGIFTRLINRNTTIPTKKSQVFSTAADNQTQVGIKVLQGEREMAVDNKSLGEFELVGIPPAPRGMPQIEVTFDIDANGIVTVSAKDKSTGKEQQITIRSSGGLSEDEIDKMVKEAELHAQKDQERKALIDIRNSADTSIYSIEKSLGEYRDKIPSEVAKEIEDAVSDLRTAMAGDNADEIKAKLDAANKAVSKIGEHISGGSSGGSSAGGSQGGEQAPEAEYEEVKK

SEQ ID NO: 16938 - protein, 259 aa, Glycine max
MGAAIQGGILRGDVKELLLLDVTPLSLGIETLGGIFTRLINRNTTIPTKKSQVFSTAADNQTQVGIKVLQGEREMAVDNKSLGEFELVGIPPAPRGMPQIEVTFDIDANGIVTVSAKDKSTGKEQQITIRSSGGLSEDEIDKMVKEAELHAQKDQERKALIDIRNSADTSIYSIEKSLGEYRDKIPSEVAKEIEDAVSDLRTAMAGDNADEIKAKLDAANKAVSKIGEHISGGSSGGSSAGGSQGGEQAPEAEYEEVKK

SEQ ID NO: 16939 - DNA, 1381 bp, Glycine max
ttcccgcgttgccctgcttcctctggcatgtcgaaggacatgcgcgcgctcataatatgcttcgcggtggcttcgattttgttgctctcgtgtttgggcgtttacttgcaactcaagaggaggaaggaagatgcggagaaatacggagagcgttcgctgaaggaagaaacgtgggacgtgaaatcgttccacgtgttgagtttctcggagggagagattctagattccatcaagcaggagaatctcataggaaaaggaggctcggggaacgtgtacagggtcactctttccaatgggaaagaactcgcggtgaagcatatttggaacaccgatgtccctgcaaggagaaagaactcgtggagtagcacccccatgcttgggaacaagcacggtggtggtgggaagtcaaaggagtttgacgcggaggttcaggctttgagctccataaggcacgtgaatgttgtaaagcttttttgcagcataaccagcgaggattcgagcttgttggtgtacgagtatttgcccaatgggagcttgtgggaccggcttcacacgagtaggaagatggagcttgattgggaaaccaggtatgaaatcgcggttggggcagcaaaagggttggagtatttgcatcatgggtgtgagaagcctgtgattcatagagatgttaagtccagtaatattttgttggatgagtttttgaaacctaggattgcagattttggacttgctaaggttattcaggccaacgttgtcaaggattcctccactcatgtcattgccggaacccacggatacattgctcctgaatatggctacacgtacaaagtgaatgagaagagtgatgtgtacagctttggagtggtgttgatggaactagtaactgggaaaaggccaactgaaccagaatttggggaaaataaggacatagtgagctgggttcataacaaggcaaggagcaaagagggacttaggagtgcggtggattcgagaattccggagatgtatacagaggaagcttgcaaggtgttgagaacagcagtgctgtgcacggggactcttccggctttgagaccaaccatgagagctatggttcaaaagcttgaggatgccgagccttgtaaattggttgggattgttattaccaaagatgacagtgaaaagaaaataggagtcaacgacaagtaatgtattgtattccatcctccatagttggttacaaccggactgaagattatggatcatcatgaagttgaaggggaaccaaccacctccacgagttatctataattgatgtaaattttcccggaaagagggaacactgtaaaatattagtcttggcttctttaatgtctattttaaagtggaagacttgtgtagt

SEQ ID NO: 16940 - protein, 395 aa, Glycine max
FPRCPASSGMSKDMRALIICFAVASILLLSCLGVYLQLKRRKEDAEKYGERSLKEETWDVKSFHVLSFSEGEILDSIKQENLIGKGGSGNVYRVTLSNGKELAVKHIWNTDVPARRKNSWSSTPMLGNKHGGGGKSKEFDAEVQALSSIRHVNVVKLFCSITSEDSSLLVYEYLPNGSLWDRLHTSRKMELDWETRYEIAVGAAKGLEYLHHGCEKPVIHRDVKSSNILLDEFLKPRIADFGLAKVIQANVVKDSSTHVIAGTHGYIAPEYGYTYKVNEKSDVYSFGVVLMELVTGKRPTEPEFGENKDIVSWVHNKARSKEGLRSAVDSRIPEMYTEEACKVLRTAVLCTGTLPALRPTMRAMVQKLEDAEPCKLVGIVITKDDSEKKIGVNDK

SEQ ID NO: 16941 - protein, 386 aa, Glycine max
MSKDMRALIICFAVASILLLSCLGVYLQLKRRKEDAEKYGERSLKEETWDVKSFHVLSFSEGEILDSIKQENLIGKGGSGNVYRVTLSNGKELAVKHIWNTDVPARRKNSWSSTPMLGNKHGGGGKSKEFDAEVQALSSIRHVNVVKLFCSITSEDSSLLVYEYLPNGSLWDRLHTSRKMELDWETRYEIAVGAAKGLEYLHHGCEKPVIHRDVKSSNILLDEFLKPRIADFGLAKVIQANVVKDSSTHVIAGTHGYIAPEYGYTYKVNEKSDVYSFGVVLMELVTGKRPTEPEFGENKDIVSWVHNKARSKEGLRSAVDSRIPEMYTEEACKVLRTAVLCTGTLPALRPTMRAMVQKLEDAEPCKLVGIVITKDDSEKKIGVNDK

SEQ ID NO: 16942 - protein, 382 aa, Glycine max
MRALIICFAVASILLLSCLGVYLQLKRRKEDAEKYGERSLKEETWDVKSFHVLSFSEGEILDSIKQENLIGKGGSGNVYRVTLSNGKELAVKHIWNTDVPARRKNSWSSTPMLGNKHGGGGKSKEFDAEVQALSSIRHVNVVKLFCSITSEDSSLLVYEYLPNGSLWDRLHTSRKMELDWETRYEIAVGAAKGLEYLHHGCEKPVIHRDVKSSNILLDEFLKPRIADFGLAKVIQANVVKDSSTHVIAGTHGYIAPEYGYTYKVNEKSDVYSFGVVLMELVTGKRPTEPEFGENKDIVSWVHNKARSKEGLRSAVDSRIPEMYTEEACKVLRTAVLCTGTLPALRPTMRAMVQKLEDAEPCKLVGIVITKDDSEKKIGVNDK

SEQ ID NO: 16943 - DNA, 1588 bp, Glycine max
tcagctacgtaccccccccgcctgaacctgatcgatctctttaccagttgccacactacaccgagattccccctaaacccgtttgcgttgttgtttgcgaagaaatggcgactaagaggagcgtgggaacgttgaaggagggtgatttgaaagggaagagggtgttcgtgagggtcgatctgaacgtgcctttggatgacaaccttaacatcaccgatgacactagagtccgtgctgctgttcccaccatcaagtacttaactggtcatggagccaaagtgatcctttctagccacttgggacgtcctaaaggtgtaacacctaaatacagtttgaagcctcttgtgccaaggctgtctcaacttctcggaattgaggttacgatggcaaatgactctattggggaggaagttgagaagttggttgcacaacttccagaaggtggtgttttgcttctagagaatgtgaggttctataaggaggaagagaagaatgaccctgagtttgcaaagaagttggcttctcttgctgatctctacgtgaatgatgctttcggcactgcccacagagctcatgcttctacagaaggagtggccaaatacttgaagccctctgttgcaggattccttatgcagaaggaacttgactatctagttggagctgtgtcaaaccccaagagaccatttgctgctatcgttggtgggtcaaaggtgtcttccaagattggagttattgagtccttgttggagaaagttaacgttctcttgcttggtggaggaatgatctttaccttttacaaggctcagggttattcagttggttcatctcttgtggaggaagacaagcttagccttgcaactacacttctcgaaaaggccaaggctaaaggggtttctttgttgcttccaactgatgtggtcatagcagacaagtttgctgctgatgctaacagcaagactgtgccagcatcaagcatcccagacgggtggatgggattagatattggtcccgattccatcaagacatttggtgaagcattggataagacccagaccgtcatttggaatggaccaatgggtgtttttgagtttgataagtttgccacaggaacagaggccatagccaagaaactggcagagctgagtgggaagggagtaacgaccatcattggaggaggtgactctgttgccgctgtggagaaggttggtcttgcagacaagatgagccacatctccactggtggtggtgccagcttagagcttcttgaggggaagcaactccctggtgtccttgcccttgatgatgcttgagtaaacatcactagttcctctgtaatttgtgctttatattattattatggttggatttcagccaacagtggattgaggtacaatgagagagctcttgttgctcctgtagaggcttaatataggttaggtttcgaaataagagggttttgtggcatccttggtgttgcattgagctttgatctaattgttcttgaacaatgttcatttcaaaaggagttttactttgttagttatgttcctttagttttatcagtgaccaattttcaacttttcgtgtt

SEQ ID NO: 16944 - protein, 435 aa, Glycine max
SYVPPPPEPDRSLYQLPHYTEIPPKPVCVVVCEEMATKRSVGTLKEGDLKGKRVFVRVDLNVPLDDNLNITDDTRVRAAVPTIKYLTGHGAKVILSSHLGRPKGVTPKYSLKPLVPRLSQLLGIEVTMANDSIGEEVEKLVAQLPEGGVLLLENVRFYKEEEKNDPEFAKKLASLADLYVNDAFGTAHRAHASTEGVAKYLKPSVAGFLMQKELDYLVGAVSNPKRPFAAIVGGSKVSSKIGVIESLLEKVNVLLLGGGMIFTFYKAQGYSVGSSLVEEDKLSLATTLLEKAKAKGVSLLLPTDVVIADKFAADANSKTVPASSIPDGWMGLDIGPDSIKTFGEALDKTQTVIWNGPMGVFEFDKFATGTEAIAKKLAELSGKGVTTIIGGGDSVAAVEKVGLADKMSHISTGGGASLELLEGKQLPGVLALDDA

SEQ ID NO: 16945 - protein, 401 aa, Glycine max
MATKRSVGTLKEGDLKGKRVFVRVDLNVPLDDNLNITDDTRVRAAVPTIKYLTGHGAKVILSSHLGRPKGVTPKYSLKPLVPRLSQLLGIEVTMANDSIGEEVEKLVAQLPEGGVLLLENVRFYKEEEKNDPEFAKKLASLADLYVNDAFGTAHRAHASTEGVAKYLKPSVAGFLMQKELDYLVGAVSNPKRPFAAIVGGSKVSSKIGVIESLLEKVNVLLLGGGMIFTFYKAQGYSVGSSLVEEDKLSLATTLLEKAKAKGVSLLLPTDVVIADKFAADANSKTVPASSIPDGWMGLDIGPDSIKTFGEALDKTQTVIWNGPMGVFEFDKFATGTEAIAKKLAELSGKGVTTIIGGGDSVAAVEKVGLADKMSHISTGGGASLELLEGKQLPGVLALDDA

SEQ ID NO: 16946 - protein, 308 aa, Glycine max
MANDSIGEEVEKLVAQLPEGGVLLLENVRFYKEEEKNDPEFAKKLASLADLYVNDAFGTAHRAHASTEGVAKYLKPSVAGFLMQKELDYLVGAVSNPKRPFAAIVGGSKVSSKIGVIESLLEKVNVLLLGGGMIFTFYKAQGYSVGSSLVEEDKLSLATTLLEKAKAKGVSLLLPTDVVIADKFAADANSKTVPASSIPDGWMGLDIGPDSIKTFGEALDKTQTVIWNGPMGVFEFDKFATGTEAIAKKLAELSGKGVTTIIGGGDSVAAVEKVGLADKMSHISTGGGASLELLEGKQLPGVLALDDA

SEQ ID NO: 16947 - DNA, 1571 bp, Glycine max
aaatttattgaaagccgtttccgatggagttgttgcactgaaaggaaatgttaagtcattcggaattgttaccacaccgatgttgcactacatggttgtttgtgccaatacaaatggtgcctatggcacaccaaccgaagaaggttattatcagaaattaataactgcattcagagcattacgtggaacggaatgtgaacgtggcaattacaaaaataaacttttattcgatggttcgaatggcgttggtgcacgcaaaatgattcaatttcttaaacggatgaatggtgaactgaatgttgaggtttacaatcaaggtgaagggaaaattaatgaaaattgcggtgccgattatgtgaaaatcaaccaaacagtgccgattggaacgccagccaccgaaccatacacgcgttgtgtttcaattgatggtgatgctgatcgtattgtttacttctttaccgatgaaaacaataaattttatcttttggatggtgatcgaattgccactttgtatgctgggtatctgatggatttggttaccaagtgtggaattgatttgaagttgggcattgtacaaacggcatatgccaatggtggctcaactgattacatcgaacaagaattgaaagttccagtagcatgtgtgccgactggtgtgaagcatttacatcataaagcgcttgaatacgatattggagtgtattttgaagcaaatggacacggaaccattgtcttcagtgatcatgccaagcaatcaattcgtgcagttgctgataattcagaactaaacgaggagcagattgaagctgccaaaaaactgttgagcacaatagaagtaatcaatgaaacagtgggcgatgcaatttccgatatgtttttggtggaaatcattctacagtcaaatggttgggatgttaaagaatggtataatacatacgtcgatttgccaaatgtgcaaaagaaaatcagtgtaaccgatcgaaatgtaatcacaacaactgatgctgaacgtaaagtcgtaacaccagaaggattacaagatggtatcgatgaattggttgaaaaatatccacgcggaagatcgtttgtgaggccatcaggcactgaagatattgttcgagtctatgctgaagctgcttccaaggaggatgttgatcatttggctgcggaagtgtcacagttggtatatcgactagctggtggaattggaccagaaccacaatcaatcaacaacactgccaatggtttagccaattgaatcattgaaaattcaataatttctacccattcacactacaataaaaccttttataaaacaaaaaacaacaacaacaacaaagaattgcttcgcttgtaatgttagacacatgatattttccattgtttcatcttttttatacttgaactataaattcatatatattcttcttaaatatttcataaaaaaagcaatgtacaccgaaacatttcaatttttttgcttcgtattttatagtttcgtttaaatttttgttaataatttacccctctaagaacaattgacaaatacgaataaaattggatttaaatgg

SEQ ID NO: 16948 - protein, 418 aa, Glycine max
NLLKAVSDGVVALKGNVKSFGIVTTPMLHYMVVCANTNGAYGTPTEEGYYQKLITAFRALRGTECERGNYKNKLLFDGSNGVGARKMIQFLKRMNGELNVEVYNQGEGKINENCGADYVKINQTVPIGTPATEPYTRCVSIDGDADRIVYFFTDENNKFYLLDGDRIATLYAGYLMDLVTKCGIDLKLGIVQTAYANGGSTDYIEQELKVPVACVPTGVKHLHHKALEYDIGVYFEANGHGTIVFSDHAKQSIRAVADNSELNEEQIEAAKKLLSTIEVINETVGDAISDMFLVEIILQSNGWDVKEWYNTYVDLPNVQKKISVTDRNVITTTDAERKVVTPEGLQDGIDELVEKYPRGRSFVRPSGTEDIVRVYAEAASKEDVDHLAAEVSQLVYRLAGGIGPEPQSINNTANGLAN

SEQ ID NO: 16949 - protein, 392 aa, Glycine max
MLHYMVVCANTNGAYGTPTEEGYYQKLITAFRALRGTECERGNYKNKLLFDGSNGVGARKMIQFLKRMNGELNVEVYNQGEGKINENCGADYVKINQTVPIGTPATEPYTRCVSIDGDADRIVYFFTDENNKFYLLDGDRIATLYAGYLMDLVTKCGIDLKLGIVQTAYANGGSTDYIEQELKVPVACVPTGVKHLHHKALEYDIGVYFEANGHGTIVFSDHAKQSIRAVADNSELNEEQIEAAKKLLSTIEVINETVGDAISDMFLVEIILQSNGWDVKEWYNTYVDLPNVQKKISVTDRNVITTTDAERKVVTPEGLQDGIDELVEKYPRGRSFVRPSGTEDIVRVYAEAASKEDVDHLAAEVSQLVYRLAGGIGPEPQSINNTANGLAN

SEQ ID NO: 16950 - protein, 388 aa, Glycine max
MVVCANTNGAYGTPTEEGYYQKLITAFRALRGTECERGNYKNKLLFDGSNGVGARKMIQFLKRMNGELNVEVYNQGEGKINENCGADYVKINQTVPIGTPATEPYTRCVSIDGDADRIVYFFTDENNKFYLLDGDRIATLYAGYLMDLVTKCGIDLKLGIVQTAYANGGSTDYIEQELKVPVACVPTGVKHLHHKALEYDIGVYFEANGHGTIVFSDHAKQSIRAVADNSELNEEQIEAAKKLLSTIEVINETVGDAISDMFLVEIILQSNGWDVKEWYNTYVDLPNVQKKISVTDRNVITTTDAERKVVTPEGLQDGIDELVEKYPRGRSFVRPSGTEDIVRVYAEAASKEDVDHLAAEVSQLVYRLAGGIGPEPQSINNTANGLAN

SEQ ID NO: 16951 - DNA, 1472 bp, Glycine max
ggttcaggcttgccatgatatggttcctcctgatgcagttgaacccttgttcaaacaaatagtaaatcaatttgtacatgaccgttcacgtccagaggctattactgttggaataaatgcagtcagggagatatgcatgcgcatgccattgttaatgaatgaagacttgctacaagaccttgcgctatataagaagtcacgtgagaaggcagtttcaatagcagctcgatctctgattgggttattcagagaggtttgcccctcactgctagttaagaaggaccgtgggcggcctattgaccctaaggcaagaccaaaggcctatggagagcagaatgttgcgactgacgttcctgatgttgagttattgcagacggctattgacaatgatgatgagcaggagagtgatcattctgatggttctgcatgcagtgtctctgacaatgaccaggaaaatgatttgatgagtataaatgatgacgatgacaatgatgatgagaaccagttatgcagtgatgatcctgaaagtgatgatgaagccaaagatagtgatgttatatcagacgatgacgacgagagaagttctgatgacgaagctgatgttagtgatgctgatgaagttaagggggatgacattgaagacaatgaacaagctgatggagaggatagtgatgtttcagaacatgaagaagatggtgatctgcattctttaagtgatgatggacttgtgacaaaaagtacaatgaaagactcagcaaaaaagaggaagtttactgattttaatggtcaactgatagctgctgatacaagtctccgggctctgaagaaattagctgggagacaaatgggggatgtcataccagaatctaacgacggaattctttctaacgaagacttcaagaggatcaaagaactgaaggcaaaaagtgaggcaaaaaatgcgttggctcagcaagggctagcgaagtcagctgcaactaaggttccaagctctggtcaactaaatctaaagcgagtggatggtaccatgcttgaagctcacataaggaaaaagttgaacaaggatgaaaggttggcattggttagagcaggaagggaggaaagaggaaaataccaagctcgaactgctgtgaaacagaataagacgggtgggttaagcaacagacaaaaggaacacaagaagaaaatgcccttggctgcaaagagagataaggtatcaagaactcggatagagaaaaagaggaaaaatcagcgatctggcaaacagttccgtggaaagaaagcgtggaagcaataaatatggactgagatttttgttaacgaatccttttcaagcattatttatttattattattgttgttcccaatctcatttccgtccgcaaccggtagatgatggtaatggttgtttcttttgttacaagaaaactcccgacaaatattattcaatgtgaaaaatgatcatgtttatc

SEQ ID NO: 16952 - protein, 431 aa, Glycine max
VQACHDMVPPDAVEPLFKQIVNQFVHDRSRPEAITVGINAVREICMRMPLLMNEDLLQDLALYKKSREKAVSIAARSLIGLFREVCPSLLVKKDRGRPIDPKARPKAYGEQNVATDVPDVELLQTAIDNDDEQESDHSDGSACSVSDNDQENDLMSINDDDDNDDENQLCSDDPESDDEAKDSDVISDDDDERSSDDEADVSDADEVKGDDIEDNEQADGEDSDVSEHEEDGDLHSLSDDGLVTKSTMKDSAKKRKFTDFNGQLIAADTSLRALKKLAGRQMGDVIPESNDGILSNEDFKRIKELKAKSEAKNALAQQGLAKSAATKVPSSGQLNLKRVDGTMLEAHIRKKLNKDERLALVRAGREERGKYQARTAVKQNKTGGLSNRQKEHKKKMPLAAKRDKVSRTRIEKKRKNQRSGKQFRGKKAWKQ

SEQ ID NO: 16953 - protein, 425 aa, Glycine max
MVPPDAVEPLFKQIVNQFVHDRSRPEAITVGINAVREICMRMPLLMNEDLLQDLALYKKSREKAVSIAARSLIGLFREVCPSLLVKKDRGRPIDPKARPKAYGEQNVATDVPDVELLQTAIDNDDEQESDHSDGSACSVSDNDQENDLMSINDDDDNDDENQLCSDDPESDDEAKDSDVISDDDDERSSDDEADVSDADEVKGDDIEDNEQADGEDSDVSEHEEDGDLHSLSDDGLVTKSTMKDSAKKRKFTDFNGQLIAADTSLRALKKLAGRQMGDVIPESNDGILSNEDFKRIKELKAKSEAKNALAQQGLAKSAATKVPSSGQLNLKRVDGTMLEAHIRKKLNKDERLALVRAGREERGKYQARTAVKQNKTGGLSNRQKEHKKKMPLAAKRDKVSRTRIEKKRKNQRSGKQFRGKKAWKQ

SEQ ID NO: 16954 - protein, 386 aa, Glycine max
MRMPLLMNEDLLQDLALYKKSREKAVSIAARSLIGLFREVCPSLLVKKDRGRPIDPKARPKAYGEQNVATDVPDVELLQTAIDNDDEQESDHSDGSACSVSDNDQENDLMSINDDDDNDDENQLCSDDPESDDEAKDSDVISDDDDERSSDDEADVSDADEVKGDDIEDNEQADGEDSDVSEHEEDGDLHSLSDDGLVTKSTMKDSAKKRKFTDFNGQLIAADTSLRALKKLAGRQMGDVIPESNDGILSNEDFKRIKELKAKSEAKNALAQQGLAKSAATKVPSSGQLNLKRVDGTMLEAHIRKKLNKDERLALVRAGREERGKYQARTAVKQNKTGGLSNRQKEHKKKMPLAAKRDKVSRTRIEKKRKNQRSGKQFRGKKAWKQ

SEQ ID NO: 16955 - DNA, 1093 bp, Glycine max
ttatgaatttactaatattcaggcttcctttaatggtgacctaccattggaggaaaatggaaacagcttgctagggcagttaaatgaggatcaaattgttgcttctggcatggattgtgatgacaaggatgcaaggcctgactgcatatttattgaaaatgctaaagtagattgcttacaatctgaagcacttggattagatgaaaaagagagtttgttgaaagatgaagaaatccctgtctgtcaggaagctgaactacaaagtacaatgtgccctgaaattaggagtcctttagtagatcagaatgatgaaaatgacatgattgctaatgacacagggtttttgaatgttggtgatgatgagataattgaggatgatgatgattatcaatcatgtgctgaaggaactaaccttgaaaatagcggatggtcttccagaaccagggctgttgccaattatctgcagactgtgtttgataaggaagatctacatggaagaaaggagttgcatcttaacaatttattagttggtaaaacacggaaggaagcatctcggatgttttttgaaactctggttctcaagacaagggattatgtccatgtagaacagacaaaaccctttgccaatgttagcataaaacctcgaatgaagcttatgaagtcagatttctgaaacctcatgtaggagtggcagatatagttgtaaagatccattcggtggtagtttggcactttggctggaatctgcagggttgggataatattttcaacattttctccccgattctagctgtggcttttcatttataattttttggagataggatttagctgttcagttttagttcttcaatggccggggggttgaagtgggcacttgtaccatcctattgattattctgggtcctaatgtatatatttttgtaaaatgtcataatttgtaacagacagatgctaatttgtactggtatgttgtttaaacgcatccctccatgtaagaatgttctgctttctctaggcatcagatttatgtaacagaaagcaccttgtaatttaactgttcggggacaaggtacatcatttctgtactttt

SEQ ID NO: 16956 - protein, 223 aa, Glycine max
YEFTNIQASFNGDLPLEENGNSLLGQLNEDQIVASGMDCDDKDARPDCIFIENAKVDCLQSEALGLDEKESLLKDEEIPVCQEAELQSTMCPEIRSPLVDQNDENDMIANDTGFLNVGDDEIIEDDDDYQSCAEGTNLENSGWSSRTRAVANYLQTVFDKEDLHGRKELHLNNLLVGKTRKEASRMFFETLVLKTRDYVHVEQTKPFANVSIKPRMKLMKSDF

SEQ ID NO: 16957 - protein, 187 aa, Glycine max
MDCDDKDARPDCIFIENAKVDCLQSEALGLDEKESLLKDEEIPVCQEAELQSTMCPEIRSPLVDQNDENDMIANDTGFLNVGDDEIIEDDDDYQSCAEGTNLENSGWSSRTRAVANYLQTVFDKEDLHGRKELHLNNLLVGKTRKEASRMFFETLVLKTRDYVHVEQTKPFANVSIKPRMKLMKSDF

SEQ ID NO: 16958 - protein, 134 aa, Glycine max
MCPEIRSPLVDQNDENDMIANDTGFLNVGDDEIIEDDDDYQSCAEGTNLENSGWSSRTRAVANYLQTVFDKEDLHGRKELHLNNLLVGKTRKEASRMFFETLVLKTRDYVHVEQTKPFANVSIKPRMKLMKSDF

SEQ ID NO: 16959 - DNA, 1232 bp, Glycine max
gagtgaagtgcgaaggacaatgagtgttcggtccaaaaacttgaactctgtattctatgcagattcgtaccatcccattcaagctggcagcatcgacggcaccgatgttgttcctcacgataacgccgtttatcgcgctcaactctgttcctccatcggcctctatgacccatttggtgatcccaaggccactggagacccttattgcactctctttgtcgctcgtctctctcgcctcaccaccgaagatgatctccgcaaggtcatgagtaagtatggtcgagtgaagaacttacgcttggttagggacattgtgacgggagcttctcgtggttatgcttttgttgaatacgagactgaaagggagatgcgacgagcatatatggatgctcatcatttgattgttgatgattctgaaatcatagttgattacaacagacagcaattgatgcctggatggattcctagaaggttaggtggtggtcttagtggtaagaaggaatcgggacaacttcgttttggggggagagaaaagccatttcgtgcacccctgaaaccaattccatatgaggagttgaagaagcttggcatcccccctcctcccgagggaagatacatgtcacgctttcaggtgccatcgcctcctagaagtgaaaggagcctttcagacagggaagaagactctcatagccacagaaggggatctaatgacaggaacaggaacaagacggaagatggactcagaagttcagtggacattgaggaagggcattataggagttcaagtcatcgtgataaccactcacgtggaaggagctctatggagaggagtggtcgttaccatgaccggagttcatctgagaaagaacatcgacacgggagttctactgacaaagacaaacattctcagaagagaaaagaaagtgacaggagttcacttgagaaagaacgtcgacacaggagttctactgacaaagacaaacattctcggaagagaaaagaaagagatgaacggtctcaaaggcgggaaaaatatagtcaccattcccctcacaaggactaagctgtacaactcattattatcacccttctgttgtgcttttgtgctttgtgtatggtatatgcatgggagaaatgggaatgcaaagtggaaatcctcaaagatttctcaataaacgcgagactggtgcatgtataggttcaatgataatcatgcttcggtttatattttt

SEQ ID NO: 16960 - protein, 353 aa, Glycine max
SEVRRTMSVRSKNLNSVFYADSYHPIQAGSIDGTDVVPHDNAVYRAQLCSSIGLYDPFGDPKATGDPYCTLFVARLSRLTTEDDLRKVMSKYGRVKNLRLVRDIVTGASRGYAFVEYETEREMRRAYMDAHHLIVDDSEIIVDYNRQQLMPGWIPRRLGGGLSGKKESGQLRFGGREKPFRAPLKPIPYEELKKLGIPPPPEGRYMSRFQVPSPPRSERSLSDREEDSHSHRRGSNDRNRNKTEDGLRSSVDIEEGHYRSSSHRDNHSRGRSSMERSGRYHDRSSSEKEHRHGSSTDKDKHSQKRKESDRSSLEKERRHRSSTDKDKHSRKRKERDERSQRREKYSHHSPHKD

SEQ ID NO: 16961 - protein, 347 aa, Glycine max
MSVRSKNLNSVFYADSYHPIQAGSIDGTDVVPHDNAVYRAQLCSSIGLYDPFGDPKATGDPYCTLFVARLSRLTTEDDLRKVMSKYGRVKNLRLVRDIVTGASRGYAFVEYETEREMRRAYMDAHHLIVDDSEIIVDYNRQQLMPGWIPRRLGGGLSGKKESGQLRFGGREKPFRAPLKPIPYEELKKLGIPPPPEGRYMSRFQVPSPPRSERSLSDREEDSHSHRRGSNDRNRNKTEDGLRSSVDIEEGHYRSSSHRDNHSRGRSSMERSGRYHDRSSSEKEHRHGSSTDKDKHSQKRKESDRSSLEKERRHRSSTDKDKHSRKRKERDERSQRREKYSHHSPHKD

SEQ ID NO: 16962 - protein, 265 aa, Glycine max
MSKYGRVKNLRLVRDIVTGASRGYAFVEYETEREMRRAYMDAHHLIVDDSEIIVDYNRQQLMPGWIPRRLGGGLSGKKESGQLRFGGREKPFRAPLKPIPYEELKKLGIPPPPEGRYMSRFQVPSPPRSERSLSDREEDSHSHRRGSNDRNRNKTEDGLRSSVDIEEGHYRSSSHRDNHSRGRSSMERSGRYHDRSSSEKEHRHGSSTDKDKHSQKRKESDRSSLEKERRHRSSTDKDKHSRKRKERDERSQRREKYSHHSPHKD

SEQ ID NO: 16963 - DNA, 1575 bp, Glycine max
gtcattgacttcatcaactctttgcaggacgatgagtactcctccagttgttgagcgcgtttcagaatgcttcatcaagccgcagcactccaaccatgaatcaaaccaaatctgctacttaacaccttgggatattgctatgttgtctgctcactatatccaaaagggccttctcttcaagaagccctcatcaccacttgttagtcacaataatttcatagagaacctgttgcagaagctcaagcactctctttctctcaccctcttccatttctatcctttggctggtcgccttgtcacccaccaaacccatgaccctcccttctatgctgttttcgttgattgcaacaacagtgatggagccagattcatccatgcaactttagatatgaccatatctgatatcctctctcccgttgacgttccacccattgttcaatcattgtttgaccaccacaaagctgtcaaccatgacggtcacacaatgccgttgttgtccgtccaagtcactgaatttgtggatggtgttttcataggttgttccatgaaccacactcttggtgatggcacttcttattggaatttcttcaacacatggtctcagatctttcaagttcaaggccatgaacatgatgttcccatttcgcacccacccattcacaatcgctggtttccagagggttgcggtccattaatcaaccttcccttcaaacatcacgacgattttataaacagatatgaaacaccgttgctgagagagagaatcttccacttctcagcagagtctattgcaaaactgaaagcaaaggctaactcggagtgcaacacaaccaaaatctcatcgttccaatcattatcggcacttgtttggagatgcataactcgtgcgcggcgcttgccgtatgatcaaagaacaagttgcaagttgtccgcaaacaacagaacaagaatggaaccaccactgcctcaggagtactttggaaactcaatttatacactgaatgcaggaaccgccacctcagggaaattgcttgagaatggtataggttgggcagcatggaagttgcacaaatcggttgtaaaccataacgacagagcggtgttggaaacgctcaaagagtggttagagagtcctctgatatatgatcttggtcgttattttgacccgtactgtgtgatgatgggtagctcacccaggttcaacatgtatgggaatgagtttggaatgggaaaggcagttgcacttagaagtgggtatgccaacaaatttgatggaaaagtaacatcatacccaggccatgaaggaggaggaagcgtagatttggaagtgtgtctttcgccagctgtaatgagtgcactggaatcggacgaggagttcatgaatattgctctagtttctgtttacaatcctctctagtcattattcactgttacttccatcgcccccataataatcatttgtcctagaataatccgttatctttaattagtattattttaaaatatatcatgttaatgtgttttatgtattgtgaattcatatatcatataataacaacacgtgatttattttgt

SEQ ID NO: 16964 - protein, 471 aa, Glycine max
SLTSSTLCRTMSTPPVVERVSECFIKPQHSNHESNQICYLTPWDIAMLSAHYIQKGLLFKKPSSPLVSHNNFIENLLQKLKHSLSLTLFHFYPLAGRLVTHQTHDPPFYAVFVDCNNSDGARFIHATLDMTISDILSPVDVPPIVQSLFDHHKAVNHDGHTMPLLSVQVTEFVDGVFIGCSMNHTLGDGTSYWNFFNTWSQIFQVQGHEHDVPISHPPIHNRWFPEGCGPLINLPFKHHDDFINRYETPLLRERIFHFSAESIAKLKAKANSECNTTKISSFQSLSALVWRCITRARRLPYDQRTSCKLSANNRTRMEPPLPQEYFGNSIYTLNAGTATSGKLLENGIGWAAWKLHKSVVNHNDRAVLETLKEWLESPLIYDLGRYFDPYCVMMGSSPRFNMYGNEFGMGKAVALRSGYANKFDGKVTSYPGHEGGGSVDLEVCLSPAVMSALESDEEFMNIALVSVYNPL

SEQ ID NO: 16965 - protein, 461 aa, Glycine max
MSTPPVVERVSECFIKPQHSNHESNQICYLTPWDIAMLSAHYIQKGLLFKKPSSPLVSHNNFIENLLQKLKHSLSLTLFHFYPLAGRLVTHQTHDPPFYAVFVDCNNSDGARFIHATLDMTISDILSPVDVPPIVQSLFDHHKAVNHDGHTMPLLSVQVTEFVDGVFIGCSMNHTLGDGTSYWNFFNTWSQIFQVQGHEHDVPISHPPIHNRWFPEGCGPLINLPFKHHDDFINRYETPLLRERIFHFSAESIAKLKAKANSECNTTKISSFQSLSALVWRCITRARRLPYDQRTSCKLSANNRTRMEPPLPQEYFGNSIYTLNAGTATSGKLLENGIGWAAWKLHKSVVNHNDRAVLETLKEWLESPLIYDLGRYFDPYCVMMGSSPRFNMYGNEFGMGKAVALRSGYANKFDGKVTSYPGHEGGGSVDLEVCLSPAVMSALESDEEFMNIALVSVYNPL

SEQ ID NO: 16966 - protein, 425 aa, Glycine max
MLSAHYIQKGLLFKKPSSPLVSHNNFIENLLQKLKHSLSLTLFHFYPLAGRLVTHQTHDPPFYAVFVDCNNSDGARFIHATLDMTISDILSPVDVPPIVQSLFDHHKAVNHDGHTMPLLSVQVTEFVDGVFIGCSMNHTLGDGTSYWNFFNTWSQIFQVQGHEHDVPISHPPIHNRWFPEGCGPLINLPFKHHDDFINRYETPLLRERIFHFSAESIAKLKAKANSECNTTKISSFQSLSALVWRCITRARRLPYDQRTSCKLSANNRTRMEPPLPQEYFGNSIYTLNAGTATSGKLLENGIGWAAWKLHKSVVNHNDRAVLETLKEWLESPLIYDLGRYFDPYCVMMGSSPRFNMYGNEFGMGKAVALRSGYANKFDGKVTSYPGHEGGGSVDLEVCLSPAVMSALESDEEFMNIALVSVYNPL

SEQ ID NO: 16967 - DNA, 1320 bp, Glycine max
aaatctatcttactataggttgattcttaccctcttctgttctctatatgtctctatttcttttctctctctataaataagcagccttacaactcttcttaatcccatcaaatcgaaccctttttaaacgctcaaatacaaatttctggcaccaaatccttcccactctcctcaattccattcatttcaactcaacaatctctcagatccgtcaaacaaaatataaaagatagaaaaccctagttctgtaaatatataaaggaaaaaagctttttgctggttttgaggcatagcattaaattggattttgattattcatggctgaacaagcattggaaggtagccaacctgtggatttaacaaagcacccttctgggattgtgcctacccttcaaaatattgtgtcaacggtcaatttggactgtaagttggagcttaaatcaattgcacttcaagctcgaaatgcagaatacaatcccaagcgttttgctgctgttattatgaggatcagggaaccaaaaactactgcactcatttttgcatctggcaagatggtctgtactggagccaagagtgagcaacagtctaaattggcggcaaggaagtatgctagaattattcaaaagcttggtttcccagctaaatttaaggattttaagattcagaacattgttggctcttgtgatgtcaagttccccattcgacttgagggtcttgcctattcccatggtgctttctcaagttatgaaccagagctgtttccaggactaatctatcgcatgaagcaacccaagatagtcttgcttatatttgtctctggaaaaattgttctgacaggagccaaggttagagatgagacttacacagcttttgagaacatatatccagtgcttactgagttcaggaaaaaccaacaatgattactactgtcaagagagcaggagcaaggcttgattgaactgtaaatatgaagaccagagatagaaatatctgtaatctggattgagttttaataagacacctgtgtttgttctgtctttttctctcttttaagaaaagggatcctgctttagtaaagtggaagaaaaaaaaaaaccgtgtattgaatttgactgtagaaaaagagatttataagaggcagaatgaaaagaaaaagtggaagcctgtgcaaatcatgaataactttcactgaagtggaaactatttgtggttcatttcaactatgagtaactttgttttttggctaatcaaacactacatttgataactatgcttcatgcttacaataacgttgtaattgaacaaaggaattggtttatc

SEQ ID NO: 16968 - protein, 200 aa, Glycine max
MAEQALEGSQPVDLTKHPSGIVPTLQNIVSTVNLDCKLELKSIALQARNAEYNPKRFAAVIMRIREPKTTALIFASGKMVCTGAKSEQQSKLAARKYARIIQKLGFPAKFKDFKIQNIVGSCDVKFPIRLEGLAYSHGAFSSYEPELFPGLIYRMKQPKIVLLIFVSGKIVLTGAKVRDETYTAFENIYPVLTEFRKNQQ

SEQ ID NO: 16969 - protein, 139 aa, Glycine max; identical to SEQ ID NO: 12753

SEQ ID NO: 16970 - protein, 122 aa, Glycine max; identical to SEQ ID NO: 12754

SEQ ID NO: 16971 - DNA, 1227 bp, Glycine max
gattgtcatttgtaccgtaatatatagacagcaaaaacgcagaaaccgcgaaattgtgcctaaaatcgatgacttcgcaaaatggtgacgagagccaccacccaccaccgcaagcgcaagctgaaaaggttactgaagttggatggtacgttcttggcgaggatcaacaacagattggcccttacgccttctctgagttgtgccgtgagactttgggcacatttgttttatggtgaaattgaaacctctattgtcatatttacatggaaattggtgtggatagagcatttcttgaatggatacctctccgaaaatacgtttgtgtggtctgaaggaagtagtgagtggcagcccttgtcctcggtttctgacctgtgggctcaaattaaccggcagggacctgattcttcaactactgtgtctgctcctgatgttgatgagtttgaaagatggcaaaaggagattcaggaggtggaggcacaggtggaaggttcggaatttggatccttatctggcaatgttggtggtactggggcaggagaagattctgagagaccttcgacgccacctgagggtgaagaaggatttactgatgatgatggaactgtatataagtgggataggagtcttagagcttgggttccccaggattatccaactggcagcactaagccttatggggttgaagagatgaccttcttggaagaagaggaagtttttccaacaatacctaattctgatgcctctgaaaagtttgaagatagtccaaaattgagtgtttctgtgcctcccttaaaggaagaagaaaataataccaatgtgatatcaggtggaaaaaggatgctttcagatcaacaaacagacaagaaggaagctaataaaccccctgatagttggtttgaattaaagattaatacgcatgtttatgtcactgggttgcctgaggatgttaccactgatgaaattgtggaggtattttccaaatgtggaattataaaggaggaccccgaaaccaaaagacctcgtgtgaagctctatgttgataaagagacaggaaggaaaaagggagatgctctggttacatatcttaaggaaccttctgtggctttggcaattcaaattttggatggagcacctcttcgccctggtggcaagattcctatgtctgtcagccaggctaaatttgagcagaaaggagacaagtttgtatccaagcaagtagacggc

SEQ ID NO: 16972 - protein, 382 aa, Glycine max
MVTRATTHHRKRKLKRLLKLDGTFLARINNRLALTPSLSCAVRLWAHLFYGEIETSIVIFTWKLVWIEHFLNGYLSENTFVWSEGSSEWQPLSSVSDLWAQINRQGPDSSTTVSAPDVDEFERWQKEIQEVEAQVEGSEFGSLSGNVGGTGAGEDSERPSTPPEGEEGFTDDDGTVYKWDRSLRAWVPQDYPTGSTKPYGVEEMTFLEEEEVFPTIPNSDASEKFEDSPKLSVSVPPLKEEENNTNVISGGKRMLSDQQTDKKEANKPPDSWFELKINTHVYVTGLPEDVTTDEIVEVFSKCGIIKEDPETKRPRVKLYVDKETGRKKGDALVTYLKEPSVALAIQILDGAPLRPGGKIPMSVSQAKFEQKGDKFVSKQVDG

SEQ ID NO: 16973 - DNA, 1850 bp, Glycine max
tctctcccctcaccctctcctctctcctcaacgtccttccctctctctccctctccgccaacctccaccgccacctactccatgtcccactctccacccccttccgtcagtacactcgtctcaccgtctgcgtcgatagtgcttcccaggctcaagccctcaattcgggtaaccctattttgaaaacctatgatctggtcgctgttaagcctttgaatcagatcgcgtttgatcttgcatgtgagagaatggaggtggatattatctctattgatttctcagctaagttgccctttagattgaagcaacctatggttaaagctgctactcaggtttgttcttgactctccttgccttttaatttcgtaaaactgaaaaaagaaggtgaaaaattaacatgtggcttgttgatatgcagcgtggggtttgttttgaagtcacgtactctggtttatttgctgatattcaaataaggagacagctaatttccagtgccaagttgttgatggattggactcggggacaaaacattgtattttctagtgctgctcctacggtgaatgagcttagagggccctgtgatgttgcaaacttgttgtcattgtttgggctttccaaggagcgagctaatgcggctatttctaaaaactgtaggattcttttagctaattctttaaggaaaaagcgattttacaaagagacaataagagtagaagttttatcatcagatgcagcatctcattctaaggaagaccggtatcaagagttactaaagtgggaccctatctccagtggtgaaggtgatatcctgttggatgatatgcaaaaatcttctctagtctcctgtaaagcatcaaaacctgcaaaagccattgactttgcttccgtggtcaaaagccttccatctcatggttttgaaatcaaggatatcttacctgcaaataatgctttccctgtctgtggagacaataaaataaatttcccgccagttgccgaaaaactaagtcagtcaacacatgtacctaacaatttaactgagaagtccaacatacttgtttgtcctgagcaagatgaaaactccgtaccagatgctataacaagaggtcaaattttgaggtgtgacaacatttttgagaataatatatgtagtggaacaactgatgctgtcaatttgaaggagacaaacaccccggcagccattgactctatttcagtggctgagggccttccgtcccctggttttcatgataaatgtaataatgagaaaagttctgatgttaatttaaatgaacaaattgggaggatttgtgaagctttgccaaatgaagatttaaaaattgcagagcaaccagtcttggagttaaacacatcaatttctgatacttcgatggaggacaaacgggaaactgatgcacttgaacttgatgagatgaaaatggaagatgattccactgctgcaaaacatttattgccagatgttataatgaaagataaaaggcttagtgaagtgagcactgattctgatcagtttgcctcaggtggattgagagtgaagcgaaggacgcctcagggactacctttattccccttcaggcgattgctgaatccaacgccttttaagaagaaaggtaaaacaagcaagagcagaactaagctaaagtaatttttttcgggattatcattgttacatggcttatatgtgagctaattctttgtaacgtctattaatactagcatataatgttagtaaaattttataattttatatatcttgttatgtaatatggaaaattatatttgattgtgatatgtttatatcacaattcagtaagaaattctaaattagtgtc

SEQ ID NO: 16974 - protein, 421 aa, Glycine max
MWLVDMQRGVCFEVTYSGLFADIQIRRQLISSAKLLMDWTRGQNIVFSSAAPTVNELRGPCDVANLLSLFGLSKERANAAISKNCRILLANSLRKKRFYKETIRVEVLSSDAASHSKEDRYQELLKWDPISSGEGDILLDDMQKSSLVSCKASKPAKAIDFASVVKSLPSHGFEIKDILPANNAFPVCGDNKINFPPVAEKLSQSTHVPNNLTEKSNILVCPEQDENSVPDAITRGQILRCDNIFENNICSGTTDAVNLKETNTPAAIDSISVAEGLPSPGFHDKCNNEKSSDVNLNEQIGRICEALPNEDLKIAEQPVLELNTSISDTSMEDKRETDALELDEMKMEDDSTAAKHLLPDVIMKDKRLSEVSTDSDQFASGGLRVKRRTPQGLPLFPFRRLLNPTPFKKKGKTSKSRTKLK

SEQ ID NO: 16975 - protein, 416 aa, Glycine max
MQRGVCFEVTYSGLFADIQIRRQLISSAKLLMDWTRGQNIVFSSAAPTVNELRGPCDVANLLSLFGLSKERANAAISKNCRILLANSLRKKRFYKETIRVEVLSSDAASHSKEDRYQELLKWDPISSGEGDILLDDMQKSSLVSCKASKPAKAIDFASVVKSLPSHGFEIKDILPANNAFPVCGDNKINFPPVAEKLSQSTHVPNNLTEKSNILVCPEQDENSVPDAITRGQILRCDNIFENNICSGTTDAVNLKETNTPAAIDSISVAEGLPSPGFHDKCNNEKSSDVNLNEQIGRICEALPNEDLKIAEQPVLELNTSISDTSMEDKRETDALELDEMKMEDDSTAAKHLLPDVIMKDKRLSEVSTDSDQFASGGLRVKRRTPQGLPLFPFRRLLNPTPFKKKGKTSKSRTKLK

SEQ ID NO: 16976 - protein, 385 aa, Glycine max
MDWTRGQNIVFSSAAPTVNELRGPCDVANLLSLFGLSKERANAAISKNCRILLANSLRKKRFYKETIRVEVLSSDAASHSKEDRYQELLKWDPISSGEGDILLDDMQKSSLVSCKASKPAKAIDFASVVKSLPSHGFEIKDILPANNAFPVCGDNKINFPPVAEKLSQSTHVPNNLTEKSNILVCPEQDENSVPDAITRGQILRCDNIFENNICSGTTDAVNLKETNTPAAIDSISVAEGLPSPGFHDKCNNEKSSDVNLNEQIGRICEALPNEDLKIAEQPVLELNTSISDTSMEDKRETDALELDEMKMEDDSTAAKHLLPDVIMKDKRLSEVSTDSDQFASGGLRVKRRTPQGLPLFPFRRLLNPTPFKKKGKTSKSRTKLK

SEQ ID NO: 16977 - DNA, 1473 bp, Glycine max
aatgtttttaccttgcaggcatgtgatcaagaaaaagagcaaggaagcctttattgcatttaaagaagccttgaaattcaagttcatatttatccctttaattaaatttcctttgcatcataaatatgggcatatgcttacataatgctcacatatattcaataatgtagtgtgtgtgtacgagttgggggaatagcaattggcgttaaaaagaaaagtttccctcacatagcttttgtttttttcccttggaaagccaaatttccccgttgaatgtggtttggaagtgtttccaaacacacccgtattggttcataatcatttgatgaagccttgaaattcaagtttcttattcatccttctattaaacttcctttgcgagtttgcgtcataaatatgggcataagcttgcatccgcagatgcatacatacatacatacatacattgcaaattcaacggtcttagaataaatagtaagttagtaacacaatgatatttggtaagacggacgaaacagctggcaactatgggagaactacagccatgctgctgttgacattggcaatatcagtcaggcactggaaggtgtccagatgattttgaatatgagcaataataagagagttgattgcgaattattggaaagaatcactaaggaggtggaaaagcggctttcaacaagtaacgtgccccctttgataactgacaataagcctaaaacagatcaattctgcattgttgatcctggatcagaaaatcaagagcaagtatctggagcatctgttacaggaagatcacgtgaaactgaacaattattgttattacttggaaaagttttacagcagataattaaaactgggagtggatgtggaccagaaatctggggcttatatgccaaatggcacagaattaatggagatctcatgatgtgttctgaagccctcttaaagcaagttaggtcactccagggatctgatacatggaaggaccgagaccggttcaaaaagtttgcaaaagtttctttggaactttgccaggtgtacgtggaatttttttcatctactggtagtattaaacaattgtctacagctgagatgcacttgaagaatgtcatcagacaggctcagagcttcaccgatacagaagagttcagggatcttcaggcttgctatgatgaagtgaaaattaaactccaatcgaactcaatgcctagctaaaatcttgttgaaggtattattcgatttatcatgcaagttctaacctgctgaggcatctattaagagtctctgtgcatgtagcttcctaattttcatcaacagggaatgtcaagaggttgctttcagaatcttgaatgtggcaaatatttaatatcactgattggagttaaaggacgtgcttcgtatcatatgatatcgtatgtattgcatattaaattaaacattctcaaatgaaagcgcaattttgtcatggcc

SEQ ID NO: 16978 - protein, 207 aa, Glycine max
MILNMSNNKRVDCELLERITKEVEKRLSTSNVPPLITDNKPKTDQFCIVDPGSENQEQVSGASVTGRSRETEQLLLLLGKVLQQIIKTGSGCGPEIWGLYAKWHRINGDLMMCSEALLKQVRSLQGSDTWKDRDRFKKFAKVSLELCQVYVEFFSSTGSIKQLSTAEMHLKNVIRQAQSFTDTEEFRDLQACYDEVKIKLQSNSMPS

SEQ ID NO: 16979 - protein, 203 aa, Glycine max
MSNNKRVDCELLERITKEVEKRLSTSNVPPLITDNKPKTDQFCIVDPGSENQEQVSGASVTGRSRETEQLLLLLGKVLQQIIKTGSGCGPEIWGLYAKWHRINGDLMMCSEALLKQVRSLQGSDTWKDRDRFKKFAKVSLELCQVYVEFFSSTGSIKQLSTAEMHLKNVIRQAQSFTDTEEFRDLQACYDEVKIKLQSNSMPS

SEQ ID NO: 16980 - DNA, 1283 bp, Glycine max
ttcatgtgctttacagtgctattacaatgatgcttggaagactaaagatacgtggatggaaggcatgggaagcggagacttcaactcataattatgagttcgccaatgctgcttcaagatttagacttactcatgaaacatcattcgtgagagcccattccagttttttgactaggattcccatcttcttctacattcgctgcttctttaggcagttctataggtctgtaaataagactgactacctcactttgcgcaatgggtttatcactgtccacctggctcctggaagtaaatttaatttccaaaagtatatcaaaagatcattagaagatgacttcaaggtggtcgtgggagttagtcctatcctctgggcatcagttgtagtttaccttctcatcaatgttaatggatggcacaccgtactttgggcagccttaattcctgttgttataattttggctgttggaacaaaacttcaagccatattggcaaatatggctcttgaaatcacggaaagacatgcagttgtccaaggaatgcctcttgtccaaggctcagacaaatacttttggtttggtcagccacagttagttctacatcttatccattttgctttgttccagaatgcgttccaaataacatatatcttgtggatatggtattcttttgggttgagaaactgtttccgtactgactacaagcttgcagtagtaaaagtagctctagggattttgatgctatgcctctgcagctatatcacccttccattatatgctcttgtaactcagatgggttcaaggatgaaaacagcaatatttgacgagcaaacaaacaaggctctgaagaaatggcacatggctgcgaagaagaagcagggaggagcagtgacgctaggaaagtcgagtgcacgaatcatggatggaagccccattggtaattcttcaacagtgcactccactggccccacactacaccgtttcaaaactactggccactcaacccgctcctcatcaacagcgtacgaggatcaagatcaagatcatgaatatgaatccgatggtgttgagttgtctccgttggcgtcgcaaacaacaagcttcattgtaagagttgatcatggcgaccaacaacaagcagaacatagacaagatagtgagggagaaaccaacagtagtagtgaaggtgaattctcatttgtcaaacctgaccctgtggaaattagaaccaccacatagcatatgatcatatattcatctctattcttatacataaatctttac

SEQ ID NO: 16981 - protein, 411 aa, Glycine max
HVLYSAITMMLGRLKIRGWKAWEAETSTHNYEFANAASRFRLTHETSFVRAHSSFLTRIPIFFYIRCFFRQFYRSVNKTDYLTLRNGFITVHLAPGSKFNFQKYIKRSLEDDFKVVVGVSPILWASVVVYLLINVNGWHTVLWAALIPVVIILAVGTKLQAILANMALEITERHAVVQGMPLVQGSDKYFWFGQPQLVLHLIHFALFQNAFQITYILWIWYSFGLRNCFRTDYKLAVVKVALGILMLCLCSYITLPLYALVTQMGSRMKTAIFDEQTNKALKKWHMAAKKKQGGAVTLGKSSARIMDGSPIGNSSTVHSTGPTLHRFKTTGHSTRSSSTAYEDQDQDHEYESDGVELSPLASQTTSFIVRVDHGDQQQAEHRQDSEGETNSSSEGEFSFVKPDPVEIRTTT

SEQ ID NO: 16982 - protein, 403 aa, Glycine max
MMLGRLKIRGWKAWEAETSTHNYEFANAASRFRLTHETSFVRAHSSFLTRIPIFFYIRCFFRQFYRSVNKTDYLTLRNGFITVHLAPGSKFNFQKYIKRSLEDDFKVVVGVSPILWASVVVYLLINVNGWHTVLWAALIPVVIILAVGTKLQAILANMALEITERHAVVQGMPLVQGSDKYFWFGQPQLVLHLIHFALFQNAFQITYILWIWYSFGLRNCFRTDYKLAVVKVALGILMLCLCSYITLPLYALVTQMGSRMKTAIFDEQTNKALKKWHMAAKKKQGGAVTLGKSSARIMDGSPIGNSSTVHSTGPTLHRFKTTGHSTRSSSTAYEDQDQDHEYESDGVELSPLASQTTSFIVRVDHGDQQQAEHRQDSEGETNSSSEGEFSFVKPDPVEIRTTT

SEQ ID NO: 16983 - protein, 402 aa, Glycine max
MLGRLKIRGWKAWEAETSTHNYEFANAASRFRLTHETSFVRAHSSFLTRIPIFFYIRCFFRQFYRSVNKTDYLTLRNGFITVHLAPGSKFNFQKYIKRSLEDDFKVVVGVSPILWASVVVYLLINVNGWHTVLWAALIPVVIILAVGTKLQAILANMALEITERHAVVQGMPLVQGSDKYFWFGQPQLVLHLIHFALFQNAFQITYILWIWYSFGLRNCFRTDYKLAVVKVALGILMLCLCSYITLPLYALVTQMGSRMKTAIFDEQTNKALKKWHMAAKKKQGGAVTLGKSSARIMDGSPIGNSSTVHSTGPTLHRFKTTGHSTRSSSTAYEDQDQDHEYESDGVELSPLASQTTSFIVRVDHGDQQQAEHRQDSEGETNSSSEGEFSFVKPDPVEIRTTT

SEQ ID NO: 16984 - DNA, 1313 bp, Glycine max
ggtcaatccacaatctttagttgttgccaacctcctctagggttcctctgtttcttaactttcttcacatcaatggcaaagaagagaaccgcacctcagaagaagacccagatgatgaatcccatgccaaaacattctcaacagccaagaagctcacctcctaaacgccgcactgatttctctttcttcacgcgctctccctcctccttctccaaccctacttctggttcctcaccagattcatcttctggtgaagtgaggttgtccaatgttgcttcaagctgtttgcaggggaggagaatggcaatgaaacaattttctgaagatatgctggttcgatgcagcttttaccaagagggtagaccggtatgttcatctgagtcttttgatactccagttgtggaagttgattcagctgttcaagatgaaagtctcaaccttggtggacatagggatgcttgcaatgaaaaaattaatatttccaagatgtcagaatctacccctcttgaatcatctgtcagtgatagcagttctcttgctgtaactcctggaagtgttgtatgggcgaggacagattctcaagtgtggtggcctgctgagatcatggaagaaacatctgtgctatccaaccctggcaatgatggacatgttttagtgcagttttatggaaatcttcccagtgcctggattgatccaatgacagatatttcaacttttgaggattcttttgaagacaggagcaacaacccttcagaagattttcaaaaggctttaaagcaggccttacagaggaaggcacaacttagttcttgccaaaagttgactcctgataggtctgctcactatgatctgcaagaacgttcatctgataaatgcacttcaactagcacaagcaaaacaattgatgatgttcaagagagacggagagggaaaagggaacgtaaaccgaaagttcactttgatgaggtaacatatccaatgaaatcagaaacaaaggttcgtcggttgaagataatgcggtacctcggccttgcacctccagttggttctcccttttgagttttgaccatgatcacaagtaatgcatatttcaaatgtttgcagcctaacagctgtagttgaccctcccttttttaaccataataatcatgaaatatggatattttaaaaaaatgcttctatttcttgccattagctatgtaaaattttctaggattatatagtctcatagtattacattactatctgtaaaaaccatataagaatttcacggaatatcagattagttctctaataaaagttcaatttagcac

SEQ ID NO: 16985 - protein, 352 aa, Glycine max
GQSTIFSCCQPPLGFLCFLTFFTSMAKKRTAPQKKTQMMNPMPKHSQQPRSSPPKRRTDFSFFTRSPSSFSNPTSGSSPDSSSGEVRLSNVASSCLQGRRMAMKQFSEDMLVRCSFYQEGRPVCSSESFDTPVVEVDSAVQDESLNLGGHRDACNEKINISKMSESTPLESSVSDSSSLAVTPGSVVWARTDSQVWWPAEIMEETSVLSNPGNDGHVLVQFYGNLPSAWIDPMTDISTFEDSFEDRSNNPSEDFQKALKQALQRKAQLSSCQKLTPDRSAHYDLQERSSDKCTSTSTSKTIDDVQERRRGKRERKPKVHFDEVTYPMKSETKVRRLKIMRYLGLAPPVGSPF

SEQ ID NO: 16986 - protein, 328 aa, Glycine max
MAKKRTAPQKKTQMMNPMPKHSQQPRSSPPKRRTDFSFFTRSPSSFSNPTSGSSPDSSSGEVRLSNVASSCLQGRRMAMKQFSEDMLVRCSFYQEGRPVCSSESFDTPVVEVDSAVQDESLNLGGHRDACNEKINISKMSESTPLESSVSDSSSLAVTPGSVVWARTDSQVWWPAEIMEETSVLSNPGNDGHVLVQFYGNLPSAWIDPMTDISTFEDSFEDRSNNPSEDFQKALKQALQRKAQLSSCQKLTPDRSAHYDLQERSSDKCTSTSTSKTIDDVQERRRGKRERKPKVHFDEVTYPMKSETKVRRLKIMRYLGLAPPVGSPF

SEQ ID NO: 16987 - protein, 315 aa, Glycine max
MMNPMPKHSQQPRSSPPKRRTDFSFFTRSPSSFSNPTSGSSPDSSSGEVRLSNVASSCLQGRRMAMKQFSEDMLVRCSFYQEGRPVCSSESFDTPVVEVDSAVQDESLNLGGHRDACNEKINISKMSESTPLESSVSDSSSLAVTPGSVVWARTDSQVWWPAEIMEETSVLSNPGNDGHVLVQFYGNLPSAWIDPMTDISTFEDSFEDRSNNPSEDFQKALKQALQRKAQLSSCQKLTPDRSAHYDLQERSSDKCTSTSTSKTIDDVQERRRGKRERKPKVHFDEVTYPMKSETKVRRLKIMRYLGLAPPVGSPF

SEQ ID NO: 16988 - DNA, 1841 bp, Glycine max
actcctcttagtgaattttttaatgtggaggttactgctttgtcaagctatgaggacaaggaggacaagttcaaagaggaggttgctcaattacggcagcgtttcttccattctatagcgcctggaggtctggctggtgatcggcgtggtgttgtgcctgcttctgccttttctattagtgcacaacaaatatggaaagtcattcgggaaaacaaggatctcgatcttccagctcataaggtaatggttgcaacagtgcgttgtgaagagattgctaatgaaaaacttaaccgactacgctctgacaagggttggttggaattggaggaagctattgaattgggtcctgtacgaggttttggggaaaagctgagctccattattgatgcctgcctttcacaatatgatgaggaggcaatcttctttgatgaagctgtgagaaatgcaaaacgaaagcaattggaatcaaaggctttggatcttgtgtaccctgcttatacaacattgttagggcatatacgctctaaagctctagatgattttaagactaagctggaacaatcactaaacaatggagaagggtttgcttcatctgttcgcacttggactcagtctactatgcttcagtttgacaaagcatctgctgatgctgctgtaagacaagctaattggggtgcttcaaaagtgcgagacaaacttcaccgtgatattgattcacatacttcatccatgcgcagtacaaaactgtcggagataacagctaattttgagaaaaaattggccaaggcgttgacagagcctgtggagtctctctttgaagcaggtggaaaggacacctggctttcaataagagagctacttaaacgtgagactgaaattgctgtatcagaattttctgcttctgttgctggttttgagctggatgaagaaacagttgaaagaatgcaacaaagcttaagggactatgcaagaaaagtggtggaaaataaagcaagagatgaagctggaaagattctgatacgcatgaaagataggttctctactgttttcaatcatgataatgattcactacctagagtttggactgggaaggaagatgtcagagctattacaagggatgctcgctctgcgtcgctgaagcttctatcagatatggctgctatacgcttggatgagaagccagatcgcattgaaagtgcacttcattcatctctcatagataaaactagtgctgcaacatcttctcaatatctaactagggaagcttctgtagatccattggcttcaagcacatgggaggaggtttccccagaagatgtgcttatcactccagtgcagtgcaaagctttgtggagacaatttcagggagaaactgagtatacagttactcaagctatttcagctcaggaggcctacaagcggagtaacaattggttacctcctccatgggcaataatggcaatggtcatacttggttttaatgaatttatgttgctactaaaaaatcctctctacctgatgtttatatttgttgcctatctactcggaaaggccatctgggtacaaatggacatagctggagagtttcgacatggcactctgcctggactactatccatttcatcaaagtttcttcccacatttatgaaccttattaaacgtcttgctgaagaagctcaggggaatcaaacccctcaagaatcacaagggtcagcttctcagacacagatcttcagaaatcaagtgcacaaaccagattcagtatcaacctcaatttccaatgtatcgagtgttggcttgtctgttgatgataacgaatactcaaccacaaacttgtctca

SEQ ID NO: 16989 - protein, 613 aa, Glycine max
TPLSEFFNVEVTALSSYEDKEDKFKEEVAQLRQRFFHSIAPGGLAGDRRGVVPASAFSISAQQIWKVIRENKDLDLPAHKVMVATVRCEEIANEKLNRLRSDKGWLELEEAIELGPVRGFGEKLSSIIDACLSQYDEEAIFFDEAVRNAKRKQLESKALDLVYPAYTTLLGHIRSKALDDFKTKLEQSLNNGEGFASSVRTWTQSTMLQFDKASADAAVRQANWGASKVRDKLHRDIDSHTSSMRSTKLSEITANFEKKLAKALTEPVESLFEAGGKDTWLSIRELLKRETEIAVSEFSASVAGFELDEETVERMQQSLRDYARKVVENKARDEAGKILIRMKDRFSTVFNHDNDSLPRVWTGKEDVRAITRDARSASLKLLSDMAAIRLDEKPDRIESALHSSLIDKTSAATSSQYLTREASVDPLASSTWEEVSPEDVLITPVQCKALWRQFQGETEYTVTQAISAQEAYKRSNNWLPPPWAIMAMVILGFNEFMLLLKNPLYLMFIFVAYLLGKAIWVQMDIAGEFRHGTLPGLLSISSKFLPTFMNLIKRLAEEAQGNQTPQESQGSASQTQIFRNQVHKPDSVSTSISNVSSVGLSVDDNEYSTTNLS

SEQ ID NO: 16990 - protein, 532 aa, Glycine max
MVATVRCEEIANEKLNRLRSDKGWLELEEAIELGPVRGFGEKLSSIIDACLSQYDEEAIFFDEAVRNAKRKQLESKALDLVYPAYTTLLGHIRSKALDDFKTKLEQSLNNGEGFASSVRTWTQSTMLQFDKASADAAVRQANWGASKVRDKLHRDIDSHTSSMRSTKLSEITANFEKKLAKALTEPVESLFEAGGKDTWLSIRELLKRETEIAVSEFSASVAGFELDEETVERMQQSLRDYARKVVENKARDEAGKILIRMKDRFSTVFNHDNDSLPRVWTGKEDVRAITRDARSASLKLLSDMAAIRLDEKPDRIESALHSSLIDKTSAATSSQYLTREASVDPLASSTWEEVSPEDVLITPVQCKALWRQFQGETEYTVTQAISAQEAYKRSNNWLPPPWAIMAMVILGFNEFMLLLKNPLYLMFIFVAYLLGKAIWVQMDIAGEFRHGTLPGLLSISSKFLPTFMNLIKRLAEEAQGNQTPQESQGSASQTQIFRNQVHKPDSVSTSISNVSSVGLSVDDNEYSTTNLS

SEQ ID NO: 16991 - protein, 407 aa, Glycine max
MLQFDKASADAAVRQANWGASKVRDKLHRDIDSHTSSMRSTKLSEITANFEKKLAKALTEPVESLFEAGGKDTWLSIRELLKRETEIAVSEFSASVAGFELDEETVERMQQSLRDYARKVVENKARDEAGKILIRMKDRFSTVFNHDNDSLPRVWTGKEDVRAITRDARSASLKLLSDMAAIRLDEKPDRIESALHSSLIDKTSAATSSQYLTREASVDPLASSTWEEVSPEDVLITPVQCKALWRQFQGETEYTVTQAISAQEAYKRSNNWLPPPWAIMAMVILGFNEFMLLLKNPLYLMFIFVAYLLGKAIWVQMDIAGEFRHGTLPGLLSISSKFLPTFMNLIKRLAEEAQGNQTPQESQGSASQTQIFRNQVHKPDSVSTSISNVSSVGLSVDDNEYSTTNLS

SEQ ID NO: 16992 - DNA, 1296 bp, Glycine max
tttgattcaatgcatgagaatggcctagactttgggatttactttcagaacataccaacaactctgttctataggaatcttaggaaattgaagtacatatggaagttccatcagtatgatttgaagttcaagagggatgctagagatgggaagcttccacccttgactgtgattgagcctaggtactttgatttgaagggcataccggcgaacgatgatcacccgtctcatgatgttgcacatgggcaaatgctggttaaggaggtttatgaggctctaagagcaagtcctcaatggaatgaaacgctttttgtcattacatatgatgaacatggtggattttttgatcatgtgaagaccccttttgtcaacattcctaatccagatgggaacaccggacctgctccctatttcttcaagtttgataggttaggggttcgggtgccaactattatggtctctccttggatcaagaaagggactgtgataagtggcgccaaaggaccggctgaaaactcagaatttgagcactcttctattcctgcaaccataaagatgattttcaacctttcctctaactttctgactcacagagatgcatgggctgggacatttgagcatgttgttggggagttaagttcacccagaacagattgcccagtgactatgccagacgtgacacctctaaggagcactgaagcaaaagaaaatgctggcctttctgagtttcagagagaggtagttcaattggcagctgttcttaatggggaccattttttgagcagtttccctgatgaaatgagcaagaagatgagtgtgaaggaagctcacgagtacgtgcgaggagctgtttcaagattcataagagccagcaaggaggccatcaaactaggggctgatgagtctgctattgtggatatgagatcctctctcactactagatcttcagttcataattaatacaaaacaaaactcataaacagacaagagcaaagaaagttgtgtgcctatctctgtatctaactattatagtttttaggttatctgataattcttgtgctagattttgttaggtttgtgaaagtgaaatgcagtagaatggcgtgtttgatagaaggccgtgcaaggacgggaggtttctcaaggtctctgtttgaaagaatataaggaaattaaaaaaaaaaaaaaaaaaaagagaatgatggtttggctagtgagtaatttcgaatggaaaactccaatgctgttgtacaaagtacaaacacattataaatgcagctccataattttgttttc

SEQ ID NO: 16993 - protein, 319 aa, Glycine max
FDSMHENGLDFGIYFQNIPTTLFYRNLRKLKYIWKFHQYDLKFKRDARDGKLPPLTVIEPRYFDLKGIPANDDHPSHDVAHGQMLVKEVYEALRASPQWNETLFVITYDEHGGFFDHVKTPFVNIPNPDGNTGPAPYFFKFDRLGVRVPTIMVSPWIKKGTVISGAKGPAENSEFEHSSIPATIKMIFNLSSNFLTHRDAWAGTFEHVVGELSSPRTDCPVTMPDVTPLRSTEAKENAGLSEFQREVVQLAAVLNGDHFLSSFPDEMSKKMSVKEAHEYVRGAVSRFIRASKEAIKLGADESAIVDMRSSLTTRSSVHN

SEQ ID NO: 16994 - protein, 316 aa, Glycine max
MHENGLDFGIYFQNIPTTLFYRNLRKLKYIWKFHQYDLKFKRDARDGKLPPLTVIEPRYFDLKGIPANDDHPSHDVAHGQMLVKEVYEALRASPQWNETLFVITYDEHGGFFDHVKTPFVNIPNPDGNTGPAPYFFKFDRLGVRVPTIMVSPWIKKGTVISGAKGPAENSEFEHSSIPATIKMIFNLSSNFLTHRDAWAGTFEHVVGELSSPRTDCPVTMPDVTPLRSTEAKENAGLSEFQREVVQLAAVLNGDHFLSSFPDEMSKKMSVKEAHEYVRGAVSRFIRASKEAIKLGADESAIVDMRSSLTTRSSVHN

SEQ ID NO: 16995 - protein, 236 aa, Glycine max
MLVKEVYEALRASPQWNETLFVITYDEHGGFFDHVKTPFVNIPNPDGNTGPAPYFFKFDRLGVRVPTIMVSPWIKKGTVISGAKGPAENSEFEHSSIPATIKMIFNLSSNFLTHRDAWAGTFEHVVGELSSPRTDCPVTMPDVTPLRSTEAKENAGLSEFQREVVQLAAVLNGDHFLSSFPDEMSKKMSVKEAHEYVRGAVSRFIRASKEAIKLGADESAIVDMRSSLTTRSSVHN

SEQ ID NO: 16996 - DNA, 1468 bp, Glycine max
aagaagtatgagctaccggagctgcctcctcctcgacatgatccagaactcttaacacctgaacagcttcaggcgtataaaaaaattggattcaggaataagaactatgtcccagttggtgttcgtggtgtctttggaggagttgttcaaaatatgcatctccattggaagtttcacgagactgtgcaagtttgttgtgacaacttccccaaggaaaaaataaaagaaatggcttcaatgcttgcaagattgagtggtgggattgtgataaatgttcataatgtgaaaacaatcattatgtttcgtggcagaaattatcgccaacccaaaaatttgatacctattaacacccttacaaagaggaaggctcttttcaaggccagatttgagcaagctcttgagtctcagaagctaaacataaagaaaatagaacagcagcttcgacggatgggagtaaatcctgaggatccagctgccatggccagcatccagagagttgcttccacattcttcaatgccatcgaccagaaagaaggaagcccttatgtcttccgtgaaggcaagcagtcaataatagaacctgctgaaggttttgaagagtcagagcctacagctgatagtgatcaggaagagctagatcggttcattgctgagatagaggatgcggcagataaagaatatgaagctgaagaggcaaaagaaaaagaagagtttggcagaattagatactggaacaaagaagaatttggtggaagataccgaagatcagatgcttctagaaatgatgaccatgatgttgaggctagaggctcaagggtttggaatactacacatcctaagcgtcatgctatcgatagtgatgatgaagagaatgctcattctgacaatgatgatgatgatgatgatgaggagtggcatttcaataatattgcagatgctagtgatcttgacagcaattctgatgaatctgatggaactagaggtaagttcaaggaaagtaggaggaaaagagagaagcagaataatcctggtatcagtcgggccagagatgacgaaagttcaaatagacatgcaggagctaaatttaggaggaatatggccataaaagattccgaatcagaaggcatgctcagtgatgttgaaaatgcaatgtgggagtctgaggatgaggagcaagagaataatgactcaggacatttgagaaagttcagtggtaactacaggagtagtagcagtgatgatgagtatgcacatcaaacaatgagcaacaagaagagtggtgtgagggatcatgagagtaaggttggtggttctgctcaatatcacgatagttttgatgcaccaaacagtgtgagagggatgcatgcagttaacaaaattgattctgaatccatagatgaattcagcagttcagaaaactggctgtggccttcagatgctgaggagactggggactaccctacaaatc

SEQ ID NO: 16997 - protein, 489 aa, Glycine max
KKYELPELPPPRHDPELLTPEQLQAYKKIGFRNKNYVPVGVRGVFGGVVQNMHLHWKFHETVQVCCDNFPKEKIKEMASMLARLSGGIVINVHNVKTIIMFRGRNYRQPKNLIPINTLTKRKALFKARFEQALESQKLNIKKIEQQLRRMGVNPEDPAAMASIQRVASTFFNAIDQKEGSPYVFREGKQSIIEPAEGFEESEPTADSDQEELDRFIAEIEDAADKEYEAEEAKEKEEFGRIRYWNKEEFGGRYRRSDASRNDDHDVEARGSRVWNTTHPKRHAIDSDDEENAHSDNDDDDDDEEWHFNNIADASDLDSNSDESDGTRGKFKESRRKREKQNNPGISRARDDESSNRHAGAKFRRNMAIKDSESEGMLSDVENAMWESEDEEQENNDSGHLRKFSGNYRSSSSDDEYAHQTMSNKKSGVRDHESKVGGSAQYHDSFDAPNSVRGMHAVNKIDSESIDEFSSSENWLWPSDAEETGDYPTN

SEQ ID NO: 16998 - protein, 438 aa, Glycine max
MHLHWKFHETVQVCCDNFPKEKIKEMASMLARLSGGIVINVHNVKTIIMFRGRNYRQPKNLIPINTLTKRKALFKARFEQALESQKLNIKKIEQQLRRMGVNPEDPAAMASIQRVASTFFNAIDQKEGSPYVFREGKQSIIEPAEGFEESEPTADSDQEELDRFIAEIEDAADKEYEAEEAKEKEEFGRIRYWNKEEFGGRYRRSDASRNDDHDVEARGSRVWNTTHPKRHAIDSDDEENAHSDNDDDDDDEEWHFNNIADASDLDSNSDESDGTRGKFKESRRKREKQNNPGISRARDDESSNRHAGAKFRRNMAIKDSESEGMLSDVENAMWESEDEEQENNDSGHLRKFSGNYRSSSSDDEYAHQTMSNKKSGVRDHESKVGGSAQYHDSFDAPNSVRGMHAVNKIDSESIDEFSSSENWLWPSDAEETGDYPTN

SEQ ID NO: 16999 - protein, 413 aa, Glycine max
MASMLARLSGGIVINVHNVKTIIMFRGRNYRQPKNLIPINTLTKRKALFKARFEQALESQKLNIKKIEQQLRRMGVNPEDPAAMASIQRVASTFFNAIDQKEGSPYVFREGKQSIIEPAEGFEESEPTADSDQEELDRFIAEIEDAADKEYEAEEAKEKEEFGRIRYWNKEEFGGRYRRSDASRNDDHDVEARGSRVWNTTHPKRHAIDSDDEENAHSDNDDDDDDEEWHFNNIADASDLDSNSDESDGTRGKFKESRRKREKQNNPGISRARDDESSNRHAGAKFRRNMAIKDSESEGMLSDVENAMWESEDEEQENNDSGHLRKFSGNYRSSSSDDEYAHQTMSNKKSGVRDHESKVGGSAQYHDSFDAPNSVRGMHAVNKIDSESIDEFSSSENWLWPSDAEETGDYPTN

SEQ ID NO: 17000 - DNA, 1322 bp, Glycine max
tcgttttgtgttccgccgaaggcaccggaggttgtagcaggctagcagctatggatttggcatccaatctcggtggcaagattgacaaagccgaagttctctctgccgttcagaagtatgagaagtatcatgtttgctatggaggtcaagaggaagagaggaaagctaattataccgatatggttaataaatactacgatcttgttaccagcttttatgagtttggctggggggaatctttccattttgcacccaggtatggaaaggggaatctcttcgagagagcatcaagcgacatgaacacttccttcctttacaacttggactgaagccagggcagaaggttttggatgttggatgtggaattgggggaccattaagagaaatttctcgatttagctcaacttcaattaccgggttgaataacaatgagtaccagataacaagaggaaaggaactcaatcgcattgctggagtggacaagacttgcaattttgtcaaggctgacttcatgaaaatgccattcccagacaacagttttgatgcagtgtatgcgattgaagccacttgccatgcaccggatgcttatggatgctataaagagatttttagagtgttaaagcctggtcaatattttgctgcttatgaatggtgcatgaccgattcttttgatccccaaaacccagagcaccaaaaaatcaaggcagaaattgagattggtgatgggctacctgacattcgattgactgctaagtgtcttgaagctctgaagcaagcaggttttgaggtaatatgggagaaagatctagcagtggactctcctcttccttggtatttgcctttagacaaaagtcacttctcactgagtagcttccgtctaactgctgtcgggcgacttttcaccaaaaacatggtcaaggttctggagtatgttggactggctccaaagggtagtctaagggttcaagacttcctggagaaggctgcagagggactagttgaaggagggaagagagagattttcacaccaatgtacttcttcctggcacggaagcctgatttagacaggaactaagctggctgtacaaataggttgctgttttcatcagttacggtgattctggtagggtgaaccgtaagctaggattgtttttggccttgttgccttagtgattcttgctgtttctttgttttgtttaggttaccaacacttcattttgctgcttgtttcgatgaagcagtgctcctccatattttgtttaccctacatattatatgctcttttactttgtttaaaaggatttgcagtttttgtctttggt

SEQ ID NO: 17001 - protein, 187 aa, Glycine max
MKMPFPDNSFDAVYAIEATCHAPDAYGCYKEIFRVLKPGQYFAAYEWCMTDSFDPQNPEHQKIKAEIEIGDGLPDIRLTAKCLEALKQAGFEVIWEKDLAVDSPLPWYLPLDKSHFSLSSFRLTAVGRLFTKNMVKVLEYVGLAPKGSLRVQDFLEKAAEGLVEGGKREIFTPMYFFLARKPDLDRN

SEQ ID NO: 17002 - protein, 185 aa, Glycine max
MPFPDNSFDAVYAIEATCHAPDAYGCYKEIFRVLKPGQYFAAYEWCMTDSFDPQNPEHQKIKAEIEIGDGLPDIRLTAKCLEALKQAGFEVIWEKDLAVDSPLPWYLPLDKSHFSLSSFRLTAVGRLFTKNMVKVLEYVGLAPKGSLRVQDFLEKAAEGLVEGGKREIFTPMYFFLARKPDLDRN

SEQ ID NO: 17003 - protein, 139 aa, Glycine max
MTDSFDPQNPEHQKIKAEIEIGDGLPDIRLTAKCLEALKQAGFEVIWEKDLAVDSPLPWYLPLDKSHFSLSSFRLTAVGRLFTKNMVKVLEYVGLAPKGSLRVQDFLEKAAEGLVEGGKREIFTPMYFFLARKPDLDRN

SEQ ID NO: 17004 - DNA, 1620 bp, Glycine max
gtttcatttggttttcttccttctcacacttcccccaattcccaaaccaaactctgtcttttcttctctgtacggcactctctcttccggcgttctgggggtcgcatcgccggcgattccccactctgcttctctcttcacccttcaattcaaccctctcgtcttcgcttcactgattccctcttcgaaaatgcttccgatcgcttgctagggttttccttctcccaaatctccgtctccgaaagaaccctgtaccttttcttcctccgattaatcaacttcctagttatggctattcgtgtaactttttccttttcgggctacgtcgcccagagcctcgcctcctccgccggcgtgcgcgtcgccaattcgcgatgtgtccaggaatgctggatccgcacgcgcctcttcgggggcgccacccagaagacggatctagattcctccgccggcggcggagtccgcaatttcgccaggcccaactgctgggcccagtccacttactcgagcctcgccggggaatttctcggcgacggttgcagcaagagcccaatcatcttgggcctgatttcgatcatgaagtcaacggtgggtgtgtctgggtcatccgcggcggctgcgggtattttcggtatttcgccatttaaaaccacttcgattatccccttcttgccaggttcgaagtggcttccttgcaacgagtccgttcccgaccccacctcctgggaggtcgacaaaggtggcacgcgacgcgtcgtttcggaaacagaatcgaattttgccaagattagttggctttcgcggttgatgaacgtgtgttccgaagacgcgaaggctgcgttcactgctcttaccgttagtttactctttaaatcgtccttggctgaacccagatcaattccctcctcttctatgtaccctactcttgaagtaggtgaccgtgttcttaccgagaaggtttcgttcttctttagaaagcctgatgtttcggatatagtcattttcaaagctcctccttggttagaggagtttggttttagttcgtctgatgtatttataaagaggattgtggctaaggctggggacactgttgaggtgcgtgatgggaaactactgataaatggtgctgctgaagaacaagaatttgtattagaggctctagcttatgagatggatccaatggttgtgccagaaggatatgtgtttgtaatgggcgacaatcggaataaaagctttgattctcataactggggtcccctgccggttgagaacattgttggtaggtccatgtttcggtactggcctccatccaaggcatctgacactgatacccatcgtaaactcccacctggtaacaaacctgtggcaatttcttgacatgattcccgcagctttgtgaaggtgatgaaggtttccagatacggtcgtttgttctaaattgttagcttgagctgactttgcacacagtttgggatgaatatcttattcattgatacaaatttgtcgatgacctaataataccattaagcgttcattagtgccatctgagatgtatttctattgctgaagtgcggggagaaaaaaaagaattaaaaaagcatgatgattttgccccccccc

SEQ ID NO: 17005 - protein, 458 aa, Glycine max
VSFGFLPSHTSPNSQTKLCLFFSVRHSLFRRSGGRIAGDSPLCFSLHPSIQPSRLRFTDSLFENASDRLLGFSFSQISVSERTLYLFFLRLINFLVMAIRVTFSFSGYVAQSLASSAGVRVANSRCVQECWIRTRLFGGATQKTDLDSSAGGGVRNFARPNCWAQSTYSSLAGEFLGDGCSKSPIILGLISIMKSTVGVSGSSAAAAGIFGISPFKTTSIIPFLPGSKWLPCNESVPDPTSWEVDKGGTRRVVSETESNFAKISWLSRLMNVCSEDAKAAFTALTVSLLFKSSLAEPRSIPSSSMYPTLEVGDRVLTEKVSFFFRKPDVSDIVIFKAPPWLEEFGFSSSDVFIKRIVAKAGDTVEVRDGKLLINGAAEEQEFVLEALAYEMDPMVVPEGYVFVMGDNRNKSFDSHNWGPLPVENIVGRSMFRYWPPSKASDTDTHRKLPPGNKPVAIS

SEQ ID NO: 17006 - protein, 362 aa, Glycine max
MAIRVTFSFSGYVAQSLASSAGVRVANSRCVQECWIRTRLFGGATQKTDLDSSAGGGVRNFARPNCWAQSTYSSLAGEFLGDGCSKSPIILGLISIMKSTVGVSGSSAAAAGIFGISPFKTTSIIPFLPGSKWLPCNESVPDPTSWEVDKGGTRRVVSETESNFAKISWLSRLMNVCSEDAKAAFTALTVSLLFKSSLAEPRSIPSSSMYPTLEVGDRVLTEKVSFFFRKPDVSDIVIFKAPPWLEEFGFSSSDVFIKRIVAKAGDTVEVRDGKLLINGAAEEQEFVLEALAYEMDPMVVPEGYVFVMGDNRNKSFDSHNWGPLPVENIVGRSMFRYWPPSKASDTDTHRKLPPGNKPVAIS

SEQ ID NO: 17007 - protein, 266 aa, Glycine max
MKSTVGVSGSSAAAAGIFGISPFKTTSIIPFLPGSKWLPCNESVPDPTSWEVDKGGTRRVVSETESNFAKISWLSRLMNVCSEDAKAAFTALTVSLLFKSSLAEPRSIPSSSMYPTLEVGDRVLTEKVSFFFRKPDVSDIVIFKAPPWLEEFGFSSSDVFIKRIVAKAGDTVEVRDGKLLINGAAEEQEFVLEALAYEMDPMVVPEGYVFVMGDNRNKSFDSHNWGPLPVENIVGRSMFRYWPPSKASDTDTHRKLPPGNKPVAIS

SEQ ID NO: 17008 - DNA, 1676 bp, Glycine max
agaattgtacccggtgttggagtcaatacaaaaatatctctggcctcgactgtgcaagctagatcaggaaacactatatgagctacattaccagatgattacatttggaaaggtcttctgtacaaaaagcaaaccaaattgtaatgcatgcccaatgagagcagaatgtagacactttgctagtgcatttgcaagtgcaaggtttgcactgcctggaccagagcagaagagtatagttagcacaactggaaatagtgtgattaaccagaacccatctgaaatcatcagtcagttgcacttgcctccacctgagaacacagcccaagaagatgaaattcaactaacagaagtgagcagacaattggaatcaaaatttgaaataaatatttgccaacctatcattgaagagcccagaactccagagccagaatgcttgcaagaatcacaaactgatatagaggatgctttctatgaggattcaagtgaaattccaaccatcaatcttaacatagaagagttcactctgaatttacaaaattacatgcaagaaaatatggaacttcaaggaggtgaaatgtcaaaggcattggttgctttgaatccacaagctgcttccattcctatgcccaagctaaagaatgtgggccgattacgaacagagcattgtgtttatgaactcccagatacgcatcctcttctacaagggtgggacacacgagagcctgatgatccaggcaaatatcttcttgctatatggactccaggtgagaccgcaaattctatacagccaccagaaagcaattgcagctctcaagaagaatgtggccaactctgtaatgagaaggaatgtttctcatgcaacagtttccgtgaagcaaattctcagatagttagagggacactcctgataccttgtcgaacagctatgcgggggagctttccactgaatggcacctatttccaattcaatgaggtatttgctgaccatgactcaagtctcaacccaattagtgtgccccgaagttggatctggaacctcaacaggcgaacagtatattttgggacctccgtaacaacaatatttaaaggtttaacaacacaagaaactcaacaatgcttttggagagggtatatctgtgtgcgggggtttgacagggaagcacgagcaccccgccctctgatggctagactacatttcccagctagcaagttggccgccaagaccaaagagaaagcaaaaaaggagtcgaattcagcaaaatcacgagcatccaaaccaaatccagaacagccggaattgattgccaacagagacaaatgagcatttttcatcatcccatgctgtgttgcccagttgcatgcataaaatgacaaagtcattatttcattttactttttatcgtgctcagagactgagcagtttttccagattaggacccccaataatgtactattggtagaacttaggctttagtttcttgtttccaaaaaggaagattatgtgaaggggagtgtgagccatatgagaggccaagtactttctcccccaatccctgctgatgtacacttagaatgttttagaattaaattatgcctccccacttcaccaacaacatctacatcaatcatgcgtcttcatcataattttaaagacaatataacaaagattaaaatgc

SEQ ID NO: 17009 - protein, 439 aa, Glycine max
ELYPVLESIQKYLWPRLCKLDQETLYELHYQMITFGKVFCTKSKPNCNACPMRAECRHFASAFASARFALPGPEQKSIVSTTGNSVINQNPSEIISQLHLPPPENTAQEDEIQLTEVSRQLESKFEINICQPIIEEPRTPEPECLQESQTDIEDAFYEDSSEIPTINLNIEEFTLNLQNYMQENMELQGGEMSKALVALNPQAASIPMPKLKNVGRLRTEHCVYELPDTHPLLQGWDTREPDDPGKYLLAIWTPGETANSIQPPESNCSSQEECGQLCNEKECFSCNSFREANSQIVRGTLLIPCRTAMRGSFPLNGTYFQFNEVFADHDSSLNPISVPRSWIWNLNRRTVYFGTSVTTIFKGLTTQETQQCFWRGYICVRGFDREARAPRPLMARLHFPASKLAAKTKEKAKKESNSAKSRASKPNPEQPELIANRDK

SEQ ID NO: 17010 - protein, 408 aa, Glycine max
MITFGKVFCTKSKPNCNACPMRAECRHFASAFASARFALPGPEQKSIVSTTGNSVINQNPSEIISQLHLPPPENTAQEDEIQLTEVSRQLESKFEINICQPIIEEPRTPEPECLQESQTDIEDAFYEDSSEIPTINLNIEEFTLNLQNYMQENMELQGGEMSKALVALNPQAASIPMPKLKNVGRLRTEHCVYELPDTHPLLQGWDTREPDDPGKYLLAIWTPGETANSIQPPESNCSSQEECGQLCNEKECFSCNSFREANSQIVRGTLLIPCRTAMRGSFPLNGTYFQFNEVFADHDSSLNPISVPRSWIWNLNRRTVYFGTSVTTIFKGLTTQETQQCFWRGYICVRGFDREARAPRPLMARLHFPASKLAAKTKEKAKKESNSAKSRASKPNPEQPELIANRDK

SEQ ID NO: 17011 - protein, 388 aa, Glycine max
MRAECRHFASAFASARFALPGPEQKSIVSTTGNSVINQNPSEIISQLHLPPPENTAQEDEIQLTEVSRQLESKFEINICQPIIEEPRTPEPECLQESQTDIEDAFYEDSSEIPTINLNIEEFTLNLQNYMQENMELQGGEMSKALVALNPQAASIPMPKLKNVGRLRTEHCVYELPDTHPLLQGWDTREPDDPGKYLLAIWTPGETANSIQPPESNCSSQEECGQLCNEKECFSCNSFREANSQIVRGTLLIPCRTAMRGSFPLNGTYFQFNEVFADHDSSLNPISVPRSWIWNLNRRTVYFGTSVTTIFKGLTTQETQQCFWRGYICVRGFDREARAPRPLMARLHFPASKLAAKTKEKAKKESNSAKSRASKPNPEQPELIANRDK

SEQ ID NO: 17012 - DNA, 1562 bp, Glycine max
gagaagccatgatggatatgcttctatcttcttcttcttcttcccttaatctcatcaaacccttttttttctcttctccctcgatttgattccgccagattctcgtcaacgcgctgttccttcacctcaatttcttccagcatgaaaccccaccccctccattatcctattctcctcccaaaaccctaccatcccttatcccctctccgtctccgctcactccgaatcatttccaaaaaccaccaaaggcaataacagcccgaacatttgcaatactctctgctcttgttttgctcttaatccaaccagcttttgctcctgcagcttttgcaacgtttcaaaatgctgccaagaccagtggccctgctgctgcagcagttggtggaaaactaatccgcactgagcttctaagtagtgcttggactggtttctttgccggttgcttgcacacactatcagggcctgaccaccttgcagctttggctccattgtcaattggccgaacccaaatggagagtgctgctgttggagccctttggggttgtggccatgatgccggtcaagttatctttggcttaatatttttgctcttaaaagatcgacttcacattgaaattatccaaacttggggcacccgtgtggttggccttaccctgctagtaattggtgctatgggaattaaggaagcttcagaagtgcctatcctgtgtgttgccttagaaaatggtgaatgtgatgttagcgtctatgaatcacgcgatagtaatcctgttgtaggaaagaagaagattggttttgctacttttgccactggaatagttcatggactggaaccagatgcattgatgatggtgttgcctgcccttgctctaccttcacgcttggctggtgctgcatttctcatcatgttcttactgggaactgttgttgcaatggggagctatacggtatttattggttcatgtagcgaggcactaaaagatagagtacctagaataactgagaaactcacttgggcttcttctcttgttgcaatagccctcggatttgccatcatcactagccagttttttgggtttagcctgtattagtacccacgttattcagccaccaacccatggcccattaattggttaattatacccaaatcatacaagacaaggtcagcaagggcataaatgaagaaaaatccattgaaaagttgtgcttttgccatccttcctttgggatgaaaaaaaaaaaaaacctaccattccctcttaattgtgaatggctaactattacagaaatgtttctcatttcctagaagttctatcaattatcatagatgctgaaataatatatatatatcaaaaagcattagaaacttagagatggtgacaggaaaacttgtaggtcgaactattcaagagagatggtgaagagatatcatatgccagcaaaaaaagggttttgcatgaagttctactagggatgatttcaaatttagtcgggctaatgagttatttcttggaaatgttgcaaaacacaaaaaacccaacataggccttatttatgaacct

SEQ ID NO: 17013 - protein, 193 aa, Glycine max
MESAAVGALWGCGHDAGQVIFGLIFLLLKDRLHIEIIQTWGTRVVGLTLLVIGAMGIKEASEVPILCVALENGECDVSVYESRDSNPVVGKKKIGFATFATGIVHGLEPDALMMVLPALALPSRLAGAAFLIMFLLGTVVAMGSYTVFIGSCSEALKDRVPRITEKLTWASSLVAIALGFAIITSQFFGFSLY

SEQ ID NO: 17014 - protein, 139 aa, Glycine max
MGIKEASEVPILCVALENGECDVSVYESRDSNPVVGKKKIGFATFATGIVHGLEPDALMMVLPALALPSRLAGAAFLIMFLLGTVVAMGSYTVFIGSCSEALKDRVPRITEKLTWASSLVAIALGFAIITSQFFGFSLY

SEQ ID NO: 17015 - DNA, 1181 bp, Glycine max
aaataccgatcctgccacactggcttctttgaatgctggacaattcaaagatgtgtctccagatatgattaaaactacctctgatatggttagtaaaatgtcacctgaggaacttcaaagaatgcttgacatggcttcttcatttcaaggggataatccaatttttagaggaggttcccctgattcttctttcaaccctggatcaatgcctccaaatgtgacacctgatatgtttaaagcagcaagtgatatgattagtaaaatgccagcagatgaccttaagaggatgtttgaaatggcatcctcactgaaagggaaagaatctactccattagcagcagcagtagatgagaatgaaagaaatgtttcccggtcaaacttaccatcatcaagtactaatggaactactgcttttggagaatcaagttctcataatgtgttttcaaatatgagaaatgcttctcagtcaaacttcccttcctcaagtgccaatctccaagaacagatgagaaaccagatgaaagatccagctatgcggaagatgttcacatccatggttaaaaatatgagcccggaaatgatggctaacatgggtgaacaatttggtgttaagctttcaccagaagaagctgcaaaagctcagcaagccatgtcatccttatcaccggagagcttggataaaatgatgctttgggcagacaggattcaaagaggagttgaatctgcgagaaagacaaagaactggctgctagggaaacctggcatgatctttgctatattaatgctcattttggctgtcattcttcaccggttaggcttcattggtggctagagtaaggggcaaacattatgagattccttgggcattcaaactcaggcataaccttcttgtgtgatgagaatatgagatgattgaatgtattgtctcagccaagagacattggagagaggaggggacatattattggttttctggaaagcaatgccaaaatggcttctcatcagatatgtccaaattgtggatgtgattggcactttttttttttgttgtaacatattagcttttgagttgtttgccatttagcacttggaaggaccctaccattcaataaatttgtaaccttttgtcattcttataccctaatcctaatgtagcattggtctggtgcgttattatttat

SEQ ID NO: 17016 - protein, 276 aa, Glycine max
NTDPATLASLNAGQFKDVSPDMIKTTSDMVSKMSPEELQRMLDMASSFQGDNPIFRGGSPDSSFNPGSMPPNVTPDMFKAASDMISKMPADDLKRMFEMASSLKGKESTPLAAAVDENERNVSRSNLPSSSTNGTTAFGESSSHNVFSNMRNASQSNFPSSSANLQEQMRNQMKDPAMRKMFTSMVKNMSPEMMANMGEQFGVKLSPEEAAKAQQAMSSLSPESLDKMMLWADRIQRGVESARKTKNWLLGKPGMIFAILMLILAVILHRLGFIGG

SEQ ID NO: 17017 - protein, 255 aa, Glycine max
MIKTTSDMVSKMSPEELQRMLDMASSFQGDNPIFRGGSPDSSFNPGSMPPNVTPDMFKAASDMISKMPADDLKRMFEMASSLKGKESTPLAAAVDENERNVSRSNLPSSSTNGTTAFGESSSHNVFSNMRNASQSNFPSSSANLQEQMRNQMKDPAMRKMFTSMVKNMSPEMMANMGEQFGVKLSPEEAAKAQQAMSSLSPESLDKMMLWADRIQRGVESARKTKNWLLGKPGMIFAILMLILAVILHRLGFIGG

SEQ ID NO: 17018 - protein, 248 aa, Glycine max
MVSKMSPEELQRMLDMASSFQGDNPIFRGGSPDSSFNPGSMPPNVTPDMFKAASDMISKMPADDLKRMFEMASSLKGKESTPLAAAVDENERNVSRSNLPSSSTNGTTAFGESSSHNVFSNMRNASQSNFPSSSANLQEQMRNQMKDPAMRKMFTSMVKNMSPEMMANMGEQFGVKLSPEEAAKAQQAMSSLSPESLDKMMLWADRIQRGVESARKTKNWLLGKPGMIFAILMLILAVILHRLGFIGG

SEQ ID NO: 17019 - DNA, 1546 bp, Glycine max
acaaaaacctaaactcactcagtcctacgatacgattctcttccgcctcccttcccttcaactccacggcgcagatccgaggagtttgggaaaccctaattcattcctctttgcttcttctatctctattcctctaacaccagtgatggcaggtttggctccagaaggatcgcagtttgatgctcggcaatatgattctaagatgaatgaattgctttccgccgatggacaagaatttttcacttcatatgacgaagtctatgatagttttgatgcaatgggccttcaagaaaatcttctgagaggcatatatgcttatggttttgagaggccttctgcaatccagcagaggggaattgttcctttctgcaagggtctggatgtgattcagcaggctcagtctggaactggaaagacagcaacgttctgttcaggaattttgcagcagcttgactatggattggttcagtgtcaggctttggttttggcaccaacaagggagcttgcacagcagattgagaaggttatgcgagctctaggtgattaccttggtgtcaaggttcatgcttgtgttggtgggaccagtgttcgtgaggatcagcgcattctccaagctggtgtccatactgttgttggcactcctgggcgtgtatttgacatgctacggagacagtctcttcgtccagatcacataaagatgtttgttttggatgaggctgatgaaatgctttctcgtggtttcaaggaccagatctatgacatcttccagcttctgccgggtcaaattcaggttggagtgttctctgctacaatgccacctgaggccttggagattacgaggaagttcatgaataagccagtgagaatcctggtaaagcgtgatgaattgacccttgagggtatcaaacagttttatgtgaatgttgataaggaagactggaaactagagacattatgtgacctttatgagactttggctatcacccagagtgtcatctttgtgaacacaaggcgtaaggtggactggctcactgacaagatgcgaagcaatgaccatacagtctcagccacccatggagacatggaccaaaacactcgtgacatcatcatgcgggaatttcgctctggctcttctcgagttctaattaccactgacctcttggctcgtggtatagatgtacagcaggtgtctttggttataaactatgatctgccaacccaacctgaaaattatcttcatcgcataggacgaagtgggcgttttggaagaaaaggtgttgccataaactttgtgactttggatgatgcaagaatgctgtctgatattcaaaagttctacaatgtgactgtagaggagttgccatcaaatgttgctgatctgctctgatgggttaattttcattctttgttaagtcatcagagggctattactttttgccaattattattttgtgctctttgtttttctttttcaaattttagcattagagttccaatacacctgactttatttttataatggattctataaaatttgtttatttgc

SEQ ID NO: 17020 - protein, 461 aa, Glycine max
QKPKLTQSYDTILFRLPSLQLHGADPRSLGNPNSFLFASSISIPLTPVMAGLAPEGSQFDARQYDSKMNELLSADGQEFFTSYDEVYDSFDAMGLQENLLRGIYAYGFERPSAIQQRGIVPFCKGLDVIQQAQSGTGKTATFCSGILQQLDYGLVQCQALVLAPTRELAQQIEKVMRALGDYLGVKVHACVGGTSVREDQRILQAGVHTVVGTPGRVFDMLRRQSLRPDHIKMFVLDEADEMLSRGFKDQIYDIFQLLPGQIQVGVFSATMPPEALEITRKFMNKPVRILVKRDELTLEGIKQFYVNVDKEDWKLETLCDLYETLAITQSVIFVNTRRKVDWLTDKMRSNDHTVSATHGDMDQNTRDIIMREFRSGSSRVLITTDLLARGIDVQQVSLVINYDLPTQPENYLHRIGRSGRFGRKGVAINFVTLDDARMLSDIQKFYNVTVEELPSNVADLL

SEQ ID NO: 17021 - protein, 413 aa, Glycine max
MAGLAPEGSQFDARQYDSKMNELLSADGQEFFTSYDEVYDSFDAMGLQENLLRGIYAYGFERPSAIQQRGIVPFCKGLDVIQQAQSGTGKTATFCSGILQQLDYGLVQCQALVLAPTRELAQQIEKVMRALGDYLGVKVHACVGGTSVREDQRILQAGVHTVVGTPGRVFDMLRRQSLRPDHIKMFVLDEADEMLSRGFKDQIYDIFQLLPGQIQVGVFSATMPPEALEITRKFMNKPVRILVKRDELTLEGIKQFYVNVDKEDWKLETLCDLYETLAITQSVIFVNTRRKVDWLTDKMRSNDHTVSATHGDMDQNTRDIIMREFRSGSSRVLITTDLLARGIDVQQVSLVINYDLPTQPENYLHRIGRSGRFGRKGVAINFVTLDDARMLSDIQKFYNVTVEELPSNVADLL

SEQ ID NO: 17022 - protein, 394 aa, Glycine max
MNELLSADGQEFFTSYDEVYDSFDAMGLQENLLRGIYAYGFERPSAIQQRGIVPFCKGLDVIQQAQSGTGKTATFCSGILQQLDYGLVQCQALVLAPTRELAQQIEKVMRALGDYLGVKVHACVGGTSVREDQRILQAGVHTVVGTPGRVFDMLRRQSLRPDHIKMFVLDEADEMLSRGFKDQIYDIFQLLPGQIQVGVFSATMPPEALEITRKFMNKPVRILVKRDELTLEGIKQFYVNVDKEDWKLETLCDLYETLAITQSVIFVNTRRKVDWLTDKMRSNDHTVSATHGDMDQNTRDIIMREFRSGSSRVLITTDLLARGIDVQQVSLVINYDLPTQPENYLHRIGRSGRFGRKGVAINFVTLDDARMLSDIQKFYNVTVEELPSNVADLL

SEQ ID NO: 17023 - DNA, 1025 bp, Glycine max
ggattttttgtcttttatttcagaagtgcaggtagagttgcatcacttcgacaactttccaatagttttgctcagttcaataatttacacctttcccttcgttcaaagaagccactaactagaaaggatgctgcatctatcaacgaatggagatttgccaagataaaggaatacaaggagcggaatgttgaagtggaaaatgaagcttttgaccgatacatgcagaatgtagatttactagaagaagtattagctgtgaagtcgttggatgccaatgtgccctctgcattagagtctaatgctactccaatggagagcaatgaggcaatgatccctgggataaaattgcagctaagatcaaattcaatgagaagtgatggtttgagaatgagaatacaacaaattgtaaacgagggattaaagaagctcgagaaaagtgctgtagatggtgacataaatgaatcaattgatggtgaatctaatgaagcttcaaaaaggggaaaggggattgaaaggttatcagctataagtgatcttatggataaaattaataaagcccgaactgaggaggatttgaagccgtgcttagagatgaagacccaactcttcaatttagacgaaggctctagcgcgaaagaccttcaagacaatgaaatgcatgcgaatgaaactgctgaaagtgatgtggtacaaacagaaggattggattattctttaccgaaatttgttaccatcactgagattgatctagaagttctccacaccatagacaaacacttttctacccaggatatagagcagttatgaggctagatttcttaaacgttgtgatttaccttgaaagaaacagaaatataaatgttgtgctgttctaggaaaatgctctctaattagaattaggtagtcaaatgcaagccaaaaatgttttagaaattaatctggatacttgaaccggttgaagtgtgaacagattatattcagtttgagcattatgcaattcaattacggttcaactttagtccatt

SEQ ID NO: 17024 - protein, 268 aa, Glycine max
GFFVFYFRSAGRVASLRQLSNSFAQFNNLHLSLRSKKPLTRKDAASINEWRFAKIKEYKERNVEVENEAFDRYMQNVDLLEEVLAVKSLDANVPSALESNATPMESNEAMIPGIKLQLRSNSMRSDGLRMRIQQIVNEGLKKLEKSAVDGDINESIDGESNEASKRGKGIERLSAISDLMDKINKARTEEDLKPCLEMKTQLFNLDEGSSAKDLQDNEMHANETAESDVVQTEGLDYSLPKFVTITEIDLEVLHTIDKHFSTQDIEQL

SEQ ID NO: 17025 - protein, 195 aa, Glycine max
MQNVDLLEEVLAVKSLDANVPSALESNATPMESNEAMIPGIKLQLRSNSMRSDGLRMRIQQIVNEGLKKLEKSAVDGDINESIDGESNEASKRGKGIERLSAISDLMDKINKARTEEDLKPCLEMKTQLFNLDEGSSAKDLQDNEMHANETAESDVVQTEGLDYSLPKFVTITEIDLEVLHTIDKHFSTQDIEQL

SEQ ID NO: 17026 - protein, 165 aa, Glycine max
MESNEAMIPGIKLQLRSNSMRSDGLRMRIQQIVNEGLKKLEKSAVDGDINESIDGESNEASKRGKGIERLSAISDLMDKINKARTEEDLKPCLEMKTQLFNLDEGSSAKDLQDNEMHANETAESDVVQTEGLDYSLPKFVTITEIDLEVLHTIDKHFSTQDIEQL

SEQ ID NO: 17027 - DNA, 1257 bp, Glycine max
tattgggtcgtggttttcctgtcaggccgaaaaagaaatggagtgcgtggaggcagcgttgaagagcaattataggaaagaaatgaccttaaaactgagcccacaaaccttcacggaagaggttagtgtccaaaacggcacaacctgcgacgactttttcgttaacgacctccttgacttctctcacgtcgaagaagaacccgaacaacaagaagacactccttgtgtctcccttcagcatgaaaacccaagccacgagccctgtactttcaaagacgattatgcctctgtgcccactagcgagcttagcgtcttggtaccttttttttccactcaatttgtattttaattgttctgtgttagtggttgacgaagaaagttgcgatttttacaggcggatgacttggcggacttggagtggctgtctcatttcgtggaggattccttctcggaattctctgcggccttccccaccgtaacggagaacccaacagcatgccttaaagaggcagagcctgaaccggaaatcccggttttctctttcaaaaccccggttcagaccaaagcaagaagcaagcgaaccagaaacggtcttcgtgtttggccattcggttcaccttccttcaccgattcttcctcaagctccaccacctcttcctcttcctcttcttcaccctctagccccttgctaatttacacccaaagcctcgaccacctgtgctccgagccaaataccaaaaaaatgaagaaaaaaccctcttccgataccctggcgccgcgaaggtgcagtcattgcggcgtgcagaaaacccctcagtggagaactgggccgctaggcccaaaaacactatgcaacgcgtgtggggtccgcttcaagtcgggccggctcttacccgaatacaggcctgcttgtagcccaacattttcaagtgaattacactcgaaccatcatcgtaaagtgctcgagatgcggcaaaagaaggagacagtttctgtggatgagactggttttgcccctgctcatgttgttcccagtttttgattctttttattacataagaaaagaaaagaaaaaaaaaaactaggtgctgtagtgattgattactcagattagagaaggtagcgcagactttagacccggttcaatgggacccgagttagtgtacatttttttcccttgtattgagtgcggtatgtgttagcttttgtaacccattaggagactttgatatgtaatgcaagtccttttaccttttg

SEQ ID NO: 17028 - protein, 115 aa, Glycine max
IGSWFSCQAEKEMECVEAALKSNYRKEMTLKLSPQTFTEEVSVQNGTTCDDFFVNDLLDFSHVEEEPEQQEDTPCVSLQHENPSHEPCTFKDDYASVPTSELSVLVPFFSTQFVF

SEQ ID NO: 17029 - protein, 103 aa, Glycine max
MECVEAALKSNYRKEMTLKLSPQTFTEEVSVQNGTTCDDFFVNDLLDFSHVEEEPEQQEDTPCVSLQHENPSHEPCTFKDDYASVPTSELSVLVPFFSTQFVF

SEQ ID NO: 17030 - protein, 99 aa, Glycine max
MKKKPSSDTLAPRRCSHCGVQKTPQWRTGPLGPKTLCNACGVRFKSGRLLPEYRPACSPTFSSELHSNHHRKVLEMRQKKETVSVDETGFAPAHVVPSF

SEQ ID NO: 17031 - DNA, 1516 bp, Glycine max
ggagttcttgctggggaaagataagtttccacccgcagagagtaacaagaagtctaaattgaatgggaagaagcatgtcgagggtgagatgggacatggaatgggttccaagcttttaaagagttgtagtgcgttgcttgagaagttgatgaagcacaaacatggttgggtgtttaatgctccggttgacgtggagggtcttggtttgcatgattactttagtatcatcacacatccaatggacttgggaactgtgaagtcaaggctgaacaagaattggtacaaatcacccaaggagtttgctgaggatgtgagacttacatttcataatgccatgacttataatcccaaagggcaagacgttcatataatggcatagcagctacttaacatatttgaagaaagatgggctataatagaatcaaattactaccgtgagattagatatggcctggattatggagcaccttcacctgtgtctagaaaggctcctccctttcggccaccaccaattgatatgaggcggattttggataggtcagaatcaatgacacaacctccaaaaatcatgggcatcactccttcgtctcgaacccctgctcccaaaaagcccaaggccaaagatcctcataagagagacatgacatatgaggaaaagcagaaactcagcacacatcttcagagtctaccttctgagaagctagatgcaattgtacagatcattaagaagagaaactcagcactttcacaacacgatgatgaaattgaagtggacattgatagtgtggatactgagactctctgggagcttgatagatttgtgaccaactataagaaaagtttgagcaaaaacaagaggaaggctgagcttgctattctagctagagaacgagctgagcagaatgcccagcagaagagtcaggcaccagttgcagtagagattccgaaagaaacacaagcagatgaaagaaatgttcccccatccttgcccgagcaaggacaaattccagtggataatgggagtaagaccagtagttcaagcagctccagcagtgattcaggctcttcgtcaagtgattctgatagtgatagttcctcagcctctgggtctgatgcagggtcaccaaaaacctgaattctttctgtcagatctcagatatttaagattagatagtgatgcaatgcttggctagttggtttttttcccgcatccagatttagctgttggtttgtaaaggaagcattctcaagaccacctatgatccctatggatgcagtatggggtccttttctcgcgtctgttggaactgttgcactactgctttaaggcattatatgtgataacacaaacccatgtaaaatatttggtagaatgtgatgataggtagatagttctccgtagcagtgtacattgctaactactgctactctcattaggtttccattgatgacttggtttgattttgtgctggtagattctagattcttgctgttatacaaagataatctgcaattc

SEQ ID NO: 17032 - protein, 205 aa, Glycine max
MRRILDRSESMTQPPKIMGITPSSRTPAPKKPKAKDPHKRDMTYEEKQKLSTHLQSLPSEKLDAIVQIIKKRNSALSQHDDEIEVDIDSVDTETLWELDRFVTNYKKSLSKNKRKAELAILARERAEQNAQQKSQAPVAVEIPKETQADERNVPPSLPEQGQIPVDNGSKTSSSSSSSSDSGSSSSDSDSDSSSASGSDAGSPKT

SEQ ID NO: 17033 - protein, 195 aa, Glycine max
MTQPPKIMGITPSSRTPAPKKPKAKDPHKRDMTYEEKQKLSTHLQSLPSEKLDAIVQIIKKRNSALSQHDDEIEVDIDSVDTETLWELDRFVTNYKKSLSKNKRKAELAILARERAEQNAQQKSQAPVAVEIPKETQADERNVPPSLPEQGQIPVDNGSKTSSSSSSSSDSGSSSSDSDSDSSSASGSDAGSPKT

SEQ ID NO: 17034 - protein, 188 aa, Glycine max
MGITPSSRTPAPKKPKAKDPHKRDMTYEEKQKLSTHLQSLPSEKLDAIVQIIKKRNSALSQHDDEIEVDIDSVDTETLWELDRFVTNYKKSLSKNKRKAELAILARERAEQNAQQKSQAPVAVEIPKETQADERNVPPSLPEQGQIPVDNGSKTSSSSSSSSDSGSSSSDSDSDSSSASGSDAGSPKT

SEQ ID NO: 17035 - DNA, 1323 bp, Glycine max
acacacactctctcccttgtttctctctcttcggtcagaaacatgaatttggaaacgcaaccaggaacggcgtcgtattggtgctacagctgcacccgtttcgtgcacctctctgtccaaagcaccatcgcctgcccccactgtcaaagcggtttcgtcgaagagatccgtgccggcgccggagccgaagcctcgccacgccatcgactaagtcctttccccgatgatcctcttttgctccggcgacagggcttccgccgccgtaggagagaagcttccggcaaccgctccccgttcaaccccgttatcgtcctccgcggccccggcgacgactccgccgccgccgaccacgacggcgtcagcacgttcgagctcttctacgacgacggcgacggcaccggcctccgccctcttcctcccaccatgtcggagttgctcctcggctctggctttgacaaacttctcgaacagttcgcgcagatcgagatgaacggattcgggcggccggagaatccgccggcgtcaaaggcggcgatcgagtccatgccgacggtcgagatcggagaaacgcacgtggaaaccgaagcgcactgcgccgtgtgcaaagaagcgtttgagctgcacgcggaggcgcgtgagttaccgtgcaagcacatctaccactccgattgcatcctcccgtggctctcgatgcggaattcgtgcccggtgtgccgccacgagcttccttccgatttggaaactagggttcccagccagatcgacgaggagacgatagggttaacgatttggaggcttcccggcggcggattcgccgtggggagattctccggcggccggagaacaggcgagagtcatttcccggtggtgtacacggagatggacggtggactgaacacgaacggtggtgctcctaggagaatttctcgttctgttagaagcaatagggttagggaaagtcgagggtttggtagagttattagcaatttcttttcattctttggaagaattggttctagaaactcttcttctggacatgggtctgtaagtagaagccgtagtcacgtgagttcaatcttcaatagaagctcgcggagacatagcaggacttgggttatggatgattaattggtgaatggtgatggcaattttgcaaagaatagtaatactttcttttttttcagctttgggttatgagattcatttcatactgtaaatagcatgtaactagcaactatagaagcaagttttttagttttccctctctgggaatctttaatatggtttgattcaacatcaatggaaggaagagtgctatttttt

SEQ ID NO: 17036 - protein, 375 aa, Glycine max
THTLSLVSLSSVRNMNLETQPGTASYWCYSCTRFVHLSVQSTIACPHCQSGFVEEIRAGAGAEASPRHRLSPFPDDPLLLRRQGFRRRRREASGNRSPFNPVIVLRGPGDDSAAADHDGVSTFELFYDDGDGTGLRPLPPTMSELLLGSGFDKLLEQFAQIEMNGFGRPENPPASKAAIESMPTVEIGETHVETEAHCAVCKEAFELHAEARELPCKHIYHSDCILPWLSMRNSCPVCRHELPSDLETRVPSQIDEETIGLTIWRLPGGGFAVGRFSGGRRTGESHFPVVYTEMDGGLNTNGGAPRRISRSVRSNRVRESRGFGRVISNFFSFFGRIGSRNSSSGHGSVSRSRSHVSSIFNRSSRRHSRTWVMDD

SEQ ID NO: 17037 - protein, 361 aa, Glycine max
MNLETQPGTASYWCYSCTRFVHLSVQSTIACPHCQSGFVEEIRAGAGAEASPRHRLSPFPDDPLLLRRQGFRRRRREASGNRSPFNPVIVLRGPGDDSAAADHDGVSTFELFYDDGDGTGLRPLPPTMSELLLGSGFDKLLEQFAQIEMNGFGRPENPPASKAAIESMPTVEIGETHVETEAHCAVCKEAFELHAEARELPCKHIYHSDCILPWLSMRNSCPVCRHELPSDLETRVPSQIDEETIGLTIWRLPGGGFAVGRFSGGRRTGESHFPVVYTEMDGGLNTNGGAPRRISRSVRSNRVRESRGFGRVISNFFSFFGRIGSRNSSSGHGSVSRSRSHVSSIFNRSSRRHSRTWVMDD

SEQ ID NO: 17038 - protein, 234 aa, Glycine max
MSELLLGSGFDKLLEQFAQIEMNGFGRPENPPASKAAIESMPTVEIGETHVETEAHCAVCKEAFELHAEARELPCKHIYHSDCILPWLSMRNSCPVCRHELPSDLETRVPSQIDEETIGLTIWRLPGGGFAVGRFSGGRRTGESHFPVVYTEMDGGLNTNGGAPRRISRSVRSNRVRESRGFGRVISNFFSFFGRIGSRNSSSGHGSVSRSRSHVSSIFNRSSRRHSRTWVMDD

SEQ ID NO: 17039 - DNA, 1330 bp, Glycine max
agtggacctatcaaacaacaagttcaatggccccataccagccaagtttggtagttcttcaaatttacaactcctcaatgtgtctttcaacaatatctctggttcaataccaacagcaaagtcattcaaattgatgggaagaagtgcatttgttggaaattcagagctatgtggagcaccattgcaaccatgtcctgattcagttggaatattgggaagcaaaggcacgtggaaggttacacgtattgtgcttctctctgtagggttgttaatagtccttctgggacttgtttttggaattctttacttgagaaggggaatcaaaagtcaatggaagatggtctcattcgctggtctacctcaattcacagcaaacgatattttgacaagcctcagtgccacaacaaaacctacagatattcaatcaccatcagttacaaagactgttctgcctacaggaataacagttttggtcaagaagattgaattggaagcaagaagcataaaggttgtgtcagaatttataatgaggctaggaaatgcaaggcacaagaacttaatcagattgttggggttctgccacaaccagcacctagtctatcttttgtatgattacttgcccaatgggaatttggctgagaaaatggaaatgaaatgggattgggcagcaaaattcagaacagtggttggaattgcaaggggactttgcttccttcaccatgaatgttacccagctataccccatggagacttgaggcctagcaacattgtattcgatgaaaatatggaaccccatttggcagaatttgggttcaaacatgtgtcgaggtggagcaaaggctcatcacccaccacaactaagtgggaaacagaatacaatgaagccacaaaagaggaactgagcatggatatctacaaatttggggagatgattctggaaattttaaccagggaaaggttggcaaattcaggagccagcatacacagcaaaccatgggaggttctcttaagagaaatttacaatgagaatggagcaagttcggcaagttcattgcaagagattaaacttgttcttgaggtagcaatgctttgcacccgaagcaggtcatctgaccggccatccatggaagatgttcttaagcttctgtcagggttaaaacatctagaggatggcagaacttcgaaagaagggcaataaaatgttcatttgcatcactgcgttgaaaaccattagaaacatatagtaattgcttagataacaagtttgcacgtatgtaattaaaggagtttgcagcttgtataatagatatttccattgtttcagtgtgcc

SEQ ID NO: 17040 - protein, 398 aa, Glycine max
VDLSNNKFNGPIPAKFGSSSNLQLLNVSFNNISGSIPTAKSFKLMGRSAFVGNSELCGAPLQPCPDSVGILGSKGTWKVTRIVLLSVGLLIVLLGLVFGILYLRRGIKSQWKMVSFAGLPQFTANDILTSLSATTKPTDIQSPSVTKTVLPTGITVLVKKIELEARSIKVVSEFIMRLGNARHKNLIRLLGFCHNQHLVYLLYDYLPNGNLAEKMEMKWDWAAKFRTVVGIARGLCFLHHECYPAIPHGDLRPSNIVFDENMEPHLAEFGFKHVSRWSKGSSPTTTKWETEYNEATKEELSMDIYKFGEMILEILTRERLANSGASIHSKPWEVLLREIYNENGASSASSLQEIKLVLEVAMLCTRSRSSDRPSMEDVLKLLSGLKHLEDGRTSKEGQ

SEQ ID NO: 17041 - protein, 354 aa, Glycine max
MGRSAFVGNSELCGAPLQPCPDSVGILGSKGTWKVTRIVLLSVGLLIVLLGLVFGILYLRRGIKSQWKMVSFAGLPQFTANDILTSLSATTKPTDIQSPSVTKTVLPTGITVLVKKIELEARSIKVVSEFIMRLGNARHKNLIRLLGFCHNQHLVYLLYDYLPNGNLAEKMEMKWDWAAKFRTVVGIARGLCFLHHECYPAIPHGDLRPSNIVFDENMEPHLAEFGFKHVSRWSKGSSPTTTKWETEYNEATKEELSMDIYKFGEMILEILTRERLANSGASIHSKPWEVLLREIYNENGASSASSLQEIKLVLEVAMLCTRSRSSDRPSMEDVLKLLSGLKHLEDGRTSKEGQ

SEQ ID NO: 17042 - protein, 286 aa, Glycine max
MVSFAGLPQFTANDILTSLSATTKPTDIQSPSVTKTVLPTGITVLVKKIELEARSIKVVSEFIMRLGNARHKNLIRLLGFCHNQHLVYLLYDYLPNGNLAEKMEMKWDWAAKFRTVVGIARGLCFLHHECYPAIPHGDLRPSNIVFDENMEPHLAEFGFKHVSRWSKGSSPTTTKWETEYNEATKEELSMDIYKFGEMILEILTRERLANSGASIHSKPWEVLLREIYNENGASSASSLQEIKLVLEVAMLCTRSRSSDRPSMEDVLKLLSGLKHLEDGRTSKEGQ

SEQ ID NO: 17043 - DNA, 1056 bp, Glycine max
tctcggaactttgaaaacgtggaagcacaccccagaccccacaccagtccccgtttgttccgctgcaaaacaaaaacaccgcgtcttccccgtgcggggaaaaagaaaagaaaagaaaagaaccctcaattttccgggaaaaccctccccacaatggtttcccgggaaaacaccaattggctcttcgattacggcttgatcgacgatattcccgttccggacgccaccttcggcgtcaattcctccgccttcacatggccccctaacgccttgaacgcttcctccaatgtcggcgttgaaattgatggctcgttgggggattctgacagtctcaaagagtctggctcaaagaaaagggttaggtctgagtcatgtgctgcttctggctccaaggcatgtcgggagaagttgagaagggataggcttaatgacaagtttgttgaattgggcgccattttggagcctggaaggcctgccaaaacagacaaggctgctatcctgattgatgctgtccgaatggtgacccagttacggggtgaagcccagaagttgaaagacactaatcagggtcttcaagaaaagattaaagagttaaaggctgagaagaacgaacttcgcgatgagaaacagaggctcaaggcagagaaggagaaactggagcagcagctgaaatctttgaatgcacagcctagtttcatgcctccccctgctgcaatgcctgctgcatttgcggcacaaggccaagcccatggcaacaagttggtaccttttattagttatcccggagttgcaatgtggcaattcatgccacctgctgcagtggatacctcacaggatcatgttctccgtccaccagttgcctaagctggcactgtacaattctctgggccagcattttggctcaaggttgtatccattttaccaataccttcttggctttgttagttctcttctaagtattctaactggacccagtggtgacttctgactatatctggcatatgatactattatgattaatgctggtagttgcatgtaaatcagtcaatgttaaat

SEQ ID NO: 17044 - protein, 287 aa, Glycine max
SRNFENVEAHPRPHTSPRLFRCKTKTPRLPRAGKKKRKEKNPQFSGKTLPTMVSRENTNWLFDYGLIDDIPVPDATFGVNSSAFTWPPNALNASSNVGVEIDGSLGDSDSLKESGSKKRVRSESCAASGSKACREKLRRDRLNDKFVELGAILEPGRPAKTDKAAILIDAVRMVTQLRGEAQKLKDTNQGLQEKIKELKAEKNELRDEKQRLKAEKEKLEQQLKSLNAQPSFMPPPAAMPAAFAAQGQAHGNKLVPFISYPGVAMWQFMPPAAVDTSQDHVLRPPVA

SEQ ID NO: 17045 - protein, 236 aa, Glycine max
MVSRENTNWLFDYGLIDDIPVPDATFGVNSSAFTWPPNALNASSNVGVEIDGSLGDSDSLKESGSKKRVRSESCAASGSKACREKLRRDRLNDKFVELGAILEPGRPAKTDKAAILIDAVRMVTQLRGEAQKLKDTNQGLQEKIKELKAEKNELRDEKQRLKAEKEKLEQQLKSLNAQPSFMPPPAAMPAAFAAQGQAHGNKLVPFISYPGVAMWQFMPPAAVDTSQDHVLRPPVA

SEQ ID NO: 17046 - DNA, 1253 bp, Glycine max
ttttattcgtataggaatgagattgagagacgtggactccctttgactccggaatcattggccacccttcctcccttttcctccattactttcaataccgatgatgccgatggagggaattgcaagcctgaagtggctaaaactggtttgggctcttctgcagcgatgacaatggctgtagttgctgctctacttcattacctggatgttgtaaagctttcctcttcgaaagatcatcgggaaaggaaggatgttgcagatcttgatatggtgcataaaatagctcaaactgcacactgtattgcacaggggaaagttggcagtgggtttgatgtcagctcagctgtgtatggcagtcagcgctatgtgcggttttcaccggaagtgatttcttccactaaggttgcagatatagcagtgcctttatcagatggtatcactgaaattataaaaggaaattgggaccatgacacgactgagttctctctaccacctttgatgtctcttttactaggagaacctggaactggtggatcatccacgccatcgatggttggtgctgttaaaaaatggcaaaagtctgaccctcagaaatccctggacacatggacaagattgtcagaggcaaattcagcattggaaatgcaactaaacttgttaagcaaattagcaaaggaacaatggaatgcatataaatctgtgattgacagctgcagcatgctcagaccagacaagtggatagaacaagcttctgaacctaacaaggaagcagttattaaagcactgcttggagcaaaagaagccatgctggggattagatatcatatgcgcctaataggcgaggctgcaggtgttccaattgaaccagaaccacaaacacaacttttagatgctacaatgaacttggaaggagtattgttggctggagttccaggggcaggaggatttgatgcagtctttgctgttactttgggagattcgagcagcaatgtgacaaaagtatggagttcactcaatgtccttgccttgttggttaaagaagatccttgtggcgtttgtttagaaaaggctgatccacgaaccaatggaatcacatcagctgtgtcttcaattcatattgaataagctcatttccatcaattaatagttccgtggaatgtggcttcactagctattagtttttgctttttttcaatttcgggggaaaatgagtgtaagattgaaaataagctttaattgatatagtttttttt

SEQ ID NO: 17047 - protein, 374 aa, Glycine max
FYSYRNEIERRGLPLTPESLATLPPFSSITFNTDDADGGNCKPEVAKTGLGSSAAMTMAVVAALLHYLDVVKLSSSKDHRERKDVADLDMVHKIAQTAHCIAQGKVGSGFDVSSAVYGSQRYVRFSPEVISSTKVADIAVPLSDGITEIIKGNWDHDTTEFSLPPLMSLLLGEPGTGGSSTPSMVGAVKKWQKSDPQKSLDTWTRLSEANSALEMQLNLLSKLAKEQWNAYKSVIDSCSMLRPDKWIEQASEPNKEAVIKALLGAKEAMLGIRYHMRLIGEAAGVPIEPEPQTQLLDATMNLEGVLLAGVPGAGGFDAVFAVTLGDSSSNVTKVWSSLNVLALLVKEDPCGVCLEKADPRTNGITSAVSSIHIE

SEQ ID NO: 17048 - protein, 319 aa, Glycine max
MTMAVVAALLHYLDVVKLSSSKDHRERKDVADLDMVHKIAQTAHCIAQGKVGSGFDVSSAVYGSQRYVRFSPEVISSTKVADIAVPLSDGITEIIKGNWDHDTTEFSLPPLMSLLLGEPGTGGSSTPSMVGAVKKWQKSDPQKSLDTWTRLSEANSALEMQLNLLSKLAKEQWNAYKSVIDSCSMLRPDKWIEQASEPNKEAVIKALLGAKEAMLGIRYHMRLIGEAAGVPIEPEPQTQLLDATMNLEGVLLAGVPGAGGFDAVFAVTLGDSSSNVTKVWSSLNVLALLVKEDPCGVCLEKADPRTNGITSAVSSIHIE

SEQ ID NO: 17049 - protein, 317 aa, Glycine max
MAVVAALLHYLDVVKLSSSKDHRERKDVADLDMVHKIAQTAHCIAQGKVGSGFDVSSAVYGSQRYVRFSPEVISSTKVADIAVPLSDGITEIIKGNWDHDTTEFSLPPLMSLLLGEPGTGGSSTPSMVGAVKKWQKSDPQKSLDTWTRLSEANSALEMQLNLLSKLAKEQWNAYKSVIDSCSMLRPDKWIEQASEPNKEAVIKALLGAKEAMLGIRYHMRLIGEAAGVPIEPEPQTQLLDATMNLEGVLLAGVPGAGGFDAVFAVTLGDSSSNVTKVWSSLNVLALLVKEDPCGVCLEKADPRTNGITSAVSSIHIE

SEQ ID NO: 17050 - DNA, 1429 bp, Glycine max
ctacgtaggccccccccccccccaaacaaacactatccctggcagtaccaatccatctctttcctctctggcccatgacgacgtcgtccggttccgtgaagaacgcgatgcccccaggcctccaagaacccaacatcaatgccgaaccctcttcctccgccgacgattgctccaactccaacacgaagcccatcgtgttggtcaccaacagtgacggcattgagtctccgggcctcgttcacctcgtcgaagccctcgtgctccagggcctctgcgacgtccatgtctgcgttcctcaatcggacaaatcggcttcggcccactctgtcactcgcggagtaaccgttgaagctttttcggcacaaattaatggcgccaccgcctttgaagtttcaggaactcctgtggattgtgtttcactagcgttatctggggccttgttttcatggtcaaaacctatgctggttattagtggaattaaccggggatcaagctgtggtcatcacatgttctactcaggtgttgttgctggagcaagagaggcgttgttatgtggtgtaccttcattgtcaatatcattaaattggaagaaggatgaaagtcaagagactgatttcaaggatgcagtagtactctgtttacctttaataattgctgctatcagggatgttgtaaacggaactttcaccaaaagttgctttctgaatatagaaattcctacatcgcctttaacctgtaagggcttcaaattaaccaagcaaagtatgtggagatccactctaaactggcaggcagtttcaactagccggtatcctcctggtcatttcttggccagtaaacaaggctttggtcttcagtttgcacagattggccgagatgcctctgctgctggtgcagctcgcagattaactacacagaaaaagaatttggagattgttgaatcaattggagctgctggaaaacctgattccaacagggtgaagaagtacttcaggctagagttttcggagaagcagctggaagatatagatgacgatctagattacagggcacttgaaagtggatttgttgcagttactcctctctctctatctcctcatactgagaccaatattcaaatggcagcttctgattggatttcatctgtgtttcctggtgaacaatagcctcaaacagagttcagcttcagcgtgattatgtacatttgagatttctgattcttttctattttcttcttgaaagcaaaggtggagcagaagcgtctgtcacacccattctatagttgatatcatcaatctgtactctatgtttgtatgtgtgtgtaagatattttgtattcccctcttcattgtttcatttcttttggtcgctagttatttctgatgttatttgcttcctgtaatctcctaggcatattttaaaaatgcca

SEQ ID NO: 17051 - protein, 363 aa, Glycine max
MTTSSGSVKNAMPPGLQEPNINAEPSSSADDCSNSNTKPIVLVTNSDGIESPGLVHLVEALVLQGLCDVHVCVPQSDKSASAHSVTRGVTVEAFSAQINGATAFEVSGTPVDCVSLALSGALFSWSKPMLVISGINRGSSCGHHMFYSGVVAGAREALLCGVPSLSISLNWKKDESQETDFKDAVVLCLPLIIAAIRDVVNGTFTKSCFLNIEIPTSPLTCKGFKLTKQSMWRSTLNWQAVSTSRYPPGHFLASKQGFGLQFAQIGRDASAAGAARRLTTQKKNLEIVESIGAAGKPDSNRVKKYFRLEFSEKQLEDIDDDLDYRALESGFVAVTPLSLSPHTETNIQMAASDWISSVFPGEQ

SEQ ID NO: 17052 - protein, 352 aa, Glycine max
MPPGLQEPNINAEPSSSADDCSNSNTKPIVLVTNSDGIESPGLVHLVEALVLQGLCDVHVCVPQSDKSASAHSVTRGVTVEAFSAQINGATAFEVSGTPVDCVSLALSGALFSWSKPMLVISGINRGSSCGHHMFYSGVVAGAREALLCGVPSLSISLNWKKDESQETDFKDAVVLCLPLIIAAIRDVVNGTFTKSCFLNIEIPTSPLTCKGFKLTKQSMWRSTLNWQAVSTSRYPPGHFLASKQGFGLQFAQIGRDASAAGAARRLTTQKKNLEIVESIGAAGKPDSNRVKKYFRLEFSEKQLEDIDDDLDYRALESGFVAVTPLSLSPHTETNIQMAASDWISSVFPGEQ

SEQ ID NO: 17053 - protein, 235 aa, Glycine max
MLVISGINRGSSCGHHMFYSGVVAGAREALLCGVPSLSISLNWKKDESQETDFKDAVVLCLPLIIAAIRDVVNGTFTKSCFLNIEIPTSPLTCKGFKLTKQSMWRSTLNWQAVSTSRYPPGHFLASKQGFGLQFAQIGRDASAAGAARRLTTQKKNLEIVESIGAAGKPDSNRVKKYFRLEFSEKQLEDIDDDLDYRALESGFVAVTPLSLSPHTETNIQMAASDWISSVFPGEQ

SEQ ID NO: 17054 - DNA, 1708 bp, Glycine max
gtatcgctttttggcggttttagcctttttcggtttcgaacattcggacgaatttctctctctctctcttcaattcaacacttggaggacatgagatggatcgggaagaatatttggggaagtgttccaatatgaaatgccaaagagtggatgaatcatatgtacatgctcttcaagatgaagtaatggaagttgagcatttgcttgcagaacctagaaatgatcatgcttccctggatggtagtttggattctcatacaactttgaatggaaaggatgatttggaactggaggcccttgatggattgctggatgatgttgaaatcaatgatcttgaaggaactgttggtttccctggtggtacatgtgaagaatattttttggattttggatttgctgacaaatttgaggaggtactaggctctggtccttttgtaggttcactcttgcaaaactcaagttctgaaagtcattcttccggattaagcggaagtagcattgttgatggggtattagaatcaacagaagtacctattgcacaatctgaatgcaaaaatgattctctagatgagacaataacctatgaatcacatggtgccttcaggaacaatccaagtcaaccatcaaaagtaaattgcagatacaacatttcacttgatatacaacatctgcaagatttggataacaaccgtcatttagctggtggtatattgacttgtaagaaggaaaagggtcctgttgaaaaaggccaacctgctgcacttagagagaagagattccgaaagcctactcagaggtacattgaagaattttcaaattcaaggtcaaaggaaaaggcaccaactgctggtacaaaaactaaatatttaagtgactcatcatgtgatgatgtacttcatataagaattaaagcattcaaaaagagtccaagtgaaaagtctagtattgaaaatagagatgtgatgcttcctgagttgcaagttcacaaagggcgtccgaagaaagagaaacttgagtatgacaacgagtcatttcccttggaatctgaggatgaatggttgacatcaaaaagatctagaaggaaagatcgaagaaagcatcagaagatgtggactctccctgaagtgttgaagttggttgaaggcatatctgaatatggagttggtcgatggactgacataaagaggtttctgttttcttctacaagctaccgaactcccatagatctcagagacaagtggcgaaaccttttgagagccagttctgcacagaaaagcacgagagaggctgaacaaaatgacgagcttgccctgcgtcccttgccatttaatgtggtacatcgtgtgcaagaattggctaaaattcacccatacccaagggaacgtggatcaaagaagttgcgtgttagccaagctggctcttctgtcattgctaaagattctcctccccttagtcttagcaaaagaaatgtacgtaggaagtttacttagaagtccatatggaaaacagtccatggaaatctatagtcaaaagaatcttgttgaaatttaggtaatcacattcgcacaattttatactgtgaagtaattttatgtttacaaaggcacagaaattttgaattgtaattatgaggaatcattagttgtcctacaatagtttgccatgcttaatgcctaatacttttatagtatgattttattagtgcact

SEQ ID NO: 17055 - protein, 464 aa, Glycine max
MDREEYLGKCSNMKCQRVDESYVHALQDEVMEVEHLLAEPRNDHASLDGSLDSHTTLNGKDDLELEALDGLLDDVEINDLEGTVGFPGGTCEEYFLDFGFADKFEEVLGSGPFVGSLLQNSSSESHSSGLSGSSIVDGVLESTEVPIAQSECKNDSLDETITYESHGAFRNNPSQPSKVNCRYNISLDIQHLQDLDNNRHLAGGILTCKKEKGPVEKGQPAALREKRFRKPTQRYIEEFSNSRSKEKAPTAGTKTKYLSDSSCDDVLHIRIKAFKKSPSEKSSIENRDVMLPELQVHKGRPKKEKLEYDNESFPLESEDEWLTSKRSRRKDRRKHQKMWTLPEVLKLVEGISEYGVGRWTDIKRFLFSSTSYRTPIDLRDKWRNLLRASSAQKSTREAEQNDELALRPLPFNVVHRVQELAKIHPYPRERGSKKLRVSQAGSSVIAKDSPPLSLSKRNVRRKFT

SEQ ID NO: 17056 - protein, 452 aa, Glycine max
MKCQRVDESYVHALQDEVMEVEHLLAEPRNDHASLDGSLDSHTTLNGKDDLELEALDGLLDDVEINDLEGTVGFPGGTCEEYFLDFGFADKFEEVLGSGPFVGSLLQNSSSESHSSGLSGSSIVDGVLESTEVPIAQSECKNDSLDETITYESHGAFRNNPSQPSKVNCRYNISLDIQHLQDLDNNRHLAGGILTCKKEKGPVEKGQPAALREKRFRKPTQRYIEEFSNSRSKEKAPTAGTKTKYLSDSSCDDVLHIRIKAFKKSPSEKSSIENRDVMLPELQVHKGRPKKEKLEYDNESFPLESEDEWLTSKRSRRKDRRKHQKMWTLPEVLKLVEGISEYGVGRWTDIKRFLFSSTSYRTPIDLRDKWRNLLRASSAQKSTREAEQNDELALRPLPFNVVHRVQELAKIHPYPRERGSKKLRVSQAGSSVIAKDSPPLSLSKRNVRRKFT

SEQ ID NO: 17057 - protein, 434 aa, Glycine max
MEVEHLLAEPRNDHASLDGSLDSHTTLNGKDDLELEALDGLLDDVEINDLEGTVGFPGGTCEEYFLDFGFADKFEEVLGSGPFVGSLLQNSSSESHSSGLSGSSIVDGVLESTEVPIAQSECKNDSLDETITYESHGAFRNNPSQPSKVNCRYNISLDIQHLQDLDNNRHLAGGILTCKKEKGPVEKGQPAALREKRFRKPTQRYIEEFSNSRSKEKAPTAGTKTKYLSDSSCDDVLHIRIKAFKKSPSEKSSIENRDVMLPELQVHKGRPKKEKLEYDNESFPLESEDEWLTSKRSRRKDRRKHQKMWTLPEVLKLVEGISEYGVGRWTDIKRFLFSSTSYRTPIDLRDKWRNLLRASSAQKSTREAEQNDELALRPLPFNVVHRVQELAKIHPYPRERGSKKLRVSQAGSSVIAKDSPPLSLSKRNVRRKFT

SEQ ID NO: 17058 - DNA, 1625 bp, Glycine max
attttcttctggtgtgttgggtgctctctatacacttgctcagaaagaaaagtccactgctgttgcaacaatagaaacaatgagcagcaaactgaaggaaaaggaagaactgattgtttccttgaagaagaactatgagttgaagttactaaacaagcgggaggaacaagccaagctacttgaaaaggcaaaggaagagcaactggcactgataaaccaactgaattctgcaaacagtactattaaccgcttggggcaggagcttaaaaatgagagaagtttgattgaggacctgaaacttcaaattgaccgacttaaagctgagctttcaaagactgatacagataagaaggatcttgaaaacaatttgaaagaaaagatagattccattggtgttttacaagaaagaatcaatctgctgagtgtggacctcaaggacaaagaagatgctgttcagaatctcaattcatcccaagcagaaaaggagttggaattgaagagtttgaagtctacctatgagcaaaccaaggatgacttaataaatgttcaattgcagattcaagggttgaaagatgaactactgaaaacccaagaggaactagaagctaaagattccttggtgatagaactaaattcaagagtgagttccttaactattgagaacaataattttaggagtaaatgtgatgtcatggagaaggaatacaatgatctaaagttcagtgctgtaaagaaggctgctttggactctaaggttttaagagaaaaagaagaggagcttcatcagctaaaggatcagtttgaacttgccctaggtgaagcaagcaaaagccagatcgtcattgctgatttatcccaagaaagagatgatttgaaggaggctctagataatgaatctagcaaggtgaatcatttgaagcaagaactccaagttaccctggagaatcttgcaaaatcaagaaatgagtctgctgaattggaaaaccttctaactttgtcaaacaaactgtgcaaagagctcgagctcgaggtctctaagctctcatctgagctcactgaggttaatgaatcgctacagagaaaccttgatgatgcgaaacatgaggcagaaatgctagcaagtgagcttacaactgccaaggaacacttgaaggaagcacaagcagagctgcaaggtgtgtcaaaagaattgacagctgctcttgaaaagaatgatagcctacaaaaagaattagttgaagtctacaaaaaggctgaaagcacagcagaggatttgaaggaacaaaaacagttagttgcttctctgaacaaagatttacaagcattagagcagcaagtctcaaaagacaaggagtcccgaaaatctcttgagagggacctggaggaggcgaccatatcactagatgaaatgaaccgaaatgcggtgatcctttctggggaactacagagagctaattctcttgtttctagccttgaaaaagagaaagatgtgcttattaagtccctaaccaaccaaagaaatgcatgcaaagaggcccaagacaacattgaagatgctcataaccttatcatgaaacttggcaaagaaagagagaatttagagaaaaaaggtaagaaatttgaag

SEQ ID NO: 17059 - protein, 541 aa, Glycine max
FSSGVLGALYTLAQKEKSTAVATIETMSSKLKEKEELIVSLKKNYELKLLNKREEQAKLLEKAKEEQLALINQLNSANSTINRLGQELKNERSLIEDLKLQIDRLKAELSKTDTDKKDLENNLKEKIDSIGVLQERINLLSVDLKDKEDAVQNLNSSQAEKELELKSLKSTYEQTKDDLINVQLQIQGLKDELLKTQEELEAKDSLVIELNSRVSSLTIENNNFRSKCDVMEKEYNDLKFSAVKKAALDSKVLREKEEELHQLKDQFELALGEASKSQIVIADLSQERDDLKEALDNESSKVNHLKQELQVTLENLAKSRNESAELENLLTLSNKLCKELELEVSKLSSELTEVNESLQRNLDDAKHEAEMLASELTTAKEHLKEAQAELQGVSKELTAALEKNDSLQKELVEVYKKAESTAEDLKEQKQLVASLNKDLQALEQQVSKDKESRKSLERDLEEATISLDEMNRNAVILSGELQRANSLVSSLEKEKDVLIKSLTNQRNACKEAQDNIEDAHNLIMKLGKERENLEKKGKKFE

SEQ ID NO: 17060 - protein, 515 aa, Glycine max
MSSKLKEKEELIVSLKKNYELKLLNKREEQAKLLEKAKEEQLALINQLNSANSTINRLGQELKNERSLIEDLKLQIDRLKAELSKTDTDKKDLENNLKEKIDSIGVLQERINLLSVDLKDKEDAVQNLNSSQAEKELELKSLKSTYEQTKDDLINVQLQIQGLKDELLKTQEELEAKDSLVIELNSRVSSLTIENNNFRSKCDVMEKEYNDLKFSAVKKAALDSKVLREKEEELHQLKDQFELALGEASKSQIVIADLSQERDDLKEALDNESSKVNHLKQELQVTLENLAKSRNESAELENLLTLSNKLCKELELEVSKLSSELTEVNESLQRNLDDAKHEAEMLASELTTAKEHLKEAQAELQGVSKELTAALEKNDSLQKELVEVYKKAESTAEDLKEQKQLVASLNKDLQALEQQVSKDKESRKSLERDLEEATISLDEMNRNAVILSGELQRANSLVSSLEKEKDVLIKSLTNQRNACKEAQDNIEDAHNLIMKLGKERENLEKKGKKFE

SEQ ID NO: 17061 - protein, 311 aa, Glycine max
MEKEYNDLKFSAVKKAALDSKVLREKEEELHQLKDQFELALGEASKSQIVIADLSQERDDLKEALDNESSKVNHLKQELQVTLENLAKSRNESAELENLLTLSNKLCKELELEVSKLSSELTEVNESLQRNLDDAKHEAEMLASELTTAKEHLKEAQAELQGVSKELTAALEKNDSLQKELVEVYKKAESTAEDLKEQKQLVASLNKDLQALEQQVSKDKESRKSLERDLEEATISLDEMNRNAVILSGELQRANSLVSSLEKEKDVLIKSLTNQRNACKEAQDNIEDAHNLIMKLGKERENLEKKGKKFE

SEQ ID NO: 17062 - DNA, 609 bp, Glycine max
atttcatcgctcttcacataaacttcaagcgagcaaacaaacaactagcaagggaagaaagaaactacagaaaagaaatggcttccacttctgcagtttcaatggctatgccagtaacttatgctagccagaagagggtggtgcctagctcggatgcattcttcaagccactgcctctacggtcttccaaggcagtgacagcatcaaaactcaatggaaggtttcaagtgagggcctccatgaaggagaaagttgtgacggggctcaccgcagctgcattgacagcttcaatgatggttcctgatgtggctgaggctgccgttacaccttctctcaagaacttcttgctcagcatcgcggcaggtggagttgttgttgttgccattattggtgctgtgatcggtgtttccaatttcgatcccgtcaagcgtagctgatggagttctgaggcactgtgttttatttatttttttgttacctcttatcatgatatgtatctttaatgtaatgttcttcagaaatgaagtgaaccctctgatgtgtgtactaatatgtgactcttatgctccacttgagcagaagcttttcaatgcttaaaattgtaaaaag

SEQ ID NO: 17063 - protein, 144 aa, Glycine max
FIALHINFKRANKQLAREERNYRKEMASTSAVSMAMPVTYASQKRVVPSSDAFFKPLPLRSSKAVTASKLNGRFQVRASMKEKVVTGLTAAALTASMMVPDVAEAAVTPSLKNFLLSIAAGGVVVVAIIGAVIGVSNFDPVKRS

SEQ ID NO: 17064 - protein, 119 aa, Glycine max
MASTSAVSMAMPVTYASQKRVVPSSDAFFKPLPLRSSKAVTASKLNGRFQVRASMKEKVVTGLTAAALTASMMVPDVAEAAVTPSLKNFLLSIAAGGVVVVAIIGAVIGVSNFDPVKRS

SEQ ID NO: 17065 - protein, 111 aa, Glycine max
MAMPVTYASQKRVVPSSDAFFKPLPLRSSKAVTASKLNGRFQVRASMKEKVVTGLTAAALTASMMVPDVAEAAVTPSLKNFLLSIAAGGVVVVAIIGAVIGVSNFDPVKRS

SEQ ID NO: 17066 - DNA, 1085 bp, Glycine max
aatagaaggagaagaaagccccagccagaacctctctcgcgacctggtagttttttgtcgaattaccaaggcacccaattgctacccttctcaggtccacacgtatatgcttccactgccatggttagcccagattggagtggtgcacttgtgacttcctctgcagatgctaggttgcacaaccacaaccaccaccaccaccaacaagacctttttctcggatcttctcacaaagaagggaagcaagtagcattcttacacagcaaccatcatccctccacactcagcaaccaaaacccgccacctttcccatccccttccatctgccacacgcttctcaggacccgccctctatcagaaaccctgcggcggaggagcgagaagcaaaatgttctgtgaaagcttaacaacaacaacaacagcaagtaataataataacaactcgctgcatgacactattccttgtgctctctctcttctgtcatcatcacagacgcacacaccaggagggaatggtttgaaccaaatggtacagcagcctcctcctccctcaatgtccctcatgatgcagcccttaggccttagcttgcaggataataacaacaacagcttagagtctgtggatcattgttcctccatatatagcttggcttctgatcatcatggatcccactgcaatgaagcagcccctcaactgtttccctttcaatgggaatagagataaggattaattattcacactttctttgttcattcccctaatgaattctttcccccccaaggactagtcaattaattctgatttcaccctccctttataatgaaggcaatgcaatgcctatgaacaatctcatggtatttctatttgtatcttcaggagagaaaaaaaaactcaataattttacataagattcataatatatgggagttgtaaaaggaaagtctatatgtgtacacctctaatgggaataatgttagatggtaactgacaaaatttagtaatttacatggtaagttccaatcaagtccaacctcttattaggttatgggcttggtaatgttaaatccgattcttattttcatcc

SEQ ID NO: 17067 - protein, 132 aa, Glycine max
NRRRRKPQPEPLSRPGSFLSNYQGTQLLPFSGPHVYASTAMVSPDWSGALVTSSADARLHNHNHHHHQQDLFLGSSHKEGKQVAFLHSNHHPSTLSNQNPPPFPSPSICHTLLRTRPLSETLRRRSEKQNVL

SEQ ID NO: 17068 - protein, 109 aa, Glycine max
MFCESLTTTTTASNNNNNSLHDTIPCALSLLSSSQTHTPGGNGLNQMVQQPPPPSMSLMMQPLGLSLQDNNNNSLESVDHCSSIYSLASDHHGSHCNEAAPQLFPFQWE

SEQ ID NO: 17069 - protein, 92 aa, Glycine max
MVSPDWSGALVTSSADARLHNHNHHHHQQDLFLGSSHKEGKQVAFLHSNHHPSTLSNQNPPPFPSPSICHTLLRTRPLSETLRRRSEKQNVL

SEQ ID NO: 17070 - DNA, 1359 bp, Glycine max
tctgagcggacatatcttactcccaggatttattaacacccacgttcatagctcccaacaaatggccagaggcatagcagacgatgtggatttaatgacctggctgcatgagcgcatctggccttacgaatcgaacatgagcgaacaggattcgtacctctctactttgctttgtgggattgaactcattcactccggtgtaacctgttttgcggaagctgggggccagcatgtttctgggatggctagagcagttggcttactgggtttgcgagcttgcttaacccaatcaaccatggactctggccacggtttgcccccatcctgggccactcgaaccactcaccaatgcattcagtctcaaaaggacaattatcacaagtaccacaatacagcccaaggccgcatcagaatctggttcgcgattaggcaaatcatgaactctactcctcgcttacttattcaaacaagagatgctgcaacacaactcaatactggaatacacatgcatgttgcagagataccacatgagaaccaactagttatggatgttcacaaaatagatcacggaactgttacatacttggacaagataaatttccttcaaaacaatctgttagcagctcactcagtttggatcgataataatgagatatctcttctttcacgagcaggggtcaaagtgtctcactgtcctgctgctgcaatgcgaatgcttggatttgcaccagtaagggagatgcttgatgctggcatctgtgtctccctgggaacagatggggccccatcaaacaatcgcatgagcatcgttgacgaaatgtacctagcttctctaattaacaaaggacggggagtttatgctaatggaactacagatccaactgcattgcctgctgaaactattcttaggatggttactgtcaatggtgcaaagtcagtattatgggatgatgaactaggttctcttgaggttgggaaaaaggctgacattgttgtagtggatccttcgtcttggtctatggttcctgttcatgactgcatttctagcttagtgtattgtatgcgatcagaaaatgtggtttccgtcatgtgcaatggattatggataatgaagaacaagaagattatatatgtggacgaggaagaagttattttgaaggcaaaacaggcttcagttgaacttctgaagagggcaggcataaaattaccaaccagaatgaacataatttaactgttgtttatcagtatattgtctatgataagcgcttgtatccattgaacttgtttccaagaggcgtcaactgtttgatgctaagcgtatgacggtgcaatcatgatctggccattggatctttgaat

SEQ ID NO: 17071 - protein, 409 aa, Glycine max
LSGHILLPGFINTHVHSSQQMARGIADDVDLMTWLHERIWPYESNMSEQDSYLSTLLCGIELIHSGVTCFAEAGGQHVSGMARAVGLLGLRACLTQSTMDSGHGLPPSWATRTTHQCIQSQKDNYHKYHNTAQGRIRIWFAIRQIMNSTPRLLIQTRDAATQLNTGIHMHVAEIPHENQLVMDVHKIDHGTVTYLDKINFLQNNLLAAHSVWIDNNEISLLSRAGVKVSHCPAAAMRMLGFAPVREMLDAGICVSLGTDGAPSNNRMSIVDEMYLASLINKGRGVYANGTTDPTALPAETILRMVTVNGAKSVLWDDELGSLEVGKKADIVVVDPSSWSMVPVHDCISSLVYCMRSENVVSVMCNGLWIMKNKKIIYVDEEEVILKAKQASVELLKRAGIKLPTRMNII

SEQ ID NO: 17072 - protein, 389 aa, Glycine max
MARGIADDVDLMTWLHERIWPYESNMSEQDSYLSTLLCGIELIHSGVTCFAEAGGQHVSGMARAVGLLGLRACLTQSTMDSGHGLPPSWATRTTHQCIQSQKDNYHKYHNTAQGRIRIWFAIRQIMNSTPRLLIQTRDAATQLNTGIHMHVAEIPHENQLVMDVHKIDHGTVTYLDKINFLQNNLLAAHSVWIDNNEISLLSRAGVKVSHCPAAAMRMLGFAPVREMLDAGICVSLGTDGAPSNNRMSIVDEMYLASLINKGRGVYANGTTDPTALPAETILRMVTVNGAKSVLWDDELGSLEVGKKADIVVVDPSSWSMVPVHDCISSLVYCMRSENVVSVMCNGLWIMKNKKIIYVDEEEVILKAKQASVELLKRAGIKLPTRMNII

SEQ ID NO: 17073 - protein, 378 aa, Glycine max
MTWLHERIWPYESNMSEQDSYLSTLLCGIELIHSGVTCFAEAGGQHVSGMARAVGLLGLRACLTQSTMDSGHGLPPSWATRTTHQCIQSQKDNYHKYHNTAQGRIRIWFAIRQIMNSTPRLLIQTRDAATQLNTGIHMHVAEIPHENQLVMDVHKIDHGTVTYLDKINFLQNNLLAAHSVWIDNNEISLLSRAGVKVSHCPAAAMRMLGFAPVREMLDAGICVSLGTDGAPSNNRMSIVDEMYLASLINKGRGVYANGTTDPTALPAETILRMVTVNGAKSVLWDDELGSLEVGKKADIVVVDPSSWSMVPVHDCISSLVYCMRSENVVSVMCNGLWIMKNKKIIYVDEEEVILKAKQASVELLKRAGIKLPTRMNII

SEQ ID NO: 17074 - DNA, 1280 bp, Glycine max
aaggatgaagttattctcagggaagaagcaataagaaaagagtataatgaacttgacacagtctggtttatggcaggttctctatttcagcaatatccatatgacattcctactgaggccttttcatttgagattttcaaacaagcctttgctgctattcagtcttgtgtggtgcatttacagaaagttagtttagctcggagatttgctttagttcccctgggacctcctttactgtcctaccaaagcaactgcaaggcaatgctaactgctgttgatggcgctgttgagcttgcagttgatcgcccgtataaagccggggacccaattgttgtgtggtgtggccctcaacctaactcaaagttgcccacaaactatggttttgttgatgaaaataattccaatgatcgtcttatagttgaggcagctttaaatactgaagatccacaatatcaagataaaagaatggtggctcaaagaaatggaaagttatcagttcaagtttttcatgtatatgctgggaaggaaagggaagctgtcttagatatgcttcgttatatgcgtttgggctatgtttcagatccttctgagatggaatctgtcatctcctctcaaggtccagtttgtcctgtaagcccttgtatggaacgggctgcgttggatcagttggctgattatttcaaggcacggctggctggctaccctacaacattggctgaagatgaatctatgctgacagatgataatctgaatccaaagaagcgagttgctacccaatatgttaggctggaaaagaaaatgctccatgcctgtttgcaggcaaccaccgacttcattaaccagcttccagaccacactatatctccatgccccgctccctatgcacctttattgaaatgaaaggaactggaaatgtatgtagtctgaactgtacaaatatggatttgatgaaccaggtcaattacaaatgcatatagttgaatcacggctcattgaacaatgatgcaagagttccggatttaaaaggttatgggtctgcctttccccctgaagataaaatctcaatccgagtgttttctgcatgcccccttcaggtaggcgtgtcgcttcattccctaggtaggacttaggaggaaaggaaccatcatttgagcaaatttttgtgtcttactgtaattgtaccgacgattcgaaatttgagtgttggaatgatactcaactttgtaaatggaaacctgaatcccaaatcctaattcaattgtgcataaaaaaaaaaaaag

SEQ ID NO: 17075 - protein, 299 aa, Glycine max
KDEVILREEAIRKEYNELDTVWFMAGSLFQQYPYDIPTEAFSFEIFKQAFAAIQSCVVHLQKVSLARRFALVPLGPPLLSYQSNCKAMLTAVDGAVELAVDRPYKAGDPIVVWCGPQPNSKLPTNYGFVDENNSNDRLIVEAALNTEDPQYQDKRMVAQRNGKLSVQVFHVYAGKEREAVLDMLRYMRLGYVSDPSEMESVISSQGPVCPVSPCMERAALDQLADYFKARLAGYPTTLAEDESMLTDDNLNPKKRVATQYVRLEKKMLHACLQATTDFINQLPDHTISPCPAPYAPLLK

SEQ ID NO: 17076 - protein, 276 aa, Glycine max
MAGSLFQQYPYDIPTEAFSFEIFKQAFAAIQSCVVHLQKVSLARRFALVPLGPPLLSYQSNCKAMLTAVDGAVELAVDRPYKAGDPIVVWCGPQPNSKLPTNYGFVDENNSNDRLIVEAALNTEDPQYQDKRMVAQRNGKLSVQVFHVYAGKEREAVLDMLRYMRLGYVSDPSEMESVISSQGPVCPVSPCMERAALDQLADYFKARLAGYPTTLAEDESMLTDDNLNPKKRVATQYVRLEKKMLHACLQATTDFINQLPDHTISPCPAPYAPLLK

SEQ ID NO: 17077 - protein, 212 aa, Glycine max
MLTAVDGAVELAVDRPYKAGDPIVVWCGPQPNSKLPTNYGFVDENNSNDRLIVEAALNTEDPQYQDKRMVAQRNGKLSVQVFHVYAGKEREAVLDMLRYMRLGYVSDPSEMESVISSQGPVCPVSPCMERAALDQLADYFKARLAGYPTTLAEDESMLTDDNLNPKKRVATQYVRLEKKMLHACLQATTDFINQLPDHTISPCPAPYAPLLK

SEQ ID NO: 17078 - DNA, 1155 bp, Glycine max
atgacactcccagtctttctacaaataatagtccttggattccttgagttggagcatctaagacttagggaggttcggagtcaagccaaagtgattggaacattagtaacctttggaggtgctttgctaatggcaatttacaaaggtccggcattcaacctttttcagtctggaagcacaacccatcatgaaaatggaagcacctcctctcacaacagccaccaaactgctggtgctatttatatactaatgggttgtgtggctttgtcgtctttctacattttgcagtctataacggtaaagagatacccagcggagctatcattggcaacgttgatatgcctggcgggaacagtggaagcatctgcagtggcatttgtggctgaacgtcactcccgtgcttgggctgttggttgggattataggctctatgctcctttttacacgggagtagttagttcaggaattgcatactatgttcaagggctggtgatgaaactaagaggccccgtatttgcaacagcctttaatcctctttgcatgatcattgttgctgctttgggctcccttatattaggagaactgctccatctcggaagtatcattggaggcattgtaatcgcagtggggctttactcggttgtgtggggcaaagccaaagattattcagaacccaaattaccatcaacagatgcagaagacacagaatcactgccaattactgcaacttccaaaattgatattatttctgggaatttggaaaaacaaccatcaactgatcagaaattagaggagaccaacaaagtgggggaagaaaaagagttgaatgttgtgaaggtttaattgactaatcaacgattccttgtccacccacaatgttcggagaaagtgaagtctcacgtgtgcactaccagaaatgcattgcctcaagtcaaatatcaatgtttacaaagaatgagtctaggcaacttaattcctaagattaggccatatagctaccaatagtattcctctctctctctctctctctctctctctctgttgtaattagttttgaacaagcaattacctacgttctgtttgttagagtagataatgtatttcattacttctgtaacctatgtatgattaaggcatgcagtgagaattagtatg

SEQ ID NO: 17079 - protein, 280 aa, Glycine max
MTLPVFLQIIVLGFLELEHLRLREVRSQAKVIGTLVTFGGALLMAIYKGPAFNLFQSGSTTHHENGSTSSHNSHQTAGAIYILMGCVALSSFYILQSITVKRYPAELSLATLICLAGTVEASAVAFVAERHSRAWAVGWDYRLYAPFYTGVVSSGIAYYVQGLVMKLRGPVFATAFNPLCMIIVAALGSLILGELLHLGSIIGGIVIAVGLYSVVWGKAKDYSEPKLPSTDAEDTESLPITATSKIDIISGNLEKQPSTDQKLEETNKVGEEKELNVVKV

SEQ ID NO: 17080 - protein, 237 aa, Glycine max
MAIYKGPAFNLFQSGSTTHHENGSTSSHNSHQTAGAIYILMGCVALSSFYILQSITVKRYPAELSLATLICLAGTVEASAVAFVAERHSRAWAVGWDYRLYAPFYTGVVSSGIAYYVQGLVMKLRGPVFATAFNPLCMIIVAALGSLILGELLHLGSIIGGIVIAVGLYSVVWGKAKDYSEPKLPSTDAEDTESLPITATSKIDIISGNLEKQPSTDQKLEETNKVGEEKELNVVKV

SEQ ID NO: 17081 - protein, 197 aa, Glycine max
MGCVALSSFYILQSITVKRYPAELSLATLICLAGTVEASAVAFVAERHSRAWAVGWDYRLYAPFYTGVVSSGIAYYVQGLVMKLRGPVFATAFNPLCMIIVAALGSLILGELLHLGSIIGGIVIAVGLYSVVWGKAKDYSEPKLPSTDAEDTESLPITATSKIDIISGNLEKQPSTDQKLEETNKVGEEKELNVVKV

SEQ ID NO: 17082 - DNA, 1543 bp, Glycine max
tctctcttcattctccaacatctacgttatctcctccaattccatcccgatctctttattgtcttcttcttctctcttcctggttttcgttggagaatcctgaaagccgtttgattttaatcaaagggtcatcaggattcggacaccaatatctcgaatcactcctctgttgtcttggaagaagaccaagcaaaggaaacgaagaaaaacatcaatttttgcaagcaacaatcttctttcttcttcttctgccccttttcttctcttctcttgtcttaaaacacacacacacacaacatagccacccatctgctgaggctgaagctgaagcgtcacaagtcacatacatatgattcgagtggccacaaattaagagtgagagagaatggaatcgagtagcattgagagcagcactgtgtcatcgatgactatgatggaagaggatgagcatccccatcatcagttttcttcaatctccaagcttcataacagtggccccaccactaccagtgtccatgaccttcttgaatgccccgtttgcaccaactctatgtaccctcctatccatcagtgccacaacggtcacacactttgctcaacttgcaagacaagggtacacaatcgatgcccaacttgccggcaggaactcggtgatataaggtgtttggcattagagaagatagcagaatcacttgaactgccttgcagatacatttctcttgggtgtccagagatatttccctattacagcaaacttaaacatgaggctatttgtaacttcagaccatacaactgcccttatgccgggtcagactgctcggtggttggggatattccatgccttgtcgctcatttaagggacgaccacagggttgatatgcattctggatgcacttttaaccatcgctatgtcaagtccaatcccatggaagtagaaaatgctacatggatgctaacggttttccactgttttggtcagtatttttgcctccattttgaggccttccagctggggcatggctccagtttacatggcattcctccgattcatgggtgatgaaagagaggcgcggaactacagctacagcttggaggtgggaggaaatggacgtaaactaacttttgaggggagtccaagaagcattagagatagccataagaaggtaagagacagccatgatggtctcatcatttaccgcaacatggcgcttttcttctcgggtggagacaggaaagagttgaagctacgagtaacaggaaggatatggaaagaacagcaaaaccctgaaggtggagtgtgcatacccaacctgtgtagctaggttgattgcatattctcttgattgctatttcttgctgtagataatttgagaagtgttaatctttgactggtgaatggttatggggatatttcaacttccaaacaaaataaaaaaactgagttctaaccaagatactgtcagatatttggtctcctacgtgtatcatatgctaaatcacttgagattctcaaaaatatttaagggggttgttacttttcaac

SEQ ID NO: 17083 - protein, 223 aa, Glycine max
MESSSIESSTVSSMTMMEEDEHPHHQFSSISKLHNSGPTTTSVHDLLECPVCTNSMYPPIHQCHNGHTLCSTCKTRVHNRCPTCRQELGDIRCLALEKIAESLELPCRYISLGCPEIFPYYSKLKHEAICNFRPYNCPYAGSDCSVVGDIPCLVAHLRDDHRVDMHSGCTFNHRYVKSNPMEVENATWMLTVFHCFGQYFCLHFEAFQLGHGSSLHGIPPIHG

SEQ ID NO: 17084 - protein, 210 aa, Glycine max
MTMMEEDEHPHHQFSSISKLHNSGPTTTSVHDLLECPVCTNSMYPPIHQCHNGHTLCSTCKTRVHNRCPTCRQELGDIRCLALEKIAESLELPCRYISLGCPEIFPYYSKLKHEAICNFRPYNCPYAGSDCSVVGDIPCLVAHLRDDHRVDMHSGCTFNHRYVKSNPMEVENATWMLTVFHCFGQYFCLHFEAFQLGHGSSLHGIPPIHG

SEQ ID NO: 17085 - protein, 208 aa, Glycine max
MMEEDEHPHHQFSSISKLHNSGPTTTSVHDLLECPVCTNSMYPPIHQCHNGHTLCSTCKTRVHNRCPTCRQELGDIRCLALEKIAESLELPCRYISLGCPEIFPYYSKLKHEAICNFRPYNCPYAGSDCSVVGDIPCLVAHLRDDHRVDMHSGCTFNHRYVKSNPMEVENATWMLTVFHCFGQYFCLHFEAFQLGHGSSLHGIPPIHG

SEQ ID NO: 17086 - DNA, 1045 bp, Glycine max
aagaagggtcatcgctctctgatgtgatgtctcttcagaacgatgctggagagactgcgctatacatcgctgcagagaataatctgcaagagatgttcagcttcttgctcagcatctgtcactttgaggtcgtcaagattcgctccaaggctgatatgaacgcctttcatgttgctgccaagcgtggcaatctagatattgtgagggagcttttgaatatttggcctgaggtctgcaagttatgtgactcctcaaacaccagtcctctatattctgctgcagttcaagatcacttggatgtggtggatgctatcttggatgtcgatgtcagttccatgttcatagttaggaaaaacggcaaaacttcactgcacaatgctgctaggtatggtgtccatcgtattgtaaaaacacttattgctcgggatccaggaatagtatgcatcaaagataaaaaaggtcaaactgcactgcatatggcggttaaaggacagtgtacttcagttgtggaggagatattactagctgatccttctattttgaatgagcgagataagaagggtaatacagctcttcacatggctacaaggaaatgccgttcacagatagtgggccttttgctaagctattctgctgtggatgttaatgccatcaacaagcagcaggaaacagccttggatttggcagataaactgccatatggagattcagctttggaaataaaggaagcccttgcagaatatggtgctaagcatgccaggtatgttggcaaagaagatgacgcaatggaacttaaaagaactgttagtgatataaagcatgaggtgcagtcacaacttatacaaaatgaaacgacacgacgacgggtttctggtattgccaaggagttgaagaaacttcatagagaagcagttcaaaacaccattaattctgtcacattggttgctgtactttttgcctcaatagcattcttagccatcttcaatttgccgggtcaatatataacggacgaaggaaaagagattgggaaagctaaaatagccga

SEQ ID NO: 17087 - protein, 347 aa, Glycine max
EGSSLSDVMSLQNDAGETALYIAAENNLQEMFSFLLSICHFEVVKIRSKADMNAFHVAAKRGNLDIVRELLNIWPEVCKLCDSSNTSPLYSAAVQDHLDVVDAILDVDVSSMFIVRKNGKTSLHNAARYGVHRIVKTLIARDPGIVCIKDKKGQTALHMAVKGQCTSVVEEILLADPSILNERDKKGNTALHMATRKCRSQIVGLLLSYSAVDVNAINKQQETALDLADKLPYGDSALEIKEALAEYGAKHARYVGKEDDAMELKRTVSDIKHEVQSQLIQNETTRRRVSGIAKELKKLHREAVQNTINSVTLVAVLFASIAFLAIFNLPGQYITDEGKEIGKAKIA

SEQ ID NO: 17088 - protein, 339 aa, Glycine max
MSLQNDAGETALYIAAENNLQEMFSFLLSICHFEVVKIRSKADMNAFHVAAKRGNLDIVRELLNIWPEVCKLCDSSNTSPLYSAAVQDHLDVVDAILDVDVSSMFIVRKNGKTSLHNAARYGVHRIVKTLIARDPGIVCIKDKKGQTALHMAVKGQCTSVVEEILLADPSILNERDKKGNTALHMATRKCRSQIVGLLLSYSAVDVNAINKQQETALDLADKLPYGDSALEIKEALAEYGAKHARYVGKEDDAMELKRTVSDIKHEVQSQLIQNETTRRRVSGIAKELKKLHREAVQNTINSVTLVAVLFASIAFLAIFNLPGQYITDEGKEIGKAKIA

SEQ ID NO: 17089 - protein, 317 aa, Glycine max
MFSFLLSICHFEVVKIRSKADMNAFHVAAKRGNLDIVRELLNIWPEVCKLCDSSNTSPLYSAAVQDHLDVVDAILDVDVSSMFIVRKNGKTSLHNAARYGVHRIVKTLIARDPGIVCIKDKKGQTALHMAVKGQCTSVVEEILLADPSILNERDKKGNTALHMATRKCRSQIVGLLLSYSAVDVNAINKQQETALDLADKLPYGDSALEIKEALAEYGAKHARYVGKEDDAMELKRTVSDIKHEVQSQLIQNETTRRRVSGIAKELKKLHREAVQNTINSVTLVAVLFASIAFLAIFNLPGQYITDEGKEIGKAKIA

SEQ ID NO: 17090 - DNA, 2041 bp, Glycine max
tttgtttgccttggctgaagtcgcgtttcaaagtcttcaggttttggatttgtctcacaatgcgttttctggcgaaatcacatctgcagttggaggtttaagcagcttgcaggttttgaatttagcaaacaactctctcggaggtcctattccagctgccattggtgaattgaaaacatgttcaagtcttgatttgagctataataagctgaatggaagcataccttgggaaataggaagagctgtgtccttgaaagaactggtattggaaaagaacttcctaaatgggaaaattccatcgtcaattgagaactgctctttgctaacaactttgattctgtcccagaacaagctgagtggtccaatacctgcagcagttgcaaaacttactaacctgcgaactgtggatgtatcgtttaacagtctcactggaaaccttcctaagcaattggccaaccttgccaatcttcttaccttcaatttatctcacaacaaccttcagggtgagctgccggctggtggttttttcaacaccatttcgccttcctctgtttctggcaatccatctctttgtggcgctgcagtaaacaaatcatgccctgctgtcctcccaaagcctattgttctaaatcccaacacctctactgacactggtccgggttcattgcctccaaatttgggtcataaaagaatcattctcagcatttctgcactcattgccattggtgcagctgctgtcattgtaattggtgttattagcatcactgttctcaatctccgtgttcgctcctctacacctcgtgatgcagctgccctcacattttctgcaggggacgaattcagccgttccccgactacagatgctaactctggcaagcttgtcatgttttcgggtgagcctgatttcagttctggtgcgcatgctttgcttaataaggattgtgagcttgggcgtggaggatttggagcagtgtaccaaactgttcttagagatggacattcagttgctataaagaagctcactgtgtcaagccttgtcaagtctcaagaagattttgaaagagaagtgaagaaattaggaaaaatcagacaccaaaacctcgtggaactcgagggttattattggactacatcgctgcagctgctcatatacgagtatgtctccggtggtagtctgtataagcatctccatgaaggatctggtgggaacttcctctcatggaatgagaggtttaatgtgattctcggaacagcgaaggccttggcacacttgcaccattccaacattattcactataacattaagtcaaccaatgtccttcttgatagttacggtgaaccaaaagtaggggactttggcctagcaagactgttgccaatgcttgatcgatacgttttgagcagcaaaattcagagcgcactcggctacatggcgccagagtttgcctgcaagacggtgaaaatcaccgagaaatgcgatgtatatgggtttggtgtcttggtcttggagatcgtcacagggaagaggccagtcgaatacatggaggatgatgtggtggtactatgcgacatggtgagaggggctttggaagaaggcagggtggaggagtgcattgatgagaggctccaagggaagttcccagcagaagaagctattcctgtcatgaaactaggcttaatatgtacttctcaagtgccatctaacaggcctgacatgggagaggtagttaacatattggagctgataagatgtccctcggaaggacaagaagaattggcatgaattaacttgggatttttttaattaggaggatagacaatgggatgtccggggaagaagaatccggctttatttattagaaaagcgaggaattattttgttgcaaaatgtttactttttcattgtaatttttttccttgttagttagtctctagttgttgtttgtttttaagatttctcttatgttatgctactacacctaggatgccggattccttttcaccgggtttcgttttggaccccccttgaaaattgttgctc

SEQ ID NO: 17091 - protein, 593 aa, Glycine max
LFALAEVAFQSLQVLDLSHNAFSGEITSAVGGLSSLQVLNLANNSLGGPIPAAIGELKTCSSLDLSYNKLNGSIPWEIGRAVSLKELVLEKNFLNGKIPSSIENCSLLTTLILSQNKLSGPIPAAVAKLTNLRTVDVSFNSLTGNLPKQLANLANLLTFNLSHNNLQGELPAGGFFNTISPSSVSGNPSLCGAAVNKSCPAVLPKPIVLNPNTSTDTGPGSLPPNLGHKRIILSISALIAIGAAAVIVIGVISITVLNLRVRSSTPRDAAALTFSAGDEFSRSPTTDANSGKLVMFSGEPDFSSGAHALLNKDCELGRGGFGAVYQTVLRDGHSVAIKKLTVSSLVKSQEDFEREVKKLGKIRHQNLVELEGYYWTTSLQLLIYEYVSGGSLYKHLHEGSGGNFLSWNERFNVILGTAKALAHLHHSNIIHYNIKSTNVLLDSYGEPKVGDFGLARLLPMLDRYVLSSKIQSALGYMAPEFACKTVKITEKCDVYGFGVLVLEIVTGKRPVEYMEDDVVVLCDMVRGALEEGRVEECIDERLQGKFPAEEAIPVMKLGLICTSQVPSNRPDMGEVVNILELIRCPSEGQEELA

SEQ ID NO: 17092 - protein, 299 aa, Glycine max
MFSGEPDFSSGAHALLNKDCELGRGGFGAVYQTVLRDGHSVAIKKLTVSSLVKSQEDFEREVKKLGKIRHQNLVELEGYYWTTSLQLLIYEYVSGGSLYKHLHEGSGGNFLSWNERFNVILGTAKALAHLHHSNIIHYNIKSTNVLLDSYGEPKVGDFGLARLLPMLDRYVLSSKIQSALGYMAPEFACKTVKITEKCDVYGFGVLVLEIVTGKRPVEYMEDDVVVLCDMVRGALEEGRVEECIDERLQGKFPAEEAIPVMKLGLICTSQVPSNRPDMGEVVNILELIRCPSEGQEELA

SEQ ID NO: 17093 - DNA, 1249 bp, Glycine max
gaaaaaggaacaaacttaactcatgcaggacctaaaccagcagtttatctagaaattgctaaggatttggctgaccgtctgttatctgcttttacagccagtccaactgctattccgtttagtgatgttattctgcatgacaagtcggcacatccagctcctggtggactgagtagcacatcggaagtttccactttacagcttgagtttaattatctcagtcagatatctggtgatcagaaatatagtttggaagcaatgaaagtcatggagcacatgaagactcttccaaagattgaaggactagttcctatctacattagccctcattctggtgaatttagtggagaaaatattagactgggatctcgtggtgacagttactatgagtacttaatcaaagtatggcttcagagtggagctagtagcaacactaatacatcattcctatatgaaatgtataaggaagcaatgaatggtgttagacatcttcttgttcggaaatctatcccaaatggactagtttttgttggagaattgccttatggatctaacagtggtttcagcccaaaaatggatcacctggtgtgtttcctacctggtacacttgcaattggtgccactaaaggccttacaaagaaacaggcaatggaaaacaatatgcttaactttgaagacctagaaaatttgaagctagcagaagatctgactaaaacatgctttgaaatgtatgcagtaacttcaactggtcttgctcctgaaattgcttactttcatactgaggaattttctgaagaaggtcatgatggaggaaataagagctcggaatttgttaatgacatcataataaaacctgctgaccgtcataatcttttgagacctgagaccgtggagtcattgtttgttttgtaccgtatcacagaagatccaaaatatcgggaatggggttggcaaatctttgaagcttttgaaaatcacacaaaggttgatactggtggatattgttctctggacgatgtaactagtgttcctcctcatagaagagacaaaatggagactttctttctaggagaaacacttaagtatttctacttgctttttgcggacagctctcttattcctctggataaatttgtttttaacacagaagcacatcctataccaatcaatttgaagaaatgagtataatcatcaaaggcattcaacagagttattagaaatacggattctgtcaccctggtctcacaaa

SEQ ID NO: 17094 - protein, 393 aa, Glycine max
EKGTNLTHAGPKPAVYLEIAKDLADRLLSAFTASPTAIPFSDVILHDKSAHPAPGGLSSTSEVSTLQLEFNYLSQISGDQKYSLEAMKVMEHMKTLPKIEGLVPIYISPHSGEFSGENIRLGSRGDSYYEYLIKVWLQSGASSNTNTSFLYEMYKEAMNGVRHLLVRKSIPNGLVFVGELPYGSNSGFSPKMDHLVCFLPGTLAIGATKGLTKKQAMENNMLNFEDLENLKLAEDLTKTCFEMYAVTSTGLAPEIAYFHTEEFSEEGHDGGNKSSEFVNDIIIKPADRHNLLRPETVESLFVLYRITEDPKYREWGWQIFEAFENHTKVDTGGYCSLDDVTSVPPHRRDKMETFFLGETLKYFYLLFADSSLIPLDKFVFNTEAHPIPINLKK

SEQ ID NO: 17095 - protein, 307 aa, Glycine max
MKVMEHMKTLPKIEGLVPIYISPHSGEFSGENIRLGSRGDSYYEYLIKVWLQSGASSNTNTSFLYEMYKEAMNGVRHLLVRKSIPNGLVFVGELPYGSNSGFSPKMDHLVCFLPGTLAIGATKGLTKKQAMENNMLNFEDLENLKLAEDLTKTCFEMYAVTSTGLAPEIAYFHTEEFSEEGHDGGNKSSEFVNDIIIKPADRHNLLRPETVESLFVLYRITEDPKYREWGWQIFEAFENHTKVDTGGYCSLDDVTSVPPHRRDKMETFFLGETLKYFYLLFADSSLIPLDKFVFNTEAHPIPINLKK

SEQ ID NO: 17096 - protein, 304 aa, Glycine max
MEHMKTLPKIEGLVPIYISPHSGEFSGENIRLGSRGDSYYEYLIKVWLQSGASSNTNTSFLYEMYKEAMNGVRHLLVRKSIPNGLVFVGELPYGSNSGFSPKMDHLVCFLPGTLAIGATKGLTKKQAMENNMLNFEDLENLKLAEDLTKTCFEMYAVTSTGLAPEIAYFHTEEFSEEGHDGGNKSSEFVNDIIIKPADRHNLLRPETVESLFVLYRITEDPKYREWGWQIFEAFENHTKVDTGGYCSLDDVTSVPPHRRDKMETFFLGETLKYFYLLFADSSLIPLDKFVFNTEAHPIPINLKK

SEQ ID NO: 17097 - DNA, 1265 bp, Glycine max
actagaaatgctgctttcttcttcttcttctcgcggttatcttcactaacaacttctctctctctctccgtctgtgcattttccattgttgaagaaggagaaaggtcttgaggtgtggggtcggtgatggacggtggagtgaactacaaccctcgcactgtggaagaggttttccgggacttcaagggtcgtagagccggcatgatcaaggctctcaccactgatgttgaagaatttttccagcagtgcgatcctgaaaaggataacctttgtttatacgggttccctaatgagcaatgggaagttaatttacctgcggaagaagttcctccggagcttcctgagcctgcattgggcataaactttgctagggatgggatgcaggataaggactggctgtctttggttgccgttcacagtgatgcatggttacttgcagtggctttctactttggggcacgatttggttttgataaagctgacaggaaacgcctgttcactatgattaatgatttaccaacaatattcgagattgtgactggaagtgcaaaaaaacagactaaggaaaagtcatccatttcaaaccactccagcaacaaatcaaaatctggttcaaaagggcgaggatctgaatcagggaagtattcaaagcaaacaaaggacgaggaggaagaggtaccggatgaagaagatgacgaggagcatggggaaactttgtgtggggcatgtggagagaactatgcgtctgatgagttctggatttgttgtgacatatgtgagaagtggttccatggcaagtgtgtgaagatcactccagccagagccgagcacatcaagcagtataagtgcccctcatgcagcaataagagagcacggccttgatatagttgagagtgggacagttctcaccccttgtaactaaatcatgttggacttctaacttgttagtggcttaggattcctgtgccatgccatgatgggcatatgtattcagtactttgggtcttgtgaacttcttagtggatatatttttttttaatatttatagtttgcaggttctggatatgtctccaatcttcatcctgactggtatacttatatttgtagcatatgatagtgcacgtgtgcacacatacatgtatgtttgaacatatgtcgtatttgctagcatgacgcattggattgatcagatttatggtctacccaatgtagcagtgtggcatctgtgttagctttggaagaacggcagagttggcttaaggtgt

SEQ ID NO: 17098 - protein, 251 aa, Glycine max
MDGGVNYNPRTVEEVFRDFKGRRAGMIKALTTDVEEFFQQCDPEKDNLCLYGFPNEQWEVNLPAEEVPPELPEPALGINFARDGMQDKDWLSLVAVHSDAWLLAVAFYFGARFGFDKADRKRLFTMINDLPTIFEIVTGSAKKQTKEKSSISNHSSNKSKSGSKGRGSESGKYSKQTKDEEEEVPDEEDDEEHGETLCGACGENYASDEFWICCDICEKWFHGKCVKITPARAEHIKQYKCPSCSNKRARP

SEQ ID NO: 17099 - protein, 226 aa, Glycine max
MIKALTTDVEEFFQQCDPEKDNLCLYGFPNEQWEVNLPAEEVPPELPEPALGINFARDGMQDKDWLSLVAVHSDAWLLAVAFYFGARFGFDKADRKRLFTMINDLPTIFEIVTGSAKKQTKEKSSISNHSSNKSKSGSKGRGSESGKYSKQTKDEEEEVPDEEDDEEHGETLCGACGENYASDEFWICCDICEKWFHGKCVKITPARAEHIKQYKCPSCSNKRARP

SEQ ID NO: 17100 - protein, 167 aa, Glycine max
MQDKDWLSLVAVHSDAWLLAVAFYFGARFGFDKADRKRLFTMINDLPTIFEIVTGSAKKQTKEKSSISNHSSNKSKSGSKGRGSESGKYSKQTKDEEEEVPDEEDDEEHGETLCGACGENYASDEFWICCDICEKWFHGKCVKITPARAEHIKQYKCPSCSNKRARP

SEQ ID NO: 17101 - DNA, 1612 bp, Glycine max
gcgctcacatcgtgttctctgcggcgcgagctagctagggtttagaacctcgcagttacagaaaacatggcgactgtggtgccaacctccgaagaagacgctgcactctccgtcgttcgattcgcctctgaacttgcctgggccgatgccggtcccgaggttgctgagccccaagttagcagactctgcgtggaggctgaagaattcattgttatgggaaagtggttggagctagcatcattgatgattacctctgctgaattgattttctcgaaggtttctgaaaaagatatagagtccatcttcactatcatctgcaatcttgttacaaagaccgaaaatccagatgaagtgatggagattgtaaaagttataactacaaaaatactccagcagccaaatgaaaagcctgctgtgcgattgaagattatgatcagcctgtacaaccttttggagactccatactgccagttttatgtctacatgaagttactgaatttagctgttgatgggaaagtcacagaacacattataccttcattcaataagattgataacttcttgaaagactggaaaattgggataccagaacagagagagctctttcttgctgtctctaatattttgaaggaaaataaaagcatgtcaaaggatgcttttaagttcctgaccagttatctggcaactttttcgggagatgactcacatgttttgagtgaagccaaggaggaggctgcacgtgcaattgtggaatttgtgagggcacctgacgtatttcagtgtgatttactagacttgcctgctgttacacaactggagaaggatgccaaatatgctctgttatatcagcttcttaagatttttcttacccagaggctggatgcatacttagactatcatgctgccaattccaccttgttgaaaagttatggccttgtgcatgaagaatgcattgccaaaatgaggcttttgtcattggtggatcttagctctgatggatctggccaaattccatatgaacttattagggacacacttcagatcagtgatgatgaggtggaactatgggtagttagaggattaactgctaacttaattgactgtaagatggaccaaatgaatcaagttgtagttgtcagtcatcctactgagcgtgtgtttggtcagcaccaatggcaagcactgagaacaaagctagtgacatggaggggaaacattgcaaatgtgatcagtaccattcaggccaacaaaataacggaggatgggtcccaggcagcccaaggcttggtagttcggtgaggacgattgagtgaagcaattatctgagtatctagattttatccaggtggaatttttttatcttaaacagaggataagagtgtaatttgctttgttgcaatttatttttccatttattttagttggctggtgactctaatttgtactaaactttggcagagccattttgattgaagtttttccatttttaatttagaccagcctcatttctaaatatctttctgtcgtctaagttaaccagtgcgattgttgttgccctgattgcatagtcaattcaactatcaaattcatattagtatattttcactcttac

SEQ ID NO: 17102 - protein, 410 aa, Glycine max
MATVVPTSEEDAALSVVRFASELAWADAGPEVAEPQVSRLCVEAEEFIVMGKWLELASLMITSAELIFSKVSEKDIESIFTIICNLVTKTENPDEVMEIVKVITTKILQQPNEKPAVRLKIMISLYNLLETPYCQFYVYMKLLNLAVDGKVTEHIIPSFNKIDNFLKDWKIGIPEQRELFLAVSNILKENKSMSKDAFKFLTSYLATFSGDDSHVLSEAKEEAARAIVEFVRAPDVFQCDLLDLPAVTQLEKDAKYALLYQLLKIFLTQRLDAYLDYHAANSTLLKSYGLVHEECIAKMRLLSLVDLSSDGSGQIPYELIRDTLQISDDEVELWVVRGLTANLIDCKMDQMNQVVVVSHPTERVFGQHQWQALRTKLVTWRGNIANVISTIQANKITEDGSQAAQGLVVR

SEQ ID NO: 17103 - protein, 361 aa, Glycine max
MGKWLELASLMITSAELIFSKVSEKDIESIFTIICNLVTKTENPDEVMEIVKVITTKILQQPNEKPAVRLKIMISLYNLLETPYCQFYVYMKLLNLAVDGKVTEHIIPSFNKIDNFLKDWKIGIPEQRELFLAVSNILKENKSMSKDAFKFLTSYLATFSGDDSHVLSEAKEEAARAIVEFVRAPDVFQCDLLDLPAVTQLEKDAKYALLYQLLKIFLTQRLDAYLDYHAANSTLLKSYGLVHEECIAKMRLLSLVDLSSDGSGQIPYELIRDTLQISDDEVELWVVRGLTANLIDCKMDQMNQVVVVSHPTERVFGQHQWQALRTKLVTWRGNIANVISTIQANKITEDGSQAAQGLVVR

SEQ ID NO: 17104 - protein, 351 aa, Glycine max
MITSAELIFSKVSEKDIESIFTIICNLVTKTENPDEVMEIVKVITTKILQQPNEKPAVRLKIMISLYNLLETPYCQFYVYMKLLNLAVDGKVTEHIIPSFNKIDNFLKDWKIGIPEQRELFLAVSNILKENKSMSKDAFKFLTSYLATFSGDDSHVLSEAKEEAARAIVEFVRAPDVFQCDLLDLPAVTQLEKDAKYALLYQLLKIFLTQRLDAYLDYHAANSTLLKSYGLVHEECIAKMRLLSLVDLSSDGSGQIPYELIRDTLQISDDEVELWVVRGLTANLIDCKMDQMNQVVVVSHPTERVFGQHQWQALRTKLVTWRGNIANVISTIQANKITEDGSQAAQGLVVR

SEQ ID NO: 17105 - DNA, 1437 bp, Glycine max
gtaacagatgattatgatggtgtgaaagtttggtgggtctctaacaaagttatgtcaccaacaaggtccccaatgtcttattatccagaacaggagaaaaggttctacaagctcacttttcacagcaagaatagggacacaataacagagtcctatttgaagcatgtgatgagggaagggaaggagattcgtttgaggaacaggcagaggaagttgtatactaatagtcccggctacaagtggccaagttacaagcaaacgatgtggagccacattgtgtttgagcaccctgcaacttttgacacaatggccatggagcctgagaagaaaaaagagatcattgaggatttggtcactttcagcaagagcaaggatttctatgcaagaattgggaaggcttggaagaggggttaccttctctacggccctccagggaccggaaagtccacgatgatcgcggctatggcgaatttgctggcctatgatgtctatgacttggagctgacagcagtgaaggacaacaccgagctgaggaagcttctgattgagacaacaagtaagtccataattgtaattgaggacattgattgctctcttgatcttacagggcagaggaagaagaagggcgataagtcctcgtgggacgaggacgaggccgagaaggatgttattggaaggaaagaggccaaggaggaaggagggagtagtggctgcagcaaagtcacactctcagggcttttgaatttcattgatgggatttggtctgcttgtggaggggagaggttgattgtgttcacaaccaattatgtggagaagcttgatcctgctctcattagaagggggagaatggacaagcatattcagctctcttattgcacctttgatggctttaaagttctcgcgaataactacttgaagcttgagactcatccattgtttgacaccattgagagccttattggggaggttaagatcaccccagctgatgttgctgaaaaccttatgcctaagtctccactggatgatcctcacaagtgtctctcaaacttgattgaagcacttgaggaagctgcaaaagcagaggagatgaagcagaggagtagtcacattaaggaggagcttcttcaacaaaatgggtccattaaggaaaatggtgagcttcatggtgacaaagcaatgaatcagtgccagatctggctcgttaatgatacataatgtttgtgtacactattatgaatctatgttagtcaactccatgagatgattaaaaaagggaggggttatctacttcaaaacgctctctggtttttggttcagattgtaatttagcgtctgaaatctttggtacccaactaaatcctcctacttttggaattaattttgaacttgtattagagagttgatgaaatttattgttattgggataggtccctccct

SEQ ID NO: 17106 - protein, 404 aa, Glycine max
VTDDYDGVKVWWVSNKVMSPTRSPMSYYPEQEKRFYKLTFHSKNRDTITESYLKHVMREGKEIRLRNRQRKLYTNSPGYKWPSYKQTMWSHIVFEHPATFDTMAMEPEKKKEIIEDLVTFSKSKDFYARIGKAWKRGYLLYGPPGTGKSTMIAAMANLLAYDVYDLELTAVKDNTELRKLLIETTSKSIIVIEDIDCSLDLTGQRKKKGDKSSWDEDEAEKDVIGRKEAKEEGGSSGCSKVTLSGLLNFIDGIWSACGGERLIVFTTNYVEKLDPALIRRGRMDKHIQLSYCTFDGFKVLANNYLKLETHPLFDTIESLIGEVKITPADVAENLMPKSPLDDPHKCLSNLIEALEEAAKAEEMKQRSSHIKEELLQQNGSIKENGELHGDKAMNQCQIWLVNDT

SEQ ID NO: 17107 - protein, 387 aa, Glycine max
MSPTRSPMSYYPEQEKRFYKLTFHSKNRDTITESYLKHVMREGKEIRLRNRQRKLYTNSPGYKWPSYKQTMWSHIVFEHPATFDTMAMEPEKKKEIIEDLVTFSKSKDFYARIGKAWKRGYLLYGPPGTGKSTMIAAMANLLAYDVYDLELTAVKDNTELRKLLIETTSKSIIVIEDIDCSLDLTGQRKKKGDKSSWDEDEAEKDVIGRKEAKEEGGSSGCSKVTLSGLLNFIDGIWSACGGERLIVFTTNYVEKLDPALIRRGRMDKHIQLSYCTFDGFKVLANNYLKLETHPLFDTIESLIGEVKITPADVAENLMPKSPLDDPHKCLSNLIEALEEAAKAEEMKQRSSHIKEELLQQNGSIKENGELHGDKAMNQCQIWLVNDT

SEQ ID NO: 17108 - protein, 380 aa, Glycine max
MSYYPEQEKRFYKLTFHSKNRDTITESYLKHVMREGKEIRLRNRQRKLYTNSPGYKWPSYKQTMWSHIVFEHPATFDTMAMEPEKKKEIIEDLVTFSKSKDFYARIGKAWKRGYLLYGPPGTGKSTMIAAMANLLAYDVYDLELTAVKDNTELRKLLIETTSKSIIVIEDIDCSLDLTGQRKKKGDKSSWDEDEAEKDVIGRKEAKEEGGSSGCSKVTLSGLLNFIDGIWSACGGERLIVFTTNYVEKLDPALIRRGRMDKHIQLSYCTFDGFKVLANNYLKLETHPLFDTIESLIGEVKITPADVAENLMPKSPLDDPHKCLSNLIEALEEAAKAEEMKQRSSHIKEELLQQNGSIKENGELHGDKAMNQCQIWLVNDT

SEQ ID NO: 17109 - DNA, 1635 bp, Glycine max
gttccgggccccccctgcgagttagctacgtaggcccccccccccccccccctaatgataacgaggaagaagaagatgatgaggatgatgaggattttaacagtgatgatagcaatgatgaaggaatggaaataattgcaaaagaatatggagttaaaaggtatggttggcttgtttacatggataagaaggctaaggaggaagaaaaaaggcaaaaagagttgatcaaaggtgatcctgcaattaggaagctgagtcgtaaggaaagaaggaaggcttctcagattgaaagggagagagagagagaagccacacggatatctggaactcgtgtgctgcatcatgatccctaccgggaaacaaggcaaagtcctacatatgaagcctattctcgatctagaaggtcaaggtctccgttgcggtcatactctccgtcgcattcaaggcgttattcgcgtagtggtcattctgatgatattcaccgaagcaaaccaaggactcctaaaatagaatacattactgaatttgggggctctggagcagcagatgaacgcaggcctgaaggattttctccaccacgatctcctacatctcaagttgatttgttaaaccggtcggagcactggacctttaattcttgccaagatagattggactgtcttttctctgggcaacatatctcccattttgttgcctgaggcaattttttgtggtttagaatagatcaggactaggtttgtcggggtaactgccaagaggaggagggagaagggagaaggcttcctatttgaagctcattgttccctgaaatgaattttgcataactaactacctacctgcgagttgcatagaaatttcacaattattttttctgatacctctactgttttgcaggccaacatctggttgcatacttgaggcgttgcatgttgatcctgcttctggtgtatcaattgataaggataagggcactaaagtcttgaaaccgtcagtaagtggttcttcttcagcattagcaaaattaaaggctggtggttctggagggcccttaaaacaaggggagaagaaagaaactcctcaagaaagacttaaaagaatcatgaacaagcaactaaacaaacaaattaagaaagatactgctgcagaacttgccaagaaaagggaacaggagcggcagaggcaggaaaagcttgcagaaactagtagattgagtcggtatagatgccgcagccgcagcaggagtttcagcggttcccctccaagaagataccggcgcagtagaagtccaagtagaagcagaagttccagaagatattattctagttctcattcacggtccccttctcgcacacgttctccgtctccttattctcgatctcccaggataagaaatcgatcaaagcactgatggaatgctatatacgagtagaaggctgacgaagtttgtgtggcatttatttataatatgaaatggatattaatatatggctttcatttctgccaaatagttcgagggaaatcggtcttggttgagttgtgttgaagttgcgatatgcaatctacctgaacatgtcattttagtatttgccaacgtatatttaacattaattaatgaattatgagtaatttgatgtc

SEQ ID NO: 17110 - protein, 231 aa, Glycine max
SGPPLRVSYVGPPPPPPNDNEEEEDDEDDEDFNSDDSNDEGMEIIAKEYGVKRYGWLVYMDKKAKEEEKRQKELIKGDPAIRKLSRKERRKASQIEREREREATRISGTRVLHHDPYRETRQSPTYEAYSRSRRSRSPLRSYSPSHSRRYSRSGHSDDIHRSKPRTPKIEYITEFGGSGAADERRPEGFSPPRSPTSQVDLLNRSEHWTFNSCQDRLDCLFSGQHISHFVA

SEQ ID NO: 17111 - protein, 190 aa, Glycine max
MEIIAKEYGVKRYGWLVYMDKKAKEEEKRQKELIKGDPAIRKLSRKERRKASQIEREREREATRISGTRVLHHDPYRETRQSPTYEAYSRSRRSRSPLRSYSPSHSRRYSRSGHSDDIHRSKPRTPKIEYITEFGGSGAADERRPEGFSPPRSPTSQVDLLNRSEHWTFNSCQDRLDCLFSGQHISHFVA

SEQ ID NO: 17112 - protein, 172 aa, Glycine max
MDKKAKEEEKRQKELIKGDPAIRKLSRKERRKASQIEREREREATRISGTRVLHHDPYRETRQSPTYEAYSRSRRSRSPLRSYSPSHSRRYSRSGHSDDIHRSKPRTPKIEYITEFGGSGAADERRPEGFSPPRSPTSQVDLLNRSEHWTFNSCQDRLDCLFSGQHISHFVA

SEQ ID NO: 17113 - DNA, 1219 bp, Glycine max
gttcaacacgttacaataatggcccatttttctctctcccctctctcctgtgcaccttctcctctaccaccacgccgccgaatctttctctctcctcctcgagccgccgcatcttccgccaccgacgtcgtttccacttccacttccacttcattttctgcttcgaatttcgcgcccaaagtcgttgtcaccagagagcgcggcaagaacgccaagcttatcgctgctctggctaaacatgaaatcaattgtttggagcttccactcattgagcacatgcaaggacctgatttagataggcttccttctgtattaggtgacaatgcatttgattgggttgtgataacgtctcctgaggcaggctcagtctttctagaggcatggagagcttctgggatgcctcatgtcaaaataggtgttgttggggctggcactgcaagcattttcaaggaagctttgcagtcttccaaccgatcccttgatattgcctttgtgccatcaaaagcaacaggaaaggttttggctactgagcttcctaagattggaagtaaatgcacggttctctatcctgcttctgcaaaggctagtaatgagattgaggaaggactttcaaatcgtggatttgaggttactaggatgaatacatatacaacggtgccagttcaacatgttgaccatacggttctaaagatagcacttgctgcccctgttgttacagtagcttcaccatcttctattcgggcctggaagaatcttctttcagattcagagtggaacaattctgttgcgtgcattggtgagacaactgctacaatggcaagaagtttaggtttcacaaatgtgtacttcccaacacaaccaggcatcgaaggctgggtcgagagcattcttgaagcattagggttcctatgatgaattattgaggtaggtctcaggctctcagccctctgtagcaacctggagatgttttcaactttttctcatgctgcaagattaatataatgatttggcaccgtggatgtatatactttctctgttctgtagtatttttaaggataaatttagcttcaataaattaaggagagtgtagtgtatattaggaaataaagtgcacttatagtcattgattaaaatatcaatagttgagattgtaattaattcccaattttgttatacgggcacttgttttttaatcacaaactctaatcattaacttttt

SEQ ID NO: 17114 - protein, 303 aa, Glycine max
VQHVTIMAHFSLSPLSCAPSPLPPRRRIFLSPPRAAASSATDVVSTSTSTSFSASNFAPKVVVTRERGKNAKLIAALAKHEINCLELPLIEHMQGPDLDRLPSVLGDNAFDWVVITSPEAGSVFLEAWRASGMPHVKIGVVGAGTASIFKEALQSSNRSLDIAFVPSKATGKVLATELPKIGSKCTVLYPASAKASNEIEEGLSNRGFEVTRMNTYTTVPVQHVDHTVLKIALAAPVVTVASPSSIRAWKNLLSDSEWNNSVACIGETTATMARSLGFTNVYFPTQPGIEGWVESILEALGFL

SEQ ID NO: 17115 - protein, 297 aa, Glycine max
MAHFSLSPLSCAPSPLPPRRRIFLSPPRAAASSATDVVSTSTSTSFSASNFAPKVVVTRERGKNAKLIAALAKHEINCLELPLIEHMQGPDLDRLPSVLGDNAFDWVVITSPEAGSVFLEAWRASGMPHVKIGVVGAGTASIFKEALQSSNRSLDIAFVPSKATGKVLATELPKIGSKCTVLYPASAKASNEIEEGLSNRGFEVTRMNTYTTVPVQHVDHTVLKIALAAPVVTVASPSSIRAWKNLLSDSEWNNSVACIGETTATMARSLGFTNVYFPTQPGIEGWVESILEALGFL

SEQ ID NO: 17116 - protein, 211 aa, Glycine max
MQGPDLDRLPSVLGDNAFDWVVITSPEAGSVFLEAWRASGMPHVKIGVVGAGTASIFKEALQSSNRSLDIAFVPSKATGKVLATELPKIGSKCTVLYPASAKASNEIEEGLSNRGFEVTRMNTYTTVPVQHVDHTVLKIALAAPVVTVASPSSIRAWKNLLSDSEWNNSVACIGETTATMARSLGFTNVYFPTQPGIEGWVESILEALGFL

SEQ ID NO: 17117 - DNA, 2167 bp, Glycine max
aaattgcatcgtcgagccgaaacattcattcttcttgggaaattgctgttgcaactactaaatatgatgctgggagttcattgatacaaagtgatttggcatgctcatcaagtaaagttgggattcaatcacaacgagtggtacctgttgaaacagaagaacaagcatctgcctcttctccctctctttataatacatttggaagcaaatcagaggtgcccaaaaatgcttcctcccctaaaaagttgggaaataaagcatatatgtcaaatactgggaagaaaggtaggttgcaaacagtatcgtcatctacttctgtaaatgacaacagagttaacaaaccgccatgccatgcccctcgcactgttaaatcggtcatcaagaacaagaatctgagtaagaagaaacaaaaggaggattcaggttctgctttgcatggtcctacacccaatgaagtcaataagccagttcctggtacacctcggctaatttgtgagagatgtaggtgtgctttggaaaatacttgcgaagaaaaaaaccaagatattgtggcattggactctatcagtcctggagatggagtaaacttgagtaatgtacactctggttcaaataaacctggtttggtgtcaagtagtgttaataaaagcaaaacaggtgcaaaagtgaagaacaccaagttgaaagagcaaattgatttttcacaaagttcaaagagtagtcaaggtgagtacagtagtagtacaagtaccagtgatgagagcaacgtaagtggttcaagtcgtagcactaggcctcacatgtcaaaggatgtcaggtgggcagccatacgacatgctcaaatgcagcatggagtcttgggcttgagacacttcaatcttttaaagaaacttggttgtggagacattgggactgtatatcttgcggaactaattggcactagctgcctgtttgctattaaggtcatggacaatgaatttttggaaagaagagagaagatgcctagggctcaaactgagagagaaatattaaggatcctggatcacccttttcttcccacaatgtatgcacaatttacatcagataatctatcgtgtctggtcatggagtattgtccaggtggagatcttcatgttctacggcagaagcagcttggtagatatttctcggagccagcagcaaggttttatgttgctgaagttctccttgctttggagtacttgcacatgcttggagttgtttaccgtgatttgaaacccgaaaacattcttgttcgggaagatggccacattatgctcacagattttgatctgtccctgaggtgtgctgttaacccaacgcttctgaaatcatcttctgatgttgaccctgcaaaaatttcaggtctaagtgcacaagcaagttgcattgagccattttgcattgaaccatcttgtcaagttccatgcttcagcccaagattgctacccgctgctgcaaaagcaaggaaactaaaagttgatcttgcagcccaggtcagatcattgccacagcttgtggctgagcccactgatgcaagatcaaactcatttgttggcacacatgaatacttggctcctgagatcatcaaagaagagggacatggagctgcagttgactggtggacatttggtgtttttctctatgaacttttgtacggtagaacaccctttaaaggttcaaacaatgaagaaacattggccaacgtagtgttgcagggtcttcgattccccaagcacccaaatgttagtttccaagcaaaggatctgattagagggttgttggttaaagagcccgaaaaccgtttgggttcagagaaaggagctgctgagattaaacagcaccccttcttcgagggccttaactgggccttaattcgttgcgctgtccctccagaacttccagacttttatgattttggagtttcagacatggtgaacccacagggcaagggtgctaagtacttggagtgtaaagtaggagagcatgtagaattcgagttgttttaaagacattgctgtctatcaagaatggcattcatgttatggactcccatatttatggctccatatcggtgtcgagatgtaacttatacagttatatgtaagcctaaagccgaatagtctatgttgcaaattagttttgtatc

SEQ ID NO: 17118 - protein, 674 aa, Glycine max
IASSSRNIHSSWEIAVATTKYDAGSSLIQSDLACSSSKVGIQSQRVVPVETEEQASASSPSLYNTFGSKSEVPKNASSPKKLGNKAYMSNTGKKGRLQTVSSSTSVNDNRVNKPPCHAPRTVKSVIKNKNLSKKKQKEDSGSALHGPTPNEVNKPVPGTPRLICERCRCALENTCEEKNQDIVALDSISPGDGVNLSNVHSGSNKPGLVSSSVNKSKTGAKVKNTKLKEQIDFSQSSKSSQGEYSSSTSTSDESNVSGSSRSTRPHMSKDVRWAAIRHAQMQHGVLGLRHFNLLKKLGCGDIGTVYLAELIGTSCLFAIKVMDNEFLERREKMPRAQTEREILRILDHPFLPTMYAQFTSDNLSCLVMEYCPGGDLHVLRQKQLGRYFSEPAARFYVAEVLLALEYLHMLGVVYRDLKPENILVREDGHIMLTDFDLSLRCAVNPTLLKSSSDVDPAKISGLSAQASCIEPFCIEPSCQVPCFSPRLLPAAAKARKLKVDLAAQVRSLPQLVAEPTDARSNSFVGTHEYLAPEIIKEEGHGAAVDWWTFGVFLYELLYGRTPFKGSNNEETLANVVLQGLRFPKHPNVSFQAKDLIRGLLVKEPENRLGSEKGAAEIKQHPFFEGLNWALIRCAVPPELPDFYDFGVSDMVNPQGKGAKYLECKVGEHVEFELF

SEQ ID NO: 17119 - protein, 587 aa, Glycine max
MSNTGKKGRLQTVSSSTSVNDNRVNKPPCHAPRTVKSVIKNKNLSKKKQKEDSGSALHGPTPNEVNKPVPGTPRLICERCRCALENTCEEKNQDIVALDSISPGDGVNLSNVHSGSNKPGLVSSSVNKSKTGAKVKNTKLKEQIDFSQSSKSSQGEYSSSTSTSDESNVSGSSRSTRPHMSKDVRWAAIRHAQMQHGVLGLRHFNLLKKLGCGDIGTVYLAELIGTSCLFAIKVMDNEFLERREKMPRAQTEREILRILDHPFLPTMYAQFTSDNLSCLVMEYCPGGDLHVLRQKQLGRYFSEPAARFYVAEVLLALEYLHMLGVVYRDLKPENILVREDGHIMLTDFDLSLRCAVNPTLLKSSSDVDPAKISGLSAQASCIEPFCIEPSCQVPCFSPRLLPAAAKARKLKVDLAAQVRSLPQLVAEPTDARSNSFVGTHEYLAPEIIKEEGHGAAVDWWTFGVFLYELLYGRTPFKGSNNEETLANVVLQGLRFPKHPNVSFQAKDLIRGLLVKEPENRLGSEKGAAEIKQHPFFEGLNWALIRCAVPPELPDFYDFGVSDMVNPQGKGAKYLECKVGEHVEFELF

SEQ ID NO: 17120 - protein, 408 aa, Glycine max
MSKDVRWAAIRHAQMQHGVLGLRHFNLLKKLGCGDIGTVYLAELIGTSCLFAIKVMDNEFLERREKMPRAQTEREILRILDHPFLPTMYAQFTSDNLSCLVMEYCPGGDLHVLRQKQLGRYFSEPAARFYVAEVLLALEYLHMLGVVYRDLKPENILVREDGHIMLTDFDLSLRCAVNPTLLKSSSDVDPAKISGLSAQASCIEPFCIEPSCQVPCFSPRLLPAAAKARKLKVDLAAQVRSLPQLVAEPTDARSNSFVGTHEYLAPEIIKEEGHGAAVDWWTFGVFLYELLYGRTPFKGSNNEETLANVVLQGLRFPKHPNVSFQAKDLIRGLLVKEPENRLGSEKGAAEIKQHPFFEGLNWALIRCAVPPELPDFYDFGVSDMVNPQGKGAKYLECKVGEHVEFELF

SEQ ID NO: 17121 - DNA, 1450 bp, Glycine max
tttgagcaagatcagaattgggacgtggctttaaagaacttcaaaagtgctagggctgtatatgaggaattggggaaatatggagatctggataaccaagttttgtgtcgtgagcgagttgaggaactagaacctagtatccggtactgccttcacaaaattggccagtcagatttacaggcctctgaacttttgcaaatcagtgatgtggaaggtcccgcattagacctttttaaagctaaattagaggctgccatggctgaggcaagatctcaacaagctgcttccatgacagaattcctttggcttggccacagatttccaatatcaaatgccaaaacaagggtttccatcctgaaagctcaggagctggagaaagatatacatggtcccttggcagactcaattccagcagacaaaagacttgttatttttgacaaaatcttttctgcatatcatgaagccagaggctatattcgggctgatttggccactacaggaagtacagaaagcgtgaaagatgatttgaatggtcttgataaggctgtcagtgctgtcctaggagaaagaaccattgatcggaacctcttgttggttaaggttgcaaaaagcaaacttgcaaagcgtcatgatgataaaaatgaaaaactcaccaaacctgaagagcttgttcgcttatatgatctcttgctgcagaatacaggtgatctatctgatttagtcagttctggaagggataaaaagccagaagaagttatctttgctgaagtgtgttcatgcaaaagtttggcttttcgagcccaaaggtgcttttatgttgcaaagtcatacagtgtggctggaaagagggctgaagcatatgcattgtactgtcgtgctcgcaatttggcagatgatgccttaaaaaagttccaaatgttggatggtgataataagactatgatgaaagagttggaggatttgtgcaatgagtgccgatctaacagttgtatagagcatgcattggggatcatggaggagaaaaagactcaagaaaatctatctgaaagggtctccaatatatcattgactggaactgagcggttggagaagttccttcttgagaaactagatgtttatgaatctgctgtgggtgattcaaatgtgaagtgtacaccacgcattgcaggcttccccccggctttccaggcaatttcccgtaatcctattgtgctggatctggcttataacatgattgaattcccacctattgaaaacaggatgaagaaggatagaaaagccaagggcggctttatcagtagaatatttggatgagtatatttaattaaggtttttgataaatattgacaactgatctggtgatttcttttgtggaatattgttatgaattttgagatgttatgtactatacaaatctttgagaggtctagatatttggaaattttacagt

SEQ ID NO: 17122 - protein, 437 aa, Glycine max
FEQDQNWDVALKNFKSARAVYEELGKYGDLDNQVLCRERVEELEPSIRYCLHKIGQSDLQASELLQISDVEGPALDLFKAKLEAAMAEARSQQAASMTEFLWLGHRFPISNAKTRVSILKAQELEKDIHGPLADSIPADKRLVIFDKIFSAYHEARGYIRADLATTGSTESVKDDLNGLDKAVSAVLGERTIDRNLLLVKVAKSKLAKRHDDKNEKLTKPEELVRLYDLLLQNTGDLSDLVSSGRDKKPEEVIFAEVCSCKSLAFRAQRCFYVAKSYSVAGKRAEAYALYCRARNLADDALKKFQMLDGDNKTMMKELEDLCNECRSNSCIEHALGIMEEKKTQENLSERVSNISLTGTERLEKFLLEKLDVYESAVGDSNVKCTPRIAGFPPAFQAISRNPIVLDLAYNMIEFPPIENRMKKDRKAKGGFISRIFG

SEQ ID NO: 17123 - protein, 352 aa, Glycine max
MAEARSQQAASMTEFLWLGHRFPISNAKTRVSILKAQELEKDIHGPLADSIPADKRLVIFDKIFSAYHEARGYIRADLATTGSTESVKDDLNGLDKAVSAVLGERTIDRNLLLVKVAKSKLAKRHDDKNEKLTKPEELVRLYDLLLQNTGDLSDLVSSGRDKKPEEVIFAEVCSCKSLAFRAQRCFYVAKSYSVAGKRAEAYALYCRARNLADDALKKFQMLDGDNKTMMKELEDLCNECRSNSCIEHALGIMEEKKTQENLSERVSNISLTGTERLEKFLLEKLDVYESAVGDSNVKCTPRIAGFPPAFQAISRNPIVLDLAYNMIEFPPIENRMKKDRKAKGGFISRIFG

SEQ ID NO: 17124 - protein, 341 aa, Glycine max
MTEFLWLGHRFPISNAKTRVSILKAQELEKDIHGPLADSIPADKRLVIFDKIFSAYHEARGYIRADLATTGSTESVKDDLNGLDKAVSAVLGERTIDRNLLLVKVAKSKLAKRHDDKNEKLTKPEELVRLYDLLLQNTGDLSDLVSSGRDKKPEEVIFAEVCSCKSLAFRAQRCFYVAKSYSVAGKRAEAYALYCRARNLADDALKKFQMLDGDNKTMMKELEDLCNECRSNSCIEHALGIMEEKKTQENLSERVSNISLTGTERLEKFLLEKLDVYESAVGDSNVKCTPRIAGFPPAFQAISRNPIVLDLAYNMIEFPPIENRMKKDRKAKGGFISRIFG

SEQ ID NO: 17125 - DNA, 1586 bp, Glycine max
ttatatctgaacaggttgatgctgccattatagaagttggtcttggaggtaaagaagactcaactaatgtgattaaagaacctacagtttgcggcattacttctctgggcatggatcatactgagatattaggagatactattggacagatagcttcacacaaggcagggatttttaagcctaaggtacctgccttcactgtaccccaacctcctgaagcaatggatgttatccttgagagggccaaagaactcatgatatagagttcttatggtcagaagctcctatacccagttgcccaccttgactgaggatgttgttcataaaaatattactaaaaacccaatgcacgatgctcccacctggtgcagtctggggaaggtagatgcatggcaatagagcaaaatggggagtcgggggttgcttttgcccttcttgtctgcaccctcaccaaggacaatgttccactggaagtgactgaaccttttgattgtaaacaaattaagggattagagcttggcttatcgggtgatcaccaattctataatgctgctcttgcagtctctctttctagatgttggcttcagagaacagggaactgggggagaaaaatatcaaaacgattctaatttgccacatgaatttattagaggcctttcaacagcatatttttctggaagagctcagattgtttacgactcttatccaaattctgacggctcagaaatcttttctaaaaattatggtggagagttgatattttatttggatggagctcatagtccagagagcatggaggcttgcgcaaagtggttctctaatgccgtaagaagatatgaaattctgccacatttgtctttcaaagtagaaaatgcagaggaatcttcagaaaatggccacctcctacatgaaagcaagaccttggggcagtttgagaaatcttttaggcagattcttctattcaattgcttagatgtgagaaatccccatgttttgcttccgcagctggtgaatacatgtgcttcttcaggtattcatttctcgagagcactttttgtcccaaatatgtcaaagtatagtaaggttacttctggtgcatcagttatttcttctgatctcaatggcatagacctatcatggcaatttaacctccaaagaatctgggagaagattacacatgggaaagaaatgatcacttcgcttgaaaaggatttcaagatagacagcaaggagatcttaccacctcatgaatttctttacgatgatgcttcaactggctgccattctcataactatctggcacacagtgcagtaataccttcattgccattgacaataaaatggctgcgggactgcgtcagagaacacccttccacaagacttcaggttcttgtgactggatcactgcatcttgttggagatgtattaaagctcttgaaaagatgatttaaattgaagaatataagttgtctgccttggctttggaaaagttttattgcaccaaagaattgtcattctttcaatcatttaagcagataccgagttcatgtaattgctcaatggtgtgacaatatttcattctttac

SEQ ID NO: 17126 - protein, 299 aa, Glycine max
MLLLQSLFLDVGFREQGTGGEKYQNDSNLPHEFIRGLSTAYFSGRAQIVYDSYPNSDGSEIFSKNYGGELIFYLDGAHSPESMEACAKWFSNAVRRYEILPHLSFKVENAEESSENGHLLHESKTLGQFEKSFRQILLFNCLDVRNPHVLLPQLVNTCASSGIHFSRALFVPNMSKYSKVTSGASVISSDLNGIDLSWQFNLQRIWEKITHGKEMITSLEKDFKIDSKEILPPHEFLYDDASTGCHSHNYLAHSAVIPSLPLTIKWLRDCVREHPSTRLQVLVTGSLHLVGDVLKLLKR

SEQ ID NO: 17127 - protein, 217 aa, Glycine max
MEACAKWFSNAVRRYEILPHLSFKVENAEESSENGHLLHESKTLGQFEKSFRQILLFNCLDVRNPHVLLPQLVNTCASSGIHFSRALFVPNMSKYSKVTSGASVISSDLNGIDLSWQFNLQRIWEKITHGKEMITSLEKDFKIDSKEILPPHEFLYDDASTGCHSHNYLAHSAVIPSLPLTIKWLRDCVREHPSTRLQVLVTGSLHLVGDVLKLLKR

SEQ ID NO: 17128 - DNA, 1102 bp, Glycine max
acctaagattcagaatgtctggtcgtcactccgattccgattccaagcgatgccattctagattcgattcagaccccaacaagagatatagaagggatgaatatggaaaagaagacagagagagagtgtcaagtagcactgatgttcaaaatgaagctcttttcgctaagcacaacaaaccaaatgatcctatccaacttccaacatctctctcttattttcagcacaatgaacaaggtggcactgggcaggttggccgaagctctggtcaaaggaaggagcgtggacggtggaaggacacaaagaaacggtttaatattaatgaaagggaagagaaaaatcatggtagagagcagagaaatgagaaatcacaagctaaactggatgataatactttccagagaagagatggttttaccggaaggtcgagaaaaagagcttcatttagagagaagaagattgtagcggattcaggtgatgctaatgtggctgcagtaaagtcaggccagaaggaggaaagaaacagcaatccacagcatttggatagacctgagaagcattttgcagatgacaagggtgaagctaggaggggaagaaggtatggaggcaatgacagttacaagggaagagataaatttaatggaagacaaggctatcgtcctgagaagtggaaacatgatttgtatcaagaggtaaataaggatcccattccagagaatgaggatggccagattgcgaagctggaagcactcttggcttcataatatcatacgtgtgtatgtgtcaagctatcaccatcttcaactgtcaattttagaagatgcaaactagattcaattgaggcaggcaggttttaaaattggaatggagcacagagcaatttgcaatttggaattgtaataaagcatttttgcttgttttagacaatttctagttcgcaaagtatctacatgtctatgatttttattttggtcaatttatgtacacaccactattacggtggtttagctgaattggaaaagagtgtctcaattgcatgatcgccggttatggacatcacatatgtgaaagtagattttttaactttaaggtgaatttaatt

SEQ ID NO: 17129 - protein, 253 aa, Glycine max
LRFRMSGRHSDSDSKRCHSRFDSDPNKRYRRDEYGKEDRERVSSSTDVQNEALFAKHNKPNDPIQLPTSLSYFQHNEQGGTGQVGRSSGQRKERGRWKDTKKRFNINEREEKNHGREQRNEKSQAKLDDNTFQRRDGFTGRSRKRASFREKKIVADSGDANVAAVKSGQKEERNSNPQHLDRPEKHFADDKGEARRGRRYGGNDSYKGRDKFNGRQGYRPEKWKHDLYQEVNKDPIPENEDGQIAKLEALLAS

SEQ ID NO: 17130 - protein, 249 aa, Glycine max
MSGRHSDSDSKRCHSRFDSDPNKRYRRDEYGKEDRERVSSSTDVQNEALFAKHNKPNDPIQLPTSLSYFQHNEQGGTGQVGRSSGQRKERGRWKDTKKRFNINEREEKNHGREQRNEKSQAKLDDNTFQRRDGFTGRSRKRASFREKKIVADSGDANVAAVKSGQKEERNSNPQHLDRPEKHFADDKGEARRGRRYGGNDSYKGRDKFNGRQGYRPEKWKHDLYQEVNKDPIPENEDGQIAKLEALLAS

SEQ ID NO: 17131 - DNA, 835 bp, Glycine max
gaaaaaagcaaaaatgcaatctatgtccctgacgctgagcaagaggctctccaattcaaagcctctcttcagaatctcttccaacctcgtcgctcacgcatcctccgccacaacctctccgccgccaccttcgccgccagtcccctctccatccgccctcaacagcctcctcaccgctccgtggtccgccactcagtcacgcggaatcacgctctctggatctgatgttcgagtcgggaatctcattggaaaccgaggacgcgctcacgaggttctcaaactgtatcgccctcttgaaggaacgggcaaagccactcttgaggttccgcctcaaagtgtagctggttatgccacagttgctactacagaggatggcgccgaaaggaaggaacgaaacagtggattgagtaaggcaacgaagacaaagagagagcagctcctaaaagctactgcagttgcctctcttcttctaatatacccgaacacttattcattgctcttcgcaaatttctttgtgttctggcacttatatgcagggatcggagagattttggcagactatgttcaccatgaaatgaccagagaatttgtcatgatttctctcaggttgttcttgataatggcattgaaggatgtatgcttaaattttgtatttgtataatcagatagtgcatgggttgtgctgacattactttccaataagaggccatttagggtcaaacttggcaaaaccttaatttgtagtttctagtcgttttctcaaacttaagaggcgaggcaacgtgataacttgatgatttatcatggtaatggatgaattttagcgtgtcttgcg

SEQ ID NO: 17132 - protein, 219 aa, Glycine max
KKAKMQSMSLTLSKRLSNSKPLFRISSNLVAHASSATTSPPPPSPPVPSPSALNSLLTAPWSATQSRGITLSGSDVRVGNLIGNRGRAHEVLKLYRPLEGTGKATLEVPPQSVAGYATVATTEDGAERKERNSGLSKATKTKREQLLKATAVASLLLIYPNTYSLLFANFFVFWHLYAGIGEILADYVHHEMTREFVMISLRLFLIMALKDVCLNFVFV

SEQ ID NO: 17133 - protein, 215 aa, Glycine max
MQSMSLTLSKRLSNSKPLFRISSNLVAHASSATTSPPPPSPPVPSPSALNSLLTAPWSATQSRGITLSGSDVRVGNLIGNRGRAHEVLKLYRPLEGTGKATLEVPPQSVAGYATVATTEDGAERKERNSGLSKATKTKREQLLKATAVASLLLIYPNTYSLLFANFFVFWHLYAGIGEILADYVHHEMTREFVMISLRLFLIMALKDVCLNFVFV

SEQ ID NO: 17134 - protein, 212 aa, Glycine max
MSLTLSKRLSNSKPLFRISSNLVAHASSATTSPPPPSPPVPSPSALNSLLTAPWSATQSRGITLSGSDVRVGNLIGNRGRAHEVLKLYRPLEGTGKATLEVPPQSVAGYATVATTEDGAERKERNSGLSKATKTKREQLLKATAVASLLLIYPNTYSLLFANFFVFWHLYAGIGEILADYVHHEMTREFVMISLRLFLIMALKDVCLNFVFV

SEQ ID NO: 17135 - DNA, 1179 bp, Glycine max
aacaatttctcatttacttagtttctattatttaggcagaacctcgaagcgccaccgccaccgccaccgaagcagaaagtccgacgaagaaattgaatgcggttgcgaaattgctccggcggttccttttccgactccgccccgtaattctggcacgaattttcgcgtaatcgacgacgatgatgtcgaagaaggagaaattttcgaagacgacgacgatgtcgcgaaacagcacgcgcaatctgaagctgagcctggcgaaattgacccgaccggagatcgaggtgttcgatccgataacaaaaatctgggacattttgccagggagactttgttgcatgctaaagatatagaaactaaaactcagtgcaacgttgatgatagatttattagtcctgatggagaagatggggcatgctatcagagtcatgttggccgtggaatacatgaagatggtatggggaatggtctttttgatggaaaggatggtagagctagtacagatggtatgggcaatgggcttttggatcataaacatggatgttttaaaggaaatgagaaactaaaaggttattgtgatgatgaggatgtggaggttgatggagggaaagttggttactataaaaattcttcctcagaaagtggaagagagaaagatagaagatcaagatattcacattctcgtgatagatatagaagtcgatcaagatcaactggtcatgctacggacaggtctcattctggtagtatagtggaagaacatgctcgttcaaagagaaagcactctggtgaacagggggatgattcatatgctagtagactgaagactgactatgaccttgatgatgaaagaatgatggcaagcagaagggagagtagagatttggtggtggataaaagaagggaacacaggacaagttatcatactcaggaggcttggggtagggctaggagtagcgatagagatgttgatagagacttaaagatggaaaaagaacaagagaggagtaggaatagggaggtcaattgggtgcatagaagggaaaaagaacgtgagaggagttgtgagaggcacagaagggatgtagaaaaagataggagggaaagagaggatgatagggataggagaagagaaaaggaaagcgataggatccgtgagacagtgtttgagagggatag

SEQ ID NO: 17136 - protein, 392 aa, Glycine max
TISHLLSFYYLGRTSKRHRHRHRSRKSDEEIECGCEIAPAVPFPTPPRNSGTNFRVIDDDDVEEGEIFEDDDDVAKQHAQSEAEPGEIDPTGDRGVRSDNKNLGHFARETLLHAKDIETKTQCNVDDRFISPDGEDGACYQSHVGRGIHEDGMGNGLFDGKDGRASTDGMGNGLLDHKHGCFKGNEKLKGYCDDEDVEVDGGKVGYYKNSSSESGREKDRRSRYSHSRDRYRSRSRSTGHATDRSHSGSIVEEHARSKRKHSGEQGDDSYASRLKTDYDLDDERMMASRRESRDLVVDKRREHRTSYHTQEAWGRARSSDRDVDRDLKMEKEQERSRNREVNWVHRREKERERSCERHRRDVEKDRREREDDRDRRREKESDRIRETVFERD

SEQ ID NO: 17137 - protein, 240 aa, Glycine max
MGNGLFDGKDGRASTDGMGNGLLDHKHGCFKGNEKLKGYCDDEDVEVDGGKVGYYKNSSSESGREKDRRSRYSHSRDRYRSRSRSTGHATDRSHSGSIVEEHARSKRKHSGEQGDDSYASRLKTDYDLDDERMMASRRESRDLVVDKRREHRTSYHTQEAWGRARSSDRDVDRDLKMEKEQERSRNREVNWVHRREKERERSCERHRRDVEKDRREREDDRDRRREKESDRIRETVFERD

SEQ ID NO: 17138 - protein, 223 aa, Glycine max
MGNGLLDHKHGCFKGNEKLKGYCDDEDVEVDGGKVGYYKNSSSESGREKDRRSRYSHSRDRYRSRSRSTGHATDRSHSGSIVEEHARSKRKHSGEQGDDSYASRLKTDYDLDDERMMASRRESRDLVVDKRREHRTSYHTQEAWGRARSSDRDVDRDLKMEKEQERSRNREVNWVHRREKERERSCERHRRDVEKDRREREDDRDRRREKESDRIRETVFERD

SEQ ID NO: 17139 - DNA, 1142 bp, Glycine max
atccaatagagattgtaaattctgcaatagacctgcatacaaatatgattaaacaaatgaaaggagttcctggagttaccttggagcgattatctgaaggtctctcaccacgtcattgtgcattatcgcttgttggtgaacctattatgtatccagagataaatgcacttgtggatgagctgcacaaaaggaggatttccacttttctagttacaaatgcacaatttccagagaaaattaagtcactgaaacctatcacccagttatatgtaagtgtagatgctgcaacaaaggactctttgaaggcaattgatagaccactctttggagatttctgggagcgattcattgattccttgactgctctaaaggaaaaacatcagcgaacagtataccgcctgaccctggtgaaaggctggaataccgaagaagttgatgcttattctaagctctttagtttaggagaacctgactttgttgaaatcaagggagttacatattgtggctcgtccactacgtcaaaattgacaatggataatgtcccttggcatgctgatgtgaaagctttttctgaggccctagctttgaaaagccaaggagagtatgaagttgcatgtgagcatgctcactcgtgctgtgtcctcttagcaaaaactaataagttcaaaattgatggccagtggtatacatggatagactatgaaaaatttcatgatctggtggcatctggaagaacttttgacagcagagattacatggctgccacaccatcgtggtccgtctatggatcagaggaaggtggatttgatccaggacaattgagatacaggaaagagagacatcacaagtctacccgcaatcaagcaggttagacatttaagagcctttggcagccaacactcattttcctgttgatcttttttcttcagtgtataactctaggttatacaacatacttcaataggacagttttgtaatacatggcttcacacataggttagtaccatttctgtgtatttaagccccattgttttcccaatcagcagttgaatgaacagaacattttttcttatttaccacaaatagtactttggatgtcaatgttgcagtcacagaagtaatttgtttttgagattgagatc

SEQ ID NO: 17140 - protein, 289 aa, Glycine max
PIEIVNSAIDLHTNMIKQMKGVPGVTLERLSEGLSPRHCALSLVGEPIMYPEINALVDELHKRRISTFLVTNAQFPEKIKSLKPITQLYVSVDAATKDSLKAIDRPLFGDFWERFIDSLTALKEKHQRTVYRLTLVKGWNTEEVDAYSKLFSLGEPDFVEIKGVTYCGSSTTSKLTMDNVPWHADVKAFSEALALKSQGEYEVACEHAHSCCVLLAKTNKFKIDGQWYTWIDYEKFHDLVASGRTFDSRDYMAATPSWSVYGSEEGGFDPGQLRYRKERHHKSTRNQAG

SEQ ID NO: 17141 - protein, 275 aa, Glycine max
MIKQMKGVPGVTLERLSEGLSPRHCALSLVGEPIMYPEINALVDELHKRRISTFLVTNAQFPEKIKSLKPITQLYVSVDAATKDSLKAIDRPLFGDFWERFIDSLTALKEKHQRTVYRLTLVKGWNTEEVDAYSKLFSLGEPDFVEIKGVTYCGSSTTSKLTMDNVPWHADVKAFSEALALKSQGEYEVACEHAHSCCVLLAKTNKFKIDGQWYTWIDYEKFHDLVASGRTFDSRDYMAATPSWSVYGSEEGGFDPGQLRYRKERHHKSTRNQAG

SEQ ID NO: 17142 - protein, 271 aa, Glycine max
MKGVPGVTLERLSEGLSPRHCALSLVGEPIMYPEINALVDELHKRRISTFLVTNAQFPEKIKSLKPITQLYVSVDAATKDSLKAIDRPLFGDFWERFIDSLTALKEKHQRTVYRLTLVKGWNTEEVDAYSKLFSLGEPDFVEIKGVTYCGSSTTSKLTMDNVPWHADVKAFSEALALKSQGEYEVACEHAHSCCVLLAKTNKFKIDGQWYTWIDYEKFHDLVASGRTFDSRDYMAATPSWSVYGSEEGGFDPGQLRYRKERHHKSTRNQAG

SEQ ID NO: 17143 - DNA, 1402 bp, Glycine max
aatagctttcctcctctctatatttccgctttcacttcttctctctcaccctccaactatgagttactacaaccagcagcagccacccgtcggtgttcctcctccccaaggttacccaccgccggaatcttacggaaaggacgcgtaccctccgccagggtaccctccacagggaggataccctccgcaggcgtatccagcacaggggtaccctccaccctacgcgcctcctcagtacgctcagcctccgccgcaacaacaccagaattcatctggcccgggttgcttagaaggatgtttggctgctctctgctgctgttgcctgttggatgcctgcttctgagaaagaaaagagaggttgctttgcacaaattggatttgaaactgtgttttgactttgaacatgaccattatcgctcttagtttttattattttctatgttgatttacatttcgtggatatgaaatattgttctgcttcattaacaggaggattcgtggctttttgtttttcttgtgtttttgtttatattggcgattgatacaaaaaataaaaaccctctaatagcgcactaatctgcattataattttttcatttgttgaatgcatttgaattgatctgaacatttggaattggtgttcgtgtggtgttttgattaattgatggaactatcaattttgcaaacagaggaaacaagtaatgtgttcagttgcgtacgaaaatatatttgtagcaccaaatagtttggctttggcaactttctttgtgatgcgaattgcactttagctttgccttttgcattgccaataacgtgctctggcagcttattctcgttattaactttagctagtggagtccccaaaatgaacagtttattccacccgtgatcctttcttttctcttctccacaaaccacactttcaatgatacaatcatatttatatttgctttgggtggcttttaagtagagtcttcttccatgtcttgtaaagttaattaaagaatagaagagatcaaatgttatgtattaaaaagataatgtaattttctaattttttttctttaaaaacacttggacaccaaagtgcgagttccctataacaaaactatagcaccttgaatgacccctagttaacgatttcccgtagtgaaccaatggttgggtgtaaggagtttcgttggtcatggtgacattctctgaagaaggactcaatgtgtccccctgcggtcactcgatcgtcctagcaaatcggtctaatgaataattcgcaatttcaatttcgtgattactatttaacagtgtaagtgcgcaactacacgtttttacggtatcatataattaagaatatgttgttattgattgatctagtttacctaacttatcaatgggtaagtatttt

SEQ ID NO: 17144 - protein, 140 aa, Glycine max
NSFPPLYISAFTSSLSPSNYELLQPAAATRRCSSSPRLPTAGILRKGRVPSARVPSTGRIPSAGVSSTGVPSTLRASSVRSASAATTPEFIWPGLLRRMFGCSLLLLPVGCLLLRKKREVALHKLDLKLCFDFEHDHYRS

SEQ ID NO: 17145 - protein, 113 aa, Glycine max
IAFLLSIFPLSLLLSHPPTMSYYNQQQPPVGVPPPQGYPPPESYGKDAYPPPGYPPQGGYPPQAYPAQGYPPPYAPPQYAQPPPQQHQNSSGPGCLEGCLAALCCCCLLDACF

SEQ ID NO: 17146 - protein, 94 aa, Glycine max
MSYYNQQQPPVGVPPPQGYPPPESYGKDAYPPPGYPPQGGYPPQAYPAQGYPPPYAPPQYAQPPPQQHQNSSGPGCLEGCLAALCCCCLLDACF

SEQ ID NO: 17147 - DNA, 1470 bp, Glycine max
atctcggatcttaaaaaactggaattcccgacgcaacacaaacatgagttactggaaacactgtcaataggaagcagttgtgattcactcacatctcttccattggttacctttccaaatctcagagatcttgaaatccataactgtgaaaatatggaatctcttttggtttcaggggcagagtcatttaagagtctatgctctttgataatttcccaatgccccaactttgtatcattctgtagagaaggattgcctgcgcccaacttgattactttcagggttattggctctgacaagttgaagtcgttgcctgatgagatgagtactcttctcccaaagttagaattgctccacatatcctactgcccagaaattgagtcgtttccagaagggggtatgccacctaacctgagaacagttgtgattgagaattgtgagaaactactgagcggcctagcatggccatccatgggcatgcttacccatgtctatgttcggggtccatgtgatggcatcaagtccttccctaaggagggtttgctgcctccctcccttacgtctctgcatctatataacatgtcaaatctggagatgttggactgcacgggggcttctccatctcacatccctgcaagatttaagcatatggagatgtcctttgctggagatgttggactgcacggggcttcctgtctctctaataaaattaacaatgaggggatgtcctttgctggaaaatatggtgggagaaaggcttcctgactctctaataaaattaaccatagagagttgtcctttgctggaaaaacgatgccgcttgaagcaccctcaaatttggcctaaaatttcccacatccctggcattaaggttgacaatagatggatttagccaccaaggaggaccaacagagaatcaacaaattatcaaaggcaacttgtgatatcatctaaatcaaattcactgaagagtgccgcttaacccctagcttcgaagaagtaacgatacaggtactaagtaacaacattgataaatacttaaatataatgatacaggtactaagtaacaacattgataaatacttaaatataatgatacaggtactaagtaacaacattgataaacttatttttgtttttcagatatggttgattggcccggagaaactgtacctacccatgaatctaagttcaaatttgaactagtgctaaatgtaacttttgatttaattgacgtgaaattgacactttctcaatagctgaatttttatttgtgaggtttttcgttgggtacaatgtgaaggatgaaaaggtgtaccaagtgaacttttgaaggatgggatgatttcagcttatctcttatcctatgtcttataaattaatagtggtatgattattctaaaaatatgatagatatgtagatatgtaagaattgataaaagcataataaatatacaattgcaattcggt

SEQ ID NO: 17148 - protein, 254 aa, Glycine max
ISDLKKLEFPTQHKHELLETLSIGSSCDSLTSLPLVTFPNLRDLEIHNCENMESLLVSGAESFKSLCSLIISQCPNFVSFCREGLPAPNLITFRVIGSDKLKSLPDEMSTLLPKLELLHISYCPEIESFPEGGMPPNLRTVVIENCEKLLSGLAWPSMGMLTHVYVRGPCDGIKSFPKEGLLPPSLTSLHLYNMSNLEMLDCTGASPSHIPARFKHMEMSFAGDVGLHGASCLSNKINNEGMSFAGKYGGRKAS

SEQ ID NO: 17149 - protein, 203 aa, Glycine max
MESLLVSGAESFKSLCSLIISQCPNFVSFCREGLPAPNLITFRVIGSDKLKSLPDEMSTLLPKLELLHISYCPEIESFPEGGMPPNLRTVVIENCEKLLSGLAWPSMGMLTHVYVRGPCDGIKSFPKEGLLPPSLTSLHLYNMSNLEMLDCTGASPSHIPARFKHMEMSFAGDVGLHGASCLSNKINNEGMSFAGKYGGRKAS

SEQ ID NO: 17150 - protein, 147 aa, Glycine max
MSTLLPKLELLHISYCPEIESFPEGGMPPNLRTVVIENCEKLLSGLAWPSMGMLTHVYVRGPCDGIKSFPKEGLLPPSLTSLHLYNMSNLEMLDCTGASPSHIPARFKHMEMSFAGDVGLHGASCLSNKINNEGMSFAGKYGGRKAS

SEQ ID NO: 17151 - DNA, 1055 bp, Glycine max
agaaacagaacagaagcatcaattatcagttatcagcatggtcaaaactgtagtttggtccacttttgtgagaccgcaatataaacctgcacatttcaatcactcaccccttccatttctgaagctcagtacacccaatttgagctttcgtgggaccaacacagtacataataagcgatccaattggccaaaacctttgtcactgcgctcaaaatctgttcttgctgttgctggggctgaccctttggaaatggcagaggattggaaccgcacagcccttcttgtgatcgacatgcagaaagattttatagaagatgggggtcccatgctagtaaaaggagggaaagacattgtcccaaatgttattaaggctgtcgatgttgctaggcagcgtggaattctcatagtttgggtagtacgggaacatgatcccttaggaagagatgttgaactctttcgtcggcatctatatgcagcagggaaagttggtccaacctctaaaggaagtgaaggtgcagaattagttgatggactggtaattaaagaaggggattataaacttgtgaaaaccaggtttagtgcattctttgctacacaccttcattcagtccttcaaggagcaggaattaatagtcttgtggtcactggtgttcaaactcctaactgtattaggcaaactgtctatgatgctgtagcattggactatcaacctgtaactgttattgttgatgctacagcagcagccacacctgatattcatctcgccaatgtgtttgacatggaaaatattggagttgcaaccccaacattacaagaatggagcgaacccaaagcttgatctatatgaactatgaagcatgctactttttgcacccagtggtgtactggtgttcaattccaagactcaagaaaggtttgaagtgaagcaaacgtatctatgtttactgcataataaaatgatttacatggctaagtttgtttattttggtattcacttcacttttgttgtgactactatgaacttattttttctagtccaatgcactccaatttag

SEQ ID NO: 17152 - protein, 278 aa, Glycine max
ETEQKHQLSVISMVKTVVWSTFVRPQYKPAHFNHSPLPFLKLSTPNLSFRGTNTVHNKRSNWPKPLSLRSKSVLAVAGADPLEMAEDWNRTALLVIDMQKDFIEDGGPMLVKGGKDIVPNVIKAVDVARQRGILIVWVVREHDPLGRDVELFRRHLYAAGKVGPTSKGSEGAELVDGLVIKEGDYKLVKTRFSAFFATHLHSVLQGAGINSLVVTGVQTPNCIRQTVYDAVALDYQPVTVIVDATAAATPDIHLANVFDMENIGVATPTLQEWSEPKA

SEQ ID NO: 17153 - protein, 266 aa, Glycine max
MVKTVVWSTFVRPQYKPAHFNHSPLPFLKLSTPNLSFRGTNTVHNKRSNWPKPLSLRSKSVLAVAGADPLEMAEDWNRTALLVIDMQKDFIEDGGPMLVKGGKDIVPNVIKAVDVARQRGILIVWVVREHDPLGRDVELFRRHLYAAGKVGPTSKGSEGAELVDGLVIKEGDYKLVKTRFSAFFATHLHSVLQGAGINSLVVTGVQTPNCIRQTVYDAVALDYQPVTVIVDATAAATPDIHLANVFDMENIGVATPTLQEWSEPKA

SEQ ID NO: 17154 - protein, 195 aa, Glycine max
MAEDWNRTALLVIDMQKDFIEDGGPMLVKGGKDIVPNVIKAVDVARQRGILIVWVVREHDPLGRDVELFRRHLYAAGKVGPTSKGSEGAELVDGLVIKEGDYKLVKTRFSAFFATHLHSVLQGAGINSLVVTGVQTPNCIRQTVYDAVALDYQPVTVIVDATAAATPDIHLANVFDMENIGVATPTLQEWSEPKA

SEQ ID NO: 17155 - DNA, 1403 bp, Glycine max
attttgtaggatcacacatatttcctgatgttttgctcaacgatattgctggcccagaaggagatcctttgttgttgagtttaaaactatccgtagatgttttggttgtttcttgtccatgtgcactgggtcttgctacgcccacagcaatcttggttggcacctcacttggggcaagaaaaggacttcttattaggggaggggatgtgctggaacgcttggctggaataaattatattgctctagacaagacaggaacccttaccaaaggaaaaccagttgtgtcggccataagctctatcctttatggagaatctgaaattcttcggcttgctgctgcagtggagaaaacagcatctcacccaatagcaaaggctattgtcaataaagctgagtcattagagttggtacttcccgttacaaagggacagttagttgagccaggttttggaactttagcagaagttgatgggcatctgattgcagttgggtctttagaatgggttcatgaacgcttccagacaagagcgaacccatctgatttgacaaatctggagaatagtttgatgaatcattcattgaatacaacatcttcaaagtattcaaaaactgttgtctatgttggacgtgaaggagaaggcatcattggtgcgattgccatatctgacactgtgcgtgaagatgctgaatctactataacaaggctcaagcagaaggggattaaaacagtcctcttgtcaggagacagggaagaggcagttgcaactgtagcagatacagttggaattgaaaatgattttgtcaaagcatctttgtctccacaacagaaatctggatttatttcctctctgaaagctgctggacatcatgttgcaatggtaggtgatgggataaatgatgcaccctctttggctgtggctgatgttgggattgctctgcagaatgaagctcaagagaatgctgcctcggatgcagcatctatcatacttctggggaacaaaatttcacaagttgtcgatgcgctagacctagcacaggcaacaatgggaaaagtgtaccaaaatttgtcttgggcggtcgcatataatgttgttgccattcccattgctgctggtgttttacttccccattttgactttgccatgacaccgtcactttcaggaggactgatggctctgagctccatcttcgtggttggcaactcactgcttctacagcttcatgggtctcagatctctagaaaggttgggtcaactatagaaatcatatcttcccattcgaacacagatatgcttaatttaaaataaccatcggagttgtgtgcattatagagtaagccgtaatatacgttcgagcacagatacgctcaatgtaaaataatcatcggagctgtgcattattat

SEQ ID NO: 17156 - protein, 434 aa, Glycine max
FVGSHIFPDVLLNDIAGPEGDPLLLSLKLSVDVLVVSCPCALGLATPTAILVGTSLGARKGLLIRGGDVLERLAGINYIALDKTGTLTKGKPVVSAISSILYGESEILRLAAAVEKTASHPIAKAIVNKAESLELVLPVTKGQLVEPGFGTLAEVDGHLIAVGSLEWVHERFQTRANPSDLTNLENSLMNHSLNTTSSKYSKTVVYVGREGEGIIGAIAISDTVREDAESTITRLKQKGIKTVLLSGDREEAVATVADTVGIENDFVKASLSPQQKSGFISSLKAAGHHVAMVGDGINDAPSLAVADVGIALQNEAQENAASDAASIILLGNKISQVVDALDLAQATMGKVYQNLSWAVAYNVVAIPIAAGVLLPHFDFAMTPSLSGGLMALSSIFVVGNSLLLQLHGSQISRKVGSTIEIISSHSNTDMLNLK

SEQ ID NO: 17157 - protein, 246 aa, Glycine max
MNHSLNTTSSKYSKTVVYVGREGEGIIGAIAISDTVREDAESTITRLKQKGIKTVLLSGDREEAVATVADTVGIENDFVKASLSPQQKSGFISSLKAAGHHVAMVGDGINDAPSLAVADVGIALQNEAQENAASDAASIILLGNKISQVVDALDLAQATMGKVYQNLSWAVAYNVVAIPIAAGVLLPHFDFAMTPSLSGGLMALSSIFVVGNSLLLQLHGSQISRKVGSTIEIISSHSNTDMLNLK

SEQ ID NO: 17158 - DNA, 1715 bp, Glycine max
ggttaaggaccgactcttcacttgggaggaagtgacgatcgaaatctggtaagaggctgtaatcaatcaaccaaagcaacgatgtcgtggtttacaaggacaatcgcaaactcactcaaactcgacgacgacgacaatggcggtgacctaaaatcccctccgaagaaacccgattcggaacccgttcaacccgattccgcatccacccccaatcccaccacgcgcggcgtcaaagaggatttttccgagctcaccaaatccttttcccgccagctctggggagtcgcctccttcctcgccccgccgcccgatccccaatccgaaaagcccgtcgccgattccaatcccaatcccactgacgacgacgaagaggaagatatcatcgcaggaatccgaaacgatttcgcggagattagtggcaagttcaagagcgggatctccaaaatttctggtaataagacggtatccgaattcactaagatagcttcgagtttccttcagcttggatccgaggaggaatacgatctcgaaggtgtcctcggagttaccgaggatgtggttgccttcgccagaagcgtagctttgcatccagaaacttggctcgattttccccttcccgatgatgaggattctgatgattttgatttgtccgatgcacaacaagaacatgctctagctgttgaacacctggcaccaagcttagctgctcttagaatggagctgtgccccggatacatgagtgatggtaacttttggaagatatactttgttctcgtgcaccctagacttagcaaaactgatgctgctattttatccactccacaaataatggaagctagagcaatgttaactctggctttagacaaaagaagtaaggaaaagaaagaatctgacttatctgcaggagggaatgttccctcaaaagaggaggaacagcatctctttgtgccaagcactgttcaacttgaatcagcacctctccagacatctgctgctgaagctgccccatctgtggttgtttctaatgttgagatggagaaacatgccactcaaagtattgttccagaggttattgacaagtctgtggttaaagaagcaacggtaaatccatctgcagaacaatcatcatctggttcaaccaatagatttttggatgaatcctatgaggatgatgctgatgattggttgaaagaagaggatacttctgaaatggttggtcccagtggaactcctgttcacactggtaatgacgaggatgtatcattcagtgatcttgaggaggatgatggtgatgtacatgaaagttataaaaaaactagatcaggctctgattcttcaacaaaagactctcgagattgggttcagttaggtagaagttcacctaactctgataaggatttaaactgtgtagaaggcaaacatgttggctctgagcattcaagtgctcgtaattctatgaccaaggattccaatgattggcttaatgttgatgacattgatgtaatatgactatgccttggaatatgtcccagaggtaagtttttttttatttttaaatatgattctcttatattttgtgaatatctgcatatagttgtgtactctacgattgacattctgaagaatgcgtttctgtaaataaaaccagtctccactgggcattgtgctatgtatggttatttattgcaccgtacataaactaaatcttctatttg

SEQ ID NO: 17159 - protein, 475 aa, Glycine max
MSWFTRTIANSLKLDDDDNGGDLKSPPKKPDSEPVQPDSASTPNPTTRGVKEDFSELTKSFSRQLWGVASFLAPPPDPQSEKPVADSNPNPTDDDEEEDIIAGIRNDFAEISGKFKSGISKISGNKTVSEFTKIASSFLQLGSEEEYDLEGVLGVTEDVVAFARSVALHPETWLDFPLPDDEDSDDFDLSDAQQEHALAVEHLAPSLAALRMELCPGYMSDGNFWKIYFVLVHPRLSKTDAAILSTPQIMEARAMLTLALDKRSKEKKESDLSAGGNVPSKEEEQHLFVPSTVQLESAPLQTSAAEAAPSVVVSNVEMEKHATQSIVPEVIDKSVVKEATVNPSAEQSSSGSTNRFLDESYEDDADDWLKEEDTSEMVGPSGTPVHTGNDEDVSFSDLEEDDGDVHESYKKTRSGSDSSTKDSRDWVQLGRSSPNSDKDLNCVEGKHVGSEHSSARNSMTKDSNDWLNVDDIDVI

SEQ ID NO: 17160 - protein, 264 aa, Glycine max
MELCPGYMSDGNFWKIYFVLVHPRLSKTDAAILSTPQIMEARAMLTLALDKRSKEKKESDLSAGGNVPSKEEEQHLFVPSTVQLESAPLQTSAAEAAPSVVVSNVEMEKHATQSIVPEVIDKSVVKEATVNPSAEQSSSGSTNRFLDESYEDDADDWLKEEDTSEMVGPSGTPVHTGNDEDVSFSDLEEDDGDVHESYKKTRSGSDSSTKDSRDWVQLGRSSPNSDKDLNCVEGKHVGSEHSSARNSMTKDSNDWLNVDDIDVI

SEQ ID NO: 17161 - protein, 257 aa, Glycine max
MSDGNFWKIYFVLVHPRLSKTDAAILSTPQIMEARAMLTLALDKRSKEKKESDLSAGGNVPSKEEEQHLFVPSTVQLESAPLQTSAAEAAPSVVVSNVEMEKHATQSIVPEVIDKSVVKEATVNPSAEQSSSGSTNRFLDESYEDDADDWLKEEDTSEMVGPSGTPVHTGNDEDVSFSDLEEDDGDVHESYKKTRSGSDSSTKDSRDWVQLGRSSPNSDKDLNCVEGKHVGSEHSSARNSMTKDSNDWLNVDDIDVI

SEQ ID NO: 17162 - DNA, 1396 bp, Glycine max
gaaatgagaattgcacaattgcaaagtgagaataattccttacttcaaaaagaggctggattggtggaaaaaactaatcagttgctgaatgaaaaggtagttttgagcctgaaagctgagagtttagagagaaaaataaatcttctggagaatgagttgagttcttttagtgagaaagaggttggacttgaaacaagaattgcacaattgcagagtgagaataattccttacttcaaaaagaggctacattggtggaaagaaccaatcaattgctgaatgaaaaggcagttttgagcctgaaaggggagagtttagaacaaaaaatatatcttctggaaagcgatttgaattctttagtcaagaaggagaattcaactaaagaaactatttcaaacctgaatggaaacattgctgtgctacaagcgcaggtggaagaattggaggagtccaggaataatctttttctagaaaaccagcaattgagggaaaaagtgtcgagtcttcagtcaacggtccaaaatcatgaaaacagtaacacttcttcctgctcatgggatgcatctgtaaaggatcttgcttctgaaaacgaggacttgaagtctgaaattgaagcagcctttacgttggtggagaaattgatggctgaaaatgcagaacttgttgagaaggtcaccgagttatgtgttgagctggatcaccgaagtgcagaagtcggacattctggagtcactgaatccaatgggatgactgaatttgttaaacctactggtgttgccattcctctaccagaatctgctgagtatgcgtctgtatcatcccccaagttgaattcattggaagagacttcagtgaaggataatggtaactctaatgatgctaagcatgttgttggggtaacgtcaaactcgtcgttggtatcggctgatgacgctggagaaatcgtgcaaattccattggatgataatgaaatacaagatatagagttgcaggatgctaagaatgtggaaaatgatgctgatgctgtgccaatcacagatgctccgcttatcggtgctccatttcgtttgatatcatttgttgctaattttgttagtggtgctgacttggttaaccaaagctcttcaaacactgctcgttgacttggttgaccaaagctctgttttttttggctggcagtcttgaacatacaataacctcacttacattaggcagaataccaatataggttggcctaatttgggccattttaatgtttgtatgttaattctttgaacacggaaatattgtactggggaaaagcatatagttttatgtgttcttacttcatattgctttcacttttggaaattatacctttaaaaaatggcatcatgaatagacatgcattaattggtg

SEQ ID NO: 17163 - protein, 379 aa, Glycine max
EMRIAQLQSENNSLLQKEAGLVEKTNQLLNEKVVLSLKAESLERKINLLENELSSFSEKEVGLETRIAQLQSENNSLLQKEATLVERTNQLLNEKAVLSLKGESLEQKIYLLESDLNSLVKKENSTKETISNLNGNIAVLQAQVEELEESRNNLFLENQQLREKVSSLQSTVQNHENSNTSSCSWDASVKDLASENEDLKSEIEAAFTLVEKLMAENAELVEKVTELCVELDHRSAEVGHSGVTESNGMTEFVKPTGVAIPLPESAEYASVSSPKLNSLEETSVKDNGNSNDAKHVVGVTSNSSLVSADDAGEIVQIPLDDNEIQDIELQDAKNVENDADAVPITDAPLIGAPFRLISFVANFVSGADLVNQSSSNTAR

SEQ ID NO: 17164 - protein, 378 aa, Glycine max
MRIAQLQSENNSLLQKEAGLVEKTNQLLNEKVVLSLKAESLERKINLLENELSSFSEKEVGLETRIAQLQSENNSLLQKEATLVERTNQLLNEKAVLSLKGESLEQKIYLLESDLNSLVKKENSTKETISNLNGNIAVLQAQVEELEESRNNLFLENQQLREKVSSLQSTVQNHENSNTSSCSWDASVKDLASENEDLKSEIEAAFTLVEKLMAENAELVEKVTELCVELDHRSAEVGHSGVTESNGMTEFVKPTGVAIPLPESAEYASVSSPKLNSLEETSVKDNGNSNDAKHVVGVTSNSSLVSADDAGEIVQIPLDDNEIQDIELQDAKNVENDADAVPITDAPLIGAPFRLISFVANFVSGADLVNQSSSNTAR

SEQ ID NO: 17165 - DNA, 1489 bp, Glycine max
aatgagaatatcatgcaacaaagctcctcttcttcccctcatgaaactaatagtggaccattcaaccaatgtggagagggccatgaaccatttgtttcgtatgagggtcttgagcagctgcaccggttcttatttgttctcgggatcactcatgttctgtatagttgtctggctgttggtttagcaatgagcaagatctatagttggcgcagatggggaaatcaggctgcaatggcaaccggtggaaacttgcaaggaaagaaaatcaaggtgatgaggcggcagacaacatttgttttccatcacacttctcatccatggagcaggagtccaatcctaaactggatgctctgttttgtgcggcaatttagaagctctatacaaaaatcagattaccttgcactccgcttaggtttcatcactgaacacaaattgccgttcttataatttccatcaatatatggttcgaagcatggaagatgaatttcatggcattctaggaataagctggccgctttggatttatgccatagtctgcatcttcgtgaacatccatggtctgaatatatacttctggctatcatttatccctgcaattggacaaaacttcaacattttgtatccactttagcacttgaaattatggagcagacaggtcaatctgctagcacacaagtaaagccacgtaatgatcttttttggttcaaaaaaccggatatactgttacaggtgatacaatgtcatatttcagaatgcctttgaaatggcaacatttatttggacattgtggggattccaagaacgatcgtgcttcatgagaaaccattacatgatcatcacacggttggcatggtgctcttgttcagttctggtgtagctatatgacagtgcccctgaatgtaatagtttcacagatgggatctcgatgtaagaaggccttagtagcggagagtgtcagaaagtccctgcatagttggtgtaaaagagtaaaacacaagtctaagcatgattcgttgcattcacacacaacaagatcagtatgttccctcgaatcaacaattgatgagagggatgaaataacagtagtatccggcactctaactcgaagctcgtccttagagtctttgaatcagataacagtgactgtagaccagctgaacttaatttgagacttctaacaacccaaaaaattcaaccaaggtggctgagtatttgtctgaatctgtatatactaattccccacaaccatcccacaatggtgaatggagaggaagcaaaagctatcactcttcttgatttgtttcagaaaacatgatcaattaatgtttcatataacttcagaactagttggaacttcatagagcatagatgtacaaatcattcttaaatgctctcaagcatagacacataagtagtcgagaatgaagaagcctcattgtaccgcagatacaattagatatatcatctctttccctcttttaagtgatac

SEQ ID NO: 17166 - protein, 148 aa, Glycine max
NENIMQQSSSSSPHETNSGPFNQCGEGHEPFVSYEGLEQLHRFLFVLGITHVLYSCLAVGLAMSKIYSWRRWGNQAAMATGGNLQGKKIKVMRRQTTFVFHHTSHPWSRSPILNWMLCFVRQFRSSIQKSDYLALRLGFITEHKLPFL

SEQ ID NO: 17167 - protein, 144 aa, Glycine max
MQQSSSSSPHETNSGPFNQCGEGHEPFVSYEGLEQLHRFLFVLGITHVLYSCLAVGLAMSKIYSWRRWGNQAAMATGGNLQGKKIKVMRRQTTFVFHHTSHPWSRSPILNWMLCFVRQFRSSIQKSDYLALRLGFITEHKLPFL

SEQ ID NO: 17168 - protein, 95 aa, Glycine max
MTVPLNVIVSQMGSRCKKALVAESVRKSLHSWCKRVKHKSKHDSLHSHTTRSVCSLESTIDERDEITVVSGTLTRSSSLESLNQITVTVDQLNLI

SEQ ID NO: 17169 - DNA, 1837 bp, Glycine max
gagagccctgttatgttcaaatctaaaggacaaagatgatgatagacttgtcaagtcaaaatcaattaaaaaaaagaaaaatgctgatttggttaaccacaagaatggtaataatctgttggacaccaacgaccaaaataataaatccaaggatgtccaacgcattgaaggtgataatgatgaaaaatccgccaatggcattaagggcaatcctgctaccttgggtgcagaaggtgctgagaaggaatttaacccgcgcaaacgcaaacgggatgtattatttggcatgctaaactggatgaagcatattgcaaagcatcctcttgatcctttaactcaaccaatacctaaaccatcaaagtggaaggaatataatggccaggacttttttggtcaatttctgagggcaagagaggctctatcactgagacagcatgaagaaccaaacagtggatcgtcttctttgcagaaacagaagatgcaccctgctatgtatgaggatcatgttgctcttggtcgccctgctacaggaaaattgagatgcagtgaaaggctgccttcctttgttaaatctcggtcgtgctcgtgctgcaatccatgttcccccaacggaaatagattggcaggctcacacaatatggaggcagaaaaatgtcctccggagaaaacaactgaaacactagatgtttcgaccacaaaaacaatagctgaaccatctggggatgagtctctcgaaaagcaagtttctgtgggtcctcgttttcaagcagaagtcccagaatggactggtgtagtttctgagagtgactctaaatggttgggcacacaagtatggactttgaaaaatgacacagaacatgctacggaaacagatattgggagaggaagacaagaaaagtgtagctgtgaatttcatggttctgttgaatgtgttagattacatattgctgaaaataggatgaaattgaagcttgaattgggttctgaattttaccgttggggatttgatcgtatgggtgaggaagtttcacttcaatggacaactgaagaagaaaagagatttaaggatatcatgaaatcaaatattccctccaaaaataaatatttttggaacaatccatccaaatactttccaaagaaaacaagaagaaacttggtgagctattacttcaatgcatttcttattcaactaagaacctatcagaatcgggtgtctccaaagagcgttgatagtgatgatgatgaagtagaatttggatcttttagcgatggttttgggatggaagccgtcaagggtcctgatgatgatttcctggaatgttctctgaacaagcagtgcacagatttcgaatagacaaaattagagtgtaaatttgataattggatctgagccactttgagcttgagaaaatattttcctgaggcaaacttttataaaactcttcctccatgatcagtggtgaatgcattacttgtaccagaaaaattttgtataatttagggaggttactgttggaacttggaagcaaatatggacatgtattcgagtcttgtctacccataatgaagaacttgctgaggctgctattaattttgttggagatggttgtatttgttggttgaaatagcagtttaacatgatgcttcatggaggctgtaccattcgtgctataaaacttgttctttggtgtgagctaatgctttcaattttatgtttctactttccggtcactattttgtaaattaaatttatagtttttattcgtcacatgttttgactttcaaattgaacaactttttctttgaagtatgggtgaatgtaaatttatttttgtct

SEQ ID NO: 17170 - protein, 450 aa, Glycine max
RALLCSNLKDKDDDRLVKSKSIKKKKNADLVNHKNGNNLLDTNDQNNKSKDVQRIEGDNDEKSANGIKGNPATLGAEGAEKEFNPRKRKRDVLFGMLNWMKHIAKHPLDPLTQPIPKPSKWKEYNGQDFFGQFLRAREALSLRQHEEPNSGSSSLQKQKMHPAMYEDHVALGRPATGKLRCSERLPSFVKSRSCSCCNPCSPNGNRLAGSHNMEAEKCPPEKTTETLDVSTTKTIAEPSGDESLEKQVSVGPRFQAEVPEWTGVVSESDSKWLGTQVWTLKNDTEHATETDIGRGRQEKCSCEFHGSVECVRLHIAENRMKLKLELGSEFYRWGFDRMGEEVSLQWTTEEEKRFKDIMKSNIPSKNKYFWNNPSKYFPKKTRRNLVSYYFNAFLIQLRTYQNRVSPKSVDSDDDEVEFGSFSDGFGMEAVKGPDDDFLECSLNKQCTDFE

SEQ ID NO: 17171 - protein, 355 aa, Glycine max
MLNWMKHIAKHPLDPLTQPIPKPSKWKEYNGQDFFGQFLRAREALSLRQHEEPNSGSSSLQKQKMHPAMYEDHVALGRPATGKLRCSERLPSFVKSRSCSCCNPCSPNGNRLAGSHNMEAEKCPPEKTTETLDVSTTKTIAEPSGDESLEKQVSVGPRFQAEVPEWTGVVSESDSKWLGTQVWTLKNDTEHATETDIGRGRQEKCSCEFHGSVECVRLHIAENRMKLKLELGSEFYRWGFDRMGEEVSLQWTTEEEKRFKDIMKSNIPSKNKYFWNNPSKYFPKKTRRNLVSYYFNAFLIQLRTYQNRVSPKSVDSDDDEVEFGSFSDGFGMEAVKGPDDDFLECSLNKQCTDFE

SEQ ID NO: 17172 - protein, 351 aa, Glycine max
MKHIAKHPLDPLTQPIPKPSKWKEYNGQDFFGQFLRAREALSLRQHEEPNSGSSSLQKQKMHPAMYEDHVALGRPATGKLRCSERLPSFVKSRSCSCCNPCSPNGNRLAGSHNMEAEKCPPEKTTETLDVSTTKTIAEPSGDESLEKQVSVGPRFQAEVPEWTGVVSESDSKWLGTQVWTLKNDTEHATETDIGRGRQEKCSCEFHGSVECVRLHIAENRMKLKLELGSEFYRWGFDRMGEEVSLQWTTEEEKRFKDIMKSNIPSKNKYFWNNPSKYFPKKTRRNLVSYYFNAFLIQLRTYQNRVSPKSVDSDDDEVEFGSFSDGFGMEAVKGPDDDFLECSLNKQCTDFE

SEQ ID NO: 17173 - DNA, 1599 bp, Glycine max
agagcagcatttcccttgcttaaacctgctggcgctaatttctaccctccagacatggacaaaatggagtttgaattatggaaggacagtctagaaaagcatgaacagaaggaagcaacaggctttttcagtgttattaaaaggcacagtgaatttattttagattctcatctgtctgataacaaaacaggttctcatgatctctatatagttccttactccgaagagtacaagtctcttcttgcaaaagcctctgatttattgcataaagctggagacattagcgactcaccgggtttgaagaggctgctacatagcaaggctgatgctttcctttcaaatgattattatgactcagatatagcctggatggaattggactctaagttagatgtcactattggtccgtatgaaacttatgaggataaactttttggatataaggctacctttgaagcatatattggaatcagagatgacgaagcaacagctcaattgaaactctttggtgataatctgctgcttctggagcaaaatctcccaatggacagtgcatacaaatcagaagatgtgaatgcagcacctatccgtgttattcagcttctatataatgcaggggatgtcaagggaccacaaactcttgctttcaatcttccaaatgatgagcgtattgtaaaagaccggggatcatcaatggtcatgcttaagaatgtttcagaggctaagttcaagcatattcttcttcctatagctgctgcctgtgttgcaaatgaccaacaagaacatgtagattttgaatcattctttacacatacaatttgtcatgaatgctgccatggaattggaccacataccataacacttccaaatggccaaaagtctactgtcagattggaattgcaagaattttactcggctctggaagaagcaaaagctgatatagttggcctttgggcattgaggttcttaatctcccaggatttgctttctgaaagtttattgaagtccatgtatgtttcttttcttgcgggatgcttccggtcagtgcgttttggtttagaggaagctcatggaaaaggacaagcattgcagttcaactggttatatgagaaaggagcctttgtctgggattctgaaggcaaagtctctgttgattttaccaagattgaaggagcagttgaaagcctgagcagggagatactcaccatacaagccaatggtgataaagagactgctggtttgcttctcctgaaatactgtgtgttgacagaaccactaaaagttgctctaaaaaatttggaggatattcaggtacctgttgatgtagctccgacatttcccattggcaacaaaatattgcaatgaaagcaagcgaaccaatgtgtaaaaaattgccagcctggaaaatttattcaattagtatattttcactagttgttactgtgaaataatggaatgcttgtttctttgggatgttgctgttttctgttgattgatttaaaagaaaatcaaataatggtcttagaaaggagttttagaccttgtcttagttacagggttattatgccaatgatgaatgacccaactgatattgaattc

SEQ ID NO: 17174 - protein, 454 aa, Glycine max
RAAFPLLKPAGANFYPPDMDKMEFELWKDSLEKHEQKEATGFFSVIKRHSEFILDSHLSDNKTGSHDLYIVPYSEEYKSLLAKASDLLHKAGDISDSPGLKRLLHSKADAFLSNDYYDSDIAWMELDSKLDVTIGPYETYEDKLFGYKATFEAYIGIRDDEATAQLKLFGDNLLLLEQNLPMDSAYKSEDVNAAPIRVIQLLYNAGDVKGPQTLAFNLPNDERIVKDRGSSMVMLKNVSEAKFKHILLPIAAACVANDQQEHVDFESFFTHTICHECCHGIGPHTITLPNGQKSTVRLELQEFYSALEEAKADIVGLWALRFLISQDLLSESLLKSMYVSFLAGCFRSVRFGLEEAHGKGQALQFNWLYEKGAFVWDSEGKVSVDFTKIEGAVESLSREILTIQANGDKETAGLLLLKYCVLTEPLKVALKNLEDIQVPVDVAPTFPIGNKILQ

SEQ ID NO: 17175 - protein, 436 aa, Glycine max
MDKMEFELWKDSLEKHEQKEATGFFSVIKRHSEFILDSHLSDNKTGSHDLYIVPYSEEYKSLLAKASDLLHKAGDISDSPGLKRLLHSKADAFLSNDYYDSDIAWMELDSKLDVTIGPYETYEDKLFGYKATFEAYIGIRDDEATAQLKLFGDNLLLLEQNLPMDSAYKSEDVNAAPIRVIQLLYNAGDVKGPQTLAFNLPNDERIVKDRGSSMVMLKNVSEAKFKHILLPIAAACVANDQQEHVDFESFFTHTICHECCHGIGPHTITLPNGQKSTVRLELQEFYSALEEAKADIVGLWALRFLISQDLLSESLLKSMYVSFLAGCFRSVRFGLEEAHGKGQALQFNWLYEKGAFVWDSEGKVSVDFTKIEGAVESLSREILTIQANGDKETAGLLLLKYCVLTEPLKVALKNLEDIQVPVDVAPTFPIGNKILQ

SEQ ID NO: 17176 - protein, 433 aa, Glycine max
MEFELWKDSLEKHEQKEATGFFSVIKRHSEFILDSHLSDNKTGSHDLYIVPYSEEYKSLLAKASDLLHKAGDISDSPGLKRLLHSKADAFLSNDYYDSDIAWMELDSKLDVTIGPYETYEDKLFGYKATFEAYIGIRDDEATAQLKLFGDNLLLLEQNLPMDSAYKSEDVNAAPIRVIQLLYNAGDVKGPQTLAFNLPNDERIVKDRGSSMVMLKNVSEAKFKHILLPIAAACVANDQQEHVDFESFFTHTICHECCHGIGPHTITLPNGQKSTVRLELQEFYSALEEAKADIVGLWALRFLISQDLLSESLLKSMYVSFLAGCFRSVRFGLEEAHGKGQALQFNWLYEKGAFVWDSEGKVSVDFTKIEGAVESLSREILTIQANGDKETAGLLLLKYCVLTEPLKVALKNLEDIQVPVDVAPTFPIGNKILQ

SEQ ID NO: 17177 - DNA, 2014 bp, Glycine max
ttttttttttttttttttttttgaagaacctgcaattaatggataaagagcattgtttttagtgacacagaattacaggtatatacgacagtgttacaaaattttcctgactattctcatgttagtagattgggatcagaacagtatttgctcttgatacatctccaatgcttggaaaactttctccatgaacaatttcctgtgcaatctatactttattgcagcttcaagtgtcctcgtagcatctgccattgaatctagcaatttctggtcttgcttagaggttgtagcaaattctgcaagcatcttttgacattcatcttgcaactccttcgcagcctttctttccatgctagggattggaggcacatccccatctgaccaagttggcaatgttcgtgctgcagctatgactgctccatcaacaaaactatctccggcttttgacagacaattattatggtaatactcttcaggaaggccagatatattgaagattgacaagaaggaatccaaatgaatacgcgcattgcctgagaatttgatcttgtcccaaggattcacgggtgatgaaaatccatatctttgcatgaacatgtcattcttctgagcactcatgtaattaactgtcatctcatctcccttcctaatctgctgtccagcatttataagaacctcaagcatcctgtccttaaaacgccaatggaaaaaacaatttggctcaaatgaatggttcagcatatcagcataaggaatcagcatatttgcttcttgatttagagcaccaattctcgtttgcatgttaatacatcgtgactgtgcaatacctactgcccaagcaaacctttgaggatcacgcgcaagacgctttattttaaggggtacatcactgtgccagttattctcccagaattctaaggatcgttgttgctgttttctaatgtttaatgaatccacatgggaaaaaagatagtgtatgtttgctcatagtggtctttcaagaagattagtatttaataatagtatgttataaagaaataggtattaaaatggcaaaaacacaagatatataaggttgattcactgttgacatccttttagtaattaattgttgtatgcatggttatccatacatcatcttcatggatttgactgttcttcctttctttgtgtaccttgaaatcagcatgctcaaaacacttgaaaggtaccagaaatgcagttatggtgctgtggaagttaccaaacctgccaaagagctcgagagcagctatcgtgaatacttgaagctgaaagcaagatttgaatcacttcaaaggactcaaagaaaccttctaggggaagacctgggcccactgaataccaaagaacttgagcatcttgaacggcaattggattcatctctaaagcaagtgaggtccacaaagacacaattcatgctggaccagttatctgatcttcaaactaaggagcagatgttggtagaagcaaacagatccttgacagtgaagctggaagaaatcaattcaagaaaccactacaggcaatcatgggaagctggtgatcaaagtatgccatacggtggtggtccacagaattctcactctcatcagggcttcttccagccattggaatgcaaccctacattgcagattggtcctgattacaggtacaatgatgtagcttcagatcagataactgccacaactcaacctcaacaagtgagtggctttattccagggtggatgctgtgaaattaggctcagtattcagttggagacataaaagcaaacaccttacaaaagggcaaagccaaaaatgcatcttggtgttggcaaggtgtaaatgtaaccctgcttctattattattttggtataagaaacagatgtgttgtgacttgttcaaacttgtgagaacctttttagccatagacatatggcaatttataacattcggaatcttttgaaggatccttttttattattaaaatatccgagcgaccggtttcaattt

SEQ ID NO: 17178 - protein, 212 aa, Glycine max
MHGYPYIIFMDLTVLPFFVYLEISMLKTLERYQKCSYGAVEVTKPAKELESSYREYLKLKARFESLQRTQRNLLGEDLGPLNTKELEHLERQLDSSLKQVRSTKTQFMLDQLSDLQTKEQMLVEANRSLTVKLEEINSRNHYRQSWEAGDQSMPYGGGPQNSHSHQGFFQPLECNPTLQIGPDYRYNDVASDQITATTQPQQVSGFIPGWML

SEQ ID NO: 17179 - protein, 203 aa, Glycine max
MDLTVLPFFVYLEISMLKTLERYQKCSYGAVEVTKPAKELESSYREYLKLKARFESLQRTQRNLLGEDLGPLNTKELEHLERQLDSSLKQVRSTKTQFMLDQLSDLQTKEQMLVEANRSLTVKLEEINSRNHYRQSWEAGDQSMPYGGGPQNSHSHQGFFQPLECNPTLQIGPDYRYNDVASDQITATTQPQQVSGFIPGWML

SEQ ID NO: 17180 - protein, 188 aa, Glycine max
MLKTLERYQKCSYGAVEVTKPAKELESSYREYLKLKARFESLQRTQRNLLGEDLGPLNTKELEHLERQLDSSLKQVRSTKTQFMLDQLSDLQTKEQMLVEANRSLTVKLEEINSRNHYRQSWEAGDQSMPYGGGPQNSHSHQGFFQPLECNPTLQIGPDYRYNDVASDQITATTQPQQVSGFIPGWML

SEQ ID NO: 17181 - DNA, 1298 bp, Glycine max
ttatttatatcgaattgaagttgcagataacctattggtgactggactctgtcaggctgtaaaatatattgtaccaggatttgaagcagttcagaagaaaaagacattgaacgcacaggcattaaagttagtgcaacgtctttgggaactgatagtgtcttcagacgaaatacaacatggagacttaattaaaagccctttgtcacggcccctatttattgctgctgaatctgggatacctgagattgtaattgagcttctttactcatatccagatctactttggaaagttgacggccaaaatagaagtctttttcacattgcaatcatgcatcgtcaggagaaaatatttaacctgatttatgacataggggcacacaaggatctgataacttcatacagagataataacaatcacaatatactgcatttggctggaaaattggccccttcagaacaacttcatgttgtatctggtgcagcgctgcagatgcaaagggaattattgtggttcaaggaggtggaaaagatcatacagcctctattcaaggagattaaggattctcaaggtaggacacctcaaatgttattcactgaggaacacaaggagttggccaaagaaggagagaagtggctgaagaacactgcttcatcatgcatgctagttgcaacacttattaccactgtgatgtttgcagcaatctttacagtaccaggcgggaacaacaacaataatggatatcccatttttatgcacactacatccttcaaagttttcgctctctcagatgctcttgcattgttctcctcagtaatatctgtattgatgtttttgtccatactcacctcaagatatgcacaggaagatttccttgtgtcactacctagaaggttgagtgttggcattgcaacccttttcttctccatcattacaatgctcatagcttttggtgcaacatttttcattgtacttggacatcaattggcttggattgtcattccaacaacccttgttgcttgtatccctgcaatattgtttgcccttttacagtttcctcttcttgttgatacaatctcatgtacatatggagctggcgtattttctcgttgaggtaattaggtaaatagaatttgaatagtttaagttttcattttagttgaggtcttagttctgtggctgctaactctgcctctgcgtaattgtgctgaatgctcatgttctggaaacactcaattatatacttaaaagtgtgggtacaaatttgggcttggttaatttaggtttgtcttttaaaagt

SEQ ID NO: 17182 - protein, 369 aa, Glycine max
YLYRIEVADNLLVTGLCQAVKYIVPGFEAVQKKKTLNAQALKLVQRLWELIVSSDEIQHGDLIKSPLSRPLFIAAESGIPEIVIELLYSYPDLLWKVDGQNRSLFHIAIMHRQEKIFNLIYDIGAHKDLITSYRDNNNHNILHLAGKLAPSEQLHVVSGAALQMQRELLWFKEVEKIIQPLFKEIKDSQGRTPQMLFTEEHKELAKEGEKWLKNTASSCMLVATLITTVMFAAIFTVPGGNNNNNGYPIFMHTTSFKVFALSDALALFSSVISVLMFLSILTSRYAQEDFLVSLPRRLSVGIATLFFSIITMLIAFGATFFIVLGHQLAWIVIPTTLVACIPAILFALLQFPLLVDTISCTYGAGVFSR

SEQ ID NO: 17183 - protein, 260 aa, Glycine max
MHRQEKIFNLIYDIGAHKDLITSYRDNNNHNILHLAGKLAPSEQLHVVSGAALQMQRELLWFKEVEKIIQPLFKEIKDSQGRTPQMLFTEEHKELAKEGEKWLKNTASSCMLVATLITTVMFAAIFTVPGGNNNNNGYPIFMHTTSFKVFALSDALALFSSVISVLMFLSILTSRYAQEDFLVSLPRRLSVGIATLFFSIITMLIAFGATFFIVLGHQLAWIVIPTTLVACIPAILFALLQFPLLVDTISCTYGAGVFSR

SEQ ID NO: 17184 - protein, 206 aa, Glycine max
MQRELLWFKEVEKIIQPLFKEIKDSQGRTPQMLFTEEHKELAKEGEKWLKNTASSCMLVATLITTVMFAAIFTVPGGNNNNNGYPIFMHTTSFKVFALSDALALFSSVISVLMFLSILTSRYAQEDFLVSLPRRLSVGIATLFFSIITMLIAFGATFFIVLGHQLAWIVIPTTLVACIPAILFALLQFPLLVDTISCTYGAGVFSR

SEQ ID NO: 17185 - DNA, 1207 bp, Glycine max
atgaaacagctcttgagcatcttgttttagcaagcatggcaatggtaagtaacgaccaagaagcagaagtggcatctgttgactgcagcattggagacacatacttatccttgtctcgatatgatgaggctgtctttgcatatcagaaagcgctaacagttttcaagaccagcaaaggagagaatcacccagcagtgggattagtctttgtacgtttggcggacctgtataacaggacagggaagataagggaatcgaaatcatattgcgagagtgcacttaaaatatatgagaatccaatgcctggaattcctccggaggagattgccagtggtcttacgaatatctcaactatctacgagtcaatgaatgagcttgaacatgcactcaagttactgcagaaagcactagagatatataatgatacccctggtcagcaaagcacaatagctggaattgaagctcagatgggagtcatgtactacatgttggggaactattccaaatcctacaacactttgaagaatgctatttcaaagcttcgtgctattggagaaaagaaatcatccttctttggtattgctcttaatcaaatgggactcgcctgtgtgcagcgttatgccttaagtgaggctacagaattatttgaagaagcaaagagtattttggaacaagaatatggaccgtatcacccagaaacacttggggtctctagtaatcttgctgccacatatgatgcaattggcaggctggacgatgcaatacaaattctggagtacgttgttaacacgagggaggaaaaactcgggaccgcaaatcctgaggtggatgatgagaagagaaggctgggtgagttgttgaaggaagcaggtagagttcggagcagaaaaaccaggtcacttgagaaccttcttgatggcaatgctcacgctgcaaacaacgttgtcatcagggcatgatgaggatgtctgtctgtcaatgactcatgaaggaaaatcggtgttttgcaggaactcaaaagtggagcaagctaaaatgtagaagagataaaaatgtccggacagtattaatttattgggtacaattgaatgattgaagagtgtaatttttgtgcttaattattgtttatatgatatgatgtaagtaattatggtgtatagatactcccctttgtttgtgtatacaaaattttttctcctggtttcat

SEQ ID NO: 17186 - protein, 318 aa, Glycine max
ETALEHLVLASMAMVSNDQEAEVASVDCSIGDTYLSLSRYDEAVFAYQKALTVFKTSKGENHPAVGLVFVRLADLYNRTGKIRESKSYCESALKIYENPMPGIPPEEIASGLTNISTIYESMNELEHALKLLQKALEIYNDTPGQQSTIAGIEAQMGVMYYMLGNYSKSYNTLKNAISKLRAIGEKKSSFFGIALNQMGLACVQRYALSEATELFEEAKSILEQEYGPYHPETLGVSSNLAATYDAIGRLDDAIQILEYVVNTREEKLGTANPEVDDEKRRLGELLKEAGRVRSRKTRSLENLLDGNAHAANNVVIRA

SEQ ID NO: 17187 - protein, 307 aa, Glycine max
MAMVSNDQEAEVASVDCSIGDTYLSLSRYDEAVFAYQKALTVFKTSKGENHPAVGLVFVRLADLYNRTGKIRESKSYCESALKIYENPMPGIPPEEIASGLTNISTIYESMNELEHALKLLQKALEIYNDTPGQQSTIAGIEAQMGVMYYMLGNYSKSYNTLKNAISKLRAIGEKKSSFFGIALNQMGLACVQRYALSEATELFEEAKSILEQEYGPYHPETLGVSSNLAATYDAIGRLDDAIQILEYVVNTREEKLGTANPEVDDEKRRLGELLKEAGRVRSRKTRSLENLLDGNAHAANNVVIRA

SEQ ID NO: 17188 - protein, 305 aa, Glycine max
MVSNDQEAEVASVDCSIGDTYLSLSRYDEAVFAYQKALTVFKTSKGENHPAVGLVFVRLADLYNRTGKIRESKSYCESALKIYENPMPGIPPEEIASGLTNISTIYESMNELEHALKLLQKALEIYNDTPGQQSTIAGIEAQMGVMYYMLGNYSKSYNTLKNAISKLRAIGEKKSSFFGIALNQMGLACVQRYALSEATELFEEAKSILEQEYGPYHPETLGVSSNLAATYDAIGRLDDAIQILEYVVNTREEKLGTANPEVDDEKRRLGELLKEAGRVRSRKTRSLENLLDGNAHAANNVVIRA

SEQ ID NO: 17189 - DNA, 1581 bp, Glycine max
gtgtcaaaccttcagattgctgaactcttggcagtcatggccaaaaatcgtgatctttcatattgtaaaatagtggaggcaattgcagagacaactgctccactgactcccatggaggaacttcttgcaaagataccttctcaacgtccttacatttcttcacccaagaaaccagatattgcagctgtcagtgttccagatccccctgctaatgttgtgactgtggaacctaaagttgccactcaacaagaaactgcacaacctaaaccagtggcaaaacaaccactttctccttatatcgtttatgatgatttgaagccaccatcatctccttctccatctcagcctggtggtgggaaaccaacaaagatcagtgagacagtgccaaaaccaagtgcttcagatactccaagtagtgtgccaggagtagatggcatctctcagacaacatcgtcatctaaagtggagaagcctctttctccttatgtagcatatcctgacttaaagcctcccacatcaccatctcctaatgcaccaactgtatcagtttccacacctgctgcagctggggtgccggagatagacacaatatcaagcaatggaccggcccaactttcagcagcagatgaaccaaaggaagaacatctccctgaacccaagtcaagaccactttcaccttataccatgtgagctgcttctgacttgcttttaaaattttcatgtttcttttccaaagactcttcattccttagtgttgaataatgactcactggcttgtataattgtgagttttattcactggttggaacttttaggaaatcttacatcgcctgccttaattctcagggtgcagtttatatatctattggacaacttcgcttagtatcaattggttttaaattgaaatctaacatgatatcagagtctatagcccatattggttctcgcctattctattaggctcgcctgttctgatagacatttgtgaaggagaggtgttacgaagttccacattgcctgtctcaattcttggactgtagcttacatatctattgagtaacttcacttagtatcaattggttttaagcaaatctaactacatttcttatttaatctatatttgtcttaggtttcttggaggcattgttaacattctgatttcattcaaatgaacatccaggtatgaagacttgaagcctcctgcatcaccatcaccttccttcagaaattcttaggaattgcctgcctattgattgaatcagacaaggttagaaatgcaaattattatatgtatacccttgattatattttactatggtttaagctctatttttactgccaaagttactggacacataattttaatagaactgttgaagagtctatgcggcactcatatggaggatcaggatggtcactcaaatatgaagagaagcatttctacgaattgaaattttcagcggtgtaatttatttctttatgaccatttggcgaaactcaacgaacactatttctccttttagtaatttattttcccaatgttgcaatttaaatttaaataaaggaaaaggtatcactttt

SEQ ID NO: 17190 - protein, 229 aa, Glycine max
VSNLQIAELLAVMAKNRDLSYCKIVEAIAETTAPLTPMEELLAKIPSQRPYISSPKKPDIAAVSVPDPPANVVTVEPKVATQQETAQPKPVAKQPLSPYIVYDDLKPPSSPSPSQPGGGKPTKISETVPKPSASDTPSSVPGVDGISQTTSSSKVEKPLSPYVAYPDLKPPTSPSPNAPTVSVSTPAAAGVPEIDTISSNGPAQLSAADEPKEEHLPEPKSRPLSPYTM

SEQ ID NO: 17191 - protein, 217 aa, Glycine max
MAKNRDLSYCKIVEAIAETTAPLTPMEELLAKIPSQRPYISSPKKPDIAAVSVPDPPANVVTVEPKVATQQETAQPKPVAKQPLSPYIVYDDLKPPSSPSPSQPGGGKPTKISETVPKPSASDTPSSVPGVDGISQTTSSSKVEKPLSPYVAYPDLKPPTSPSPNAPTVSVSTPAAAGVPEIDTISSNGPAQLSAADEPKEEHLPEPKSRPLSPYTM

SEQ ID NO: 17192 - protein, 192 aa, Glycine max
MEELLAKIPSQRPYISSPKKPDIAAVSVPDPPANVVTVEPKVATQQETAQPKPVAKQPLSPYIVYDDLKPPSSPSPSQPGGGKPTKISETVPKPSASDTPSSVPGVDGISQTTSSSKVEKPLSPYVAYPDLKPPTSPSPNAPTVSVSTPAAAGVPEIDTISSNGPAQLSAADEPKEEHLPEPKSRPLSPYTM

SEQ ID NO: 17193 - DNA, 1247 bp, Glycine max
gacagtgagtggaacgcaatggttggtggtggcgtctctcgcatttcccaccattttcgagactgcgacttccatttccatttccacttcacttttacttactctgcttttcaaactttccacctttcgtctcccccactccctctcaaacctcgctggggaggcatttctcaaaccacagttccctcaaattaccgctgttttggcaccccacctaagtcccccggcgaaattcctctccttttcgattgtttcagccaacaagaagaggatcgtgaaattctctctgatggaacatctgccgtggcaggtggaattgtagcattgggaaagtttgatgctctacacataggtcatagagaacttgcaattcaagcatcaagggctggacctccatttcttttgtcatttgttggcatggcaaaagtacttggttgggaacctagggctcctatagttgctaaatgtgaccgaaagcgaattctttcatcttgggttccttattgctgtaacatggtcccagaagagtttgaggttgaattttcaagcgttcgacatctcaatccccgacaatttgttgaaaagttatcaaaagagcttagggtgcggggagttgttgcaggtgagaactaccgattcgggtataaagcagcaggtgatgccttggagttagttaagctttgtgaagagtacgggatggaagcttacataataaaatctgttatggacaagaatcgtttttctgctgatatgaattctgttaccaactccaaagagaggggacaggtctcatctacacgtgttcgtgaagcccttgccgtaggggacctgaagtatgtctcagagcttttggggaggcctcatcgtctcatattaatggccactgatcaagaaagattcagtactgggcagtataaagtgtctgctcctagatcctgcttattgaatctagcaccaaaggaaggattatatgagaagtgctcacttttacttgatcaggaaaatgttgtgcagtgtagtgtagttattgacagcaagtttgtccatatagaaacagattatggaggtctgagtgacattttttgttctcaaaatttgaagttcttgtttattgagtttggtgattcctgcacttgattcagtttagataattatttctatttaaatttttagtctactgaattgtagatgatttttatccatctcccaaagtagagtgatacaggtatatatgtacctttcttcct

SEQ ID NO: 17194 - protein, 378 aa, Glycine max
DSEWNAMVGGGVSRISHHFRDCDFHFHFHFTFTYSAFQTFHLSSPPLPLKPRWGGISQTTVPSNYRCFGTPPKSPGEIPLLFDCFSQQEEDREILSDGTSAVAGGIVALGKFDALHIGHRELAIQASRAGPPFLLSFVGMAKVLGWEPRAPIVAKCDRKRILSSWVPYCCNMVPEEFEVEFSSVRHLNPRQFVEKLSKELRVRGVVAGENYRFGYKAAGDALELVKLCEEYGMEAYIIKSVMDKNRFSADMNSVTNSKERGQVSSTRVREALAVGDLKYVSELLGRPHRLILMATDQERFSTGQYKVSAPRSCLLNLAPKEGLYEKCSLLLDQENVVQCSVVIDSKFVHIETDYGGLSDIFCSQNLKFLFIEFGDSCT

SEQ ID NO: 17195 - protein, 372 aa, Glycine max
MVGGGVSRISHHFRDCDFHFHFHFTFTYSAFQTFHLSSPPLPLKPRWGGISQTTVPSNYRCFGTPPKSPGEIPLLFDCFSQQEEDREILSDGTSAVAGGIVALGKFDALHIGHRELAIQASRAGPPFLLSFVGMAKVLGWEPRAPIVAKCDRKRILSSWVPYCCNMVPEEFEVEFSSVRHLNPRQFVEKLSKELRVRGVVAGENYRFGYKAAGDALELVKLCEEYGMEAYIIKSVMDKNRFSADMNSVTNSKERGQVSSTRVREALAVGDLKYVSELLGRPHRLILMATDQERFSTGQYKVSAPRSCLLNLAPKEGLYEKCSLLLDQENVVQCSVVIDSKFVHIETDYGGLSDIFCSQNLKFLFIEFGDSCT

SEQ ID NO: 17196 - protein, 239 aa, Glycine max
MAKVLGWEPRAPIVAKCDRKRILSSWVPYCCNMVPEEFEVEFSSVRHLNPRQFVEKLSKELRVRGVVAGENYRFGYKAAGDALELVKLCEEYGMEAYIIKSVMDKNRFSADMNSVTNSKERGQVSSTRVREALAVGDLKYVSELLGRPHRLILMATDQERFSTGQYKVSAPRSCLLNLAPKEGLYEKCSLLLDQENVVQCSVVIDSKFVHIETDYGGLSDIFCSQNLKFLFIEFGDSCT

SEQ ID NO: 17197 - DNA, 1360 bp, Glycine max
aaaaaaaaatcattcaatcaaccttatatttttaggttgtgcaacaataccgccatggatgggaatcggaggctgccgccgtcgtcgaggacgtcaagaaaaaccccgacgccgccgtctccggcaccgtcatccgccgccgccttcagctcatgatgtacaacaacatgtaccgcataatgttcgaccggaggttcgagagcgaggaggatcccatcttccagaggctaagagccttgaacggagagaggagtcgcttggcgcagagctttgagtataactatggtgattttattcccatcttgagacccttcttgaagggttacttgaagatttgcaaggaggtgaaggagacgaggttgaagcttttcaaggattacttcgttgacgagaggaagaagcttggaagcaccaagagcaccaacaacaataatgaacttaaatgcgctattgaccacattttggatgcccagagaaaaggcgagatcaacgaagacaacgtcctctacattgttgaaaacatcaacgttgctgcaattgaaacaactctatggtcgattgagtggggcattgctgagcttgtgaaccacccagagatccagcaaaagttaagggatgagattgacagagttcttggagcagggcaccaagtgactgagccagacatccaaaagctcccatacctccaagcagtggtcaaggaaactcttcgtcttagaatggcaatccctctccttgtaccacacatgaacctccacgacgcaaagcttgggggctatgatatcccagctgagagcaagatcttggtgaatgcatggtggctggccaacaaccctgcacactggaagaagccagaggagttccggcctgagaggttcttcgaggaggagtcgcttgttgaagccaatggcaatgactttaggtaccttccctttggtgttggcagaagaagctgccctggaatcattcttgcattgccaattcttggcatcactttgggacgtttggtccaaaactttgagctcttgcctccccctggccagtcacagattgacactagtgagaaaggagggcaatttagcttgcacatactcaagcattccaccattgtggcaaagccaaggtcattttagactccaccacatgatcatgatcatatgatcaatccccttaattttttcttttttcttttcccttttctttactctgtattgtatcaatgcttgaaaatggggttgttccaaaaatgtcatatatatttggcctgctaatgggtattgtaaatctctgaacttgaagtgatgcacggttttgagatggttttctaataaacctacacttttgtctctaaaaaaaaaag

SEQ ID NO: 17198 - protein, 326 aa, Glycine max
MMYNNMYRIMFDRRFESEEDPIFQRLRALNGERSRLAQSFEYNYGDFIPILRPFLKGYLKICKEVKETRLKLFKDYFVDERKKLGSTKSTNNNNELKCAIDHILDAQRKGEINEDNVLYIVENINVAAIETTLWSIEWGIAELVNHPEIQQKLRDEIDRVLGAGHQVTEPDIQKLPYLQAVVKETLRLRMAIPLLVPHMNLHDAKLGGYDIPAESKILVNAWWLANNPAHWKKPEEFRPERFFEEESLVEANGNDFRYLPFGVGRRSCPGIILALPILGITLGRLVQNFELLPPPGQSQIDTSEKGGQFSLHILKHSTIVAKPRSF

SEQ ID NO: 17199 - protein, 325 aa, Glycine max
MYNNMYRIMFDRRFESEEDPIFQRLRALNGERSRLAQSFEYNYGDFIPILRPFLKGYLKICKEVKETRLKLFKDYFVDERKKLGSTKSTNNNNELKCAIDHILDAQRKGEINEDNVLYIVENINVAAIETTLWSIEWGIAELVNHPEIQQKLRDEIDRVLGAGHQVTEPDIQKLPYLQAVVKETLRLRMAIPLLVPHMNLHDAKLGGYDIPAESKILVNAWWLANNPAHWKKPEEFRPERFFEEESLVEANGNDFRYLPFGVGRRSCPGIILALPILGITLGRLVQNFELLPPPGQSQIDTSEKGGQFSLHILKHSTIVAKPRSF

SEQ ID NO: 17200 - protein, 321 aa, Glycine max
MYRIMFDRRFESEEDPIFQRLRALNGERSRLAQSFEYNYGDFIPILRPFLKGYLKICKEVKETRLKLFKDYFVDERKKLGSTKSTNNNNELKCAIDHILDAQRKGEINEDNVLYIVENINVAAIETTLWSIEWGIAELVNHPEIQQKLRDEIDRVLGAGHQVTEPDIQKLPYLQAVVKETLRLRMAIPLLVPHMNLHDAKLGGYDIPAESKILVNAWWLANNPAHWKKPEEFRPERFFEEESLVEANGNDFRYLPFGVGRRSCPGIILALPILGITLGRLVQNFELLPPPGQSQIDTSEKGGQFSLHILKHSTIVAKPRSF

SEQ ID NO: 17201 - DNA, 1314 bp, Glycine max
aacaatcaatcaagattttcttttgcatggcaggaggaatccaaattccaagccaatgtacctccatcttctggtgctacccagccatttccaaagaatggctcactcatccaggattttgtggaaagagacttttctttgaacaagctgggttttgcaaatggcttcccctccaataacctcaaggaatctggaaatcttggcagtggtcatttcattgcttcaaacaataagctttcagctgtttcaagagcacaaatttcagcaccgccaggattctctgttccgaacagggcaccacctcctggtttctcttcagttgagagaatggggcaggcttttgactccctctctgggaattcattgctggacccttctttcttactgagaaattcttatcaaacaccctcaaatggaaatattggtggtccaggtgacgttgaatttatggatcctgctattttggcagttagtaaaggccctgaacagtttaactactttgaaaatgaggccagagttcaattattgatgcaaagatctccctcaccacagcaagaccttcgattttctgaaattgggaattccttttctcagtttggtgattcttatggcatttcttcaaggttaaatcaatcacaagttagtaatctggcttcatttcctcagttatctctgcagcagtctagaaatgcagtcttgtcaaatggccaattggatgggcggaatggaaatggtctgggtgtggcagagcttttgagaaatgaaagacttggatttaacaagttttatagaggatatgatgattcaaaatatcggatgcctaattctatggatgtgttcaacaggacatttgggatttgagattgttgggtatattggccatggtaaagccaagtcagaaataaacaaacagaatttttctgcattgccaaaggtgatggggatggctcatgacataacctgtctattgggctacgaaaggatgaaactctcgcttatagctgcagctggttactgttcttgatttgcagaagcaagctgcgttgagatttaagaaatcaatcatggatcggaaagtatttggcaggtagatcttagttgagtggtttctcttagtacagaacatggaaacctgttgatcgatcgactatcaaataatctctcctattttgttaatgatattttttcttttaccgatattgtggatatagatagaggtttgattattttttaatatgtatattttgtatgaaatacgtcaccttttaaagttggaaatcccttctgatatgtgtatgaaagagatcttttact

SEQ ID NO: 17202 - protein, 286 aa, Glycine max
NNQSRFSFAWQEESKFQANVPPSSGATQPFPKNGSLIQDFVERDFSLNKLGFANGFPSNNLKESGNLGSGHFIASNNKLSAVSRAQISAPPGFSVPNRAPPPGFSSVERMGQAFDSLSGNSLLDPSFLLRNSYQTPSNGNIGGPGDVEFMDPAILAVSKGPEQFNYFENEARVQLLMQRSPSPQQDLRFSEIGNSFSQFGDSYGISSRLNQSQVSNLASFPQLSLQQSRNAVLSNGQLDGRNGNGLGVAELLRNERLGFNKFYRGYDDSKYRMPNSMDVFNRTFGI

SEQ ID NO: 17203 - protein, 177 aa, Glycine max
MGQAFDSLSGNSLLDPSFLLRNSYQTPSNGNIGGPGDVEFMDPAILAVSKGPEQFNYFENEARVQLLMQRSPSPQQDLRFSEIGNSFSQFGDSYGISSRLNQSQVSNLASFPQLSLQQSRNAVLSNGQLDGRNGNGLGVAELLRNERLGFNKFYRGYDDSKYRMPNSMDVFNRTFGI

SEQ ID NO: 17204 - DNA, 1221 bp, Glycine max
gtcatgatccatggtttttgtaagaagaagggaaagctagaggaggcatgtaagtattttgaaatgatgattgatgaaggaataccaccatatgttactactgttgagatgctgaggaatcggcttttgggtttagggtttatagatcacattgaaatactggctgctaagatgaggcaaagcacttcctatgcaattcaagaattggcaaatattatgattggcaatagaacagctcataatactttgggacgtgatgagatggacatagaaagtgactgaggaagtgattattgtttctcgtaatactttctcattaagctattttgacaaatatgtggaggcaaccatttcattacggcagagcacataataaagatgctatatctgtgggctatggttaattgattcattttaaggtgctgggtattattataattctttgatgtagcctgtatgacatatttcagatggaaggtaatctaaagtttaaacatctgaaaaattttcatggaacaccttagtttctgtatcatgaagaaatgacggacatgctggttcaggaaggcagagaaattgcaagttttatagctcggggagtcatttcttacatgatatctcttgtcctataggctgcagtattgtttgagtggcatgcctccgccaaatttcatttcgtagacacctatcattgccacagatgggttgtgattgtaatcaggatagaagtgactgctttgtttcattgatttaaacatcagacaggtaaagttgtctcaaccatggtagttgaattgggattcaaatcctggatcgaattgtatcgtattgtgaagactgcacaccaagttggcaacctgtttctgttcatattggagaatttaagttattcctgatgaaatcgtaaacccaaaaaaggtttgggaaactttgcaagtggatctgcacaccaacgaaagaactagtgacatgatacaaagattactctggcctcaatagcaggcatttgtacggtttcattccttacactggggatcataaggcagtcagacatcacaggtttggggttaaaagagaagaaaccaaaaatgatatgttcttattttttatgttgatcataagtgtacaattaacattattaacttttagttttttcatcgctgttggattttggatgaattggagccaacttgttggcattattgataaaaatttgagttc

SEQ ID NO: 17205 - protein, 93 aa, Glycine max
VMIHGFCKKKGKLEEACKYFEMMIDEGIPPYVTTVEMLRNRLLGLGFIDHIEILAAKMRQSTSYAIQELANIMIGNRTAHNTLGRDEMDIESD

SEQ ID NO: 17206 - protein, 92 aa, Glycine max
MIHGFCKKKGKLEEACKYFEMMIDEGIPPYVTTVEMLRNRLLGLGFIDHIEILAAKMRQSTSYAIQELANIMIGNRTAHNTLGRDEMDIESD

SEQ ID NO: 17207 - protein, 72 aa, Glycine max
MMIDEGIPPYVTTVEMLRNRLLGLGFIDHIEILAAKMRQSTSYAIQELANIMIGNRTAHNTLGRDEMDIESD

SEQ ID NO: 17208 - DNA, 1500 bp, Glycine max
gggagctcaacaccattaacagctctggtggtttcgtggtggtgtccacggacaagttgtcggtaaagtacaccagcgtcaaccttcacggccacgacgtcggtgtcattcaggccaacaagcctgctcctaccaagcgcctcatgtattatttcgagattcatgtcaaggatgccggcgttaagggccagatagcaattggattcacctgcgagaccttcaagatgcgaagacaaccagggtgggaggccaatagctgcggctatcacggcgatgatggtctgctctaccgtggacattgcaagggggaggcgtttggcccaacctatacttccggagacgtagttggtgccggaattaactatgctgcacaggaattttttttcactaaaaatggccaagttgttggctctgtttacaaagacatgaaaggccccctttttccaaccattgctgttcacagtcaaaacgaagaggtgcatgtcaactttgggcagaaaccatttacttttgacctaaaggaatttgaagcacaagaaagaatgaagcagcaactgaaaatagaagaaatttctgtgccaccaaatgtcagttatggcagaattgtccgctcctacctgctacactatggctatgaagatacattgaattcatttgatgtggctagtaaaagtactgttcctcctatatacatagctcaagaaagtggaattgatgagcaggaaataacatatgccttaaatcacaggaagactttacgacagctaatcaggaatggggacattgatgttgcatttggtaaattgcgtgaatggtatccacagattgttgaggacaatatatcagctacatgctttctgcttcattgtcaaaagtttatcgaattagttcgggttggagcacttgaagaggctgtcaaatatggaagaatagaattgtcaagtttttatgacttgcctgtctttaaggatttagttcaggactgtgttgctttgctggcatatgaacggcctctggaatcctccgtaggttatcttctaaaagactcgcagcgtgaagttgtagctgacacagtaaatgccatgatattgtccgcaaatcctaatatgaaagattcaaaacattgcttgcactcctatcttgagaggttacttagacagcttactgcttgctgcttagagaggcgatccctgaatggagagcagggagaagctttccaacttcagagagtgcttagcagtagtagaagaggctagtgctaggtgatatgtctattgatcttcttacgccgctgtttatattgccccaggatttgtaacattgccaagtgcaaaattgatcttagcgtctcgtatatactgtagagtccccgtatatttacttgatgcatgcttattcatttctttgtcaagaagggggagagggtgtctctacattcaagtttgtaacctcgtcatcattaaaacaatagaaatgaaaaaatgaaccaagcaatagtgc

SEQ ID NO: 17209 - protein, 417 aa, Glycine max
ELNTINSSGGFVVVSTDKLSVKYTSVNLHGHDVGVIQANKPAPTKRLMYYFEIHVKDAGVKGQIAIGFTCETFKMRRQPGWEANSCGYHGDDGLLYRGHCKGEAFGPTYTSGDVVGAGINYAAQEFFFTKNGQVVGSVYKDMKGPLFPTIAVHSQNEEVHVNFGQKPFTFDLKEFEAQERMKQQLKIEEISVPPNVSYGRIVRSYLLHYGYEDTLNSFDVASKSTVPPIYIAQESGIDEQEITYALNHRKTLRQLIRNGDIDVAFGKLREWYPQIVEDNISATCFLLHCQKFIELVRVGALEEAVKYGRIELSSFYDLPVFKDLVQDCVALLAYERPLESSVGYLLKDSQREVVADTVNAMILSANPNMKDSKHCLHSYLERLLRQLTACCLERRSLNGEQGEAFQLQRVLSSSRRG

SEQ ID NO: 17210 - protein, 370 aa, Glycine max
MYYFEIHVKDAGVKGQIAIGFTCETFKMRRQPGWEANSCGYHGDDGLLYRGHCKGEAFGPTYTSGDVVGAGINYAAQEFFFTKNGQVVGSVYKDMKGPLFPTIAVHSQNEEVHVNFGQKPFTFDLKEFEAQERMKQQLKIEEISVPPNVSYGRIVRSYLLHYGYEDTLNSFDVASKSTVPPIYIAQESGIDEQEITYALNHRKTLRQLIRNGDIDVAFGKLREWYPQIVEDNISATCFLLHCQKFIELVRVGALEEAVKYGRIELSSFYDLPVFKDLVQDCVALLAYERPLESSVGYLLKDSQREVVADTVNAMILSANPNMKDSKHCLHSYLERLLRQLTACCLERRSLNGEQGEAFQLQRVLSSSRRG

SEQ ID NO: 17211 - protein, 343 aa, Glycine max
MRRQPGWEANSCGYHGDDGLLYRGHCKGEAFGPTYTSGDVVGAGINYAAQEFFFTKNGQVVGSVYKDMKGPLFPTIAVHSQNEEVHVNFGQKPFTFDLKEFEAQERMKQQLKIEEISVPPNVSYGRIVRSYLLHYGYEDTLNSFDVASKSTVPPIYIAQESGIDEQEITYALNHRKTLRQLIRNGDIDVAFGKLREWYPQIVEDNISATCFLLHCQKFIELVRVGALEEAVKYGRIELSSFYDLPVFKDLVQDCVALLAYERPLESSVGYLLKDSQREVVADTVNAMILSANPNMKDSKHCLHSYLERLLRQLTACCLERRSLNGEQGEAFQLQRVLSSSRRG

SEQ ID NO: 17212 - DNA, 1443 bp, Glycine max
actcttccaatttgatcactgaatcccctgggagcatagctgcagtgaggagagaacagatggcactgcagcatgcgcagagaaaaatgaagattgctcattatggaagatcaaagtctgcaaagtttgaaagagttgttcctcttgatccttcatccaatcttacttcaaagacaagtgaggaggagaagagatgcagctttatcacagccaattcagatcccatctatattgcttatcatgatgaagaatggggagttccagttcatgatgacaagatgttgtttgaacttctagttttaagtggtgctcaagtaggatcagattggacctcaatcttgaagaaacgccaggatttcagggctgcattttctgaatttgatgtagcaactttggccaacttgactgataagcaaatggtgtcgattagtttggaatatgggattgatataagccaagttcgaggtgttgttgacaatgctaaccgaattttagagattaacaaggactttggttcatttgataaatacatttggggttttgtcaatcacaaacccatctccactcaatacaagttcggccacaagatcccagttaagacatcaaagtcagagagcataagcaaagacatgatcagaagggggtttaggtgtgtaggtcccacagtgcttcattcatttatgcaagcagctggactcaccaatgaccacttaatcacttgccacagacacttgcaatgcaccttattggcatctagcccccattgcaccacagagcactctctatagttccaatttcaattgagaaaaaatgaaattgacccagatgagatgaagaccaaaattatgtgtgctaattaaagagcatatatatatatatatgtaatgtgctaactataatactttgtgtataatattagattagattaggtagggggagaaaaaggttttctgatttacgagatgtgtggtgtggttaattaatttccagttgatgatttaagaaagtgattattagagagaagaaaaaaaggtttaggattgtgttattaagtagtgggaggcttaggggatgtgcatgtgcaattgtgacttgtgaggggcaagggcatgtgttgtgtgtcagtttgctttttggttttagtccccatgcatgtgagcaatcaggctttgcattatttgttattccctttaacagcctgtgtgggatacttggcataggggtagtgtaggaccatattacccttctttttcctcttttatgggggttgttatcttttctacattctcttaactttttggcttcggtgaatcttatgttatatacttcaatgtgttttggagttggcgtggggtttgccttgagttgagtggttttcaatgcacttgtcatgtgctgctgtactatatatttgattactaatgcatatacatatatatttcg

SEQ ID NO: 17213 - protein, 261 aa, Glycine max
SSNLITESPGSIAAVRREQMALQHAQRKMKIAHYGRSKSAKFERVVPLDPSSNLTSKTSEEEKRCSFITANSDPIYIAYHDEEWGVPVHDDKMLFELLVLSGAQVGSDWTSILKKRQDFRAAFSEFDVATLANLTDKQMVSISLEYGIDISQVRGVVDNANRILEINKDFGSFDKYIWGFVNHKPISTQYKFGHKIPVKTSKSESISKDMIRRGFRCVGPTVLHSFMQAAGLTNDHLITCHRHLQCTLLASSPHCTTEHSL

SEQ ID NO: 17214 - protein, 242 aa, Glycine max
MALQHAQRKMKIAHYGRSKSAKFERVVPLDPSSNLTSKTSEEEKRCSFITANSDPIYIAYHDEEWGVPVHDDKMLFELLVLSGAQVGSDWTSILKKRQDFRAAFSEFDVATLANLTDKQMVSISLEYGIDISQVRGVVDNANRILEINKDFGSFDKYIWGFVNHKPISTQYKFGHKIPVKTSKSESISKDMIRRGFRCVGPTVLHSFMQAAGLTNDHLITCHRHLQCTLLASSPHCTTEHSL

SEQ ID NO: 17215 - protein, 233 aa, Glycine max
MKIAHYGRSKSAKFERVVPLDPSSNLTSKTSEEEKRCSFITANSDPIYIAYHDEEWGVPVHDDKMLFELLVLSGAQVGSDWTSILKKRQDFRAAFSEFDVATLANLTDKQMVSISLEYGIDISQVRGVVDNANRILEINKDFGSFDKYIWGFVNHKPISTQYKFGHKIPVKTSKSESISKDMIRRGFRCVGPTVLHSFMQAAGLTNDHLITCHRHLQCTLLASSPHCTTEHSL

SEQ ID NO: 17216 - DNA, 669 bp, Glycine max
ggaagacgaaaagcaaatcagcgaagcagtcctccagttttcgttagagacactgtgtcttgttttctctgaatctaacacagacccgattgctacgaatggcatccaacaggggtcaaggtggaattcaacagttgctggctgctgaacaagaagcgcaaagaattgtcaatgctgcaaaaaatgaaaaattggctagactgaagcaagccaaagaagaggctgaaaaggaaattgccgagtatagggctcagttggagtacgagtttcaaaagaaagtgtcacagagtagtggagattctggtgctaatgtgaagagacttgagcaagagacagaagaaaagattcatcacctgaaaactgaggctgagaggatatcaggggatgttgtctccatgctcctcaagcatgtaacaagtgtgaagaattagagaaatattggtgctggggaactcttaagttatgcagaacagtatatctcatttatattgtgtttattgttgattctagatcctggcgctgatagattcttgcttttttgttggctataatacgtggtaccttgctgccatgtattaaaaataatttctgagtttttaaaaataaacagttaagaattcataggcatgcctatatgtatcaccgtttcaatagaaaaaaaaaaaaaag

SEQ ID NO: 17217 - protein, 110 aa, Glycine max
MASNRGQGGIQQLLAAEQEAQRIVNAAKNEKLARLKQAKEEAEKEIAEYRAQLEYEFQKKVSQSSGDSGANVKRLEQETEEKIHHLKTEAERISGDVVSMLLKHVTSVKN

SEQ ID NO: 17218 - DNA, 1782 bp, Glycine max
aattgaggtagagatcaatcatgcttgtgagattgatgaaatatttgatgcaataagttatagaaaaggtgcatctgtaattaggatgctgcaaagctatcttggtgccgaatgctttcagaggtcgctggcttcatatataaaaagacatgcttgctcaaatgctaagactgaggatctatgggctgcacttgaggaaggatctggtgaacctgtgaacaagttaatgacctcatggacaaagcagaagggatatcctgttgtatctgttaaagtcaatgatcagaaattggaatttaatcagtcgcaattcttgtcaagcggtgctcaaggagaaggccattggattgttccaataacattatgctttggctcttatgatgtccacaagagtttcctcttgcaatcaaaatctgaaacacatgatgtcaaagatttccttggttccacacacaaaggtttaaattgttggattaaacttaatgtggatcaggctggtttctacagggtgaagtatgatgagctgcttgctgctagacttagatatgcagtagagaaacaactcttatctgcatcagaccgatttggcattttggatgattcatttgcactttgtatggctcgccaggaatcattgacctccttgattaacttgatgggatcttacagggaggaagttgattataccgtgttgtctaacctgataactataagtcttaaagttcaacgtattgcagctgatgcagtaccagacttactagaatatttcaagcagttctttattaacctttttcagtactctgctgagaggcttggttgggagcctaaaccaggagagagtcatgtagatgcaatgttgagaggagaaattttgactgcccttgctatgtttggtcacgatttaacactggatgaagcaagcaagcgttttcaggcattcttagaaaacagaaatacaccacttcttccacctgatataagaaaggcggcatatgtagctgtaatgcaacgggcaagcaaatctaacagatcgggttatgaatcccttttgaaagtatataaggaagctgacctaagtcaggagaaaacgcgtattctgggctctctggcatcttcacgtgatccagatctaattcttgaagctctaaacttcatgttgtcatctgaggttcgtagtcaggatgctgtttttggacttgctgttacccgggaaggacgagatgtagcttgggcatggcttaaggaaaattgggaacacctcataaaaacatatggttcaggatttttgataactcggtttgtcggtgcagttgtctcaccgtttgcttcctttgagaaggccaaggaggtagaggaattctttgctacccacgctatgccatccattgctagaacgttaaggcagagccttgagcgggtcaatatcaatgcaaattgggttcagagtgttcagaacgaaaataggcttggtgatgctatgaaggaattggcatacagagtttactaggctcttgtctagagcgcttttccataaataaaaaaaagaagtgtggtgtcgtgcgattttggtttgagatgacaaaaataccctcactcttggatatttgcggacaaaatttcgtaacggatagaagataaatacttaaatgagtgttcatggatgatgaagacaaatattagagtacttgtttcgtacatattcattataataaaattacataaatgtctttgtttaactaaggacttgtgagatttaagtatgtatcttattaactttggttg

SEQ ID NO: 17219 - protein, 501 aa, Glycine max
IEVEINHACEIDEIFDAISYRKGASVIRMLQSYLGAECFQRSLASYIKRHACSNAKTEDLWAALEEGSGEPVNKLMTSWTKQKGYPVVSVKVNDQKLEFNQSQFLSSGAQGEGHWIVPITLCFGSYDVHKSFLLQSKSETHDVKDFLGSTHKGLNCWIKLNVDQAGFYRVKYDELLAARLRYAVEKQLLSASDRFGILDDSFALCMARQESLTSLINLMGSYREEVDYTVLSNLITISLKVQRIAADAVPDLLEYFKQFFINLFQYSAERLGWEPKPGESHVDAMLRGEILTALAMFGHDLTLDEASKRFQAFLENRNTPLLPPDIRKAAYVAVMQRASKSNRSGYESLLKVYKEADLSQEKTRILGSLASSRDPDLILEALNFMLSSEVRSQDAVFGLAVTREGRDVAWAWLKENWEHLIKTYGSGFLITRFVGAVVSPFASFEKAKEVEEFFATHAMPSIARTLRQSLERVNINANWVQSVQNENRLGDAMKELAYRVY

SEQ ID NO: 17220 - protein, 473 aa, Glycine max
MLQSYLGAECFQRSLASYIKRHACSNAKTEDLWAALEEGSGEPVNKLMTSWTKQKGYPVVSVKVNDQKLEFNQSQFLSSGAQGEGHWIVPITLCFGSYDVHKSFLLQSKSETHDVKDFLGSTHKGLNCWIKLNVDQAGFYRVKYDELLAARLRYAVEKQLLSASDRFGILDDSFALCMARQESLTSLINLMGSYREEVDYTVLSNLITISLKVQRIAADAVPDLLEYFKQFFINLFQYSAERLGWEPKPGESHVDAMLRGEILTALAMFGHDLTLDEASKRFQAFLENRNTPLLPPDIRKAAYVAVMQRASKSNRSGYESLLKVYKEADLSQEKTRILGSLASSRDPDLILEALNFMLSSEVRSQDAVFGLAVTREGRDVAWAWLKENWEHLIKTYGSGFLITRFVGAVVSPFASFEKAKEVEEFFATHAMPSIARTLRQSLERVNINANWVQSVQNENRLGDAMKELAYRVY

SEQ ID NO: 17221 - protein, 426 aa, Glycine max
MTSWTKQKGYPVVSVKVNDQKLEFNQSQFLSSGAQGEGHWIVPITLCFGSYDVHKSFLLQSKSETHDVKDFLGSTHKGLNCWIKLNVDQAGFYRVKYDELLAARLRYAVEKQLLSASDRFGILDDSFALCMARQESLTSLINLMGSYREEVDYTVLSNLITISLKVQRIAADAVPDLLEYFKQFFINLFQYSAERLGWEPKPGESHVDAMLRGEILTALAMFGHDLTLDEASKRFQAFLENRNTPLLPPDIRKAAYVAVMQRASKSNRSGYESLLKVYKEADLSQEKTRILGSLASSRDPDLILEALNFMLSSEVRSQDAVFGLAVTREGRDVAWAWLKENWEHLIKTYGSGFLITRFVGAVVSPFASFEKAKEVEEFFATHAMPSIARTLRQSLERVNINANWVQSVQNENRLGDAMKELAYRVY

SEQ ID NO: 17222 - DNA, 1157 bp, Glycine max
acttaaataaaagatcaattggaaccaatgctgtgactgtgagttatacaatgaagccttctcgtgtcgaagattttgcaaagaggggtgcatttcctttgtgtcctactcaaaatgggttgatgtttgtgcctctcgcatccaagctgcctttatcatctcaattaaagggtgttgacatagttctccacaaagccactgatgaaatattatcaattgaagataataatattacttttacacagaacatccaagcattgcaaagatacttggatcagcaccaggatttctgtgttattgatccactgagtaatgtttatcctttattggataggctagaaattcaacaagttctacttggcttagtagaactgaacactgaaggcaaatatttgatcagaggggcccattttcttaaggctgataactttgatgaatttgattttgcaactggactagctgaagctagattgtctcttccatgtatagtgaaacctaaggttgcttgtggtgtcagtgatgcacataagatggcaattgttttcaaagttgatgattttaagaacttaagtgttcctcttccagctgttattcaggaatatgtggatcattcatccactttgtataaattttatgtcttgggtgaaaagattttctatgctgtcaagaagtcaataccaaatgctgatattttgaggaaatcatctaatggtgatgagctcaaacctctactgtttgatagcttaaaatctatgccgaccgctgacagtatcacaagtaatgagcctattgaccttaagctggttacagatgctgcaaattggcttaggagaaggcttcagcttaccatctttggttttgatgttgtaattcaggaaggtactcatgaccatgtaattgtggatgtaaactatctcccatcatttaaggaggtgcctgatgacatctctattcctgccttttgggatgccattagaaataagtttgactctagggtatctaaataagcatttgtttgaactttgtgactatttgacatgtaataatgccgattgttacatagatcaggcactagatgatatcaagctaaatatgagtttgaataactcattattgcatacttgaggtttgaaatgcttaacacttgttattaatgc

SEQ ID NO: 17223 - protein, 334 aa, Glycine max
LNKRSIGTNAVTVSYTMKPSRVEDFAKRGAFPLCPTQNGLMFVPLASKLPLSSQLKGVDIVLHKATDEILSIEDNNITFTQNIQALQRYLDQHQDFCVIDPLSNVYPLLDRLEIQQVLLGLVELNTEGKYLIRGAHFLKADNFDEFDFATGLAEARLSLPCIVKPKVACGVSDAHKMAIVFKVDDFKNLSVPLPAVIQEYVDHSSTLYKFYVLGEKIFYAVKKSIPNADILRKSSNGDELKPLLFDSLKSMPTADSITSNEPIDLKLVTDAANWLRRRLQLTIFGFDVVIQEGTHDHVIVDVNYLPSFKEVPDDISIPAFWDAIRNKFDSRVSK

SEQ ID NO: 17224 - protein, 318 aa, Glycine max
MKPSRVEDFAKRGAFPLCPTQNGLMFVPLASKLPLSSQLKGVDIVLHKATDEILSIEDNNITFTQNIQALQRYLDQHQDFCVIDPLSNVYPLLDRLEIQQVLLGLVELNTEGKYLIRGAHFLKADNFDEFDFATGLAEARLSLPCIVKPKVACGVSDAHKMAIVFKVDDFKNLSVPLPAVIQEYVDHSSTLYKFYVLGEKIFYAVKKSIPNADILRKSSNGDELKPLLFDSLKSMPTADSITSNEPIDLKLVTDAANWLRRRLQLTIFGFDVVIQEGTHDHVIVDVNYLPSFKEVPDDISIPAFWDAIRNKFDSRVSK

SEQ ID NO: 17225 - protein, 294 aa, Glycine max
MFVPLASKLPLSSQLKGVDIVLHKATDEILSIEDNNITFTQNIQALQRYLDQHQDFCVIDPLSNVYPLLDRLEIQQVLLGLVELNTEGKYLIRGAHFLKADNFDEFDFATGLAEARLSLPCIVKPKVACGVSDAHKMAIVFKVDDFKNLSVPLPAVIQEYVDHSSTLYKFYVLGEKIFYAVKKSIPNADILRKSSNGDELKPLLFDSLKSMPTADSITSNEPIDLKLVTDAANWLRRRLQLTIFGFDVVIQEGTHDHVIVDVNYLPSFKEVPDDISIPAFWDAIRNKFDSRVSK

SEQ ID NO: 17226 - DNA, 1142 bp, Glycine max
gttctctctgtagcacggaacagaggatcgaaaataatcagccgcatcacacaccgtttccaccacgatccaattatggaggttgagattgatggctctgttactgtcgaaacagtaggaaatactgctatgggtgaggtcagtagcatagctgatgacaacagagaaggtggaagttctgttgaaccaaatgacaaacaagatcaacatgataacatgactcaagattcctctggagggatcactatcccaactgcaattcccacagtatcagttgtttcagttgaagagccctatgtgggtcaggagtttgggtcagaagcagcagcacatgcattttataatgcttatgctacagatgttggattcattgtacgtgtgagtaaactctcgcggtcaaggcgtgatggaactgctattggacgcactcttgtttgcaacaaagagggtttcagaatggctgacaaacgtgaaaagattgtgaggcaaagggctgagaccagggttggttgcagggcaatgattatggtgaggaaacttagttctggcaaatgggttattgcaaagtttgtaaaggaacacacacatccgttgactcctggcaaaggtagaagggatttctactatgaacaatatccgactgaacaagataaaattcgggaactatctcagcagttggcaactgagaaaaagcgatctgcggcctataaaaggcatcttgaattgatatttgagcaaattgaagagcagaacgagaacctttcaaagaaaatacagcacatagtagacagtgtgaaggagatggaagccaaagaagaacatagtagacagtgggaaggagatggaagccaaagaagaacatattagacagtgtgaaggagatggaaaccaaagaacaacagtgtagactctgatagattcaactttgaacgcgatacttttagttggtagaagaaactagttcagtcaaatgtagaggtcctttgagtccactattgtcaagttgtgccaacaatgtaataactcataacagacattcaaacgccctgatagagtttcattcttccatcatttttctagtatttcctttgtgtatagaatgagactgctgttgagaatgctgtggctgaatattctccatc

SEQ ID NO: 17227 - protein, 288 aa, Glycine max
VLSVARNRGSKIISRITHRFHHDPIMEVEIDGSVTVETVGNTAMGEVSSIADDNREGGSSVEPNDKQDQHDNMTQDSSGGITIPTAIPTVSVVSVEEPYVGQEFGSEAAAHAFYNAYATDVGFIVRVSKLSRSRRDGTAIGRTLVCNKEGFRMADKREKIVRQRAETRVGCRAMIMVRKLSSGKWVIAKFVKEHTHPLTPGKGRRDFYYEQYPTEQDKIRELSQQLATEKKRSAAYKRHLELIFEQIEEQNENLSKKIQHIVDSVKEMEAKEEHSRQWEGDGSQRRTY

SEQ ID NO: 17228 - protein, 263 aa, Glycine max
MEVEIDGSVTVETVGNTAMGEVSSIADDNREGGSSVEPNDKQDQHDNMTQDSSGGITIPTAIPTVSVVSVEEPYVGQEFGSEAAAHAFYNAYATDVGFIVRVSKLSRSRRDGTAIGRTLVCNKEGFRMADKREKIVRQRAETRVGCRAMIMVRKLSSGKWVIAKFVKEHTHPLTPGKGRRDFYYEQYPTEQDKIRELSQQLATEKKRSAAYKRHLELIFEQIEEQNENLSKKIQHIVDSVKEMEAKEEHSRQWEGDGSQRRTY

SEQ ID NO: 17229 - protein, 245 aa, Glycine max
MGEVSSIADDNREGGSSVEPNDKQDQHDNMTQDSSGGITIPTAIPTVSVVSVEEPYVGQEFGSEAAAHAFYNAYATDVGFIVRVSKLSRSRRDGTAIGRTLVCNKEGFRMADKREKIVRQRAETRVGCRAMIMVRKLSSGKWVIAKFVKEHTHPLTPGKGRRDFYYEQYPTEQDKIRELSQQLATEKKRSAAYKRHLELIFEQIEEQNENLSKKIQHIVDSVKEMEAKEEHSRQWEGDGSQRRTY

SEQ ID NO: 17230 - DNA, 1374 bp, Glycine max
agagagatcagagatgtgtgggagagcacgttgtactctgagagcggatgatgtcccaagggcttgtcaccgcagcacttcccctactcgcactcttcatatcgaccggtataggccagcgtataatgtgtcaccgggattcgacgtgccagtggttcgtagagatgacgcgtctggcggtgaaggctatgttcttcaatgcatgaaatggggtttaatccccagttttacaaagaagacagagaagcctgatcactacaggatgtttaatgctcgatctgaatctatagatgaaaaggcatcatttcgccgtctgcttcctaaaagcaggtgccttgtggcagtagaaggattttatgagtggaaaaaggatggttcaaagaaacagccttactatattcacttcaaagatggacgaccacttgtctttgctgctctttatgactcatggcaaaattctgaaggtgaaacactatatacattcactattgttacaacctcttcatcttcagcacttcagtggcttcatgacaggatgcctgttattttgggcagcaaggaatcaactgatatttggctaagcagttctgcttccagttttaagagtgtgatgaagccatatgaagaatctgatttggtgtggtacccagtgacatctgctatgggcaaggcatcatttgatggacctgagtgcataaaggagattcaagtaaaagcacaagggaacacttcaatctctatgttcttttcaaaaaaaggagatgaaagtaaagacacaaagccagaacagaaagcatcatgtcctgaagttgtcaaaactgaacatacagaagacctgactgaaagtaaagacacaaagccagagcagaaaacatcaagtcatgaatttgtcaagactgaacctacagaagacttgagagaaagagctaaaactgaggagggaggcaatgacttaaaattccatggttcttcccattctcaaaatgtttctatgctcccaattaagcgtgagtatgagacattttcggctgctgattcaaagccagcattggcaaatcatgatcagataagtccaaaccctgcaaagaaaaaggaaaaagcaaagactgctaatgataaacaaccaaccctgttttcatactttggaaaaagtaaccactaaactaactggttttggttttgcattaacatgaggattgctatgtttgtattggtgtaaattacacatgcattttcttttagcttgtgtatttccatgtaggccttgttttatatgcacattttcaatctctactcttgttggaaggtctttctttagtccatggttcatgttcaagaggagctttataattaaatagcaaggctttttgtatt

SEQ ID NO: 17231 - protein, 386 aa, Glycine max
ERSEMCGRARCTLRADDVPRACHRSTSPTRTLHIDRYRPAYNVSPGFDVPVVRRDDASGGEGYVLQCMKWGLIPSFTKKTEKPDHYRMFNARSESIDEKASFRRLLPKSRCLVAVEGFYEWKKDGSKKQPYYIHFKDGRPLVFAALYDSWQNSEGETLYTFTIVTTSSSSALQWLHDRMPVILGSKESTDIWLSSSASSFKSVMKPYEESDLVWYPVTSAMGKASFDGPECIKEIQVKAQGNTSISMFFSKKGDESKDTKPEQKASCPEVVKTEHTEDLTESKDTKPEQKTSSHEFVKTEPTEDLRERAKTEEGGNDLKFHGSSHSQNVSMLPIKREYETFSAADSKPALANHDQISPNPAKKKEKAKTANDKQPTLFSYFGKSNH

SEQ ID NO: 17232 - protein, 382 aa, Glycine max
MCGRARCTLRADDVPRACHRSTSPTRTLHIDRYRPAYNVSPGFDVPVVRRDDASGGEGYVLQCMKWGLIPSFTKKTEKPDHYRMFNARSESIDEKASFRRLLPKSRCLVAVEGFYEWKKDGSKKQPYYIHFKDGRPLVFAALYDSWQNSEGETLYTFTIVTTSSSSALQWLHDRMPVILGSKESTDIWLSSSASSFKSVMKPYEESDLVWYPVTSAMGKASFDGPECIKEIQVKAQGNTSISMFFSKKGDESKDTKPEQKASCPEVVKTEHTEDLTESKDTKPEQKTSSHEFVKTEPTEDLRERAKTEEGGNDLKFHGSSHSQNVSMLPIKREYETFSAADSKPALANHDQISPNPAKKKEKAKTANDKQPTLFSYFGKSNH

SEQ ID NO: 17233 - protein, 319 aa, Glycine max
MKWGLIPSFTKKTEKPDHYRMFNARSESIDEKASFRRLLPKSRCLVAVEGFYEWKKDGSKKQPYYIHFKDGRPLVFAALYDSWQNSEGETLYTFTIVTTSSSSALQWLHDRMPVILGSKESTDIWLSSSASSFKSVMKPYEESDLVWYPVTSAMGKASFDGPECIKEIQVKAQGNTSISMFFSKKGDESKDTKPEQKASCPEVVKTEHTEDLTESKDTKPEQKTSSHEFVKTEPTEDLRERAKTEEGGNDLKFHGSSHSQNVSMLPIKREYETFSAADSKPALANHDQISPNPAKKKEKAKTANDKQPTLFSYFGKSNH

SEQ ID NO: 17234 - DNA, 612 bp, Glycine max
gcacaacacaacgcttatattacttacaacaaaagataagcccacgaatcagtagatcgaggtcccgcccagtccagcagaagcgcacacggagatgtcccagctgagccctgctggccacatggctgcgacgctcctcctcatcctcctggcctccgcagcagcagcagcggtgtcagctgaccaacaggtctctgcctgccagaatgacatagacgcactgtggcgcagctgcaagcagttcgtccagaaggaggggcccaagatgcctccgtccgaggactgctgcaaaaccatcaaggccttagacgcgcacgcgtcctgcatctgcgactacgtcggctccccggacgccaggaataagctagacctggacaaggtgttcttcgttaccaaacagtgcggcgtcaccgtccccaagggctgcggatcaaagcaggactgaagagcggctgaatctgaatggagcaagttggctaacatacgcacggcagctacaaatacttataggaataaataaagttggtcaactgttggtttcatggtgttggagtacaacaactgtactgttcttatcctcatatatgatatatgaactctagttcatcacat

SEQ ID NO: 17235 - protein, 116 aa, Glycine max
MSQLSPAGHMAATLLLILLASAAAAAVSADQQVSACQNDIDALWRSCKQFVQKEGPKMPPSEDCCKTIKALDAHASCICDYVGSPDARNKLDLDKVFFVTKQCGVTVPKGCGSKQD

SEQ ID NO: 17236 - protein, 107 aa, Glycine max
MAATLLLILLASAAAAAVSADQQVSACQNDIDALWRSCKQFVQKEGPKMPPSEDCCKTIKALDAHASCICDYVGSPDARNKLDLDKVFFVTKQCGVTVPKGCGSKQD

SEQ ID NO: 17237 - protein, 59 aa, Glycine max
MPPSEDCCKTIKALDAHASCICDYVGSPDARNKLDLDKVFFVTKQCGVTVPKGCGSKQD

SEQ ID NO: 17238 - DNA, 805 bp, Glycine max
acaaaactaagatcttccaattaagaacttgtgctacccatggccactcccacagcataccaagaacacctccctgcatccccccactggctaaacaaaggggacaacgcatggcagctgacagcagccactctcgtaggtctccaaagcatgccgggtctggtgatcctctacgccagcatggtgaagaagaaatgggccgtgaactctgcattcatggccctctacgcctttgcggcggtcctaatatgctgggtgctcgtttgtcaccgaatggcgttcggtgacaaactgcttcccttctgggggaagggcgccccagcactaggccagaagtttttaacacaccgcgccaaagtccccgaaagcacgcactattataacaatggtacggtcgaaagcgcgacttcggaaccgttgtttgccacggcttctcttgtgtattttcaattcacgtttgcggctatcacgcttatcttgttggcgggatcggtgctaggaagaatgaacatcaaggcttggatggcttttgtgcctctttggctgattttttcgtacactgttggggcgtttagtctttggggtggtggctttctctaccattggggggttattgattactctggtggatatgttattcatctttcctctggaattgctggtttcactgctgcttactgggttgggccaaggttgaagagtgacagggagaggttcccaccgaacaacgtattgctgatgcttgcgggtgcagggttactatggatggggtggtcagggttcaatggtggagcaccatatgcag

SEQ ID NO: 17239 - protein, 255 aa, Glycine max
MATPTAYQEHLPASPHWLNKGDNAWQLTAATLVGLQSMPGLVILYASMVKKKWAVNSAFMALYAFAAVLICWVLVCHRMAFGDKLLPFWGKGAPALGQKFLTHRAKVPESTHYYNNGTVESATSEPLFATASLVYFQFTFAAITLILLAGSVLGRMNIKAWMAFVPLWLIFSYTVGAFSLWGGGFLYHWGVIDYSGGYVIHLSSGIAGFTAAYWVGPRLKSDRERFPPNNVLLMLAGAGLLWMGWSGFNGGAPYA

SEQ ID NO: 17240 - protein, 218 aa, Glycine max
MPGLVILYASMVKKKWAVNSAFMALYAFAAVLICWVLVCHRMAFGDKLLPFWGKGAPALGQKFLTHRAKVPESTHYYNNGTVESATSEPLFATASLVYFQFTFAAITLILLAGSVLGRMNIKAWMAFVPLWLIFSYTVGAFSLWGGGFLYHWGVIDYSGGYVIHLSSGIAGFTAAYWVGPRLKSDRERFPPNNVLLMLAGAGLLWMGWSGFNGGAPYA

SEQ ID NO: 17241 - protein, 208 aa, Glycine max
MVKKKWAVNSAFMALYAFAAVLICWVLVCHRMAFGDKLLPFWGKGAPALGQKFLTHRAKVPESTHYYNNGTVESATSEPLFATASLVYFQFTFAAITLILLAGSVLGRMNIKAWMAFVPLWLIFSYTVGAFSLWGGGFLYHWGVIDYSGGYVIHLSSGIAGFTAAYWVGPRLKSDRERFPPNNVLLMLAGAGLLWMGWSGFNGGAPYA

SEQ ID NO: 17242 - DNA, 766 bp, Glycine max
atgatgctgctagtgctgagtgtgtgtatctgaggaaagaaagagaccattcttatttgtctggtttggttcttgagtaatttttttttcttcttttcttgagtaacttgattcatgtgtcaaagattctgatcattggtattattagctagacatagtgtagtgttgttgagtggggtttgtagacaatgaggagaggtagagggaaagggaagaagcagagtgcatctgctcgggaagatcatggaagcggtgaagaggatgaaaagattccagcttacaggagaagaggaaggccacagaagcctatgaaagatgattttgaagaggaggaagatgaagaagaagagttggtagagaagatggaggaagaagaagaagaggatgattcagtaacaagtaaaaaagaagaaaacgagaggaagaggaagatgattaatggaagcaatacggatgcaaatgaaaaagagaatgggttaggatcaaaatcaagtagagatggttccagttccaccaagtccacatctactggtttcagacagaatgggagcaggaggaaaagcaagcctagacgagctgctgaagctgttgtggaatgtaatggagtttgagaaaactttatgatcaagaactttccaagacacatgatgaaacattaatttgaggtttcttcttcgtttaggttatcttacaagtttctttgtaagttgagaactttggctatcttttggtgtatcaatctgcattgttttttttttcatctctc

SEQ ID NO: 17243 - protein, 140 aa, Glycine max
MRRGRGKGKKQSASAREDHGSGEEDEKIPAYRRRGRPQKPMKDDFEEEEDEEEELVEKMEEEEEEDDSVTSKKEENERKRKMINGSNTDANEKENGLGSKSSRDGSSSTKSTSTGFRQNGSRRKSKPRRAAEAVVECNGV

SEQ ID NO: 17244 - protein, 100 aa, Glycine max
MKDDFEEEEDEEEELVEKMEEEEEEDDSVTSKKEENERKRKMINGSNTDANEKENGLGSKSSRDGSSSTKSTSTGFRQNGSRRKSKPRRAAEAVVECNGV

SEQ ID NO: 17245 - protein, 82 aa, Glycine max
MEEEEEEDDSVTSKKEENERKRKMINGSNTDANEKENGLGSKSSRDGSSSTKSTSTGFRQNGSRRKSKPRRAAEAVVECNGV

SEQ ID NO: 17246 - DNA, 740 bp, Glycine max
aaaaaaatcccaagctcacacacactaaaccaaagtaagaggtatagtgttctaagagtgagcaacttgtgagaaatggcttccaaggctgcacttctcttgtgtctcaatgttctctttttcactgtggttagttccacatatgtgccatgtaatccaccccccaaaactcccaaacacccacctgtcccaaagccaccatccccaaagcaagcaagctgccccaaagacactattaagttcggtgtgtgtgctgatgtgttaggtttgattaatgtgcaacttgggaagccaccaaagaccccatgctgcaacctaattcagggtcttgctgatcttgaagctgcagtgtgcctttgcactgctctcaaggctaatgtgttgggcatcaacctcaatgttccagtgaacttgagcttgcttctaaactactgtggaaagggtgttcccaagggattcgtctgctattaaatcaaacacttataatgtgtagcttcctattgctatattcgtcattcatcattattctgtgtatttcagtatttgtgcccggcacgtgccaattagccaacgaacatttcgttcatacttggttactattactgttgtgatgcgctgaaactttaaaggcttcttggtcttccttgtcgcagcctcactaaagtcgtttgtattctaagtgaaatttctactaataaataatctacattatttaagctatgattaaaaaaaaaaaaaag

SEQ ID NO: 17247 - protein, 131 aa, Glycine max
MASKAALLLCLNVLFFTVVSSTYVPCNPPPKTPKHPPVPKPPSPKQASCPKDTIKFGVCADVLGLINVQLGKPPKTPCCNLIQGLADLEAAVCLCTALKANVLGINLNVPVNLSLLLNYCGKGVPKGFVCY

SEQ ID NO: 17248 - DNA, 1390 bp, Glycine max
ctcactcactcactcattgtccttactcacccctctctctattagcattagcatcaaaaacactctcttggttatccaatccaaacaccacccttcttctcataccctgctcagttagcagcagctactctcattcctctaccggagcaaaactataaacaaaaaaaacaagtccatcgtatgggtctcttagcatcctcatgcttcattctcattgctctcctactcctcactcccaaaggtgttatgggtgccaccttcacattctttaacaaatgcgactacacagtgtggcctgggattctcgcaaatgccggtagcccaccactcgacagcaccggttttgagctccccaaggacacttctcgcgccttccaagctcccaccggctggtccggtcgtttctggggccgaaccggttgcaccttcgacggatccggcgccggctcatgcctcaccggcgactgcggctccggccaagtcgaatgcaacggcgccggagccgccccgccggcaaccctggcggagttcacgctcggcaccggaggtcaagacttctacgacgtgagcctcgttgatggctacaatcttcccatgatcgtggaaggcactggtgggtcgggtctttgcgcctccacgggttgtacctcggatctgaaccagcaatgtcctgcggagctgagagcctcggagggaagcgcgtgcaagagcgcgtgtgaggcttttggtagccctgagtactgctgcagcggcgcgtatggctcacccgccacttgcaggccgtccatttactcggagatgttcaaggctgcttgccctaggtcttatagctacgcatacgatgatgctacgagtacgtttacgtgttccggcgccgattataccgttaccttctgtccatcctctccaagtcagaaatcttcacgagataccactaccaaccccatgacctcaacaacaacatcaccagggtcagggacagtgacaggaaccggaaccggaacaggatccgaaggggcagtggtatacacgggtgcggacaacggcgttgcgtataatacagttacggattccgggtcaagttcaggatccggaggagaaacaatgctcgcagatgggtcatatttagctggtttagccatgggagactcccctgaaagaacagtttccatcgcgtttgtttactctgctagctttttgcttattctcttcctgctttagctgcaccagcattgtttgttaaatgtgtaaatggctcttagattttcgggtttttcgtgggtgggttcaagaattttggctttgccagtaaagctggcagattctctccctcattgtaaaccaccttccaaaagattcgccagaaaaagtattccgtgtttcattcgtt

SEQ ID NO: 17249 - protein, 346 aa, Glycine max
MGLLASSCFILIALLLLTPKGVMGATFTFFNKCDYTVWPGILANAGSPPLDSTGFELPKDTSRAFQAPTGWSGRFWGRTGCTFDGSGAGSCLTGDCGSGQVECNGAGAAPPATLAEFTLGTGGQDFYDVSLVDGYNLPMIVEGTGGSGLCASTGCTSDLNQQCPAELRASEGSACKSACEAFGSPEYCCSGAYGSPATCRPSIYSEMFKAACPRSYSYAYDDATSTFTCSGADYTVTFCPSSPSQKSSRDTTTNPMTSTTTSPGSGTVTGTGTGTGSEGAVVYTGADNGVAYNTVTDSGSSSGSGGETMLADGSYLAGLAMGDSPERTVSIAFVYSASFLLILFLL

SEQ ID NO: 17250 - protein, 324 aa, Glycine max
MGATFTFFNKCDYTVWPGILANAGSPPLDSTGFELPKDTSRAFQAPTGWSGRFWGRTGCTFDGSGAGSCLTGDCGSGQVECNGAGAAPPATLAEFTLGTGGQDFYDVSLVDGYNLPMIVEGTGGSGLCASTGCTSDLNQQCPAELRASEGSACKSACEAFGSPEYCCSGAYGSPATCRPSIYSEMFKAACPRSYSYAYDDATSTFTCSGADYTVTFCPSSPSQKSSRDTTTNPMTSTTTSPGSGTVTGTGTGTGSEGAVVYTGADNGVAYNTVTDSGSSSGSGGETMLADGSYLAGLAMGDSPERTVSIAFVYSASFLLILFLL

SEQ ID NO: 17251 - protein, 208 aa, Glycine max
MIVEGTGGSGLCASTGCTSDLNQQCPAELRASEGSACKSACEAFGSPEYCCSGAYGSPATCRPSIYSEMFKAACPRSYSYAYDDATSTFTCSGADYTVTFCPSSPSQKSSRDTTTNPMTSTTTSPGSGTVTGTGTGTGSEGAVVYTGADNGVAYNTVTDSGSSSGSGGETMLADGSYLAGLAMGDSPERTVSIAFVYSASFLLILFLL

SEQ ID NO: 17252 - DNA, 1093 bp, Glycine max
acgattacgaagcgtgcccaactccatctgcttccttttcctcttccccccgtccccgacgacccccggccgaaaccctagcgaggcgcgatgttcgggtaccggaaggcgccggacctcgacctcgaggcgggcggctcggcggcgctctacccggggatgacggaggacgtggagctgcgctgggccttcatccgcaagatctacgtcatcctctcggtccagctcgccatgaccgccgccgtcgcggggttcgtcgtcaaggtccccgccgtctccgagttcttcgtctcctccaacgctggcctgggcctctacatcttcctcctcgtcctgcccctcatcgtgctctgccccctgcgctactaccaccagaagcaccccgtcaacctcatcctgctcggcgtcttcaccgtctccatcagcttcgccgtcggcatgacgtgcgccttcaccagcggaaaaatcatcttggaagctgcaattctgacagcagtggtggtgatcagcttgactgcctacactttctgggctgcaaagataggccatgatttcaacttcctgggcccgttcctgtttggagctcttatggtgctgctggtgttctcacttatccagatctttttcccactgggcaagatctccaccatgatatatggggccgtggcgtcgatcatcttctgtggctacatcatcttcgacacggacaacatcatcaagcgccacacgtatgacgagtacatctgggctgccgtgtccctctacctcgacatcatcaacctgttcctgaatctgatgcaaattctgcgggcagctgatagctgagcgcaccttgcccaacatcgcatgatttaagtccactagcttgtgcatatcagaaaattcatgaatgcccgcagatacctgtaggcatgtacaatcgttatcagtaaattctgccgtcctagactccatcacatgtcttgtttcctagcttcctggagtatgcaatgtgtgattgaaccaagctgcacgatgaaaatatactcactggtgctttgtgattgcaaggcacgtgaatttaattccctgctacgaaatgttccattttaat

SEQ ID NO: 17253 - protein, 244 aa, Glycine max
MFGYRKAPDLDLEAGGSAALYPGMTEDVELRWAFIRKIYVILSVQLAMTAAVAGFVVKVPAVSEFFVSSNAGLGLYIFLLVLPLIVLCPLRYYHQKHPVNLILLGVFTVSISFAVGMTCAFTSGKIILEAAILTAVVVISLTAYTFWAAKIGHDFNFLGPFLFGALMVLLVFSLIQIFFPLGKISTMIYGAVASIIFCGYIIFDTDNIIKRHTYDEYIWAAVSLYLDIINLFLNLMQILRAADS

SEQ ID NO: 17254 - protein, 221 aa, Glycine max
MTEDVELRWAFIRKIYVILSVQLAMTAAVAGFVVKVPAVSEFFVSSNAGLGLYIFLLVLPLIVLCPLRYYHQKHPVNLILLGVFTVSISFAVGMTCAFTSGKIILEAAILTAVVVISLTAYTFWAAKIGHDFNFLGPFLFGALMVLLVFSLIQIFFPLGKISTMIYGAVASIIFCGYIIFDTDNIIKRHTYDEYIWAAVSLYLDIINLFLNLMQILRAADS

SEQ ID NO: 17255 - protein, 197 aa, Glycine max
MTAAVAGFVVKVPAVSEFFVSSNAGLGLYIFLLVLPLIVLCPLRYYHQKHPVNLILLGVFTVSISFAVGMTCAFTSGKIILEAAILTAVVVISLTAYTFWAAKIGHDFNFLGPFLFGALMVLLVFSLIQIFFPLGKISTMIYGAVASIIFCGYIIFDTDNIIKRHTYDEYIWAAVSLYLDIINLFLNLMQILRAADS

SEQ ID NO: 17256 - DNA, 488 bp, Glycine max
gtgtcgaatcgaattgggcgatagggtttcttcatcaatctctggggagacgacgaagatggtgtgcgataagtgtgagaagaagttatcaaaggtgatagttccagataagtggaaggatggtgctcgtaatgttaccgaaggtggtggccgcaagatcaacgagaacaaacttctctccaagaagaacagatggacaccttacggtactgctaccacgaagtgcacgatctgcaagcagcaagtgcatcaagatggtaaatattgtcacacatgtgcctatagcaaaggagtgtgtgccatgtgcgggaagcaagtgttggacacgaagatgtataagcaaagcaatgtttaaccaaatccctctaagcttcttcaccctttgatgtctatttgcataaccaggggactatctttgttatatcatgtgttaattctctgtacctcactcttttgtttctagtaaaaacaaacaaaagcttccctct

SEQ ID NO: 17257 - protein, 117 aa, Glycine max
CRIELGDRVSSSISGETTKMVCDKCEKKLSKVIVPDKWKDGARNVTEGGGRKINENKLLSKKNRWTPYGTATTKCTICKQQVHQDGKYCHTCAYSKGVCAMCGKQVLDTKMYKQSNV

SEQ ID NO: 17258 - protein, 98 aa, Glycine max
MVCDKCEKKLSKVIVPDKWKDGARNVTEGGGRKINENKLLSKKNRWTPYGTATTKCTICKQQVHQDGKYCHTCAYSKGVCAMCGKQVLDTKMYKQSNV

SEQ ID NO: 17259 - protein, 88 aa, Glycine max
MVLVMLPKVVAARSTRTNFSPRRTDGHLTVLLPRSARSASSKCIKMVNIVTHVPIAKECVPCAGSKCWTRRCISKAMFNQIPLSFFTL

SEQ ID NO: 17260 - DNA, 783 bp, Glycine max
atcctctctctcatcagaagaagaagggacgaaagaagaagtatctttgttttcgctctcttctctctcctttcgatctttgacgattagaaaacgaaagtgatggctgcagttaatgggtaccaaggaaacactccggcggcgtcaaagcaatctgctcctctgactaagactgttgatagccaatctgttctcaaaaggctgcaatctgaactaatgggcttgatgatgggtggtgacccggggatatctgctttcccagaggaagacaacatattctgttggaaagggacaataacaggaagcaaagatactgtgtttgaaggaactgagtacagactctcactctctttctccaatgactatcctttcaagcctcctaagatcaagttccacactggttgcttccaccccaatgttgatgtctatggcaatatctgtttggacattcttcaggataaatggtcatctgcatatgatgtgaggacaatactactatcgattcagagccttttgggagaaccgaacatcagctcaccattgaacactcaagcagcgcagctctggagcaaccaagaagagtataggaagatggttgagaagctctacaagccccccagtgcatgataacttcaggatgtgtcattcctttgctctataatttgtttctgatcatcaacagttttatctgtaacattttacctagccttttgacctgagccaaatattgatattgatgtgagcttttcaaaaattaatcagaatgatatacacattcttctt

SEQ ID NO: 17261 - protein, 174 aa, Glycine max
MAAVNGYQGNTPAASKQSAPLTKTVDSQSVLKRLQSELMGLMMGGDPGISAFPEEDNIFCWKGTITGSKDTVFEGTEYRLSLSFSNDYPFKPPKIKFHTGCFHPNVDVYGNICLDILQDKWSSAYDVRTILLSIQSLLGEPNISSPLNTQAAQLWSNQEEYRKMVEKLYKPPSA

SEQ ID NO: 17262 - protein, 136 aa, Glycine max
MGLMMGGDPGISAFPEEDNIFCWKGTITGSKDTVFEGTEYRLSLSFSNDYPFKPPKIKFHTGCFHPNVDVYGNICLDILQDKWSSAYDVRTILLSIQSLLGEPNISSPLNTQAAQLWSNQEEYRKMVEKLYKPPSA

SEQ ID NO: 17263 - protein, 133 aa, Glycine max
MMGGDPGISAFPEEDNIFCWKGTITGSKDTVFEGTEYRLSLSFSNDYPFKPPKIKFHTGCFHPNVDVYGNICLDILQDKWSSAYDVRTILLSIQSLLGEPNISSPLNTQAAQLWSNQEEYRKMVEKLYKPPSA

SEQ ID NO: 17264 - DNA, 1157 bp, Glycine max
attcacattcatcacaactcacctcacccagctagctagcttcataaggttaattagatttttttcgtggaaacaaagatctcaatacttgtgatatcatgacgatgatgagcagcaacaacaacaacaacaacaacaacgttggagaatttggagacaccactctgactaaggtttttgttgggggcttagcttgggagactccgaaggatgccctcaaagaccactttgagaagtatggtgagatccttgaagctgtcatcatttccgataagcacactgccaaatccaaaggctatggctttgtgactttcaaggaggctgaggctgccaagaaggcttgtgaggattcagcaactctcgttatcaatggccgtcgagcaaattgcaatcttgcttgcctaggtgctcgtcgcccaaggtcttcttccaatgtttcaccacctccacaaccacaaggaggatcaaacggtggagtagtgaagaacaatgcatcaagcccaccagccattaatcacgtgcagccatattattatccagtgaggacaactgctgctctgccattccataatcacactcttcctttctatgggtatgcgcctacctacattgtgacggacgtaaactacaattacaatcagaaactgtgctatggtagcggtgggacctacatgaatgggcagcatgtgtacccgaggcaggctattgtgggtgccaacacactgatgccaatgtaccctctttatcagtatcatcatccaacggagaccataggtgtaccagctcacaacttttatccaacggcatcatgggccccaatgaccatcatgtccaagccatcgtctatcgttcctcatacaggtacagttggcacaggtgagtgctttaaaagggttgtctgagaggagcttggttggctaaataacagcagagggagggaaaatggtggtggtggccgcacagagcaacattattatctgatctgtcttggctttactttccttttttttgttgttgtctttaaatattgtttcatttttagttgttaatcttaggcattttgttgttgatgagattctttcattctctttttctgtctaacatctcagcatgtgctgtgcacagttacattcagttgaaattatcgatttgttctc

SEQ ID NO: 17265 - protein, 267 aa, Glycine max
MTMMSSNNNNNNNNVGEFGDTTLTKVFVGGLAWETPKDALKDHFEKYGEILEAVIISDKHTAKSKGYGFVTFKEAEAAKKACEDSATLVINGRRANCNLACLGARRPRSSSNVSPPPQPQGGSNGGVVKNNASSPPAINHVQPYYYPVRTTAALPFHNHTLPFYGYAPTYIVTDVNYNYNQKLCYGSGGTYMNGQHVYPRQAIVGANTLMPMYPLYQYHHPTETIGVPAHNFYPTASWAPMTIMSKPSSIVPHTGTVGTGECFKRVV

SEQ ID NO: 17266 - protein, 265 aa, Glycine max
MMSSNNNNNNNNVGEFGDTTLTKVFVGGLAWETPKDALKDHFEKYGEILEAVIISDKHTAKSKGYGFVTFKEAEAAKKACEDSATLVINGRRANCNLACLGARRPRSSSNVSPPPQPQGGSNGGVVKNNASSPPAINHVQPYYYPVRTTAALPFHNHTLPFYGYAPTYIVTDVNYNYNQKLCYGSGGTYMNGQHVYPRQAIVGANTLMPMYPLYQYHHPTETIGVPAHNFYPTASWAPMTIMSKPSSIVPHTGTVGTGECFKRVV

SEQ ID NO: 17267 - protein, 264 aa, Glycine max
MSSNNNNNNNNVGEFGDTTLTKVFVGGLAWETPKDALKDHFEKYGEILEAVIISDKHTAKSKGYGFVTFKEAEAAKKACEDSATLVINGRRANCNLACLGARRPRSSSNVSPPPQPQGGSNGGVVKNNASSPPAINHVQPYYYPVRTTAALPFHNHTLPFYGYAPTYIVTDVNYNYNQKLCYGSGGTYMNGQHVYPRQAIVGANTLMPMYPLYQYHHPTETIGVPAHNFYPTASWAPMTIMSKPSSIVPHTGTVGTGECFKRVV

SEQ ID NO: 17268 - DNA, 1405 bp, Glycine max
aaaacaatacttctactattagctttgtgagtgcaaccattcgcatcttcattcccagatttaaccaaacctctgaatgttcaaagcttccttgcctataatagcaaaaatccacacaaagcactcaccaaactcttaagaatctatggacctcttatgactttgaaatcaggcagcataagcaccatagttatttcctctcctcaagtagcaaaacgagtgctgcatgaaaatattctccccacaaatggaggaaccttagaagagtttgtgccacaaaaatattctccccacaagtgctcgactccactcaaatccttcgccaacaaaagcttcgggatttattggattttgtgaaagaaagttgcaagaaaggtgaggttgtggacattggtgcggttgtctttgcaacaatacttaattccatttcaaccacttagaaaagcctcaagagttcaagaacattattcggggtatgatggaagaagctggaaggcctaatgttgcagatttctttcccattcttcgtccacttgaccctcaacgtgtccttgcaaggaggagcatttatattaagaagttgtttgagattatcgatggaattattgaagagtgtgttcaagagcttcaaaaactgactccatggatgtattggattcacttcttaacaacaatgaagaaactggttctctgttgagtcgcgatgagacgatacacttgttcatgctcactaaacctatctcagaaaaacaaagatctcagactcattcaccattggatcgtcgtgaaatttaaacaccaagttcacaacccagttccgagcattctcaccgttgggaatttcaaaatcatgtctgagcttataggaaaatcattcgcattgtagccttttaatttcccgcagaaacccaaaactgtctcgataaaactatgatcccggtttcgttaaccgttggattttcatgaaatttggatatgttgttcgaaattcaattgcgcacacttgaaccgttgggatttgcgagataatattcgtgagggagaaaaatgaatcacatgaagacagtacaagtggaggtttcaatttcttcttcatctctctgacgtttgggaattctatcggagcaatcggaggaataactgaaggaatctcaggggaccgctagagatgctgctatcgctggctaaagacacgtgagtcctctcagaggtaagagatgagttattcacaattgagaattagcgaaaaaatgtgtacagatccttagagatatcaactgaaataagttttggggtatttttccaattttcattttattcttataattattacagtgaattatatatgtttgacagaccaatttttgtgaaattgatatgctattgtgttgagcgtgaaccctat

SEQ ID NO: 17269 - protein, 73 aa, Glycine max
MMEEAGRPNVADFFPILRPLDPQRVLARRSIYIKKLFEIIDGIIEECVQELQKLTPWMYWIHFLTTMKKLVLC

SEQ ID NO: 17270 - protein, 72 aa, Glycine max
MEEAGRPNVADFFPILRPLDPQRVLARRSIYIKKLFEIIDGIIEECVQELQKLTPWMYWIHFLTTMKKLVLC

SEQ ID NO: 17271 - protein, 66 aa, Glycine max
MTLKSGSISTIVISSPQVAKRVLHENILPTNGGTLEEFVPQKYSPHKCSTPLKSFANKSFGIYWIL

SEQ ID NO: 17272 - DNA, 711 bp, Glycine max
acctcttgctcttgcttatactaactaactcttcttgagaaactctttctcacacgccaagagtaacatgggatttccagtggggtacacagagttgatgctgccgaaggtgtttctgcaggtgctatccgtattgggcttgataagaaaactcatcaccgtcctcttgtgctacatgggcttccacgatttcttcgaatccgacattgcgtggccggagagggcgccggaattccagtcggtgtgggcggtgctcataagggaaatcctaccggtggtgaagttctcggagatggagatggagatggcggaggcgccggagagctgcgcggtgtgtctgtacgagttcgagggagaggacgagatcagacggctgacgaactgccgccacatattccacagagggtgtctggaccgttggatgggatacgatcaaagaacgtgtcccctgtgtcggacacccttcataccccaccatatgcaagctgccttcaatgatagactttgggctgcttcagggattcctgatttctattacaatcatgaatgactctagggaaaaaaaatcctagatttggggacgggagtgttctgtttaggttgttgagtatgtgttcagtgttcaatgttcgtgtaaatattatacaaaatggaaagcggagaattgttgttaaaaaaaaaaaaaaaaaaaaaaaaaaaaaaaaaaaaacc

SEQ ID NO: 17273 - protein, 160 aa, Glycine max
MGFPVGYTELMLPKVFLQVLSVLGLIRKLITVLLCYMGFHDFFESDIAWPERAPEFQSVWAVLIREILPVVKFSEMEMEMAEAPESCAVCLYEFEGEDEIRRLTNCRHIFHRGCLDRWMGYDQRTCPLCRTPFIPHHMQAAFNDRLWAASGIPDFYYNHE

SEQ ID NO: 17274 - protein, 150 aa, Glycine max
MLPKVFLQVLSVLGLIRKLITVLLCYMGFHDFFESDIAWPERAPEFQSVWAVLIREILPVVKFSEMEMEMAEAPESCAVCLYEFEGEDEIRRLTNCRHIFHRGCLDRWMGYDQRTCPLCRTPFIPHHMQAAFNDRLWAASGIPDFYYNHE

SEQ ID NO: 17275 - protein, 124 aa, Glycine max
MGFHDFFESDIAWPERAPEFQSVWAVLIREILPVVKFSEMEMEMAEAPESCAVCLYEFEGEDEIRRLTNCRHIFHRGCLDRWMGYDQRTCPLCRTPFIPHHMQAAFNDRLWAASGIPDFYYNHE

SEQ ID NO: 17276 - DNA, 1326 bp, Glycine max
attatacatgcacagctagagttaagagaggagatgggagaaatagaaagagaggagatgtcgtcgacaaggtgggagaaggaggaggaagaagaagaagaagaggcccaaatggatatctggaagtacatatttgggtttgtggaactggcagtgataaaatgtgcgattgagcttggcatagctgaagccatagagaagcatggaagtcccatgacactatcggagatatcatcaagtttagggtgtgatacttcacatctgaagcgcatcatgaggttcctggtgcaaagaaagatattcaaaggcgacgggtgcagcaggggctattctcaatcagctctgtctcgtcgattgatgagaaacggcgaacacagcatggctagttttctcttgctggagagtagtcctgtaatgctggcaccttggcacagtctgagtgctcgcgtcatggccaatggcaacccctcatttgcaaaggctcacggtgaagacgtgtggcgctatgctgccgcaaatctcgatcacagcaacctcatcaacgaagcaatggcatgtgatgctaagcttgttatgcctatcatcattcaaagttgcagcgaggcatttcatggcctcaagtccttggtggatgtcggtgggggcaacggcaccgccatgcgcatcctggctaaggcttgcccttccattcgacccatcaattttgatcttcctcatgtcattgccctctgcgatggcgatggcgatggcgtccaacacgtgtcaggcgacatgtttctaagtgttcctaaagctgatgctgcttttcttatgtgggttttgcacgattggtcagacgaagagtgcatccaaatcttaaagaagtgtagggaagccatatcaaattcaaaggaaaacggaagggttattattgtggaggcggtgattgaaggagaaggagaaggagaaggagggaagcatgacggattgaaggatgtgggattgatgctggacatggtaatgatggcgcacactaacttcggcaaagagcgcacactcaaagagtgggaatatgtcatcaaaatggcaggatttagctcatacactgtcaaacccattcatgctgtgcagtccgtcattatggctttctactaaaatatatccaccaaaaattacccttgcaagtttgccactaaaatgcattaaataatttaataaaaaataaaacatattgtgtgatccatcttgcacgtgtaaaacagtgtatgttaatttgttgtaacaatatgaaagcatttcattttctgtatgtttgttcgagaggagaataaaacgtatctttaaatc

SEQ ID NO: 17277 - protein, 377 aa, Glycine max
IIHAQLELREEMGEIEREEMSSTRWEKEEEEEEEEAQMDIWKYIFGFVELAVIKCAIELGIAEAIEKHGSPMTLSEISSSLGCDTSHLKRIMRFLVQRKIFKGDGCSRGYSQSALSRRLMRNGEHSMASFLLLESSPVMLAPWHSLSARVMANGNPSFAKAHGEDVWRYAAANLDHSNLINEAMACDAKLVMPIIIQSCSEAFHGLKSLVDVGGGNGTAMRILAKACPSIRPINFDLPHVIALCDGDGDGVQHVSGDMFLSVPKADAAFLMWVLHDWSDEECIQILKKCREAISNSKENGRVIIVEAVIEGEGEGEGGKHDGLKDVGLMLDMVMMAHTNFGKERTLKEWEYVIKMAGFSSYTVKPIHAVQSVIMAFY

SEQ ID NO: 17278 - protein, 366 aa, Glycine max
MGEIEREEMSSTRWEKEEEEEEEEAQMDIWKYIFGFVELAVIKCAIELGIAEAIEKHGSPMTLSEISSSLGCDTSHLKRIMRFLVQRKIFKGDGCSRGYSQSALSRRLMRNGEHSMASFLLLESSPVMLAPWHSLSARVMANGNPSFAKAHGEDVWRYAAANLDHSNLINEAMACDAKLVMPIIIQSCSEAFHGLKSLVDVGGGNGTAMRILAKACPSIRPINFDLPHVIALCDGDGDGVQHVSGDMFLSVPKADAAFLMWVLHDWSDEECIQILKKCREAISNSKENGRVIIVEAVIEGEGEGEGGKHDGLKDVGLMLDMVMMAHTNFGKERTLKEWEYVIKMAGFSSYTVKPIHAVQSVIMAFY

SEQ ID NO: 17279 - protein, 358 aa, Glycine max
MSSTRWEKEEEEEEEEAQMDIWKYIFGFVELAVIKCAIELGIAEAIEKHGSPMTLSEISSSLGCDTSHLKRIMRFLVQRKIFKGDGCSRGYSQSALSRRLMRNGEHSMASFLLLESSPVMLAPWHSLSARVMANGNPSFAKAHGEDVWRYAAANLDHSNLINEAMACDAKLVMPIIIQSCSEAFHGLKSLVDVGGGNGTAMRILAKACPSIRPINFDLPHVIALCDGDGDGVQHVSGDMFLSVPKADAAFLMWVLHDWSDEECIQILKKCREAISNSKENGRVIIVEAVIEGEGEGEGGKHDGLKDVGLMLDMVMMAHTNFGKERTLKEWEYVIKMAGFSSYTVKPIHAVQSVIMAFY

SEQ ID NO: 17280 - DNA, 1658 bp, Glycine max
acaaacacttgatagtactactcaaggtatggcttttcaagtgttgttcatttgtttgatctcaaccatcgtgtttgcatccatactatggagaaaacaaaacaaaaacaagacccttcttccaccgagtccaatgcccctacccatcattggacacctccaccttctttctccaacacctcaccaagattttcacaagctctcactccgctatggacccataatacacctttttcttggttcagtcccctgtgtggtggcttccacagcagaagccgccaaagagttcctcaaaactcacgaacccgccttctccaaccgccccgctaacactgtcgccgtcgaaaccttaacctacggtttccaagacttcttgttcgcaccctacggaccctattggaagttcatgaagaaactctgcatgtccgaactcctcggtggccacatgctggaccagtttcttcccgtgagacagcaagagacaaaaaaattcatcaaacgtgtcctccaaaagggtatttctggtgaggccgtggattttgggggagagttcatcacgctctcgaacaacatcgtgtcgagaatgatcgtgagtcagacgagtactactgaggacgagaacgaagttgaagagatgaggaagctggtgaaggatgccgcagagctctcggggaagttcaacatatcggacttcgtttcgttcttgaagcgctttgatttgcaggggttcaacaagaggctcgagaagattcgggactgctttgacaccgtgttggacagaatcataaagcaacgtgaagaggaaagaaggaacaagaatgaaaccgttggaaaacgagaatttaaggatatgcttgatgttttgtttgacatatctgaagatgagagttctgaaattaaattaaacaaagaaaacattaaggccttcatcttggacatattaattgctgggactgacacctcagctgtaacgatggaatgggctatggcagagttaatcaacaatccaggtgtgttggagaaggcaagacaagaaatggatgcagtggttggaaagagtagaatagtagaagaatcagatattgccaaccttccttacttgcaaggcattgttagagaaacattaagacttcacccagctggtccattgctttttagagagtcatctagaagagctgtggtttgtgggtatgatattccagcaaagactcgattatttgtcaatgtttgggctattggtagggaccccaatcactgggagaaccctcttgagtttaggccagagaggtttgttgaaaatgggaagagtcaattggatgttaggggacaacattatcatctacttccgttcggtagtgaaagaagagcatgtcctggtacttctttggcattgcaagttgtgcatgtgaatttggcagttctaattcagtgtttccaatggaaggttgactgtgacaatggcaaggtgaacatggaagaaaaggctggcatcactcttccgagggctcaccccataatttgtgtccctattcgaagacttaacccattccctgttgtgtgattgttttttattttaaacatcatttttccattcacgtatatgatatgatgtcatgtcaaacatttatgcactttttacataatatatttggggattc

SEQ ID NO: 17281 - protein, 519 aa, Glycine max
QTLDSTTQGMAFQVLFICLISTIVFASILWRKQNKNKTLLPPSPMPLPIIGHLHLLSPTPHQDFHKLSLRYGPIIHLFLGSVPCVVASTAEAAKEFLKTHEPAFSNRPANTVAVETLTYGFQDFLFAPYGPYWKFMKKLCMSELLGGHMLDQFLPVRQQETKKFIKRVLQKGISGEAVDFGGEFITLSNNIVSRMIVSQTSTTEDENEVEEMRKLVKDAAELSGKFNISDFVSFLKRFDLQGFNKRLEKIRDCFDTVLDRIIKQREEERRNKNETVGKREFKDMLDVLFDISEDESSEIKLNKENIKAFILDILIAGTDTSAVTMEWAMAELINNPGVLEKARQEMDAVVGKSRIVEESDIANLPYLQGIVRETLRLHPAGPLLFRESSRRAVVCGYDIPAKTRLFVNVWAIGRDPNHWENPLEFRPERFVENGKSQLDVRGQHYHLLPFGSERRACPGTSLALQVVHVNLAVLIQCFQWKVDCDNGKVNMEEKAGITLPRAHPIICVPIRRLNPFPVV

SEQ ID NO: 17282 - protein, 510 aa, Glycine max
MAFQVLFICLISTIVFASILWRKQNKNKTLLPPSPMPLPIIGHLHLLSPTPHQDFHKLSLRYGPIIHLFLGSVPCVVASTAEAAKEFLKTHEPAFSNRPANTVAVETLTYGFQDFLFAPYGPYWKFMKKLCMSELLGGHMLDQFLPVRQQETKKFIKRVLQKGISGEAVDFGGEFITLSNNIVSRMIVSQTSTTEDENEVEEMRKLVKDAAELSGKFNISDFVSFLKRFDLQGFNKRLEKIRDCFDTVLDRIIKQREEERRNKNETVGKREFKDMLDVLFDISEDESSEIKLNKENIKAFILDILIAGTDTSAVTMEWAMAELINNPGVLEKARQEMDAVVGKSRIVEESDIANLPYLQGIVRETLRLHPAGPLLFRESSRRAVVCGYDIPAKTRLFVNVWAIGRDPNHWENPLEFRPERFVENGKSQLDVRGQHYHLLPFGSERRACPGTSLALQVVHVNLAVLIQCFQWKVDCDNGKVNMEEKAGITLPRAHPIICVPIRRLNPFPVV

SEQ ID NO: 17283 - protein, 475 aa, Glycine max
MPLPIIGHLHLLSPTPHQDFHKLSLRYGPIIHLFLGSVPCVVASTAEAAKEFLKTHEPAFSNRPANTVAVETLTYGFQDFLFAPYGPYWKFMKKLCMSELLGGHMLDQFLPVRQQETKKFIKRVLQKGISGEAVDFGGEFITLSNNIVSRMIVSQTSTTEDENEVEEMRKLVKDAAELSGKFNISDFVSFLKRFDLQGFNKRLEKIRDCFDTVLDRIIKQREEERRNKNETVGKREFKDMLDVLFDISEDESSEIKLNKENIKAFILDILIAGTDTSAVTMEWAMAELINNPGVLEKARQEMDAVVGKSRIVEESDIANLPYLQGIVRETLRLHPAGPLLFRESSRRAVVCGYDIPAKTRLFVNVWAIGRDPNHWENPLEFRPERFVENGKSQLDVRGQHYHLLPFGSERRACPGTSLALQVVHVNLAVLIQCFQWKVDCDNGKVNMEEKAGITLPRAHPIICVPIRRLNPFPVV

SEQ ID NO: 17284 - DNA, 444 bp, Glycine max
tcacaacaccgagtccaaactaacccccggctgcaccagctcccattcctcgccggcgagctcaccggacacagcccgaagccaagatgactacttccaggcgccttgctgacaggaagacagcgaagttccagaagaacatcaccaagaggggttcggtgcctgaaaccactgtgaagaaggggaatgactatcctgttggacctatagtgcttggattcttcatctttgtggtcgtcggatcatctctgtttcagataatcaggacagcgagcagtggtgggatggcctgaacgccgtcatacattaatacagttgcagctaaattcgtttgatgtcgtcatagtttgtcttacttaaaagtacccagtttcagctgatgttgtaagaactgtaagagttatcaatcttatacatattaaacggacaagtttgtctctggtc

SEQ ID NO: 17285 - protein, 68 aa, Glycine max
MTTSRRLADRKTAKFQKNITKRGSVPETTVKKGNDYPVGPIVLGFFIFVVVGSSLFQIIRTASSGGMA

SEQ ID NO: 17286 - protein, 36 aa, Glycine max
HNTESKLTPGCTSSHSSPASSPDTARSQDDYFQAPC

SEQ ID NO: 17287 - DNA, 982 bp, Glycine max
tcaaaaaaaaaactttcaaatccctagaaagatgtcgacggaggaagaaaccaaggtggttgtcgagtcaggagacgccgaagcgacggtgacggagaagaagcctgctgcgaaaggcggcgctaaagctaagaagacgccggcgaagaagaagcctgctgctgctccgaggaagagaaccacttcgtctcaccctccttacgaagagatgatcaaagacgcgatcgtgacgctgaaggagagaaccggatctagccaatacgcgattcagaagttcatcgaggagaagcagaagtcgcttcctccaactttcaggaagcttctcctcgtcaatctcaggagactcgtcgcttccgggaagctagtcaaagtcaaagcctctttcaagattccgtctgcggctaaaccggcggctacgactaaaccggttaacaagaaaccagctgctgctgttactaaaccgaagggtaaagctcctgctaaggccaaaccggctgctaaaggagccaagaaacctgctgctgctgctaagcctaaggcaaagacaacagcaacaactaaagccgctgcgaagcccaaacctaagacgaagagtgtagctgctgtttcaaagaccaaggcggttgctgcgaagcctaaggcgaaggagagacctgttaaagcgtcgaggacttcgactaggacgtctccagggaagaaggcagcagctccggctaagaaagctgctgctgctgcgactaagaaggctccggctaagagtgtgaaggttaaatctccagcgaagagggcttcgacgaggaagaagtgattggttttagcttctcttagggttaaagtctttgtataattgaatcgtctatgaagggggcttgttttttcttcttccaaagtttatctttgtcttggtttcttctcgaaacccttttatcttgtaatttttggtttgtttgaaaattcaatagctatatgtgatggggtttgc

SEQ ID NO: 17288 - protein, 268 aa, Glycine max
QKKNFQIPRKMSTEEETKVVVESGDAEATVTEKKPAAKGGAKAKKTPAKKKPAAAPRKRTTSSHPPYEEMIKDAIVTLKERTGSSQYAIQKFIEEKQKSLPPTFRKLLLVNLRRLVASGKLVKVKASFKIPSAAKPAATTKPVNKKPAAAVTKPKGKAPAKAKPAAKGAKKPAAAAKPKAKTTATTKAAAKPKPKTKSVAAVSKTKAVAAKPKAKERPVKASRTSTRTSPGKKAAAPAKKAAAAATKKAPAKSVKVKSPAKRASTRKK

SEQ ID NO: 17289 - protein, 258 aa, Glycine max
MSTEEETKVVVESGDAEATVTEKKPAAKGGAKAKKTPAKKKPAAAPRKRTTSSHPPYEEMIKDAIVTLKERTGSSQYAIQKFIEEKQKSLPPTFRKLLLVNLRRLVASGKLVKVKASFKIPSAAKPAATTKPVNKKPAAAVTKPKGKAPAKAKPAAKGAKKPAAAAKPKAKTTATTKAAAKPKPKTKSVAAVSKTKAVAAKPKAKERPVKASRTSTRTSPGKKAAAPAKKAAAAATKKAPAKSVKVKSPAKRASTRKK

SEQ ID NO: 17290 - protein, 199 aa, Glycine max
MIKDAIVTLKERTGSSQYAIQKFIEEKQKSLPPTFRKLLLVNLRRLVASGKLVKVKASFKIPSAAKPAATTKPVNKKPAAAVTKPKGKAPAKAKPAAKGAKKPAAAAKPKAKTTATTKAAAKPKPKTKSVAAVSKTKAVAAKPKAKERPVKASRTSTRTSPGKKAAAPAKKAAAAATKKAPAKSVKVKSPAKRASTRKK

SEQ ID NO: 17291 - DNA, 774 bp, Glycine max
acataatgcgttctaaatttaattccagtagacccatgcacaccagaacacttccttctgcggcgggttgcttcctcctcttacgagcctttccattcactccatcgattcggtgggtgcgggtgctgcgaaaccgagctagaccctgatcggtgtcggcacaccgccggagaacaagatgatcgtctgcgtcgccgtcgtcggtcaccagaacaatccgctgtacattcagagcttcacggaggccgacgatgctcttaagctccaccacatcgtccattgctcgctcgatgtggtcgacgagcgagtgaacaatcctaaaaagtctggaccgatgcttaatgagacgtttttgggactgctttatcctattgaaaactacaaagtatatggatatctgactaatacgaaggtgaaatttatcttggtgaccacggatctggatgttaaagatgcggatgtaaggaattttttcaggaggttccattctgcatatgtagatgccgtttcaaacccattccatgtaccaggcaaaaagataacctccagaacttttgcagaaagagtgagcacaattgtcaagtcatttggcttgagttctgctgggtgaacatctataactggtgcctagtatgatgatgcttggttgatatttggcacaacttttcttttgttattctaagctcctgccttgtagttttagcagtggtaaatgcttaggaacattttgaacagaatcctattttcaatatatcatattcaaattgaaccatc

SEQ ID NO: 17292 - protein, 143 aa, Glycine max
MIVCVAVVGHQNNPLYIQSFTEADDALKLHHIVHCSLDVVDERVNNPKKSGPMLNETFLGLLYPIENYKVYGYLTNTKVKFILVTTDLDVKDADVRNFFRRFHSAYVDAVSNPFHVPGKKITSRTFAERVSTIVKSFGLSSAG

SEQ ID NO: 17293 - protein, 91 aa, Glycine max
MLNETFLGLLYPIENYKVYGYLTNTKVKFILVTTDLDVKDADVRNFFRRFHSAYVDAVSNPFHVPGKKITSRTFAERVSTIVKSFGLSSAG

SEQ ID NO: 17294 - DNA, 1281 bp, Glycine max
ataataatcacttggaaacaaccgcgctaaggttggaacttggaggaacttgtgtctgtgtgtccttttttccagagtcatggctatggctttgagtctctcccaattccctgttcgtgggtctgtttctttgcccaaaagaagactacccagaagaagcttttgcattaggggcatgtcagaaacctcttccacttcttctgtgagcacccaacaagaacaaccaacttctgataatgcttcttcagtgacaattgctcctccccctaacttcaagccccctgagcctaaacgctttgcaattaggcctgataagaccagtgaagtgtttggagctttgcttcctttgatctttcgttttgccactggagttttcgtttctgggtattctttttcaattgtttctaaggatgaaattcctacagacgaatatgctttggaacttaatggcgttaccataaaagaaacagcaaaattaggccctcgcccagagaagcctattgaaatatatgaatttgagagctgtccattttgccgaaaggttagagaaattgttgccattttggatcttgatgttcttttctatccttgtccaagaaatggcccaaatttccgtcaaaaggttctagagatgggtggcaaactgcagttcccctacatggttgacccaaacacaggcgcttcaatgtatgaatcagatgacataattcggtatttggttgacaaatatggcgatggaaacgttcctttatctttatcacttggatttttaacgacactaacggctggtcttggtatgcttagtcgtatttcaaaggggactacttatactccagcgaagttccctccaaagcctcttaaattatgggcatatgaggggtctcctttctgcaaacttgtacgtgaagtacttgtggaattggagctgccacacttgcttgtcagttgtgctaggggtagcccaaagagacatatactttatcagaaaactggaactttccaggcaccttttttggaagatccaaacactgggatagaaatgtttgaaagtgcagaaatcatagagtatctaagagcaacatacgctctttagtaagtgatgctatgatagggagaggcttgtaagggtttttaagtctcatgatatgcaccttcatttccttttgtaaatgtaattgctaatggttctaagttctaacgggtaaatcaaattttctctatatagaaatttcaaatagtggaatcaagtgcctcaatatttagcaatggtttgaggtggtt

SEQ ID NO: 17295 - protein, 337 aa, Glycine max
MAMALSLSQFPVRGSVSLPKRRLPRRSFCIRGMSETSSTSSVSTQQEQPTSDNASSVTIAPPPNFKPPEPKRFAIRPDKTSEVFGALLPLIFRFATGVFVSGYSFSIVSKDEIPTDEYALELNGVTIKETAKLGPRPEKPIEIYEFESCPFCRKVREIVAILDLDVLFYPCPRNGPNFRQKVLEMGGKLQFPYMVDPNTGASMYESDDIIRYLVDKYGDGNVPLSLSLGFLTTLTAGLGMLSRISKGTTYTPAKFPPKPLKLWAYEGSPFCKLVREVLVELELPHLLVSCARGSPKRHILYQKTGTFQAPFLEDPNTGIEMFESAEIIEYLRATYAL

SEQ ID NO: 17296 - protein, 335 aa, Glycine max
MALSLSQFPVRGSVSLPKRRLPRRSFCIRGMSETSSTSSVSTQQEQPTSDNASSVTIAPPPNFKPPEPKRFAIRPDKTSEVFGALLPLIFRFATGVFVSGYSFSIVSKDEIPTDEYALELNGVTIKETAKLGPRPEKPIEIYEFESCPFCRKVREIVAILDLDVLFYPCPRNGPNFRQKVLEMGGKLQFPYMVDPNTGASMYESDDIIRYLVDKYGDGNVPLSLSLGFLTTLTAGLGMLSRISKGTTYTPAKFPPKPLKLWAYEGSPFCKLVREVLVELELPHLLVSCARGSPKRHILYQKTGTFQAPFLEDPNTGIEMFESAEIIEYLRATYAL

SEQ ID NO: 17297 - protein, 305 aa, Glycine max
MSETSSTSSVSTQQEQPTSDNASSVTIAPPPNFKPPEPKRFAIRPDKTSEVFGALLPLIFRFATGVFVSGYSFSIVSKDEIPTDEYALELNGVTIKETAKLGPRPEKPIEIYEFESCPFCRKVREIVAILDLDVLFYPCPRNGPNFRQKVLEMGGKLQFPYMVDPNTGASMYESDDIIRYLVDKYGDGNVPLSLSLGFLTTLTAGLGMLSRISKGTTYTPAKFPPKPLKLWAYEGSPFCKLVREVLVELELPHLLVSCARGSPKRHILYQKTGTFQAPFLEDPNTGIEMFESAEIIEYLRATYAL

SEQ ID NO: 17298 - DNA, 1043 bp, Glycine max
attgtctcataaaaaaacaatcttctctttaaaacgatggagtgtagaccgttggatctgacgataatatccgcagaggacctcaaagacatccagctgatcggcaagcaagacctatacgccgtcgtttccctcaacaacgacgcaaggaccaagcagaagacaaaggtggacaaagactgcgggacgaaacctaagtggaagcatcagatgaagctcaccgtcgacgacacagcagcgcgtgagaaccatctcacacttgtcatccagatcgtcgctgatcgtcccatcgccggtgataaaccagtcggagaggttagcgttccgttgaaggagcttttggatcagaacaacaaggagggtgacgtggaggaggagaaaacggttacgtatgctgtgaagctgcctaacggtaagaccaaaggatctctcaagttctcgttcaagtttggtgagaagtacactttcgggtcttcgagtgatcctcacgcgcctggctcatcgagtgttgaccacaagtctacggatcagcccgtcgcagcttacccgcccggacaaggcgccccggctgcatacccggctcctccaggacatgatgataaacatggcggtgtttacggttacccacaggccggtggatatccgccacctggtggtcccggtggttatcctccagctgggcctggtgggtatccgcctcccggtgcatacccgcaacaaggtggatatccacctcaacaaggaggctacccgggttatccaccacagggtccaggctatgggtatccgccacagggtccaggttatgggtatccgccacagggtccgtatggttacccgcaacagcaagcttatggtggtcaaccgcagaaaccgaagaagcatggaggagctggaatgggtctagggcttggacttggagctgggctattgggtgggttgcttgttggtgaagcaattgatgacatggcagatatgggtgatatgggtgatttctgattgtgcttatctttatggtattagctttcaatttcttgttgttc

SEQ ID NO: 17299 - protein, 320 aa, Glycine max
MECRPLDLTIISAEDLKDIQLIGKQDLYAVVSLNNDARTKQKTKVDKDCGTKPKWKHQMKLTVDDTAARENHLTLVIQIVADRPIAGDKPVGEVSVPLKELLDQNNKEGDVEEEKTVTYAVKLPNGKTKGSLKFSFKFGEKYTFGSSSDPHAPGSSSVDHKSTDQPVAAYPPGQGAPAAYPAPPGHDDKHGGVYGYPQAGGYPPPGGPGGYPPAGPGGYPPPGAYPQQGGYPPQQGGYPGYPPQGPGYGYPPQGPGYGYPPQGPYGYPQQQAYGGQPQKPKKHGGAGMGLGLGLGAGLLGGLLVGEAIDDMADMGDMGDF

SEQ ID NO: 17300 - protein, 262 aa, Glycine max
MKLTVDDTAARENHLTLVIQIVADRPIAGDKPVGEVSVPLKELLDQNNKEGDVEEEKTVTYAVKLPNGKTKGSLKFSFKFGEKYTFGSSSDPHAPGSSSVDHKSTDQPVAAYPPGQGAPAAYPAPPGHDDKHGGVYGYPQAGGYPPPGGPGGYPPAGPGGYPPPGAYPQQGGYPPQQGGYPGYPPQGPGYGYPPQGPGYGYPPQGPYGYPQQQAYGGQPQKPKKHGGAGMGLGLGLGAGLLGGLLVGEAIDDMADMGDMGDF

SEQ ID NO: 17301 - DNA, 768 bp, Glycine max
gaattccatggcgacgagtgggtcagagacaaagcaagtgatggtgattggaatcgacgacagtgatttcagcacgtacgctctccaatggactctggatcacttgctatcccctgcaaatgttcctaagttcaagatttttcttgtttatgccaagccttctgttgcctctgctgtcggttttgttggccctggagccgctgaggtgttacctgttgttgaggccgatttgagaaaaacagctgccaaaatcactgaacgtgctacagaactatgcaagaagaaatccgtaaatgacgtagcagtggaagtgctagaaggtgatcctagaaatgttctttgcgaggcagtggaaaagcaccaagcttcaatgttggttgtgggtagtcatggttatgggactttaaaaagagcggttttaggtagtgtaagtgactattgtgctcatcatgctcactgcactgtcatgatcgtgaagaaaccaaagcacaaacactgatctcaatcgttggctccgattaaatagcagtgcacataaatcttttcagcaacagggaaaataaatgttcttaagaattcataatattgttttctgcatgcctagctgactttgtggtttaaggttcatttacttttttattttcaaagttacaacccacaaataatgtatgtaagcacaatactttttccttcacggccactggtggtgcttggtttattttgttcaagagcaatttatttaaataaatgtcactgttgtgtgtgtat

SEQ ID NO: 17302 - protein, 165 aa, Glycine max
NSMATSGSETKQVMVIGIDDSDFSTYALQWTLDHLLSPANVPKFKIFLVYAKPSVASAVGFVGPGAAEVLPVVEADLRKTAAKITERATELCKKKSVNDVAVEVLEGDPRNVLCEAVEKHQASMLVVGSHGYGTLKRAVLGSVSDYCAHHAHCTVMIVKKPKHKH

SEQ ID NO: 17303 - protein, 163 aa, Glycine max
MATSGSETKQVMVIGIDDSDFSTYALQWTLDHLLSPANVPKFKIFLVYAKPSVASAVGFVGPGAAEVLPVVEADLRKTAAKITERATELCKKKSVNDVAVEVLEGDPRNVLCEAVEKHQASMLVVGSHGYGTLKRAVLGSVSDYCAHHAHCTVMIVKKPKHKH

SEQ ID NO: 17304 - protein, 152 aa, Glycine max
MVIGIDDSDFSTYALQWTLDHLLSPANVPKFKIFLVYAKPSVASAVGFVGPGAAEVLPVVEADLRKTAAKITERATELCKKKSVNDVAVEVLEGDPRNVLCEAVEKHQASMLVVGSHGYGTLKRAVLGSVSDYCAHHAHCTVMIVKKPKHKH

SEQ ID NO: 17305 - DNA, 896 bp, Glycine max
acgagagacaccagcccaatcacagcgaatcgcccgctcgctgcacacactagaaagaagagccggcagccagcgacgctcgatagagcaagcaagccatggccggcctcctgctctcggccgccgttgcctgcgtccttctcgccggcgccgtgtccgcgtcgtcgtcgtcgtcgccgcgggtgttcaccgtcggcggcgacgagaggggctggcggcagccggcgcccggcgaggagacctacaaccactgggccaccaagaaccgcttccacgtcggcgatttcctccatttcaggtacgagaagaacgactcggtgctggtggtgacgcgcgacgactacaagcgctgtggcgcggacaggccggtgctccgcctcgagggcggcgaggcgaggttccggctcgagcggagcggcttcctctacttcatcagcggcgcgccgggccactgcgacgccggccagaggttcaccgtgcgcgtcatggcgcagagggacaacggccccgcctccccgacggaagcccccgccatgtgtcccggcgggtccttcaactccacgccgggggccggatcaggatccacgcgcacgccgccccgcggaaacgccggcgacgggaaggccagcggcgccgcacccatgcgcgcgcccttcggtggctatcacgccgttggcgctgctctggtagtgggtaccgccgtgctggtctttgcatgagatgctcgttgcgttgcatgcattgtgcgtgtgcaagctgttggtagtcttccaagatcgtagacagtctagaatcatttgcttaacttgtttgatttgttgtgccctttgtgtggtaggctggtagcatgttgtgttaattactagttattattacatacgtactagtttggacgg

SEQ ID NO: 17306 - protein, 254 aa, Glycine max
RETPAQSQRIARSLHTLERRAGSQRRSIEQASHGRPPALGRRCLRPSRRRRVRVVVVVAAGVHRRRRREGLAAAGARRGDLQPLGHQEPLPRRRFPPFQVREERLGAGGDARRLQALWRGQAGAPPRGRRGEVPARAERLPLLHQRRAGPLRRRPEVHRARHGAEGQRPRLPDGSPRHVSRRVLQLHAGGRIRIHAHAAPRKRRRREGQRRRTHARALRWLSRRWRCSGSGYRRAGLCMRCSLRCMHCACASCW

SEQ ID NO: 17307 - protein, 206 aa, Glycine max
MAGLLLSAAVACVLLAGAVSASSSSSPRVFTVGGDERGWRQPAPGEETYNHWATKNRFHVGDFLHFRYEKNDSVLVVTRDDYKRCGADRPVLRLEGGEARFRLERSGFLYFISGAPGHCDAGQRFTVRVMAQRDNGPASPTEAPAMCPGGSFNSTPGAGSGSTRTPPRGNAGDGKASGAAPMRAPFGGYHAVGAALVVGTAVLVFA

SEQ ID NO: 17308 - DNA, 1052 bp, Glycine max
aaaaaattaaagtactcgtgttcacctcgtgcccatccagattcttatcttctctcgaaaaaggttttagcgaagatgacgaagaactacccagctgttagcgaagagtaccagaaggctattgagaagtgcaagaggaagctgagaggcttgatcgctgagaagaactgtgcaccaatcatggttcgcctcgcatggcactcagctggaacattcgattgcgcctcgaggactggtggtcccttcggaacaatgaggtttgacgatgagctagctcatggagccaacaatggtctccacattgctcttaggttgttggagcctatcagggagcagttccctaccatctcccatgctgatttccatcagcttgctggtgttgtggctgttgaagtcaccggtggacctgaaattcctttccaccctggaagagaggacaagccccagccacctccagagggtcgtctccctgatgccacaaagggctgtgaccacttgaggcaggtcttcttaaagcagatgggtttaactgaccaggacattgtcgctttgtctggtgcccacactctgggaagatgccacaaggataggtctggcttcgaaggtgcctggacttcaaaccctcttattttcgacaactcttacttcaaggaacttttgagcggtgagaaggaaggtcttcttcagctcccctctgacaaggctctgttggacgatcccgttttccgtcctcttgttgagaaatacgctgctgacgaggaagcattttttgctgattacgctgaggcccacttgaagctttctgagctcgggtttgctgatgcttaagctgtgtcgttccttgtgtgatcccccgacactcatggctgtttttgggttggtggagggtttgcattacgtttgaacttttgtcatttgatttgcttaatgtactcggaaggatcttcgtagcttgttttttttttcgggtggtattatgagtttgtcgcagttctgttgctcttttgctatgatgctctcagacaattctaataaaacaattattctcagcc

SEQ ID NO: 17309 - protein, 275 aa, Glycine max
KKLKYSCSPRAHPDSYLLSKKVLAKMTKNYPAVSEEYQKAIEKCKRKLRGLIAEKNCAPIMVRLAWHSAGTFDCASRTGGPFGTMRFDDELAHGANNGLHIALRLLEPIREQFPTISHADFHQLAGVVAVEVTGGPEIPFHPGREDKPQPPPEGRLPDATKGCDHLRQVFLKQMGLTDQDIVALSGAHTLGRCHKDRSGFEGAWTSNPLIFDNSYFKELLSGEKEGLLQLPSDKALLDDPVFRPLVEKYAADEEAFFADYAEAHLKLSELGFADA

SEQ ID NO: 17310 - protein, 250 aa, Glycine max
MTKNYPAVSEEYQKAIEKCKRKLRGLIAEKNCAPIMVRLAWHSAGTFDCASRTGGPFGTMRFDDELAHGANNGLHIALRLLEPIREQFPTISHADFHQLAGVVAVEVTGGPEIPFHPGREDKPQPPPEGRLPDATKGCDHLRQVFLKQMGLTDQDIVALSGAHTLGRCHKDRSGFEGAWTSNPLIFDNSYFKELLSGEKEGLLQLPSDKALLDDPVFRPLVEKYAADEEAFFADYAEAHLKLSELGFADA

SEQ ID NO: 17311 - protein, 215 aa, Glycine max
MVRLAWHSAGTFDCASRTGGPFGTMRFDDELAHGANNGLHIALRLLEPIREQFPTISHADFHQLAGVVAVEVTGGPEIPFHPGREDKPQPPPEGRLPDATKGCDHLRQVFLKQMGLTDQDIVALSGAHTLGRCHKDRSGFEGAWTSNPLIFDNSYFKELLSGEKEGLLQLPSDKALLDDPVFRPLVEKYAADEEAFFADYAEAHLKLSELGFADA

SEQ ID NO: 17312 - DNA, 1396 bp, Glycine max
aaagcacaacaaaccgtagtcactttcgcattgtaagggaagtagaagcaattggtggtaatgtaggagcctcagcctctcgggagcaaatgggttatacatttgatgccttaaagacctatgttccacaaatggttgaattactggttgactgtgtaaggcacccagccttcttggattgggaagtcaatgaagagcttcggaaagtaaaagcagagcttggagaactctctaacaatccccagggcttgcttttggaagcaattcactctgctggttattctggtgcattggcttatcctcttttggctcctgaagcagcactaaacagattggatggccccagtttagaggaatttgttgctgagaattacacagcacctagaatggtacttgcagcatctggggttgagcacgaagagcttctatctattgctgagccacttctctctgatctaccaaaggttccctgtcctgaaraaccaaagtctgtctatgtcgggggtgattttcgtcgtcatggtgaagggggtacacatgttgctattgcttttgaagtgcctggtggctggcaaaaggagaaagatgctattgttttgactgttttacagatgcttatgggaggaggtgggtcattctcagcaggggggcctggaaaagggatgcactcaaggctatatcttaatgtgctgaatgaatatcagcagattcaatctttttctgcattcaacagtatcttcaataatacaggactgtttggcatttatgcaagcactagccctgattttgtgccaaaaactgttgatatagcagccaaagaactaatagcaattgcttcccctggacaagttacacaggtacagcttgaccgagccaaaaaatccacaaagtctgcagttctaatgaatctggaatctagaatgattgcatcagaagatatagggaggcagattttgacttatggagaaaggaagcctgtggaacagttcttgaaggctgtagatgaaatcacgttgaatgatatcactaaaattgctcaaaagattatttcctcacctttgaccatggcatcatatggggatgtcatgaatgtgccaagttatgaatctgttaacagcaagttccatgcaaaatgaaattgcatgtgatccaccagctcattatattttctggatcacaagcatgcctacttcaaattttcgagagcaatatacaccgaatcagcaatgctgaaaataaatcccagagaagtttttgtgcggacctgaggaaccatttattcaggttccatgttttttttaatttttttttatataacgatttgccttagtgtattaggtgcatggtctcatgattaatgctcacctcaattttttatttatgaattaattttctc

SEQ ID NO: 17313 - protein, 377 aa, Glycine max
  misc_feature (160)..(160): Xaa can be any naturally occurring amino acid
STTNRSHFRIVREVEAIGGNVGASASREQMGYTFDALKTYVPQMVELLVDCVRHPAFLDWEVNEELRKVKAELGELSNNPQGLLLEAIHSAGYSGALAYPLLAPEAALNRLDGPSLEEFVAENYTAPRMVLAASGVEHEELLSIAEPLLSDLPKVPCPEXPKSVYVGGDFRRHGEGGTHVAIAFEVPGGWQKEKDAIVLTVLQMLMGGGGSFSAGGPGKGMHSRLYLNVLNEYQQIQSFSAFNSIFNNTGLFGIYASTSPDFVPKTVDIAAKELIAIASPGQVTQVQLDRAKKSTKSAVLMNLESRMIASEDIGRQILTYGERKPVEQFLKAVDEITLNDITKIAQKIISSPLTMASYGDVMNVPSYESVNSKFHAK

SEQ ID NO: 17314 - protein, 348 aa, Glycine max
  misc_feature (131)..(131): Xaa can be any naturally occurring amino acid
MGYTFDALKTYVPQMVELLVDCVRHPAFLDWEVNEELRKVKAELGELSNNPQGLLLEAIHSAGYSGALAYPLLAPEAALNRLDGPSLEEFVAENYTAPRMVLAASGVEHEELLSIAEPLLSDLPKVPCPEXPKSVYVGGDFRRHGEGGTHVAIAFEVPGGWQKEKDAIVLTVLQMLMGGGGSFSAGGPGKGMHSRLYLNVLNEYQQIQSFSAFNSIFNNTGLFGIYASTSPDFVPKTVDIAAKELIAIASPGQVTQVQLDRAKKSTKSAVLMNLESRMIASEDIGRQILTYGERKPVEQFLKAVDEITLNDITKIAQKIISSPLTMASYGDVMNVPSYESVNSKFHAK

SEQ ID NO: 17315 - protein, 334 aa, Glycine max
  misc_feature (117)..(117): Xaa can be any naturally occurring amino acid
MVELLVDCVRHPAFLDWEVNEELRKVKAELGELSNNPQGLLLEAIHSAGYSGALAYPLLAPEAALNRLDGPSLEEFVAENYTAPRMVLAASGVEHEELLSIAEPLLSDLPKVPCPEXPKSVYVGGDFRRHGEGGTHVAIAFEVPGGWQKEKDAIVLTVLQMLMGGGGSFSAGGPGKGMHSRLYLNVLNEYQQIQSFSAFNSIFNNTGLFGIYASTSPDFVPKTVDIAAKELIAIASPGQVTQVQLDRAKKSTKSAVLMNLESRMIASEDIGRQILTYGERKPVEQFLKAVDEITLNDITKIAQKIISSPLTMASYGDVMNVPSYESVNSKFHAK

SEQ ID NO: 17316 - DNA, 1209 bp, Glycine max
acacactctgcagtgaaacaccctgctccaaactccttcgatggaaaacatccagcacagtcacgtggaagttaagggactaaagctccatgttgctgagattggaagtggtcaaaaggcactggttttcttacatggattcccagaaatatggtatacatggaggcaccagatgattgctgcagcaaatgctggctaccgggctattgcctttgatttcagaggctatggactttctgagcatcctgcggagccagaaaaagcaaacttacttgaccttgttgatgatgtcgtgggtctgttggattcattaagcattaccaaggctgtgcttgttggtaaggactttggtgcctttccagcgtatattgttgccgctctccatccagacaaagtagattcagtcataatgttaggtgttccattcatgcttccaggtccctctgctattcagaacctcccaaaaggctcctacgttattaagtggcaggagcctgggagggcagaagcagattttggccgctttgatgttaagtcagttataaggaacatctacacactcttctctggaagtgagataccaatagcaggtgataatcaggaaatcatggatttgtatgacccaactactcccctgccaccatggttctctgaggaagacctggcaacctatgcatcactatacgaaaaatctggcttcagatttgcattgcaggttccatacaggactcttggagtggatagtggcataagtgatcctaaaatcacagttccggcactgctgatcatgggtgagaaagactatgtcttcaagtgttttggaatggaggactacatccgaagtggcgcagtgaaacattttgtgccagacttggaaatcatatatattccagaaggaagccattttgtgcatgaacaatttcctgagaaggtgaaccagctcatcattgaattccttaacaaacaaagcatttgattgtctgatctgaagctcagagtaggatgcaatattgtataagaagcaactctctgtggcgggatgatttttaaggaatcacttatttccaaataaggcaataagtaacttgaatgagtacttattcgatagaactttgatctacactctacagacattttgataaatactatgtaattcgtatagaattgcttttgctctatcctcaacattaatgatcaatcatctcattg

SEQ ID NO: 17317 - protein, 311 aa, Glycine max
MENIQHSHVEVKGLKLHVAEIGSGQKALVFLHGFPEIWYTWRHQMIAAANAGYRAIAFDFRGYGLSEHPAEPEKANLLDLVDDVVGLLDSLSITKAVLVGKDFGAFPAYIVAALHPDKVDSVIMLGVPFMLPGPSAIQNLPKGSYVIKWQEPGRAEADFGRFDVKSVIRNIYTLFSGSEIPIAGDNQEIMDLYDPTTPLPPWFSEEDLATYASLYEKSGFRFALQVPYRTLGVDSGISDPKITVPALLIMGEKDYVFKCFGMEDYIRSGAVKHFVPDLEIIYIPEGSHFVHEQFPEKVNQLIIEFLNKQSI

SEQ ID NO: 17318 - protein, 267 aa, Glycine max
MIAAANAGYRAIAFDFRGYGLSEHPAEPEKANLLDLVDDVVGLLDSLSITKAVLVGKDFGAFPAYIVAALHPDKVDSVIMLGVPFMLPGPSAIQNLPKGSYVIKWQEPGRAEADFGRFDVKSVIRNIYTLFSGSEIPIAGDNQEIMDLYDPTTPLPPWFSEEDLATYASLYEKSGFRFALQVPYRTLGVDSGISDPKITVPALLIMGEKDYVFKCFGMEDYIRSGAVKHFVPDLEIIYIPEGSHFVHEQFPEKVNQLIIEFLNKQSI

SEQ ID NO: 17319 - protein, 188 aa, Glycine max
MLGVPFMLPGPSAIQNLPKGSYVIKWQEPGRAEADFGRFDVKSVIRNIYTLFSGSEIPIAGDNQEIMDLYDPTTPLPPWFSEEDLATYASLYEKSGFRFALQVPYRTLGVDSGISDPKITVPALLIMGEKDYVFKCFGMEDYIRSGAVKHFVPDLEIIYIPEGSHFVHEQFPEKVNQLIIEFLNKQSI

SEQ ID NO: 17320 - DNA, 1150 bp, Glycine max
acccaccaccgcgcctcagctcacgcatctctctcggctccggcaagcaagcaccagcgctctcctctcccctcgcttcctcgctgcaatgtcgaccgacgtggccgccgatgtcccggcccctgaggtggaggtggccgccgaccccgtcgtggagaccacggccgaggccgccgccggcgacgcgaagccggccaaggagaccaaggccaaggcggccaaggccaagaagccctccgccccgaggaagccccgcgccacccccgcccacccgacctacgccgagatggtgtcggaggccatcaccgccctgaaggagcggacggggtcgagccagtacgccatcgccaagttcgtcgaggacaagcacaaggcgcacctcccggccaacttccgcaagattctgtcggtgcagctcaagaagctggtcgcctccggcaagctgaccaaggtcaaggcctcgtacaagctgtcggccgccgcggccaagcccaagccggcggcgaagaagaagcccgcggcgaagaagaaggcgccagccaagaagaccgccaccaagaccaaggccaaggcgcccgccaagaaggccgccgcgaagcccaaggccaaggcgcccgccaagcccaaggccgccgcgaagcccaaggccgccgcgaagcccaaggccaaggccgccgcgaagcccaaggctgccgccaagcccaagggccgccccgccaaggctgccaagacctcggccaaggacgcgccagggaagaaggcccctgccgccgcggcgcccaagaaggccgccgccaggaagccgcccaccaagagatccacgccggtgaagaaggccgcgcccgccaagaaggctgcgccggcgaagaaggccccggccgccaagaaggccaagaagtagatccttggagggagatcctagggcttggcgatagttttccagtagcagtttttcctgttctgtgctgttagtcgagatgtccgggctgtgtcgggggtgctaggctgtaaatttgaaatctgggttggggtgcactggtgatcctgtgcacccctttgtgtgtgttgtgagaaacggtggcgacgatcgcgttgtagcaagcttatgtatttgtgtaactgaattgggtaattgaatcttcattttagc

SEQ ID NO: 17321 - protein, 299 aa, Glycine max
PTTAPQLTHLSRLRQASTSALLSPRFLAAMSTDVAADVPAPEVEVAADPVVETTAEAAAGDAKPAKETKAKAAKAKKPSAPRKPRATPAHPTYAEMVSEAITALKERTGSSQYAIAKFVEDKHKAHLPANFRKILSVQLKKLVASGKLTKVKASYKLSAAAAKPKPAAKKKPAAKKKAPAKKTATKTKAKAPAKKAAAKPKAKAPAKPKAAAKPKAAAKPKAKAAAKPKAAAKPKGRPAKAAKTSAKDAPGKKAPAAAAPKKAAARKPPTKRSTPVKKAAPAKKAAPAKKAPAAKKAKK

SEQ ID NO: 17322 - protein, 270 aa, Glycine max
MSTDVAADVPAPEVEVAADPVVETTAEAAAGDAKPAKETKAKAAKAKKPSAPRKPRATPAHPTYAEMVSEAITALKERTGSSQYAIAKFVEDKHKAHLPANFRKILSVQLKKLVASGKLTKVKASYKLSAAAAKPKPAAKKKPAAKKKAPAKKTATKTKAKAPAKKAAAKPKAKAPAKPKAAAKPKAAAKPKAKAAAKPKAAAKPKGRPAKAAKTSAKDAPGKKAPAAAAPKKAAARKPPTKRSTPVKKAAPAKKAAPAKKAPAAKKAKK

SEQ ID NO: 17323 - protein, 204 aa, Glycine max
MVSEAITALKERTGSSQYAIAKFVEDKHKAHLPANFRKILSVQLKKLVASGKLTKVKASYKLSAAAAKPKPAAKKKPAAKKKAPAKKTATKTKAKAPAKKAAAKPKAKAPAKPKAAAKPKAAAKPKAKAAAKPKAAAKPKGRPAKAAKTSAKDAPGKKAPAAAAPKKAAARKPPTKRSTPVKKAAPAKKAAPAKKAPAAKKAKK

SEQ ID NO: 17324 - DNA, 901 bp, Glycine max
aaccacacactgccttgttcatctcgaacataaatcaagagcatatcattctttgtgagctttattgatctaaaccaatggcgaactcgacgattcttcttgattactggccaagcatgttctgtatgagggctagagtcgcgttgagggagaaaggtgttgtgttcgaggccagagaagaggatctcacgaacaagagccctttgctcctccagagtaatccgattcacaagaaggtcccggttctgatccacaacggtaaaccggtttgcgagtccctcaatgttgtccagtacgtggacgaggcttggtctgacaagaacccattcttcccttctgatccttacgggaaagctcaggctaggttttgggctgatttcgtggacaagaagtttagtgatgcccaattcaagatatggggaaagaaaggtgaggaacaagcagcaggggtgaaggagtttattgaggcagtgaagattcttgaagctgagcttggagacaaaccttactttggtggagatagctttggatatgtagacattgcactgattacattctacagttggttcggagcatacgagaagtttggtaacttcagcatcgaggcagagagtccaaaactgattgcttgggctaagaggtgtatggagaaagagagtgtgtctaagtctctccctgaccaagagaaaattgttgcgtacgccgctgagtttaggaagaataatctctgatctgaataaaaccttgtttgtgccttctgtttcggatgatgctgtagtctgtttttaactgtggtttttgtgtgtttcctaataatgcgtgagggcaagcgtcggcctttgtgtggtggtgttgtatggatcctgagtaatgcatttttaaataaaatatattttcaaat

SEQ ID NO: 17325 - protein, 217 aa, Glycine max
MANSTILLDYWPSMFCMRARVALREKGVVFEAREEDLTNKSPLLLQSNPIHKKVPVLIHNGKPVCESLNVVQYVDEAWSDKNPFFPSDPYGKAQARFWADFVDKKFSDAQFKIWGKKGEEQAAGVKEFIEAVKILEAELGDKPYFGGDSFGYVDIALITFYSWFGAYEKFGNFSIEAESPKLIAWAKRCMEKESVSKSLPDQEKIVAYAAEFRKNNL

SEQ ID NO: 17326 - protein, 204 aa, Glycine max
MFCMRARVALREKGVVFEAREEDLTNKSPLLLQSNPIHKKVPVLIHNGKPVCESLNVVQYVDEAWSDKNPFFPSDPYGKAQARFWADFVDKKFSDAQFKIWGKKGEEQAAGVKEFIEAVKILEAELGDKPYFGGDSFGYVDIALITFYSWFGAYEKFGNFSIEAESPKLIAWAKRCMEKESVSKSLPDQEKIVAYAAEFRKNNL

SEQ ID NO: 17327 - protein, 201 aa, Glycine max
MRARVALREKGVVFEAREEDLTNKSPLLLQSNPIHKKVPVLIHNGKPVCESLNVVQYVDEAWSDKNPFFPSDPYGKAQARFWADFVDKKFSDAQFKIWGKKGEEQAAGVKEFIEAVKILEAELGDKPYFGGDSFGYVDIALITFYSWFGAYEKFGNFSIEAESPKLIAWAKRCMEKESVSKSLPDQEKIVAYAAEFRKNNL

SEQ ID NO: 17328 - DNA, 1733 bp, Glycine max
acttaataaaccatctcattctcctccaattccctaaaatggccactctttcctcctacgaccacttcatcttcactgccttagctttcttcatatctggcctaattttcttcctcaaacagaaatccaaatccaaaaagttcaacctccctccaggaccccccgggtggcctattgttgggaacctcttccaagttgctcgttctgggaaacctttctttgagtatgtgaacgatgtgagactcaaatatggctcaatcttcaccctcaagatgggaacaaggaccatgatcatcctcaccgacgcaaaactggtccacgaggccatgatccaaaagggtgcaacctacgccaccaggccccccgagaaccccaccagaaccatcttcagtgaaaacaagttcaccgtgaatgcagcgacctatggccccgtgtggaagtcgctgaggaggaacatggtgcagaacatgctcagctcaacaagacttaaggagtttcgcagtgttcgggacaatgcgatggacaagctcatcaacagactcaaggacgaggccgagaagaataacggcgtggtttgggtgctcaaggatgccaggtttgctgttttttgcatacttgtggctatgtgttttggtcttgagattgatgaggagacagtggagagaatagatcaggttatgaagagtgttctcatcactttggacccgagaattgatgactatcttccaattctaagcccctttttctcaaagcaaagaaagaaagccttggaggttcgcagagaacaggttgagttcttagttccaattatagaacaaagaagaagagcaattcaaaaccctgggtcagatcacaccgccacaacgttttcctacctagacacactttttgacctcaaagttgaagggaagaaatcagcaccctctgatgcagaattggtgtctttatgctcagagtttcttaacggtggcacagacacaacagcaacagcggttgagtggggcatagcacagctcatagcgaaccctaacgttcagacaaagctgtacgaggaaataaagagaacggtgggagagaagaaggtggatgaaaaggacgttgagaaaatgccatacctacacgctgtggtgaaggagcttctaagaaagcaccctccaacacactttgtgctaacacatgctgtgactgagcccaccactttgggagggtatgacataccaattgatgcaaatgttgaggtgtacacaccagccattgctgaggaccccaaaaattggttaaaccctgagaagtttgaccctgagagattcatctctgggggtgaggaagcagacataactggggtcacaggggtgaagatgatgccatttggggttgggagaaggatttgccctggcttggctatggccacagtgcatattcacctcatgatggcaaggatggtgcaggagtttgagtggggtgcataccctccagagaagaagatggatttcactggcaagtgggagttcactgtggtcatgaaggagtctctaagagcaaccatcaaaccaagaggaggagaaaaagtgaagttgtaaaattttcctgcttctattcttctgggttttaaatttcacagacaacataaatattattgctattatcatcatcatatatgtatacatcatcatggtttgtggttgatttgcatacagagtactgcaagtttcatcccatcattatattgtctc

SEQ ID NO: 17329 - protein, 525 aa, Glycine max
LINHLILLQFPKMATLSSYDHFIFTALAFFISGLIFFLKQKSKSKKFNLPPGPPGWPIVGNLFQVARSGKPFFEYVNDVRLKYGSIFTLKMGTRTMIILTDAKLVHEAMIQKGATYATRPPENPTRTIFSENKFTVNAATYGPVWKSLRRNMVQNMLSSTRLKEFRSVRDNAMDKLINRLKDEAEKNNGVVWVLKDARFAVFCILVAMCFGLEIDEETVERIDQVMKSVLITLDPRIDDYLPILSPFFSKQRKKALEVRREQVEFLVPIIEQRRRAIQNPGSDHTATTFSYLDTLFDLKVEGKKSAPSDAELVSLCSEFLNGGTDTTATAVEWGIAQLIANPNVQTKLYEEIKRTVGEKKVDEKDVEKMPYLHAVVKELLRKHPPTHFVLTHAVTEPTTLGGYDIPIDANVEVYTPAIAEDPKNWLNPEKFDPERFISGGEEADITGVTGVKMMPFGVGRRICPGLAMATVHIHLMMARMVQEFEWGAYPPEKKMDFTGKWEFTVVMKESLRATIKPRGGEKVKL

SEQ ID NO: 17330 - protein, 513 aa, Glycine max
MATLSSYDHFIFTALAFFISGLIFFLKQKSKSKKFNLPPGPPGWPIVGNLFQVARSGKPFFEYVNDVRLKYGSIFTLKMGTRTMIILTDAKLVHEAMIQKGATYATRPPENPTRTIFSENKFTVNAATYGPVWKSLRRNMVQNMLSSTRLKEFRSVRDNAMDKLINRLKDEAEKNNGVVWVLKDARFAVFCILVAMCFGLEIDEETVERIDQVMKSVLITLDPRIDDYLPILSPFFSKQRKKALEVRREQVEFLVPIIEQRRRAIQNPGSDHTATTFSYLDTLFDLKVEGKKSAPSDAELVSLCSEFLNGGTDTTATAVEWGIAQLIANPNVQTKLYEEIKRTVGEKKVDEKDVEKMPYLHAVVKELLRKHPPTHFVLTHAVTEPTTLGGYDIPIDANVEVYTPAIAEDPKNWLNPEKFDPERFISGGEEADITGVTGVKMMPFGVGRRICPGLAMATVHIHLMMARMVQEFEWGAYPPEKKMDFTGKWEFTVVMKESLRATIKPRGGEKVKL

SEQ ID NO: 17331 - protein, 435 aa, Glycine max
MGTRTMIILTDAKLVHEAMIQKGATYATRPPENPTRTIFSENKFTVNAATYGPVWKSLRRNMVQNMLSSTRLKEFRSVRDNAMDKLINRLKDEAEKNNGVVWVLKDARFAVFCILVAMCFGLEIDEETVERIDQVMKSVLITLDPRIDDYLPILSPFFSKQRKKALEVRREQVEFLVPIIEQRRRAIQNPGSDHTATTFSYLDTLFDLKVEGKKSAPSDAELVSLCSEFLNGGTDTTATAVEWGIAQLIANPNVQTKLYEEIKRTVGEKKVDEKDVEKMPYLHAVVKELLRKHPPTHFVLTHAVTEPTTLGGYDIPIDANVEVYTPAIAEDPKNWLNPEKFDPERFISGGEEADITGVTGVKMMPFGVGRRICPGLAMATVHIHLMMARMVQEFEWGAYPPEKKMDFTGKWEFTVVMKESLRATIKPRGGEKVKL

SEQ ID NO: 17332 - DNA, 647 bp, Glycine max
gtggattaggttttaacttttatacatctcgtcgcgcaaacaacgaatcgagataaaaaaaaatggcgatgagaagagtatacagcgagatcaaaggcaagaaggtgaaggagcttcctgcctatttcaaatcgtcgttttcaacgcagtccgtgaagacgtatgtgaagaaaggtctcgataactacaacgacaagtacatccagaccagctccgtccagcctctcctccatatctgcttcggaggcatggccttctcttacctcgtcgctctccccaacgagcgtcgccacctcgagcaccagcagcatgccaaggagcacggtggccattgatctccagatgttggtttctgcgatgttggtgactgagcattgcacgtcttgttttttttcttcttgattctcctggattgatattattgttgatctaaaggaaaaccttttttttttttttttttcaaaactgatggttgatattgatgaataatgaaactgttgttttcttttgatcgtaataagctgtggattcggcattttgttttgtcttatttaagtgtttcagtttgatctatttgatacttgtatcaaagtagaacataatgtataatcgattatatcaccatctatctgagaaatatcagaacc

SEQ ID NO: 17333 - protein, 90 aa, Glycine max
MAMRRVYSEIKGKKVKELPAYFKSSFSTQSVKTYVKKGLDNYNDKYIQTSSVQPLLHICFGGMAFSYLVALPNERRHLEHQQHAKEHGGH

SEQ ID NO: 17334 - protein, 88 aa, Glycine max
MRRVYSEIKGKKVKELPAYFKSSFSTQSVKTYVKKGLDNYNDKYIQTSSVQPLLHICFGGMAFSYLVALPNERRHLEHQQHAKEHGGH

SEQ ID NO: 17335 - DNA, 1393 bp, Glycine max
tattttttaaaaatgtattgttatttgctgaataccttttataagcaggaagtcaggcatatatagtttcaagaaggcccatgaaagggcatggaagggagatgattcagttgggtgttcgaattgctgatgccccagcagaaggggaaaatatgacaggagcctccaaagatatgaatgtagaatctattccttccttgtttcaagatattattgagcgtatggtttcctcgcaagtaatgactgtgaagcctgattgctgcattgtggatttctataatgagggtgatcactcacaaccccacagttggccatcatggtatggaaggcctgtttatgtgctttttctgactgaatgtgaaatgacttttggaagagtaattgcctcagagcatcctggggattataggggcagtatcaagctttctctagttcctgggtcccttctggttatgcagggtaaatccagtgattttgctaagcatgctcttccttccacacgcaaacaacgcatactggttaccttcacaaagtcccaaccaagaaagtcactatcaagtgatgctcaacagcttgcctcggcagtagcatcttctcattggggtccaccgccaagccgatctcccaatcatgttcgtcatcacgtaggccccaagcattacgctacacttccaacaactggggtactgccagctccacccattcgaccacaaatggcagctcccgttggcatgcaaccattgtttgttgctgctccagttgtacctcccatgccattttctgcacctgtgccaatcccagctggttctaccggatggacagctgcacctcctccaaggcatcctcctcctcgagtccctgctcctggaacaggagtcttcctacctccatcgggctcaggtaattcatctcaacagttaccagcaagtactttggctgaagttaacccaagcacggaaactccaaccatgccggagaaggaaaatgggaaaattaatcataatagtacaagtgcttcaccaaaaggaaaagtgcaaaagcaagaatgcaatgggcatgctgatggaactcaagttgaaccagctctagagacacggctagatagcaatgacaaagctgcaccaagtcattgagctgtaccatacttatagagagagagagagagagagaggtaaagcttatcacacgaacacgataggctgtgaacttaacttgagtttgaagcaaatgtaaagcgcggcaacaggagatatcactatatatatactgcagaggagaacaagggaaggaggtagaacttttggttctctctgtaatcctttctttgctccattccttttttgttgtcttaaaatattaactattacaggaagggaaacccattcttaattcg

SEQ ID NO: 17336 - protein, 350 aa, Glycine max
MKGHGREMIQLGVRIADAPAEGENMTGASKDMNVESIPSLFQDIIERMVSSQVMTVKPDCCIVDFYNEGDHSQPHSWPSWYGRPVYVLFLTECEMTFGRVIASEHPGDYRGSIKLSLVPGSLLVMQGKSSDFAKHALPSTRKQRILVTFTKSQPRKSLSSDAQQLASAVASSHWGPPPSRSPNHVRHHVGPKHYATLPTTGVLPAPPIRPQMAAPVGMQPLFVAAPVVPPMPFSAPVPIPAGSTGWTAAPPPRHPPPRVPAPGTGVFLPPSGSGNSSQQLPASTLAEVNPSTETPTMPEKENGKINHNSTSASPKGKVQKQECNGHADGTQVEPALETRLDSNDKAAPSH

SEQ ID NO: 17337 - protein, 343 aa, Glycine max
MIQLGVRIADAPAEGENMTGASKDMNVESIPSLFQDIIERMVSSQVMTVKPDCCIVDFYNEGDHSQPHSWPSWYGRPVYVLFLTECEMTFGRVIASEHPGDYRGSIKLSLVPGSLLVMQGKSSDFAKHALPSTRKQRILVTFTKSQPRKSLSSDAQQLASAVASSHWGPPPSRSPNHVRHHVGPKHYATLPTTGVLPAPPIRPQMAAPVGMQPLFVAAPVVPPMPFSAPVPIPAGSTGWTAAPPPRHPPPRVPAPGTGVFLPPSGSGNSSQQLPASTLAEVNPSTETPTMPEKENGKINHNSTSASPKGKVQKQECNGHADGTQVEPALETRLDSNDKAAPSH

SEQ ID NO: 17338 - protein, 326 aa, Glycine max
MTGASKDMNVESIPSLFQDIIERMVSSQVMTVKPDCCIVDFYNEGDHSQPHSWPSWYGRPVYVLFLTECEMTFGRVIASEHPGDYRGSIKLSLVPGSLLVMQGKSSDFAKHALPSTRKQRILVTFTKSQPRKSLSSDAQQLASAVASSHWGPPPSRSPNHVRHHVGPKHYATLPTTGVLPAPPIRPQMAAPVGMQPLFVAAPVVPPMPFSAPVPIPAGSTGWTAAPPPRHPPPRVPAPGTGVFLPPSGSGNSSQQLPASTLAEVNPSTETPTMPEKENGKINHNSTSASPKGKVQKQECNGHADGTQVEPALETRLDSNDKAAPSH

SEQ ID NO: 17339 - DNA, 1103 bp, Glycine max
aaactgtaagcattaattttcgaaatgggaaaaaacgaaaaataacttttccaaattcatgacaaccgaatcacacaaaaactattttatatgctgtttttctgtttgaaggatcacacaaactagtaaccagaaaaatggcagaaacaaagttgagctccttcaaagacaaaagatggtcactccatggcatgacagctctagtgacaggaggcacacgaggcatagggtacgcaatagctgaagagttagcagaatttggggcagctgtgcatatttgtgcacgtaaacaacaagatattgataaatgtttagaagaatggaataagaaaggacttcccataacagggtcggcatgtgatgtactatctcgtgaccaacgtgaaaatttaatgaaaaatgttgcttcaatctttaacgggaagctcaacattctgataaacaatgctggaacaactacacctaagaatctcatagattatactgcagaagatgtaacgacaataatggaaactaattttgggtctagttaccacttatgtcaactagcacatccacttctaaaagcatctggatatgggagcatagtgtttatatcctccattgcaggtctgaaagctttgccttacagttctgtgtatgcatcctctaaaggagctatgaatcaattcactaagaacatagcattggaatgggcaaaggataatattcgcgcaaatgctgtggcaccggggactgttaagactgtacttctggattctatcatgaaagctgctgctgaagctgataaagccgttgagtatatagtgtctcaaacaccagttggtagacttggagatcccgaggacatatcaccactggttgttttcctttgccttccagctgcttcatacatcactggccagattattactgcggatgggggttacataatttaaagtgtaatgccaaaaataattataaaataaaataaatgcccaaaacataaatctcaagatcaactaggtttttaagaaggtccgaaactaatgattatctgtagttgttttaagtacaatatttcaagtgttataatgtttccaatgtgtgaagttctttttatc

SEQ ID NO: 17340 - protein, 266 aa, Glycine max
MAETKLSSFKDKRWSLHGMTALVTGGTRGIGYAIAEELAEFGAAVHICARKQQDIDKCLEEWNKKGLPITGSACDVLSRDQRENLMKNVASIFNGKLNILINNAGTTTPKNLIDYTAEDVTTIMETNFGSSYHLCQLAHPLLKASGYGSIVFISSIAGLKALPYSSVYASSKGAMNQFTKNIALEWAKDNIRANAVAPGTVKTVLLDSIMKAAAEADKAVEYIVSQTPVGRLGDPEDISPLVVFLCLPAASYITGQIITADGGYII

SEQ ID NO: 17341 - protein, 248 aa, Glycine max
MTALVTGGTRGIGYAIAEELAEFGAAVHICARKQQDIDKCLEEWNKKGLPITGSACDVLSRDQRENLMKNVASIFNGKLNILINNAGTTTPKNLIDYTAEDVTTIMETNFGSSYHLCQLAHPLLKASGYGSIVFISSIAGLKALPYSSVYASSKGAMNQFTKNIALEWAKDNIRANAVAPGTVKTVLLDSIMKAAAEADKAVEYIVSQTPVGRLGDPEDISPLVVFLCLPAASYITGQIITADGGYII

SEQ ID NO: 17342 - protein, 181 aa, Glycine max
MKNVASIFNGKLNILINNAGTTTPKNLIDYTAEDVTTIMETNFGSSYHLCQLAHPLLKASGYGSIVFISSIAGLKALPYSSVYASSKGAMNQFTKNIALEWAKDNIRANAVAPGTVKTVLLDSIMKAAAEADKAVEYIVSQTPVGRLGDPEDISPLVVFLCLPAASYITGQIITADGGYII

SEQ ID NO: 17343 - DNA, 813 bp, Glycine max
cctaaaaaatgtcccgattgctgtcgaaaaccctaattccccacgggagattcttcctccgtcgcttcaacgacgcggcttcgaagaaaacggcggcgccgagcctcgtctgtttcaaccgccgtccctattcatcgaaacctcatctgatcgagatcgacctggactcttcctcgtcagcgacttccaaggccgaagccgaagccgcggttctcaagaagctgaacgagttcgtacggaggatcgtcgttcagaactcgactcccgattggctccctttctccccaggatcctccttctgggtccctccgcaccaaaacaccgccgccaagatcgctaatttggtcgaccaggtgacgcatcctttgacggaggaggaggttctctccctgtcttctccttctggctggccttgctcctctttcttcactcctcctccagatgatgattcttcatctaaacaaagggtggaaggtagcacggagttgaacgttccggggaatgagatgctggaagtcaagctagcgcagtttcccgatccaatctacttgttggaacacggagatgatgatgagtgattttacatttccagctcacgtggaaggccagtcctgatgcatggtttgcgttgacaggctttggagaaaaaaagacagatgattctcgagactgatgaggttgtgtttgtatatacagttgcaagccgtggaattatatcgatgttttggctgtcttaacgctgtttgtgaactataaattatacagcttgatattaattaattaaaaccgtagcagacggtgcaacttcagatt

SEQ ID NO: 17344 - protein, 189 aa, Glycine max
MSRLLSKTLIPHGRFFLRRFNDAASKKTAAPSLVCFNRRPYSSKPHLIEIDLDSSSSATSKAEAEAAVLKKLNEFVRRIVVQNSTPDWLPFSPGSSFWVPPHQNTAAKIANLVDQVTHPLTEEEVLSLSSPSGWPCSSFFTPPPDDDSSSKQRVEGSTELNVPGNEMLEVKLAQFPDPIYLLEHGDDDE

SEQ ID NO: 17345 - protein, 112 aa, Glycine max
LKNVPIAVENPNSPREILPPSLQRRGFEENGGAEPRLFQPPSLFIETSSDRDRPGLFLVSDFQGRSRSRGSQEAERVRTEDRRSELDSRLAPFLPRILLLGPSAPKHRRQDR

SEQ ID NO: 17346 - DNA, 1137 bp, Glycine max
gactcctttcgcctcctcctcctcctcctctggattgcggcgcgacggcggccgtgagcgagcggtgctcctactcctcctccacgccctcgcgcccagatccgctccccaatggcgcggaacccggcctccagcgtctacgtaggcaacttggatgagaaggtgcctgaaagagtcttgtatgagattcttattcaggctggtcatgtagtagacctgcacataccatgtgacaaagaaactgggcgtcccaaaggttttgcttttgctgagtatgagacagacgcaattgctcagtatgctgttagacttttttcaggacttgttaggcttaatggtaaaacacttaaatttgcgctttctggacaagacaagccctcatcaaatggcaataatccagtaatgcctaaactcaaccctataccattaccaaagcagcctcagtttgtgcattctagtgatacgcttgtgtcgcataaaccagcatatccggtggtaaatggtgggattccacataatgttttttcacaaggctatcatccttacaatgttcaccctcaagcattaccaactcgacccgtgcatgagcaccgagagtttgtccatggtacgtatggttacaacagtcatgtatatggttctgttctgaatgctagctatggaggttatgttgtgaatgctgttggtcatcgagctgtgaggcaaccaatcatttacccatcctactaggttgtaggcaccaaattgcgggatctggtattcagagtaggcaggttaatcgtagcttcttggtccctcaaattctcagtagcatctttgttgtacccttgtacttcaattccctgcatgtaaatagggctggtatatccattttatcaacggtaagttggcaacggaaagctctgcccactacattgtacacctttgtacttgtctagcctggtacatcttttctctttcttggaattggaaaataaagaaatgcaacatcgtgggctgttttgcccccccactgactcggattatttgagctattcctaaagctccttttcatgtactcgaatgatcattgctgttacttacacagaagatgttgatgtctcagctccggggcctcatataattataaattcaagc

SEQ ID NO: 17347 - protein, 205 aa, Glycine max
MARNPASSVYVGNLDEKVPERVLYEILIQAGHVVDLHIPCDKETGRPKGFAFAEYETDAIAQYAVRLFSGLVRLNGKTLKFALSGQDKPSSNGNNPVMPKLNPIPLPKQPQFVHSSDTLVSHKPAYPVVNGGIPHNVFSQGYHPYNVHPQALPTRPVHEHREFVHGTYGYNSHVYGSVLNASYGGYVVNAVGHRAVRQPIIYPSY

SEQ ID NO: 17348 - protein, 108 aa, Glycine max
MPKLNPIPLPKQPQFVHSSDTLVSHKPAYPVVNGGIPHNVFSQGYHPYNVHPQALPTRPVHEHREFVHGTYGYNSHVYGSVLNASYGGYVVNAVGHRAVRQPIIYPSY

SEQ ID NO: 17349 - DNA, 973 bp, Glycine max
tttgaacagttcggtactagaaaagtttggcataaagtacaagaaaaatgcatggttttctgtggcaaaggatttttcagaggatctcatggtattgcatgactttgataagattcctgccttggtttccctgaatccacagtacaatgagcggaacacattctatggaccctttgaagaggattttttagaagattttgtaagacaaaacctgattcctttggctgtgcctgtatcctatgaaacactcaagttgatgaaagcagatggaaggaaaatagttttgacaattgttgaggatgaagatgaagaaacaacaagagagctgattaagttattgaaggctgcggcatctgcaaatcgtgacttaatatttggttacgttggagttaaacagatggaagaatttgctgaaaattttgatattgatactaaactaccaaaaatggtcatttgggataaaagtgatgattacctttcagttgttgattcagaaaccatagagggggaggaccaaggaactcaaatcactaaatttctcgaaggatacagggaaggaagaaccataaagaaaacatttagtggcccttcactaatgcgattcatccatcgatcctttgacattagaatggtgtacatcattgtttttgtggtggcagtactgatgctaattcagacattcagtaaaggaggtgatgaataccagagtgtacccaatcaagttcaaactgatcatgcaatcagttctgtttctgaagctgaaaacaatgagtataaacctggtgacaaggaagactaaaaattaacataatacattgataattaatgaacgtggtcaggagtattctagaaagtagctggctttagaattaccatacctattggtatgagtaaatattttgagtttgtgtatctccataattttgaatactgttcaaactcttgccttttgatttacacctttccactagtt

SEQ ID NO: 17350 - protein, 265 aa, Glycine max
LNSSVLEKFGIKYKKNAWFSVAKDFSEDLMVLHDFDKIPALVSLNPQYNERNTFYGPFEEDFLEDFVRQNLIPLAVPVSYETLKLMKADGRKIVLTIVEDEDEETTRELIKLLKAAASANRDLIFGYVGVKQMEEFAENFDIDTKLPKMVIWDKSDDYLSVVDSETIEGEDQGTQITKFLEGYREGRTIKKTFSGPSLMRFIHRSFDIRMVYIIVFVVAVLMLIQTFSKGGDEYQSVPNQVQTDHAISSVSEAENNEYKPGDKED

SEQ ID NO: 17351 - protein, 236 aa, Glycine max
MVLHDFDKIPALVSLNPQYNERNTFYGPFEEDFLEDFVRQNLIPLAVPVSYETLKLMKADGRKIVLTIVEDEDEETTRELIKLLKAAASANRDLIFGYVGVKQMEEFAENFDIDTKLPKMVIWDKSDDYLSVVDSETIEGEDQGTQITKFLEGYREGRTIKKTFSGPSLMRFIHRSFDIRMVYIIVFVVAVLMLIQTFSKGGDEYQSVPNQVQTDHAISSVSEAENNEYKPGDKED

SEQ ID NO: 17352 - protein, 180 aa, Glycine max
MKADGRKIVLTIVEDEDEETTRELIKLLKAAASANRDLIFGYVGVKQMEEFAENFDIDTKLPKMVIWDKSDDYLSVVDSETIEGEDQGTQITKFLEGYREGRTIKKTFSGPSLMRFIHRSFDIRMVYIIVFVVAVLMLIQTFSKGGDEYQSVPNQVQTDHAISSVSEAENNEYKPGDKED

SEQ ID NO: 17353 - DNA, 666 bp, Glycine max
agatttaagagaattcatttggagaaagtccctggccttgatgggacgaagattactgatattgctgccggagctgagcattctgtcattgtcacagagcatggagaaataaagacatggggttggggtgagcatggtcaacttggtttaggggatactcgcgaccaaaccagtcctgttacagtaagtctcgattatgatctgaatgaagctgcatcaattagagttttctgtggaagtgggttcacgtttgctgtaaccatgccctagagtctactcaaacttgattaaatgctaatttgatatgcatgtcaaaagaagttgccatcagcttggttctggttctgaacttccagtggcagtatatagactgatacatgccaagaaagtcttctgcttctcaaatattattttggaggctgcattgtgctggaaagccacaggctccataggcctctcacaaatttgagaactatgaaaggaggtgaatatgtatgatcctcttcccaaccatacaaaaaaaaaaaaaaaaaaaatagatagctattcatctctttccaatttatggactatgctagaacatggcaatgacattcccagtataagtgggtaactgttcgtcatatattattttccttgcaactataagattcaaatttttagtcc

SEQ ID NO: 17354 - protein, 89 aa, Glycine max
RFKRIHLEKVPGLDGTKITDIAAGAEHSVIVTEHGEIKTWGWGEHGQLGLGDTRDQTSPVTVSLDYDLNEAASIRVFCGSGFTFAVTMP

SEQ ID NO: 17355 - protein, 54 aa, Glycine max
MHVKRSCHQLGSGSELPVAVYRLIHAKKVFCFSNIILEAALCWKATGSIGLSQI

SEQ ID NO: 17356 - DNA, 1225 bp, Glycine max
ggtgagatatttgcaattatcttgggttgcaatggagggagtgttgcttcccgtgtgtccttcaccttcttcttgctctgcaactcctaaacccagaatccccattccgctacgctcttctttcccttctccattattacacaaccgtttcttctcccaaaacgcagcgttttcccttcgcaactctctccgcacttccaccttcgcactcgcgcaacacgaagctcccgttctgggcaaacccgataacaacaacaactcttcaccctatcttcccaaaatcgataagacgggacgcttctgcagccccagagccgccagagaactcgcactgtcgataatctatgctgcgtgcttggagggaatggacccggttcggctctttgagaaacggatgaatgcgcggcgagaagccggatataaatttaatgaggaaaagttgttggagtataatcatatgagtttcggagggccgcctgttactgttggatcggacgaagaagcaaatgagctactgcggcacattgaagaagagtctgccattgaagcagaagtccttacagctcctccaaagctggtatacaacaaactgattttaagattcaccaagaaactattggttgcagtcagggatacatgggacagtcatgtcctggtcattaacaaaattgccccacaaaattggaagaatgaaccagctgcgaagattttagagctgtctattcttcacttggccatgtccgaaatggaagtgctagaaacgagacaccaaatcgtcattaatgaggcggtagatcttgctaaacggttttgtgatggagcagcccctcgcatcattaacggctgtctccgcacatttttccgagaactggagcttgaagcatcgaataaccaggtttagttgaccttgatgtacattgtcagattgtctacacgttgtagttcttgggtcattgaaaagcttgacgtgcatttcaggaaatatcacctatgggggtttgataatttgcatattgacctgtagacaaggcctgagttaggaatcgtgttgtttgaaactggtagagttattatgacattttgtttttacagcagttattatgacattgcaatattgtaatcgtgtatatgtatattttatgtatgctagctcgtgggatttgtaataaattttgtttaagttaaagaacttttgaaatttaatttaattaagtacttttgaaac

SEQ ID NO: 17357 - protein, 299 aa, Glycine max
VRYLQLSWVAMEGVLLPVCPSPSSCSATPKPRIPIPLRSSFPSPLLHNRFFSQNAAFSLRNSLRTSTFALAQHEAPVLGKPDNNNNSSPYLPKIDKTGRFCSPRAARELALSIIYAACLEGMDPVRLFEKRMNARREAGYKFNEEKLLEYNHMSFGGPPVTVGSDEEANELLRHIEEESAIEAEVLTAPPKLVYNKLILRFTKKLLVAVRDTWDSHVLVINKIAPQNWKNEPAAKILELSILHLAMSEMEVLETRHQIVINEAVDLAKRFCDGAAPRIINGCLRTFFRELELEASNNQV

SEQ ID NO: 17358 - protein, 289 aa, Glycine max
MEGVLLPVCPSPSSCSATPKPRIPIPLRSSFPSPLLHNRFFSQNAAFSLRNSLRTSTFALAQHEAPVLGKPDNNNNSSPYLPKIDKTGRFCSPRAARELALSIIYAACLEGMDPVRLFEKRMNARREAGYKFNEEKLLEYNHMSFGGPPVTVGSDEEANELLRHIEEESAIEAEVLTAPPKLVYNKLILRFTKKLLVAVRDTWDSHVLVINKIAPQNWKNEPAAKILELSILHLAMSEMEVLETRHQIVINEAVDLAKRFCDGAAPRIINGCLRTFFRELELEASNNQV

SEQ ID NO: 17359 - protein, 178 aa, Glycine max
MDPVRLFEKRMNARREAGYKFNEEKLLEYNHMSFGGPPVTVGSDEEANELLRHIEEESAIEAEVLTAPPKLVYNKLILRFTKKLLVAVRDTWDSHVLVINKIAPQNWKNEPAAKILELSILHLAMSEMEVLETRHQIVINEAVDLAKRFCDGAAPRIINGCLRTFFRELELEASNNQV

SEQ ID NO: 17360 - DNA, 552 bp, Glycine max
aagcgaggttctgaatcaaagtatacaaaagcaatgcaatcaaaggacgaggatgatgagggtggtgtgggtttgggtttggaagacgaagacgaagaggaacatggagataccttgtgtggggcatgtggagagagctatgctgctgatgagttctggatttgctgcgacatctgcgagaaatggttccatggaaagtgcgtgaagattacccctgcaagggctgagcatatcaagcagtacaaatgtccttcttgcagcaacaagcgagctcgaccttgacaaacatggctaggatggtggtgactataatcttggcaattttatgactactaatttgtttagtaggtcaagtttattagtcttgctgtgaatttcaggtatattgtttcagatgttacattaggtatattatgagctgctgtcgattcatctaccattaggatgtttatttcataagtggacttgaatgttgttctgttatgtgtttctttaaattttatgtagctgtgtaactgtgttgtgtccatagcttattatctgccgtggtgt

SEQ ID NO: 17361 - protein, 93 aa, Glycine max
KRGSESKYTKAMQSKDEDDEGGVGLGLEDEDEEEHGDTLCGACGESYAADEFWICCDICEKWFHGKCVKITPARAEHIKQYKCPSCSNKRARP

SEQ ID NO: 17362 - protein, 82 aa, Glycine max
MQSKDEDDEGGVGLGLEDEDEEEHGDTLCGACGESYAADEFWICCDICEKWFHGKCVKITPARAEHIKQYKCPSCSNKRARP

SEQ ID NO: 17363 - protein, 67 aa, Glycine max
SEVLNQSIQKQCNQRTRMMRVVWVWVWKTKTKRNMEIPCVGHVERAMLLMSSGFAATSARNGSMESA

SEQ ID NO: 17364 - DNA, 1423 bp, Glycine max
gaatgtgatatgtcctctactcagggttctagtgaaggggttaagcaagaaaccaattcaattggtgagattgttaggactgatgtgagtaatttaatggaggatgttgcagtttcaatagattatcaaggttcatcagttgagggagagaaagagaatgaagaactggaaagcagattaggtagttcccagatagataaacatgaagaagttgtctgcgttgaacaaggaggaagtaaagaagaaagtcctaacactgaagctgaagatgtgaaggaaatttcacacaatgtgaacaatgagcctgcaaagacttcagaaaatgaagcaaaatatgtgacattggatcatccaaaggtatctaagaaggttacccctgtgaacagagaaagcaatgcaacaaaggcgaagaagaaatcgatgctatctacttctaagcctaaggcatcccaattttccacccctagaagttcaaagcctacatcaactcccaccaagacattggcatctgcctcttcaactaaaaggggaatttctccatccatatctgggaggaaaattaattccacttcagagaacagaaaagttccaaataaatctttgcacatgtcccttagcttggctccaagccaacctgatcctgcttcgcatactacaatgaggaaatctttgattatggagaaaatgggggataaggacatagtcaaacgagcattcaagactttccagaacaatttcaatcagccaaaaacttctggtgaaaacaaatctttggtaaaagaaaaggttccttcaaaggtgacagagtcaaggaatccaacatctataaccttgagaaaggaagatggacagtcacctaaggttgacagtatggatagaagaagtgtgaatgctgttcgaactgctttcggcctaaaaggtgacgttaaagcagagaaaggaaaagagtttccgagaaaaatagatgaaaaatttaattcaaaagaggtagaaagaacgcatcttcaactgaaatcaaagggggaaaagataaaacatatttccaaagccacacacttgccagcttttcactggggtcagaaagcatcaaaaagtcatccagaaaagggggatgttaagattgagaaatggaggtagcctaaaatcaagagatgggattgaatacatcagtgggcgtctaagatctatatgttcagaggaaatgcttatggctacaactcaagtcacactatggtgatattttagtttagactctagtctgcaacaggggaaaaattatctagttatataagactataggagcatatgaacaatgtgaggaggaggaggaaggactaaagcttcagttattcataataaatttcttgtgagaaataatattgtataactataatgtctaatatgagaaaatgtatgcatttct

SEQ ID NO: 17365 - protein, 378 aa, Glycine max
ECDMSSTQGSSEGVKQETNSIGEIVRTDVSNLMEDVAVSIDYQGSSVEGEKENEELESRLGSSQIDKHEEVVCVEQGGSKEESPNTEAEDVKEISHNVNNEPAKTSENEAKYVTLDHPKVSKKVTPVNRESNATKAKKKSMLSTSKPKASQFSTPRSSKPTSTPTKTLASASSTKRGISPSISGRKINSTSENRKVPNKSLHMSLSLAPSQPDPASHTTMRKSLIMEKMGDKDIVKRAFKTFQNNFNQPKTSGENKSLVKEKVPSKVTESRNPTSITLRKEDGQSPKVDSMDRRSVNAVRTAFGLKGDVKAEKGKEFPRKIDEKFNSKEVERTHLQLKSKGEKIKHISKATHLPAFHWGQKASKSHPEKGDVKIEKWR

SEQ ID NO: 17366 - protein, 375 aa, Glycine max
MSSTQGSSEGVKQETNSIGEIVRTDVSNLMEDVAVSIDYQGSSVEGEKENEELESRLGSSQIDKHEEVVCVEQGGSKEESPNTEAEDVKEISHNVNNEPAKTSENEAKYVTLDHPKVSKKVTPVNRESNATKAKKKSMLSTSKPKASQFSTPRSSKPTSTPTKTLASASSTKRGISPSISGRKINSTSENRKVPNKSLHMSLSLAPSQPDPASHTTMRKSLIMEKMGDKDIVKRAFKTFQNNFNQPKTSGENKSLVKEKVPSKVTESRNPTSITLRKEDGQSPKVDSMDRRSVNAVRTAFGLKGDVKAEKGKEFPRKIDEKFNSKEVERTHLQLKSKGEKIKHISKATHLPAFHWGQKASKSHPEKGDVKIEKWR

SEQ ID NO: 17367 - protein, 346 aa, Glycine max
MEDVAVSIDYQGSSVEGEKENEELESRLGSSQIDKHEEVVCVEQGGSKEESPNTEAEDVKEISHNVNNEPAKTSENEAKYVTLDHPKVSKKVTPVNRESNATKAKKKSMLSTSKPKASQFSTPRSSKPTSTPTKTLASASSTKRGISPSISGRKINSTSENRKVPNKSLHMSLSLAPSQPDPASHTTMRKSLIMEKMGDKDIVKRAFKTFQNNFNQPKTSGENKSLVKEKVPSKVTESRNPTSITLRKEDGQSPKVDSMDRRSVNAVRTAFGLKGDVKAEKGKEFPRKIDEKFNSKEVERTHLQLKSKGEKIKHISKATHLPAFHWGQKASKSHPEKGDVKIEKWR

SEQ ID NO: 17368 - DNA, 1224 bp, Glycine max
aatgaaaatggtctacaagtagatgcttcaatagccagtactttggtcctcatgtactgcaagagaggtgatcttgcccatgcaaaagaagcatttgaagtcttgacgagcctgggcttccaaccagacgcacatgtctacaactcaatgatcacagccttggtgaataatggccagcctaagttgggtgagaaattgatgagggacatggatgatagacatattccaatcacaaaggacatatacatggcattgctccgttctttttctcaacttggtgatgctgtaggagctgaacgaatttcaaacactatgcaatttgcaggaatccagcagggtatggatatggagacatccaccctgcttattgaggcaagtgcacttgctgttccttgtaaccctgatcaggcaagaagccattttgactacatgataaaattggggcataagcctgatgataggtgcaccgctagcatgatttcagcttatgagaagaaaactacttggacaatgctttaaatcttctattggaattagagaaggatgggtttgagcctggggttgccacttattctgttcttgtggactggttgggtaagttgcagcttgttgacgaggcagagcagcttttaggcaaaatagctctgctgggcgaggctcctccctttaagcttcaagtgagtctttgtgatatgtatgcaagggctggaaatgagaaaaaggcccttcaaagcctaggtgttctggaagctaggaaggatgaattaggtcaagctgagtttgagagaattttaagtggccttattgatggtgggtttcagaaggatgcacaaagaataagtcagatcatggaggcacagggttttgatgcatcaagggttaagtttaaactttcaaaacctgtctcaagagcaccgagttttagatgagtaggcccatttagtctttctctgccaagtgaccaacaaatgcgctgccttattaaggaagcatggtctgctggatgtatcataccatgtaacaaataaggatgagtttacgcttgtcagtttttcagttgtactgtgtttatgaatttttccattgttacaattttaccagtgctcagatcactgatttacatctcttattttgaactttggtcatctgtatatacaaatatcttttgtgacatgttcatggcattttctatttaatgtatacaatatttttttggtgtttgtc

SEQ ID NO: 17369 - protein, 172 aa, Glycine max
NENGLQVDASIASTLVLMYCKRGDLAHAKEAFEVLTSLGFQPDAHVYNSMITALVNNGQPKLGEKLMRDMDDRHIPITKDIYMALLRSFSQLGDAVGAERISNTMQFAGIQQGMDMETSTLLIEASALAVPCNPDQARSHFDYMIKLGHKPDDRCTASMISAYEKKTTWTML

SEQ ID NO: 17370 - protein, 155 aa, Glycine max
MYCKRGDLAHAKEAFEVLTSLGFQPDAHVYNSMITALVNNGQPKLGEKLMRDMDDRHIPITKDIYMALLRSFSQLGDAVGAERISNTMQFAGIQQGMDMETSTLLIEASALAVPCNPDQARSHFDYMIKLGHKPDDRCTASMISAYEKKTTWTML

SEQ ID NO: 17371 - protein, 123 aa, Glycine max
MITALVNNGQPKLGEKLMRDMDDRHIPITKDIYMALLRSFSQLGDAVGAERISNTMQFAGIQQGMDMETSTLLIEASALAVPCNPDQARSHFDYMIKLGHKPDDRCTASMISAYEKKTTWTML

SEQ ID NO: 17372 - DNA, 1863 bp, Glycine max
aaaacccctactcctcctcctccgctgccgccgccagatcacgacgacggcccaatggtgggaccgccgccgcctccgcccacagctgccgacgaagaagaagacgacgacgacgccgagatgattggcccgcccccgcctccgccgatcgcgtcggagtccgaagacgattcggatcaagatgaggtaggaacccgcttccggattcccctcagcaacgagattgtactcaagggccacaccaaggttgtgtcagctcttgctgtggaccacacgggatcaagagtgctttctggaagctatgactatatggtacgaatgtatgattttcaaggaatgaatgctcgtttggaatcgtttcgacagctggagccatttgaaggtcatcaagttcgcaatttaagctggagtccaactgcagatcgctttttgtgtgtgactggatcagctcaagcaaagatttatgatcgtgatgggcttactttgggagagtttgtgaaaggagacatgtatattcgtgatctaaagaataccaagggccacatatctggattgacatgtggagagtggcatcaaaaaactaaagagaccattttsaacatcatcagaggatggctcactgcgcatatgggatgtcaatgacttcaaaagtcagaagcaggtcattaaaccaaagcttgcgagacctggaagagttcctgtcaccacatgtgcatgggatcatgatggtaaatgcattgctggtggtataggagatggttcaattcagatttggaatattaagcctggatgggggagtaggccagatgtacatattgagaaaagtcatgaggatgatattagtggtctgaaattttcaagtgatgggagaatcttattgtcaaggagttttgatggttcattgaaggtttgggatctgcgcaaaacaaaagaaccattaaaagtatttgaggatctgccaaatcactatgcacaaacaaatattgccttcagtcctgatgagcgactctttttgactggaacatctgtggaaagggagagcatgacaggaggtttattgtgcttctttgatagagtaaatcttgagcttgtttcaaaagttggcatatcacccacttgtagtgttgttcagtgttcttggcatcccaaactgaatcagatctttgcaactactggtgataaaagccaaggtgggactcacatactatatgatccaaccgtaagtgaaagaggagctcttgtatgtgttgcacgtgcaccaaggaaaaaatcaattgatgactttgaggcaaaacctgtcattcacaatcctcatgctttaccactatttagagatcagcctagccgtaagcgtcagcgagagaaagtactaaaggatccattgaagtcccataagcctgaactacctatgacaggtcctggctttggtggacgagttggtactagtcaaggaagcttactgacccagtatcttctaaagaaaggtggtatgatcaaggagacatggatggaggaagatccaagggaagctatcctgaaatatgctgatgctgcagcaaaggatccaaagttcattgctccagcatatgcagaaacccaacctgagccagtttttgcaaagtcagattctgaggatgaggagaaatgatcgggttaccaagttattgtatcacaaagatggctaacaaggggacggtaggcaagagtgtactgtactttatttcgagaggctgggagaagtttcgctaatgcaatgatgctgttgaaattgtaacacctctaatgttttagtacctcatgtctgtaaattagtcatgtaaaattgaattttgcaaactataaaatgatacatttacgaatttt

SEQ ID NO: 17373 - protein, 213 aa, Glycine max
  misc_feature (199)..(199): Xaa can be any naturally occurring amino acid
KTPTPPPPLPPPDHDDGPMVGPPPPPPTAADEEEDDDDAEMIGPPPPPPIASESEDDSDQDEVGTRFRIPLSNEIVLKGHTKVVSALAVDHTGSRVLSGSYDYMVRMYDFQGMNARLESFRQLEPFEGHQVRNLSWSPTADRFLCVTGSAQAKIYDRDGLTLGEFVKGDMYIRDLKNTKGHISGLTCGEWHQKTKETIXNIIRGWLTAHMGCQ

SEQ ID NO: 17374 - protein, 201 aa, Glycine max
MTGGLLCFFDRVNLELVSKVGISPTCSVVQCSWHPKLNQIFATTGDKSQGGTHILYDPTVSERGALVCVARAPRKKSIDDFEAKPVIHNPHALPLFRDQPSRKRQREKVLKDPLKSHKPELPMTGPGFGGRVGTSQGSLLTQYLLKKGGMIKETWMEEDPREAILKYADAAAKDPKFIAPAYAETQPEPVFAKSDSEDEEK

SEQ ID NO: 17375 - protein, 195 aa, Glycine max
  misc_feature (181)..(181): Xaa can be any naturally occurring amino acid
MVGPPPPPPTAADEEEDDDDAEMIGPPPPPPIASESEDDSDQDEVGTRFRIPLSNEIVLKGHTKVVSALAVDHTGSRVLSGSYDYMVRMYDFQGMNARLESFRQLEPFEGHQVRNLSWSPTADRFLCVTGSAQAKIYDRDGLTLGEFVKGDMYIRDLKNTKGHISGLTCGEWHQKTKETIXNIIRGWLTAHMGCQ

SEQ ID NO: 17376 - DNA, 1233 bp, Glycine max
atcaaatacccaccgaattcaaccccccatataacaaatctcctcccatcccatttttcagcaccaaagtttgaaacttttctcaattgggttgaggagagtttgactcaaatttttatttttctaacgaagcagtagctattagaagtgcaaaaattaaatgtccaacatcttcttgttgatgtttgagattcatgtatccgattctcagtgaaatcttcttttccgggtgtatgatcaattccactgttaggcgcaggacccatttagttcaatccttctcagttgctttcctctattggttgtactacgtttcatgatttctaaaccttccttagtctaataatcatctactactagctattattattattattattattatcatcatcatcatatataataaaatctatctgcaatattatttttctgagtttgtgtctagttagtgtctgggtcctggtcctgccaattgtgtcaattaattgtattgaatcataaaagatggcttcctcaagtggaacatcttcagggtcatctctgcttcagaactctggttctgaggaggatttgcaggcggtgatggatcagagaaagaggaagagaatgatatcaaaccgcgaatctgcacggcgatctcgcatgaggaagcagaagcacttggacgatcttgtttcccaagtggctcagctcagaaaagagaaccaacaaatactcacaagcgtcaacatcaccacgcaacagtacctgagcgttgaggctgagaactcggtgcttagggctcaggtgggtgagcttagtcacaggttagagtctctgaatgagatcgttgacgtgttgaatgccaccactgtggcgggttttggagcagcagcaacatcgagcaccttcgttgagccaattaataataatagcttcttcaacccgttgaatatggggtatctgaaccaccctattatggcttctgcggatatattgcagtattgagatccatggtctctgagtctgagatttgatgaggatttcttcttcttcttctaggtttgagtctgttgagaaattgtaatcactaccatatggtgataaggaataataataatgaatgtgtatcgtaaaacggatgggattgttgggtgctggttctgtaaatgtggcatgggccattactgtaatttgtcaccctcctttcctatattattataataataatattgacctaaaaaaaaaaaaaag

SEQ ID NO: 17377 - protein, 160 aa, Glycine max
MASSSGTSSGSSLLQNSGSEEDLQAVMDQRKRKRMISNRESARRSRMRKQKHLDDLVSQVAQLRKENQQILTSVNITTQQYLSVEAENSVLRAQVGELSHRLESLNEIVDVLNATTVAGFGAAATSSTFVEPINNNSFFNPLNMGYLNHPIMASADILQY

SEQ ID NO: 17378 - protein, 134 aa, Glycine max
MDQRKRKRMISNRESARRSRMRKQKHLDDLVSQVAQLRKENQQILTSVNITTQQYLSVEAENSVLRAQVGELSHRLESLNEIVDVLNATTVAGFGAAATSSTFVEPINNNSFFNPLNMGYLNHPIMASADILQY

SEQ ID NO: 17379 - protein, 126 aa, Glycine max
MISNRESARRSRMRKQKHLDDLVSQVAQLRKENQQILTSVNITTQQYLSVEAENSVLRAQVGELSHRLESLNEIVDVLNATTVAGFGAAATSSTFVEPINNNSFFNPLNMGYLNHPIMASADILQY

SEQ ID NO: 17380 - DNA, 1426 bp, Glycine max
gatccttggttatgcctaccatggcctcctctctgcttctccaacttggttctacttgtggtaaaagtccctcttttgctcctcctcaaagcattttggttgacaaacttcgaagattagtgattaaagtcaagtcctcagagacaagggaatgcaccacagctatgtttaatgccaattcacgtagagactttcttgggttagctttaggagtctcgggtctcttcatcggttcgctggatgcaaatggagctggtttgcccccagaggaaaagcctaaactgtgtgatgacacttgtgagaaagagcttgaaaatgtatggtgcctacggtaactactggatcaggtttgcaatacaaggatattaaagttggacaaggtcctagtccaccaattggatttcaggtggctgctaattatgttgcaatggttccctccggacaaatatttgataggtattacaaatttctatcaatctttcttcagtcattgaattgctagatgtggaatggtgtttgttgttgtgtatacatgagaagttttatttgactatacagaattgtacagccatgcctaatcatatgttggacttctaaatatgttattaagagaatcgtcaatcagctatattttgctaacttgtccattcctttttcagctttttgtcaccttccaatttttgttttgaagatcttcacttttaaccctgattacaattatatgtgtactatcatgtttgcactttgataaaaatgaatttgaagcctttgaagatgacataggcaggtacattatgtgttgctcttttccccccttttcaattttacagttcactggagaaaggtcagccttatatttttcgtgttggttctggtcaggtaaactctggatgttgcttttaatgttatcaaacttaagaatttaaccttcattgtagttattagtgttcaaacttgaaaaacaatagttttggggccaattgttggataatccttttcaagataaactgatattcaacccaatgagtaacaggtgatacaaggacttgatgaaggtattctgagcatgaaagtaggagggaaacgtcgactgtacatacccggatcactggcattcccaaaaggccttacttctgctcctggaagaccaagggtggctccaagcagtccagtcatatttgatgttagtttggaatacataccggggcttgaagtggatgaggaataaaatgagtttgtccattctagctttaattgtagtacctaatcaatcttgtatcttaattttgtttgtcactggcaccatcaccattctatacgatcgttaattctttttgagaaattcgcaaaaatctcctagctatgttgagtaacattgttctgacttctgagttcaaatatcacgaaaaaatttccttatgtttct

SEQ ID NO: 17381 - protein, 110 aa, Glycine max
SLVMPTMASSLLLQLGSTCGKSPSFAPPQSILVDKLRRLVIKVKSSETRECTTAMFNANSRRDFLGLALGVSGLFIGSLDANGAGLPPEEKPKLCDDTCEKELENVWCLR

SEQ ID NO: 17382 - protein, 107 aa, Glycine max
MPTMASSLLLQLGSTCGKSPSFAPPQSILVDKLRRLVIKVKSSETRECTTAMFNANSRRDFLGLALGVSGLFIGSLDANGAGLPPEEKPKLCDDTCEKELENVWCLR

SEQ ID NO: 17383 - protein, 104 aa, Glycine max
MASSLLLQLGSTCGKSPSFAPPQSILVDKLRRLVIKVKSSETRECTTAMFNANSRRDFLGLALGVSGLFIGSLDANGAGLPPEEKPKLCDDTCEKELENVWCLR

SEQ ID NO: 17384 - DNA, 1512 bp, Glycine max
gatcagtaaacaatcacacacgccgcccctcttacagaacggagatcaggtgtggtcggcggcggcacgagggaggttggaaagtgtccgacacggcggatttcgcttgggcttcagtgtcgcagcacccaaacgctccaaccgcgactctaaaacgcaacgtgaccgaggtcttcgtcgggcctccgctccggccgctatttactactgtggctgtataaacattctagttatggaagattctgatcaaccagccaaatctgctgaaaaccagcaaactgaacaagtgtgtagttttttcagaaagccagttaataaaaagaatataaggaaacgaactattgttaatgaagataatgaggaggactcaaacaatgaaacttctctgttgcatattcagaagaagaccttaaagcctgataataagttgtacttttccactggttcttcaaaaagctctgcatctgctgaacccagtgaagaaccaggaaaaccagtctttcagttcgagtcttcaaaagagattcaagttcagcatgatagcaaagcaactgcaacactagagaccgagactgagttttcaaaagatgctcgtgccatccgtgaaagagctcttaagcaagcagaggagagtctgaaagggaaaagcccaagttctaagaatgaaaaattatataagggaatgaacagttacaaagactacaaggctggctttcgtagggagcaaacaattgctagtgaaaaagctggcgggtcacatggtcctcttagggcttcagctcatataagagtttcagcgaggtttgattatcagcctgacatatgtaaggattataaggaaactggttactgtggatatggtgattcatgtaagtttatgcatgatcgaggggactacaagtctgggtggcagatggagaaggaatgggaagaagctgagaaagcaaggaagatgagattggctgcaggagaggatgcagatgaggagggtgctaatttgactgatgaagatgatgaggattctttaccatttgcctgtttcatttgtagaaacacttttgtggatcctgtagtaaccaagtgcaagcactacttctgcgagcattgtgcattgaagcatcatgcaaagaataagaagtgttttgtctgcaaccagccaactcttggcatttttaacgttgctcatgagatacgcaggaagatggccgaggataaatcataaaaatgtctctctaggatccatggatctctttacttcatggaagttatcttttctcccccattttagtttcatgttaaagattgatgctatgtaatgagttgaaaacataccagaagtttgcacagtggaattagttgattcattttgttgtatttctttgccttatagattccagaatatctaatggtgagagacatttatgatatacccgtttgtatatagggtcatactgtggttctttttacagtagtttgttaccaaataaattttgaatagagcgacctttactc

SEQ ID NO: 17385 - protein, 406 aa, Glycine max
ISKQSHTPPLLQNGDQVWSAAARGRLESVRHGGFRLGFSVAAPKRSNRDSKTQRDRGLRRASAPAAIYYCGCINILVMEDSDQPAKSAENQQTEQVCSFFRKPVNKKNIRKRTIVNEDNEEDSNNETSLLHIQKKTLKPDNKLYFSTGSSKSSASAEPSEEPGKPVFQFESSKEIQVQHDSKATATLETETEFSKDARAIRERALKQAEESLKGKSPSSKNEKLYKGMNSYKDYKAGFRREQTIASEKAGGSHGPLRASAHIRVSARFDYQPDICKDYKETGYCGYGDSCKFMHDRGDYKSGWQMEKEWEEAEKARKMRLAAGEDADEEGANLTDEDDEDSLPFACFICRNTFVDPVVTKCKHYFCEHCALKHHAKNKKCFVCNQPTLGIFNVAHEIRRKMAEDKS

SEQ ID NO: 17386 - protein, 329 aa, Glycine max
MEDSDQPAKSAENQQTEQVCSFFRKPVNKKNIRKRTIVNEDNEEDSNNETSLLHIQKKTLKPDNKLYFSTGSSKSSASAEPSEEPGKPVFQFESSKEIQVQHDSKATATLETETEFSKDARAIRERALKQAEESLKGKSPSSKNEKLYKGMNSYKDYKAGFRREQTIASEKAGGSHGPLRASAHIRVSARFDYQPDICKDYKETGYCGYGDSCKFMHDRGDYKSGWQMEKEWEEAEKARKMRLAAGEDADEEGANLTDEDDEDSLPFACFICRNTFVDPVVTKCKHYFCEHCALKHHAKNKKCFVCNQPTLGIFNVAHEIRRKMAEDKS

SEQ ID NO: 17387 - DNA, 1760 bp, Glycine max
ggtgccttcactctgacaatggatccagcgttacccattgtagcgctgtcgcttctcttgggtgccatcatcgccttcctcatcttcaacacctacttctgcaagcgccaatccgaaatccgatccatcgccgatccaaatccaaattcaaattcgaatcccaaactcgtgtcttccaaaccccctcccaagaagcctctctccaaaccccattcctccgacaaggatcaaaacaagcgtcaccatccgttggatttgaataccttgaagggtcatggtgatgcagtgacaggggtatgcttctcccgcgatggacgaaatttggcaactgcttgcgctgatggagttgtgagagtattcaagttggatgatgcttcgagtaaaagtttcaagtttctaaggattaatttgcctgccggcggtcatccaacggcagttgcattttccgatgatgcatcctccattgttgtggcgtcttatactctgtccggttgttcattatacatgtatggagaagagaaacctaaaacatctgaagacaaaccacaagcaaagcttcctctccccgaaattaagtgggagcatcacaaagttcatgataagaagtcaataattactatgtttggagcctctgcaacttatggcactgctgatggaagtacaattattgcctcgtgttcagaagggactgacatcattctttggcatggaaaaactgggaagagtgttgggcatgtcgatacaaatcaattgaaaaataacatggctactatatcacccaacggtcgttttattgcagctgcagcatttactgccgatgtgaagatctgggagattgtatatgcaaaggatggatctgtgaaggaagttttaaatgttatgcagcttaaggggcataagagtgctgtgacttggttatgctttacgccaaactctgagcaaataatcactgcatccaaggatggttcaatgagaatatggaatatcaatgttcgctatcatcttgatgaggatccaaagacgctaaaggtgttcccaattcctcttcatgattcttccggtactacattgcactatgatcgcatgagtgtttcccctgatggaaattttttggctgcgacccatggttccacattgcagtggttatgtgttgagactggaaaggttctggatacaactgaaaaagcccatgatagtgacatttcatgcatttcatgggctcctaaaactattccaatgggaaatgaacaagttttggttttagccacagccagtgctgacaagaaagtgaagttatgggcatctccatctatccctgcatcctaagccactatgctagtgcccggaatgctaccattagtatgcctttgcacgcgctgacactaattatgttaaagagagatgcttctaaagttctgggatttggtctcttcatagttggttcagtcacttcacaactttttagagctgcatggtatcattgaaaagttgaatgagaaacaaggatgagctgaaatgatgcaatcccttcagttgctgctactgctcagactctgtatcttgacgaattttttgactaataatttatatagacagagagataatgttgttggttttcgttgtgttagtgaggctgacgtgaatggtgaagtgtgatgcgagaatagtttatttgtagaactttggaagagaacataatggacatgttactagtggctacagtttgtcatttaaagaagaaaaaaaaaaacattttcatg

SEQ ID NO: 17388 - protein, 441 aa, Glycine max
GAFTLTMDPALPIVALSLLLGAIIAFLIFNTYFCKRQSEIRSIADPNPNSNSNPKLVSSKPPPKKPLSKPHSSDKDQNKRHHPLDLNTLKGHGDAVTGVCFSRDGRNLATACADGVVRVFKLDDASSKSFKFLRINLPAGGHPTAVAFSDDASSIVVASYTLSGCSLYMYGEEKPKTSEDKPQAKLPLPEIKWEHHKVHDKKSIITMFGASATYGTADGSTIIASCSEGTDIILWHGKTGKSVGHVDTNQLKNNMATISPNGRFIAAAAFTADVKIWEIVYAKDGSVKEVLNVMQLKGHKSAVTWLCFTPNSEQIITASKDGSMRIWNINVRYHLDEDPKTLKVFPIPLHDSSGTTLHYDRMSVSPDGNFLAATHGSTLQWLCVETGKVLDTTEKAHDSDISCISWAPKTIPMGNEQVLVLATASADKKVKLWASPSIPAS

SEQ ID NO: 17389 - protein, 435 aa, Glycine max
MDPALPIVALSLLLGAIIAFLIFNTYFCKRQSEIRSIADPNPNSNSNPKLVSSKPPPKKPLSKPHSSDKDQNKRHHPLDLNTLKGHGDAVTGVCFSRDGRNLATACADGVVRVFKLDDASSKSFKFLRINLPAGGHPTAVAFSDDASSIVVASYTLSGCSLYMYGEEKPKTSEDKPQAKLPLPEIKWEHHKVHDKKSIITMFGASATYGTADGSTIIASCSEGTDIILWHGKTGKSVGHVDTNQLKNNMATISPNGRFIAAAAFTADVKIWEIVYAKDGSVKEVLNVMQLKGHKSAVTWLCFTPNSEQIITASKDGSMRIWNINVRYHLDEDPKTLKVFPIPLHDSSGTTLHYDRMSVSPDGNFLAATHGSTLQWLCVETGKVLDTTEKAHDSDISCISWAPKTIPMGNEQVLVLATASADKKVKLWASPSIPAS

SEQ ID NO: 17390 - protein, 273 aa, Glycine max
MYGEEKPKTSEDKPQAKLPLPEIKWEHHKVHDKKSIITMFGASATYGTADGSTIIASCSEGTDIILWHGKTGKSVGHVDTNQLKNNMATISPNGRFIAAAAFTADVKIWEIVYAKDGSVKEVLNVMQLKGHKSAVTWLCFTPNSEQIITASKDGSMRIWNINVRYHLDEDPKTLKVFPIPLHDSSGTTLHYDRMSVSPDGNFLAATHGSTLQWLCVETGKVLDTTEKAHDSDISCISWAPKTIPMGNEQVLVLATASADKKVKLWASPSIPAS

SEQ ID NO: 17391 - DNA, 1627 bp, Glycine max
aagatccttttcacgaggtgaaaagcaaacgtgagaagaaaaaagagggtaaggacacaacggataccaggtctcgtggaataagcaatgcatctagtcgtggtggcggcggtgctagggttggctctgaccgttatgttgggcgtggagattctggtctcctgcagggaaaacctgtattcaaaaaggaaaacggaacacctgcttatggaggttatactgctcctgcatctagctcattggacaataatgtgaacaggcaactaccatcctacagtgattctgtccgtgtctgtgatggactatcttcatcacaacatggtggattgcaatctccatgggcggcgaacccaggtcaagtatcaatggctgacattgtcaggatgggtaggccacaggccaaggcatccatgcctaactcttctctccacagtggtagccatcagaatgattttgcactcccatcagcttcacaaaacaatttgcattcagtgcaagttcatgcttccaagttgtcagagacaaataatgaccatggctttgctattgactccaatgttgaacagactgatgaatggccatcgattgagcatcaaccagctgtttctgtatccttggttgtagatggtcatccaacgtctgagtaccatacaaactcgtctaactctggtgaagctaatcagcagctgaagacccatgtaaatgaatttgtagctgaagatgatcctgttgagaatcccgacattgttggatctgctaaaagtatatctgaagagaatcccgaaagtacatctgtttttgatggtagcttgtacaaggacataaattcttaccaacctcatcggcatccttttgaaaataatgaagctgaagatggtgtttcatcagtagccacaaacttagagcagctaaatttacactcaaatgatcaggggacagaaccagaggaggaaaattcttctgtagtaattccaaatcatttacaactccattccgccgaatgcttaaatctgagctttggaagttttggatctgcaaatgatgcttccctttctggatctggtccgtatgcatctaggcccttgaaaagtaacttggaggatacatctggagctaacgatgtttcaacaattgggtcctcagatgttagaaatcctgactattatgccgatgagcatcttactactacctcggatgggaatttagctcacataactggtgtggatgctgggacttatgagcattcctccatttcacaatcagaggctttaaaatctgaaccccctgaaactgctcaagaaaatcaatattcatttccttcttcttcacacgagtttacctacgaaaatgcccaacaaccagatgttacataccctcattcgcagacaagctcacagatacagaacctgtctcccttctctagtgtaatggcttatacgaattctttgcccagtgcactgttggcttcaacagttcaaacagcaagggaggatatcccatactcacccttccctgcaacacaatcaatgccttcaaaatatagcaacattgcttcttcaattggtggtccctctataaccatgtcagaggctctaagggcaaataacatttcaacacctcaacctaa

SEQ ID NO: 17392 - protein, 541 aa, Glycine max
DPFHEVKSKREKKKEGKDTTDTRSRGISNASSRGGGGARVGSDRYVGRGDSGLLQGKPVFKKENGTPAYGGYTAPASSSLDNNVNRQLPSYSDSVRVCDGLSSSQHGGLQSPWAANPGQVSMADIVRMGRPQAKASMPNSSLHSGSHQNDFALPSASQNNLHSVQVHASKLSETNNDHGFAIDSNVEQTDEWPSIEHQPAVSVSLVVDGHPTSEYHTNSSNSGEANQQLKTHVNEFVAEDDPVENPDIVGSAKSISEENPESTSVFDGSLYKDINSYQPHRHPFENNEAEDGVSSVATNLEQLNLHSNDQGTEPEEENSSVVIPNHLQLHSAECLNLSFGSFGSANDASLSGSGPYASRPLKSNLEDTSGANDVSTIGSSDVRNPDYYADEHLTTTSDGNLAHITGVDAGTYEHSSISQSEALKSEPPETAQENQYSFPSSSHEFTYENAQQPDVTYPHSQTSSQIQNLSPFSSVMAYTNSLPSALLASTVQTAREDIPYSPFPATQSMPSKYSNIASSIGGPSITMSEALRANNISTPQP

SEQ ID NO: 17393 - protein, 420 aa, Glycine max
MADIVRMGRPQAKASMPNSSLHSGSHQNDFALPSASQNNLHSVQVHASKLSETNNDHGFAIDSNVEQTDEWPSIEHQPAVSVSLVVDGHPTSEYHTNSSNSGEANQQLKTHVNEFVAEDDPVENPDIVGSAKSISEENPESTSVFDGSLYKDINSYQPHRHPFENNEAEDGVSSVATNLEQLNLHSNDQGTEPEEENSSVVIPNHLQLHSAECLNLSFGSFGSANDASLSGSGPYASRPLKSNLEDTSGANDVSTIGSSDVRNPDYYADEHLTTTSDGNLAHITGVDAGTYEHSSISQSEALKSEPPETAQENQYSFPSSSHEFTYENAQQPDVTYPHSQTSSQIQNLSPFSSVMAYTNSLPSALLASTVQTAREDIPYSPFPATQSMPSKYSNIASSIGGPSITMSEALRANNISTPQP

SEQ ID NO: 17394 - protein, 414 aa, Glycine max
MGRPQAKASMPNSSLHSGSHQNDFALPSASQNNLHSVQVHASKLSETNNDHGFAIDSNVEQTDEWPSIEHQPAVSVSLVVDGHPTSEYHTNSSNSGEANQQLKTHVNEFVAEDDPVENPDIVGSAKSISEENPESTSVFDGSLYKDINSYQPHRHPFENNEAEDGVSSVATNLEQLNLHSNDQGTEPEEENSSVVIPNHLQLHSAECLNLSFGSFGSANDASLSGSGPYASRPLKSNLEDTSGANDVSTIGSSDVRNPDYYADEHLTTTSDGNLAHITGVDAGTYEHSSISQSEALKSEPPETAQENQYSFPSSSHEFTYENAQQPDVTYPHSQTSSQIQNLSPFSSVMAYTNSLPSALLASTVQTAREDIPYSPFPATQSMPSKYSNIASSIGGPSITMSEALRANNISTPQP

SEQ ID NO: 17395 - DNA, 1589 bp, Glycine max
aatcgcaactcgcgaaagttgttttgtaaagtcgtcacttcccacttcgtctccgttgctgtagttgtgttctgtgtgggtcgctgaagggcccttcatcagcacagatggatttccatggattcctaaacgacttgcaggattgggaattttctagaaaggataaagcacgaccacaaaaggaaaatgttggcttcatcttctcgaattacgggatctgtgggtgtggagaaggcatcaaaaggagataccatttcttttgataatgcaagaaattctccaggacagtatgatttatcaagaattaatcatttgcatagtagttttgttcctgaagatgttcctgatgctgcttccgagaaagacctgggcaacgagtttttcaagcagaaaaagtttaaggaagctagagactgctattcaaggagcattgccttatcaccaacagctgtagcatatgcaaatagggcaatggccaatatcaagctcagaagattccaagaggctgaggatgactgcacagaggccttaaatcttgatgatcgttacataaaagcatactcacgaagagcaacagctagaaaagaacttggaaaaattaaagaatcaatggacgatgctgaatttgccttgaggttggaaccaaacaatcaagaaatcaagaaacagtatgctgatgctaagtctttctatgagaaagatattcttcagaaagcatcaggggttctgagaagcactgtacagggaactcaaaaagtgggaaagtcagaggaaaaagttaatggagacagcatccaccccatttcacgtagtactcaaaagtctggactagctgaagttcatcatcataaaaagagaaataaaagccagaagctggcctcaatcacaaggagatgatggttctaagggaggtttgagtgcaagcaacagtttggagcagagaaatcacagaattaccaagccagaaatgaaagcttctgttcaacagcttgcttctcgcgctgcttctagagccatgtctgaagctgccaaaaacgtaacacctccaactacagcttatcagtttgaggtctcctggagagcattttcaggtgatcttgctctgcaggctcgtctattaaaggctatatctccccatgaattgccgaaaatattcaaaaatgccttgtcttctaccatactaattgagatcatcaagtgtcttgcatctcttttcactgaggacatggatctggttgtcagttatttggagcatttgaccaaggtaccaagatttgatgtgattgtaatgtgcctttcatcaacaaataaggatgacatacgcaagatctgggatgaagtgttcagcggtgaggcaacaccaatagagtatgcagagattctggacaaccttcaatcaaagttcggccttggacagtgacatcttcccctgtatgttttaatatttttttttcctcggtggatcctctcccttccgcaactatcttcacttgtaaattattatgctattgaaatgtttgagcattattgacggtcaacttgatccatctttaagcgttagttgataatgaggaaatgggaggaaaaag

SEQ ID NO: 17396 - protein, 236 aa, Glycine max
MLASSSRITGSVGVEKASKGDTISFDNARNSPGQYDLSRINHLHSSFVPEDVPDAASEKDLGNEFFKQKKFKEARDCYSRSIALSPTAVAYANRAMANIKLRRFQEAEDDCTEALNLDDRYIKAYSRRATARKELGKIKESMDDAEFALRLEPNNQEIKKQYADAKSFYEKDILQKASGVLRSTVQGTQKVGKSEEKVNGDSIHPISRSTQKSGLAEVHHHKKRNKSQKLASITRR

SEQ ID NO: 17397 - protein, 150 aa, Glycine max
MKASVQQLASRAASRAMSEAAKNVTPPTTAYQFEVSWRAFSGDLALQARLLKAISPHELPKIFKNALSSTILIEIIKCLASLFTEDMDLVVSYLEHLTKVPRFDVIVMCLSSTNKDDIRKIWDEVFSGEATPIEYAEILDNLQSKFGLGQ

SEQ ID NO: 17398 - protein, 141 aa, Glycine max
MANIKLRRFQEAEDDCTEALNLDDRYIKAYSRRATARKELGKIKESMDDAEFALRLEPNNQEIKKQYADAKSFYEKDILQKASGVLRSTVQGTQKVGKSEEKVNGDSIHPISRSTQKSGLAEVHHHKKRNKSQKLASITRR

SEQ ID NO: 17399 - DNA, 848 bp, Glycine max
attttttttcaatgtcatgttcaggaaatatctctaatgaggcatgtgtaacacctcctgatagaaccagttcacaggataaagataaagaaaagagtgcagtggaaaatggtcttatcaaggagcaagctcagccgatgatgactaagcaaacatccaatgggagcaatgaagatcattctccacaaaaggcagacagtggtcacagctggtgaggatgccattgtacctgaacataaatctggtgttgaggcactaatgccaaaactgcggcagtctgtgggacaagggctgaataagcctgctgaggtaacactactaaaccttagacgtttcagcaaaagaattggacatcagtatatggaagggccaaagatcgagaaatacaagtagatgctcaagagaatggctgaggaccaaggtgctgaatttgtatcatatgataccattaaaggagagtggaagatcaaggtcaaacacttcagcatctacaagctggtagataaaaacagttagataaacgatcacaagtaaggtttggtccatttggttcgatatggtggaggacaaaagtacagttgatagttttagaaccaaagttctgctcaaaaatgtatgtttttttcctgtcaatagtgtggatagagcttgggccaacgttattgatgatgtgcttcttatcttacggatgatgatgcattgggggatattttatagaattcaaatgtgggttttttcaagtttgattcacacagaggttatggttatttttaacttatttttcagaatcatgagggtggtgtttgatatgattttcctatttcaataataagttgatcaagagtgtc

SEQ ID NO: 17400 - protein, 90 aa, Glycine max
MVEDKSTVDSFRTKVLLKNVCFFPVNSVDRAWANVIDDVLLILRMMMHWGIFYRIQMWVFSSLIHTEVMVIFNLFFRIMRVVFDMIFLFQ

SEQ ID NO: 17401 - protein, 77 aa, Glycine max
MGAMKIILHKRQTVVTAGEDAIVPEHKSGVEALMPKLRQSVGQGLNKPAEVTLLNLRRFSKRIGHQYMEGPKIEKYK

SEQ ID NO: 17402 - protein, 74 aa, Glycine max
MKIILHKRQTVVTAGEDAIVPEHKSGVEALMPKLRQSVGQGLNKPAEVTLLNLRRFSKRIGHQYMEGPKIEKYK

SEQ ID NO: 17403 - DNA, 1600 bp, Glycine max
gatcattgaccaatcaacaccaactccaaacagttggaatcgacgaaacgcaaaggcatattgacattggcatggctacctcgctgtgtacacccagctacagagtcacactgaaactgtacggaacagattcccataagttaaacgcaaagccctcagttcgttataggcgtcgttttggcaccaccaccagaatatgctgcacctctaataattacaacgacaacaacatccaacgacgaccccaatccgaagctattcaagtttactcgcaaatcgagagattacttacagattctgttagacaatcacaggatggttggtggggttccccagactggagtgaagttgagggagcttggattctcaaaccgaaaagctctgaacccaattatgtagtgcattttatcggaggtatatttgttggagctgctcctcagcttacctaccggaggtttcttgagcgtctctcagaaaagggtatattgatcattgcaacgccatatgctagtgggtttgatcacttcctcattgctgatgaagtacagttcaaatttgataggtgctatcgcacactgcaagaaacaatccaagaccttcctatttttggtgttggccattctttggggtcggtggtccaccttctgattggatcaagatatgcagtgcaaagatctggaaatgttctcatggcattcaataacaaggaagcaagttcagctgttcctttgttctctcctgtgatcgtcccaatggctcaaaccattggtccacttctatcagatattttttcttcaccaactctaagagctggggcagagatgactttgaagcaactagaaaacgttagccctccaattatgaagcaggttcttcctttagttgagcagctccctcccttgtacatggatttggtcaagggaagagaagatttttctccaaagcctgaggagacacgtcgacttataaaatcatactatggcatatccagaaatcttctgataaaattccaggatgatttaatagatgagacttcaactctagcgcaggtgcttagttcagaatcagccattagctcagtgctagacatgtcaatacgaaagttgcctggagatcacggtcttccattgcaacaggccctaccaaatgttccgccagcaatggccgatgcagttaatcgtggaagtgagcttttgtcaaatcttactgttggaacaccgtgggagatagttgcgaaagaagtaggaaactcgctaggcatggattctggagtcctgcgcgctgaagtttcaaaggacatggatatgcttgtcgatgtcatcgcagcctggatagcctccaatgcagggcctaaacttcttcggccctaaggtcacggtttcatctggtccttgtcagttaaagaacacatgctgtagaaatgtataataaatcaatattggcaccgacacttctttcatcctatctcggagaatgccaatcatgtgaatccatacaagtaaagaaaatagaactctgacaatcacctgatgctgtaaaaatatgaattacattgttacaaaaaaaaaaaaaatagttgttatatagaaattattcgttc

SEQ ID NO: 17404 - protein, 455 aa, Glycine max
SLTNQHQLQTVGIDETQRHIDIGMATSLCTPSYRVTLKLYGTDSHKLNAKPSVRYRRRFGTTTRICCTSNNYNDNNIQRRPQSEAIQVYSQIERLLTDSVRQSQDGWWGSPDWSEVEGAWILKPKSSEPNYVVHFIGGIFVGAAPQLTYRRFLERLSEKGILIIATPYASGFDHFLIADEVQFKFDRCYRTLQETIQDLPIFGVGHSLGSVVHLLIGSRYAVQRSGNVLMAFNNKEASSAVPLFSPVIVPMAQTIGPLLSDIFSSPTLRAGAEMTLKQLENVSPPIMKQVLPLVEQLPPLYMDLVKGREDFSPKPEETRRLIKSYYGISRNLLIKFQDDLIDETSTLAQVLSSESAISSVLDMSIRKLPGDHGLPLQQALPNVPPAMADAVNRGSELLSNLTVGTPWEIVAKEVGNSLGMDSGVLRAEVSKDMDMLVDVIAAWIASNAGPKLLRP

SEQ ID NO: 17405 - protein, 432 aa, Glycine max
MATSLCTPSYRVTLKLYGTDSHKLNAKPSVRYRRRFGTTTRICCTSNNYNDNNIQRRPQSEAIQVYSQIERLLTDSVRQSQDGWWGSPDWSEVEGAWILKPKSSEPNYVVHFIGGIFVGAAPQLTYRRFLERLSEKGILIIATPYASGFDHFLIADEVQFKFDRCYRTLQETIQDLPIFGVGHSLGSVVHLLIGSRYAVQRSGNVLMAFNNKEASSAVPLFSPVIVPMAQTIGPLLSDIFSSPTLRAGAEMTLKQLENVSPPIMKQVLPLVEQLPPLYMDLVKGREDFSPKPEETRRLIKSYYGISRNLLIKFQDDLIDETSTLAQVLSSESAISSVLDMSIRKLPGDHGLPLQQALPNVPPAMADAVNRGSELLSNLTVGTPWEIVAKEVGNSLGMDSGVLRAEVSKDMDMLVDVIAAWIASNAGPKLLRP

SEQ ID NO: 17406 - DNA, 1064 bp, Glycine max
atgaatcctttggggtcttgctatctgcttcctcgtagtacttcattgagagagacatggacactgtactaagtactacgctgctactcatgttggcatgctccatcgtgcatgttcttcgttcactacaagcaagaatgagaagaaaatcaaactacaatcaaccaccatagtaatctcctcaatagaagccacccaagaggttctccaaacccatgactcattattctcggacagaacaaaccccgacatcacaacctcgtacaaccacaaccgttacagcttggtttttctccctgtctcacccctctggcaagaactaagaaaaatctgccacggaaacttgttttcggcaaagacccttgacgcaagcacggaccttaggcgcatgaaaatgaaggagcttcttaccgatatccgccaaagaagcctcaacggcgaagtggtggacattggaagagcagccttcatggcatgcattaactttttatcgtacacgtttctctctctggattttgttccctctgtaggtgatggcgagtacaaacacatagtggggactctgttgaaagcaacggggacaccgaacttggtggattattttccagtgttgagggtgtttgatccacaagggatcaggaggcacaccaccaactacattgacaagttgttcgatgtgttcgatcccatgattgatgaacgcatgaggaggaggggagagaagggttatgccactagccatgacatgttggatatcttgctggatatttctgaccagagtagcgagaagattcataggaagcagatcaagcatttgttccttgacctattcgttgcggggacggatacaacagcctacggcttagagagaacaatgacggaactaatgcacaatccagaagccatgagaaaagcgaagaaggagatagcagaaacaataggagtaggaaaaccggtggaggaatccgacgtggcaaggctgccatacctgcaatcagtgataaaagaatctctgcgaatgcacccaccagcaccactgctactgccacgaagggccaaaacgg

SEQ ID NO: 17407 - protein, 322 aa, Glycine max
MLHRACSSFTTSKNEKKIKLQSTTIVISSIEATQEVLQTHDSLFSDRTNPDITTSYNHNRYSLVFLPVSPLWQELRKICHGNLFSAKTLDASTDLRRMKMKELLTDIRQRSLNGEVVDIGRAAFMACINFLSYTFLSLDFVPSVGDGEYKHIVGTLLKATGTPNLVDYFPVLRVFDPQGIRRHTTNYIDKLFDVFDPMIDERMRRRGEKGYATSHDMLDILLDISDQSSEKIHRKQIKHLFLDLFVAGTDTTAYGLERTMTELMHNPEAMRKAKKEIAETIGVGKPVEESDVARLPYLQSVIKESLRMHPPAPLLLPRRAKT

SEQ ID NO: 17408 - protein, 225 aa, Glycine max
MKMKELLTDIRQRSLNGEVVDIGRAAFMACINFLSYTFLSLDFVPSVGDGEYKHIVGTLLKATGTPNLVDYFPVLRVFDPQGIRRHTTNYIDKLFDVFDPMIDERMRRRGEKGYATSHDMLDILLDISDQSSEKIHRKQIKHLFLDLFVAGTDTTAYGLERTMTELMHNPEAMRKAKKEIAETIGVGKPVEESDVARLPYLQSVIKESLRMHPPAPLLLPRRAKT

SEQ ID NO: 17409 - protein, 223 aa, Glycine max
MKELLTDIRQRSLNGEVVDIGRAAFMACINFLSYTFLSLDFVPSVGDGEYKHIVGTLLKATGTPNLVDYFPVLRVFDPQGIRRHTTNYIDKLFDVFDPMIDERMRRRGEKGYATSHDMLDILLDISDQSSEKIHRKQIKHLFLDLFVAGTDTTAYGLERTMTELMHNPEAMRKAKKEIAETIGVGKPVEESDVARLPYLQSVIKESLRMHPPAPLLLPRRAKT

SEQ ID NO: 17410 - DNA, 1153 bp, Glycine max
actggtgaagatcacagccgagtcagaggtgcacttgtcccattcttgaagccagaatccttgaagagatatgtgggaaaaatggatgaagaagttaggaagcaccttgagatgcattggcaggggaaacagcagatcaaggtattgcccctgatgaagactctcacattcaacataatttgctctcttctgtttggtgttgagcgtggaaagcaaagagatcaattcctggattccttccaagagatgatacaaggaatgtggtcagtaccaattaacgtgcccttcacacgctacaaccgcagccttagagcaagtgcaagaatccagaacattttgaaggagattgtgcaaaagaagaagattgaactcaagcaaaatgcggcatctgcacgccaagacttgatcagtttcttgttaggcatggttgatgaagatggcaaacaagttatgagcgagaaggaaatctttcacaacattaagcttgtcatggttgctggacatgacacttcggctgttctgatcactttcatcatccgactcttagccaacgaacctgctatctatgcagcagttcttcaagaacaggaagagatagcaaaaggcaagctctcaggagaggcactgacatgggaagacctttcaaagatgaagtacacctggagagtagcaatggaaactattaggatgtttcctcctatttttggtggcttcagaaaggcagcaacagatattgaatatgatggatacttcatacccaaagggtggcagattttctgggtcacagcaatgacacacatggacgaaaacattttcccagagccatcaaagattgatcctagtagatttgaaaaccaagcatctgtcccaccctactgcttcattccatttggagggggagcaagaatatgtccagggtatgagttttccaggcttgaaactcttgttgcaattcattaccttgtgacacggttcagttggaagctatgttcagacaatttcttcagtagggatccaatgccagtaccaactcaagggctacttgttcagatttggccaaggaaactttcttaatggtcatttcaataactgctgatcttctaatcaatacaatgtaccaaaaataagtcaattttatgatcagcttacgact

SEQ ID NO: 17411 - protein, 357 aa, Glycine max
TGEDHSRVRGALVPFLKPESLKRYVGKMDEEVRKHLEMHWQGKQQIKVLPLMKTLTFNIICSLLFGVERGKQRDQFLDSFQEMIQGMWSVPINVPFTRYNRSLRASARIQNILKEIVQKKKIELKQNAASARQDLISFLLGMVDEDGKQVMSEKEIFHNIKLVMVAGHDTSAVLITFIIRLLANEPAIYAAVLQEQEEIAKGKLSGEALTWEDLSKMKYTWRVAMETIRMFPPIFGGFRKAATDIEYDGYFIPKGWQIFWVTAMTHMDENIFPEPSKIDPSRFENQASVPPYCFIPFGGGARICPGYEFSRLETLVAIHYLVTRFSWKLCSDNFFSRDPMPVPTQGLLVQIWPRKLS

SEQ ID NO: 17412 - protein, 330 aa, Glycine max
MDEEVRKHLEMHWQGKQQIKVLPLMKTLTFNIICSLLFGVERGKQRDQFLDSFQEMIQGMWSVPINVPFTRYNRSLRASARIQNILKEIVQKKKIELKQNAASARQDLISFLLGMVDEDGKQVMSEKEIFHNIKLVMVAGHDTSAVLITFIIRLLANEPAIYAAVLQEQEEIAKGKLSGEALTWEDLSKMKYTWRVAMETIRMFPPIFGGFRKAATDIEYDGYFIPKGWQIFWVTAMTHMDENIFPEPSKIDPSRFENQASVPPYCFIPFGGGARICPGYEFSRLETLVAIHYLVTRFSWKLCSDNFFSRDPMPVPTQGLLVQIWPRKLS

SEQ ID NO: 17413 - protein, 320 aa, Glycine max
MHWQGKQQIKVLPLMKTLTFNIICSLLFGVERGKQRDQFLDSFQEMIQGMWSVPINVPFTRYNRSLRASARIQNILKEIVQKKKIELKQNAASARQDLISFLLGMVDEDGKQVMSEKEIFHNIKLVMVAGHDTSAVLITFIIRLLANEPAIYAAVLQEQEEIAKGKLSGEALTWEDLSKMKYTWRVAMETIRMFPPIFGGFRKAATDIEYDGYFIPKGWQIFWVTAMTHMDENIFPEPSKIDPSRFENQASVPPYCFIPFGGGARICPGYEFSRLETLVAIHYLVTRFSWKLCSDNFFSRDPMPVPTQGLLVQIWPRKLS

SEQ ID NO: 17414 - DNA, 1202 bp, Glycine max
ctgtaccacaataatcaaagtctcaaccatgagaaaacgtatcaatatggaaagtgatgctgacttcaattcctttgccacatcctcctcttccaccacaccttcaatcttctttgacactaacacttctagcacatcctcctcctcaacatctcctacctcaaattcagaatcatgcaccaaagaacactccaaaacacctcaaaatgactcaaccacttctcaaacctcattggaaaatggaaaggactcaaaagggtgcaagaagaggcagatagacaatagcaaccagaatcaccaccctacttataggggtgtaaggatgaggaattggggcaaatgggtgtccgaaatccgtgagccgagaaagaagtcaagaatatggctaggaacataccctacagcagaaatggcagctagagcacatgatgtggctgccttagccatcaagggccattcagcatacctcaattttcctgaattggctcaagagcttccaaggccagttagcacatctcctaaggacattcaagctgcagctgcaaaagctgcaaatactgcctttgaggaggttaggcattgtcaaataactgaagaagaagcagaacaaaaccaagcagaacaagcttcatcttcaactctctcaatggacaatcctcaagagccttcaagttctcattctaccattgatgatgacactttgtttgaccttccagatcttttccctgatggaaacaatggactttgctccttttcttcttcttggcatttgtgtgcagttgatagtggctttaggcttgaggagtcatttttttatgagaaccattagaatttagaggctttttattttctttttaattcaagtaaaatacagagtttaataagaccaaaaggaaggagagcaacatgcggagtttttcttctttgtttggtcactgcaactgcattctgcgcagagaataaccagttgaggaagactttacatttttatctgtaaatggtgctgtctattgctaatattttgtccgatatagtttttttttctattttggggaataaaggtttaggtgagccgtgagcaaagactattccatcatcaagtaagttacgtattcaactaggagtgcataacatctgagacaaggtttctcttctactgtatatgaaaggtatttatgatttgagagaatatcctttcctct

SEQ ID NO: 17415 - protein, 275 aa, Glycine max
CTTIIKVSTMRKRINMESDADFNSFATSSSSTTPSIFFDTNTSSTSSSSTSPTSNSESCTKEHSKTPQNDSTTSQTSLENGKDSKGCKKRQIDNSNQNHHPTYRGVRMRNWGKWVSEIREPRKKSRIWLGTYPTAEMAARAHDVAALAIKGHSAYLNFPELAQELPRPVSTSPKDIQAAAAKAANTAFEEVRHCQITEEEAEQNQAEQASSSTLSMDNPQEPSSSHSTIDDDTLFDLPDLFPDGNNGLCSFSSSWHLCAVDSGFRLEESFFYENH

SEQ ID NO: 17416 - protein, 266 aa, Glycine max
MRKRINMESDADFNSFATSSSSTTPSIFFDTNTSSTSSSSTSPTSNSESCTKEHSKTPQNDSTTSQTSLENGKDSKGCKKRQIDNSNQNHHPTYRGVRMRNWGKWVSEIREPRKKSRIWLGTYPTAEMAARAHDVAALAIKGHSAYLNFPELAQELPRPVSTSPKDIQAAAAKAANTAFEEVRHCQITEEEAEQNQAEQASSSTLSMDNPQEPSSSHSTIDDDTLFDLPDLFPDGNNGLCSFSSSWHLCAVDSGFRLEESFFYENH

SEQ ID NO: 17417 - protein, 260 aa, Glycine max
MESDADFNSFATSSSSTTPSIFFDTNTSSTSSSSTSPTSNSESCTKEHSKTPQNDSTTSQTSLENGKDSKGCKKRQIDNSNQNHHPTYRGVRMRNWGKWVSEIREPRKKSRIWLGTYPTAEMAARAHDVAALAIKGHSAYLNFPELAQELPRPVSTSPKDIQAAAAKAANTAFEEVRHCQITEEEAEQNQAEQASSSTLSMDNPQEPSSSHSTIDDDTLFDLPDLFPDGNNGLCSFSSSWHLCAVDSGFRLEESFFYENH

SEQ ID NO: 17418 - DNA, 739 bp, Glycine max
tcacccactcactcacactccctcggccttcactcacacaccaactaagcccacggagcaagcacactagctagtttctgccatggcagctcgccgtgcccacgccgccgcgaccttggccctgctggtggcggcgcttgtgctgtctgcggcaccggcgccggcggagggtgcggttgcgaactgcggccaggtggtgagctacctggccccgtgcatcagttacgccatgggcagggtgagtgcgcctggcggtggctgctgcagcggcgtgcgtggccttaacgcggcggctgccacccccgccgaccgcaagaccacctgcacctgcctcaagcagcaggcgagcggcataggcggcatcaagcccaacctcgtcgctggcatccccggcaagtgcggcgtcaacatcccctacgccatcagccaaggaaccgattgctccaaggtgcgttaagcgtgagatcagaaccatttcagatgcatggtgagagcgaaataaatcgtggaagccggccgtccttgctgcatggctccaccgcgtttaatttactgctttactagttctactgtttccctaataaataaattagttttactgctgctgctgcttcgatcgtacgttgtggcgcagttgttgccacgagagctgtgatcttgtactcctgaggggacctcgtgtactttgtcggaactattgtaatgcatgcttacatctatatatagatgatgaacaaac

SEQ ID NO: 17419 - protein, 124 aa, Glycine max
MAARRAHAAATLALLVAALVLSAAPAPAEGAVANCGQVVSYLAPCISYAMGRVSAPGGGCCSGVRGLNAAAATPADRKTTCTCLKQQASGIGGIKPNLVAGIPGKCGVNIPYAISQGTDCSKVR

SEQ ID NO: 17420 - protein, 75 aa, Glycine max
MGRVSAPGGGCCSGVRGLNAAAATPADRKTTCTCLKQQASGIGGIKPNLVAGIPGKCGVNIPYAISQGTDCSKVR

SEQ ID NO: 17421 - DNA, 621 bp, Glycine max
tagaacatcctaatgcgaaaaaattactcatctcactcttgttcctcttaaaactcgtcctttgatttctctagttctcttcaatggcgatgtcattctcaggagctgttctcagtgggattaattcttctttccccagcggcgtagccaagaagagcggcgtagccaagcagagcggcgttggcgccgtcagatttggccggaaaactgagctcgttgtcgtcgctcagcgcaagaagtcgttgatctacgccgagaaaggtgatggaaacattctcgatgacatcaatgaggccacaaagagagcttcagattacgtgacagacaagacaaaggaggcgttgaaagatggagagaaagcaaaagactacgttgatgagaaaaacgttgaagccaaagacactgcattggatgaagctcagaaagttttggattatgtgaaggaaaaaggaaacgaagcaggagaggataaggacactacaaaggcatgatgattcaaccacttaactagtatatatatatatatgtatcaatccttcatgtttcatgtttaatattatacaataagatcagtttgtttttacttctatttcactatttgaaataaaagatatgttactt

SEQ ID NO: 17422 - protein, 135 aa, Glycine max
MAMSFSGAVLSGINSSFPSGVAKKSGVAKQSGVGAVRFGRKTELVVVAQRKKSLIYAEKGDGNILDDINEATKRASDYVTDKTKEALKDGEKAKDYVDEKNVEAKDTALDEAQKVLDYVKEKGNEAGEDKDTTKA

SEQ ID NO: 17423 - protein, 133 aa, Glycine max
MSFSGAVLSGINSSFPSGVAKKSGVAKQSGVGAVRFGRKTELVVVAQRKKSLIYAEKGDGNILDDINEATKRASDYVTDKTKEALKDGEKAKDYVDEKNVEAKDTALDEAQKVLDYVKEKGNEAGEDKDTTKA

SEQ ID NO: 17424 - DNA, 1958 bp, Glycine max
attggcaatcttcatcaactaagcaaattgccataccattctcttagaaccctctcacaaaagcatggttctctgatgttgttgcagttggggcagactcgagccttggtggtttcatctccagacgcggtcagggaaatcatgaaaactcacgacataactttctcaaaccgacccaaaaccacagcagcaaaaaccttgctgtatggatgtaatgacattggttttgcatcctatggagaaagctggaaacacaaaagaaaaatatgtgtccttgagcttctgagccccaaaagggtgcagtcacttagtctcatcagagaagaagaggttgcagaattgattaacaagatacgtgaagcaagcttgagtgatgcatcctcctctgtgaatctaagtgagttgcttattgaaacaacaaacaacatcatctgtaaatgtgctcttggaaagaaatacagtacagaagattgtcacagcaggatcaaagagcttgcaaagagggcgatgattcaacttggagttgtcactgtgggggatcgctttcctttcttgggttgggttgattttctaactggccaaattcaagaattcaaggctacttttggagcattggatgccttatttgatcaggtaattgcggagcataagaagatgcagagggtatctgatctctgctccactgagaaagactttgtggatatcctcatcatgcctgactctgagctcaccaaggatggcatcaaatcaattctattggtttccctctttttctctcctgtagctttctttttcaaattcaatcgttttagctgacttacttgcagacacaataatttggtcactccaactggtaatttgtattgctctagtctcgaaagtttttttatgtctataaaaattagtccttaaaggggtgaaattatttacaagttgacagtaaacttgatagtgcgttgacacttacaaggactaatttatagatgtgagggtcggaacaatatatgttgttactttagaccaaattatattttaatcctaaaaatatataaaaagcatcattataagccgtctttaaggctcatgattaaagattgctaacttcaggacagtctaatacaacacagaatttttatatcccaaacaaaaaggttgagttcggaattactattaatattatttttataatttcaggatatgtttgtagcaggaagtgaaacaaccgcatcagcactagaatgggctatggcagagctcatgaaaaatccaatgaaattgaagaaagcccaggatgaggtgagaaaatttgtagggaataaatcaaaagtagaggaaaatgacatcaatcaaatggactacatgaaatgtgtaatcaaagaaactctaaggttacatccacctgctcctctcttggctcctagagagacagcatctagtgtgaaactgggagggtatgatattccagcaaaaacactggtatatgtcaatgcatgggcaattcagagggaccctgagttttgggaaagacctgaagagttcattccagagagacatgataacagccgggttcattttaatggccaagacttgcaatttattacatttggttttgggagaagggcatgccccggaatgacgtttgggcttgcttctgttgagtatattctggccaaccttctttattggttcaattggaagctgcctgcaactcacacatctggacaagacatagacatgagtgaaacatatggcctagttacctacaagaaagaggcacttcatcttaaaccaatcccctttttcctttaaatccatggtttaatttactttaaagtgatctatgttataaggagggacggatccaaacaataaatatcagtgtggctaaaatataaaagaaattatagactaaaatatattgaaaataaaaaataatgtttaataaaatatttacaatg

SEQ ID NO: 17425 - protein, 271 aa, Glycine max
IGNLHQLSKLPYHSLRTLSQKHGSLMLLQLGQTRALVVSSPDAVREIMKTHDITFSNRPKTTAAKTLLYGCNDIGFASYGESWKHKRKICVLELLSPKRVQSLSLIREEEVAELINKIREASLSDASSSVNLSELLIETTNNIICKCALGKKYSTEDCHSRIKELAKRAMIQLGVVTVGDRFPFLGWVDFLTGQIQEFKATFGALDALFDQVIAEHKKMQRVSDLCSTEKDFVDILIMPDSELTKDGIKSILLVSLFFSPVAFFFKFNRFS

SEQ ID NO: 17426 - protein, 246 aa, Glycine max
MLLQLGQTRALVVSSPDAVREIMKTHDITFSNRPKTTAAKTLLYGCNDIGFASYGESWKHKRKICVLELLSPKRVQSLSLIREEEVAELINKIREASLSDASSSVNLSELLIETTNNIICKCALGKKYSTEDCHSRIKELAKRAMIQLGVVTVGDRFPFLGWVDFLTGQIQEFKATFGALDALFDQVIAEHKKMQRVSDLCSTEKDFVDILIMPDSELTKDGIKSILLVSLFFSPVAFFFKFNRFS

SEQ ID NO: 17427 - protein, 224 aa, Glycine max
MKTHDITFSNRPKTTAAKTLLYGCNDIGFASYGESWKHKRKICVLELLSPKRVQSLSLIREEEVAELINKIREASLSDASSSVNLSELLIETTNNIICKCALGKKYSTEDCHSRIKELAKRAMIQLGVVTVGDRFPFLGWVDFLTGQIQEFKATFGALDALFDQVIAEHKKMQRVSDLCSTEKDFVDILIMPDSELTKDGIKSILLVSLFFSPVAFFFKFNRFS

SEQ ID NO: 17428 - DNA, 717 bp, Glycine max
aacaacgaatcatgtcaaaaatattcagaagtatgtttgaagctgtgccacgagatgaacatcaaggcaattgatctatggtctgcactccagaaaaggggtaactggagagatgtttgtttcacggatggaattcatcttacttctgaggggagcaatatagtggcaaaagagatcttgaaggtcatcaaagaagcagagtgggaaccttgcctgcactggaattcaatgccaactgaatatggagaagattcaccttatgatcctgttggccctgatggaaagacaactgtgaatgtctccaactggaccttccttgaaactaaggaatgggactagagtgatgtgtatttgaaaactatagacatgcccctattcatagaagcctaagcaataatcacaaaataactggaatttatatagaactgtggctaaagaaaaatatattgttcttagttcacatatctgcatcatttgtcactggtttttcaccatgtgagtgggatgatttggtgactgtaattgcactttgattgagctaattgcctagttattttcaccattttatggttgtctttcactaaggttatacacaatagttggataggtgggggcacattatagaaacaaaagtcacatgatcaattgtgggcctgtatctgtgtatgacaatattttttcattttgtgcaacttgtgtatggcttatatgctttgt

SEQ ID NO: 17429 - protein, 112 aa, Glycine max
NNESCQKYSEVCLKLCHEMNIKAIDLWSALQKRGNWRDVCFTDGIHLTSEGSNIVAKEILKVIKEAEWEPCLHWNSMPTEYGEDSPYDPVGPDGKTTVNVSNWTFLETKEWD

SEQ ID NO: 17430 - protein, 94 aa, Glycine max
MNIKAIDLWSALQKRGNWRDVCFTDGIHLTSEGSNIVAKEILKVIKEAEWEPCLHWNSMPTEYGEDSPYDPVGPDGKTTVNVSNWTFLETKEWD

SEQ ID NO: 17431 - DNA, 1129 bp, Glycine max
tttgtgtgtattccttttcagggagttaagtggaagatggggttgtcaacagcaaggacaagcataggatcagtttgtgtttgtgccatctcaaagcctctccgccgtcactgccatttcctcccaacctctgtttctcctgtcttctcatgtcttcagaaaaagtgcaaattgaattttcaaaaaccagttcaagatgctgcagactcaaaaatatcatgtagcttagtgaatgtggaagatgggatagatgatgaagcatgtgaattagtcagtggagtggagctttcacttgaggagggtgatgaaaatatccgtgcttatctgttcaaggcagtaaaaaataacaatggaactggcctattgcttctttcagatgttttcgggtttgaggattctttcaccagagattttgcatatcgagtagcttgcaatggttacaacattctagttccagacttatttcgtggaaatccatggacaaaggaccagcaagatccagatgtgtttgaaaaatggattgctagacaaaacccagagaggatcgcagaagacattaccagatggacaaaatggctggttgatgaattcatggctgtaggaatttccaagaaacttggcattattggattctgctttggaggtggccaagtgttgaaggtgctggccaaagaccaaggtgcttgttttggcaccggagtctccttttatggtacaaggatagatccccttgctgcttctgatataaaagctcctgtcttgtttattttaggggacaatgacccactttgccaggtaagtgaaattgagaatgttgagaaaaaaattgctagcggctccaaagtagtcttattccctggtagaggtcacggatttgcccaccgacctggatctcctgaagaagatgtggatgctgaacaagcctatgtgattatgagagactggctatatgatcgtttggtcgtataaaattatatgtattgtatatatccaacacttgcgtcttaacatgtcaatagtgacctgtcaacattttgaatacattctcttttcagtcaaggaaattcccttgtactaacataattctagggccgttacttgatgatgcattatagtttaaattaggaac

SEQ ID NO: 17432 - protein, 322 aa, Glycine max
FVCIPFQGVKWKMGLSTARTSIGSVCVCAISKPLRRHCHFLPTSVSPVFSCLQKKCKLNFQKPVQDAADSKISCSLVNVEDGIDDEACELVSGVELSLEEGDENIRAYLFKAVKNNNGTGLLLLSDVFGFEDSFTRDFAYRVACNGYNILVPDLFRGNPWTKDQQDPDVFEKWIARQNPERIAEDITRWTKWLVDEFMAVGISKKLGIIGFCFGGGQVLKVLAKDQGACFGTGVSFYGTRIDPLAASDIKAPVLFILGDNDPLCQVSEIENVEKKIASGSKVVLFPGRGHGFAHRPGSPEEDVDAEQAYVIMRDWLYDRLVV

SEQ ID NO: 17433 - protein, 310 aa, Glycine max
MGLSTARTSIGSVCVCAISKPLRRHCHFLPTSVSPVFSCLQKKCKLNFQKPVQDAADSKISCSLVNVEDGIDDEACELVSGVELSLEEGDENIRAYLFKAVKNNNGTGLLLLSDVFGFEDSFTRDFAYRVACNGYNILVPDLFRGNPWTKDQQDPDVFEKWIARQNPERIAEDITRWTKWLVDEFMAVGISKKLGIIGFCFGGGQVLKVLAKDQGACFGTGVSFYGTRIDPLAASDIKAPVLFILGDNDPLCQVSEIENVEKKIASGSKVVLFPGRGHGFAHRPGSPEEDVDAEQAYVIMRDWLYDRLVV

SEQ ID NO: 17434 - DNA, 1099 bp, Glycine max
agataaaggaattgaaatcgaggctgctgcaagaagagaacacagcaggaagcggtgtttcggtgaaggaagaagagataacaacgatgcctgcagactcagaagagaaaacgatggaacaaagtaagagtgacccaccttctgaaacctcgaacattaatcctagttcggagtcgtcggaggaggaccacttgaattacgaatgtttcaacaacaacagcgacgactgtgtcgtcggaggatccgccgcagcatcgctcttgcaagtggacttcatgaaagacggttcttccgacagcgacggatcaagcgcgatcttgaacgaagacaccatgtacttgccgtcttcgatgaactgttttcagttccagaaaccgtatcatcacgcgcagtacgtgaagacggaggagcacaatttcttgagcgccgatgaggcctgcaatttcttctccgatgaacaagcaccgaccctgcaatggtactgtccagaacagtggagctgagatagaagaaacatgggaaaattggaaaccgctttcagaaatttttgtttaatatgttgcacggttgtgttgaacacagctcattgaggtaaaagttgtaaaaaaaggttgccacttgccaacagaggctgcttgaaggtagaaaatgaaacactgtgcagaagatagagttacgaaagagagaacagagatcaatggctgcatggcgtggggtcggagatgaaggatgacgattaaggttaattattactctcgatcgtgggtaatatcaataattattcaatcgtaaagcaaaccatgctgtaaaaaacaaatttcaattcaagtatagaataacgatgtagtactttatcaaacagaaaacgaaaaaaaaaattataaatctgttaaacaatatccttttgcctcactgaactcagtttactagtgtttatgattgattatccttttcctgtaaaagtatttttttttcaccaacaattgctactaaactgaatttgagttggaggcaacatatgagttgttttttaatgttcatttccattgacattgtttattcattagtcgtgtcaagtaaaaatatttttgttattagt

SEQ ID NO: 17435 - protein, 166 aa, Glycine max
IKELKSRLLQEENTAGSGVSVKEEEITTMPADSEEKTMEQSKSDPPSETSNINPSSESSEEDHLNYECFNNNSDDCVVGGSAAASLLQVDFMKDGSSDSDGSSAILNEDTMYLPSSMNCFQFQKPYHHAQYVKTEEHNFLSADEACNFFSDEQAPTLQWYCPEQWS

SEQ ID NO: 17436 - protein, 138 aa, Glycine max
MPADSEEKTMEQSKSDPPSETSNINPSSESSEEDHLNYECFNNNSDDCVVGGSAAASLLQVDFMKDGSSDSDGSSAILNEDTMYLPSSMNCFQFQKPYHHAQYVKTEEHNFLSADEACNFFSDEQAPTLQWYCPEQWS

SEQ ID NO: 17437 - protein, 129 aa, Glycine max
MEQSKSDPPSETSNINPSSESSEEDHLNYECFNNNSDDCVVGGSAAASLLQVDFMKDGSSDSDGSSAILNEDTMYLPSSMNCFQFQKPYHHAQYVKTEEHNFLSADEACNFFSDEQAPTLQWYCPEQWS

SEQ ID NO: 17438 - DNA, 1397 bp, Glycine max
agagaagtggctcaagtaccttagagaagaattacctactgtggccttcaagtgcagcacacaacaacaaagatcaaacttaagtgattgtcttggtgctgatactctcctcaaattgttgaagaattactcaagaagtcatgagatcaagaagtcgatcactgtgggtttgattggcttgcccaatgttggtaagagcagtcttattaatagcttaaagaggtcccatgttgtcaatgttggttctactcctgggttaacaagatcaatgcaagaggttcagttggacaaaaatgttaagttgctggattgccctggtgttgttatgctgaagtctcaagaatatgatgcttccgtggctttaaaaaattgcaagagaattgagaagttagacgatccaattagcccagtgaaagaaattttcaagctctgccctcccgagcagctggtaactcattacaagattggaaccttcaaatttggtgatgttgatgactttctactgaagatagctacagttaggggcaagctcaagaagggtggaatagttgacattaatgctgctgcaagaatcgttcttcatgattggaatgaaggtaaaattatatattataccattcccccaaatagggatcaaggggaacctgcagaggttaagatagtttctgagttttcaaaggagtttaacattgatgaagtctacaagagtgaatcttcatatattgggagccttaaatctgttgatgacttaaatgctgttgaagttccttcaagtcgccctctcaatcttgatgagacaatgttagaggatgagacacaaatcaaaccagctgaacaaggtgaaggtcctggaaacctggctgtggtggatgaatcaatggaagatgatgctggcaagaacaaggggaacagtgaagctggcaggcaaaatgaaaaattatatgccacagatggtatgcttaatacaaaaatgaggcgcgctgagaagaagaaaaggaaaaaggccaagaaagctgtagcctcatcggatcccatggatggtgattatgacttcaaagttgattacttccaaaagggagcgacaatggatgctgaagagagcaagagtgaggatgacgatgaacaagtaagctctgaggtgcctatgaatgagtgatggggtaaatggacttgccatagtttatgggggaaatgaatgaacaagccaacacagccattatttaaacatgatataagggttcctcttaacttcaatttttgtttcgaagattttaaattgctgctgttgatccattatgtatatattattttgggatgtcacgaacaaaattttggataggtcatttgtgtccaattgaggcatatgattatgcaattttgtttccggatttttaccc

SEQ ID NO: 17439 - protein, 384 aa, Glycine max
EKWLKYLREELPTVAFKCSTQQQRSNLSDCLGADTLLKLLKNYSRSHEIKKSITVGLIGLPNVGKSSLINSLKRSHVVNVGSTPGLTRSMQEVQLDKNVKLLDCPGVVMLKSQEYDASVALKNCKRIEKLDDPISPVKEIFKLCPPEQLVTHYKIGTFKFGDVDDFLLKIATVRGKLKKGGIVDINAAARIVLHDWNEGKIIYYTIPPNRDQGEPAEVKIVSEFSKEFNIDEVYKSESSYIGSLKSVDDLNAVEVPSSRPLNLDETMLEDETQIKPAEQGEGPGNLAVVDESMEDDAGKNKGNSEAGRQNEKLYATDGMLNTKMRRAEKKKRKKAKKAVASSDPMDGDYDFKVDYFQKGATMDAEESKSEDDDEQVSSEVPMNE

SEQ ID NO: 17440 - protein, 295 aa, Glycine max
MQEVQLDKNVKLLDCPGVVMLKSQEYDASVALKNCKRIEKLDDPISPVKEIFKLCPPEQLVTHYKIGTFKFGDVDDFLLKIATVRGKLKKGGIVDINAAARIVLHDWNEGKIIYYTIPPNRDQGEPAEVKIVSEFSKEFNIDEVYKSESSYIGSLKSVDDLNAVEVPSSRPLNLDETMLEDETQIKPAEQGEGPGNLAVVDESMEDDAGKNKGNSEAGRQNEKLYATDGMLNTKMRRAEKKKRKKAKKAVASSDPMDGDYDFKVDYFQKGATMDAEESKSEDDDEQVSSEVPMNE

SEQ ID NO: 17441 - protein, 276 aa, Glycine max
MLKSQEYDASVALKNCKRIEKLDDPISPVKEIFKLCPPEQLVTHYKIGTFKFGDVDDFLLKIATVRGKLKKGGIVDINAAARIVLHDWNEGKIIYYTIPPNRDQGEPAEVKIVSEFSKEFNIDEVYKSESSYIGSLKSVDDLNAVEVPSSRPLNLDETMLEDETQIKPAEQGEGPGNLAVVDESMEDDAGKNKGNSEAGRQNEKLYATDGMLNTKMRRAEKKKRKKAKKAVASSDPMDGDYDFKVDYFQKGATMDAEESKSEDDDEQVSSEVPMNE

SEQ ID NO: 17442 - DNA, 1341 bp, Glycine max
acatttcttggcataattcttttctttgaccgtggtttgcttgctctgggaaatattttttccttggcaggggttggcattttgcttggttggcgttccacgtgggcacttttcactaatagagccaactttaaggcactcttctctccttccctcttcattacaaaattgtctgcattaaaatcatagagcttgaattgaatgcagattgtggatctgttaaactagttagattgctttgcctgtcatgtagcagatgatagttttgtaaagtgatggtaacgaatatatacatgacaagaagcgtcttcagatacaacttaaaatatctgtcatcaaattctaaattatgttcagaataatcagagctttccttccagcactccaactaaatgcatgtgctagttgtgatatatggagtatctcaaatttatttttgacatacataacccataaaatttccaagtttcctgatgcctcagtaatctgtcttactccaagtactaaccttgatgaattaaagatttatttgctttggatttccagcatctctttctgtaatgaaacattaagccccgcaaatgttctatttgaatggatgcctgtgtgttttatctttcgtcctttgttcttctactactacatcatgtcttaacgttagttgtgagtgtctttatccaccttgatatagaatttcaaaatactttatgaatcaataatgaaacattctatatggagacaactagcttgcattgccatttttgcagggttctgcatcatttcttctaggtctctttttcatctttgtgaggtggccaattgttggtataatacttgaaatatacggttgtgtttttctcttcagtggattttggtcatctatcaaagtgttcctctaccatatccctgttgttggatggattatacagtttatctctcctccttgattgtcacagaagggatttaacggatagcctcttagtatatggctaatcatgggtttcgattgtcttggtaatttttccaatgacttgtgtatgaatgcaatgtcttggctagtttttccaagagtttgcatcaggcaaattagcttcctttagtgagaagtatcgcagcatgcaatttatgtaaaagagttggtacttggtaggctaattttgttgtttcaaggctcatatatacaagctggttatgctgttcaggctcgctactgatgtcagactgaacatatgtttacttttggctttatgcgccttgtcattgtcaagacctcgccaaaggatgttgaaattctttttgtatatttttggtttatgaaagattcacgggttattagtgttt

SEQ ID NO: 17443 - protein, 101 aa, Glycine max
MFRIIRAFLPALQLNACASCDIWSISNLFLTYITHKISKFPDASVICLTPSTNLDELKIYLLWISSISFCNETLSPANVLFEWMPVCFIFRPLFFYYYIMS

SEQ ID NO: 17444 - protein, 62 aa, Glycine max
TFLGIILFFDRGLLALGNIFSLAGVGILLGWRSTWALFTNRANFKALFSPSLFITKLSALKS

SEQ ID NO: 17445 - DNA, 1514 bp, Glycine max
aattcccatctacagttagccccaaatctggggttagggtttcctctgcgtcgatggcttcgaattcgatcgacggcgacgccgttacggggtcgggactgtgcataaacgacgtgttaagggacgacgagctgcgttccattctggggcgagtggagagcgagaaggacaaggaaacgttcgggttggtctgcaagcgatggcttcggttgcagagcacggaaaggaagaaactcgccgcacgtgcgggtccccacatgctccgaaaaatggccgataggttcacacgcttagtcgaactggacctcgctcagtccgtctctcgttccttctatcccggcgtcaccgattccgatctcgccgtcatcgccactgccttcacttgcttgaagatcctcaatttgcataattgtaaaggaattacagatgctggaatgaaggctattggtgaacatctttccttattacagtcgttggatgtgtcttactgtagaaagctgactgacaagggattatcagctgttgccaaaggctgttgtgacttaaggatattgcatatggcgggttgcagatttgttactgatggtgtattagaagctctctccaaaaattgcggtaacttagaggagttgggattgcatggctgcacaagcattactgacaatggactgataaaccttgcaagtggatgtcgacggatcaggtttttagacataaataaatgtagtaatgccactgatgttggggtttctagtgtttctagggcttgttcatcttctctcaagacattgaaattgttagattgctataaaattggggatgaaaccatattatccctcgccgaattctgtggtaatctggagactttaatcattggtggttgccgggatgtctctgctgatgcgataaggtcgctggctgctgcatgtggaagcagccttaaaaacttgaggatggattggtgtttaaacatttctgattcttcattgagctgtgttttaagtcaatgcagaaaccttgaggcactggacattggttgctgtgaagagttgactgatgctgcttttcagctattaagcaatgaggagcctggattgagtttgaagattttgaagattagtaattgtccaaagatcacagtggcaggtataggcatcattgtgggtaaatgcacgtctctgcaatacttggatgtgaggtcatgcccgcatattacaaaggctggcctagatgaggctggtttccattttcctgaatgctgcaagattaattttaatggtagcgttaatgagcctgttgtgcttctttgatactctaattattttaaaagattggcttcatagttaaatgttcctatataaactttattgataaggcgtgcctttgtatatttgatgagaatgtggtctgttctggtgatgttagttttcttgtgcaactcacgtatcatgtatgtcagtaaatgacattggatgtatcatattttattgatcagttcagctgtaaatttgaag

SEQ ID NO: 17446 - protein, 435 aa, Glycine max
FPSTVSPKSGVRVSSASMASNSIDGDAVTGSGLCINDVLRDDELRSILGRVESEKDKETFGLVCKRWLRLQSTERKKLAARAGPHMLRKMADRFTRLVELDLAQSVSRSFYPGVTDSDLAVIATAFTCLKILNLHNCKGITDAGMKAIGEHLSLLQSLDVSYCRKLTDKGLSAVAKGCCDLRILHMAGCRFVTDGVLEALSKNCGNLEELGLHGCTSITDNGLINLASGCRRIRFLDINKCSNATDVGVSSVSRACSSSLKTLKLLDCYKIGDETILSLAEFCGNLETLIIGGCRDVSADAIRSLAAACGSSLKNLRMDWCLNISDSSLSCVLSQCRNLEALDIGCCEELTDAAFQLLSNEEPGLSLKILKISNCPKITVAGIGIIVGKCTSLQYLDVRSCPHITKAGLDEAGFHFPECCKINFNGSVNEPVVLL

SEQ ID NO: 17447 - protein, 418 aa, Glycine max
MASNSIDGDAVTGSGLCINDVLRDDELRSILGRVESEKDKETFGLVCKRWLRLQSTERKKLAARAGPHMLRKMADRFTRLVELDLAQSVSRSFYPGVTDSDLAVIATAFTCLKILNLHNCKGITDAGMKAIGEHLSLLQSLDVSYCRKLTDKGLSAVAKGCCDLRILHMAGCRFVTDGVLEALSKNCGNLEELGLHGCTSITDNGLINLASGCRRIRFLDINKCSNATDVGVSSVSRACSSSLKTLKLLDCYKIGDETILSLAEFCGNLETLIIGGCRDVSADAIRSLAAACGSSLKNLRMDWCLNISDSSLSCVLSQCRNLEALDIGCCEELTDAAFQLLSNEEPGLSLKILKISNCPKITVAGIGIIVGKCTSLQYLDVRSCPHITKAGLDEAGFHFPECCKINFNGSVNEPVVLL

SEQ ID NO: 17448 - protein, 350 aa, Glycine max
MLRKMADRFTRLVELDLAQSVSRSFYPGVTDSDLAVIATAFTCLKILNLHNCKGITDAGMKAIGEHLSLLQSLDVSYCRKLTDKGLSAVAKGCCDLRILHMAGCRFVTDGVLEALSKNCGNLEELGLHGCTSITDNGLINLASGCRRIRFLDINKCSNATDVGVSSVSRACSSSLKTLKLLDCYKIGDETILSLAEFCGNLETLIIGGCRDVSADAIRSLAAACGSSLKNLRMDWCLNISDSSLSCVLSQCRNLEALDIGCCEELTDAAFQLLSNEEPGLSLKILKISNCPKITVAGIGIIVGKCTSLQYLDVRSCPHITKAGLDEAGFHFPECCKINFNGSVNEPVVLL

SEQ ID NO: 17449 - DNA, 1341 bp, Glycine max
gtggttgtgggtaggtgctgctgctgcttccattcctattcttacagtgaaggttcaatggaagggacaatgcagcttgcatacgagactgttgtgaagctcatgctggctgcactcgaacgcaacgtgctccctgacgtcatcaccaggagactcacgcgcttgctgttggctactcgccttcgctctgcttacaaaccctcctcccaacttcaactctccgatctcctctacttcgcgcattcattacaagagatgcccatagcaatcaacactgacaagcctaagtctcaacattatgaattaccaaccgctttcttcaagctcgtcctcggaaacaatctcaaatacagctgttgttatttctcttctgcctcaatgacgctggatgatgctgaagaagcaatgttgaaactgtactgtgagagatcaaacctgaaagatggtcatacagtgcttgatgtgggatgcggttggggatcgttggctctatacattgccaagaattacactaactgtagggttacaggaatctgcaattccacaactcaaaaggcttatattgaggagaagtgtagggatcttcagctgcaaaatttgaatattatagttgctgatattagcacatttgaaatggagacttcttatgacagaatattttccatagaaatgtttgagcatatgaagaactataaagatcttctgaagaagatatccaaatggatgaaagaggatagccttttatttgttcattacttctgccacaaagcatttgcctaccactttgaggacaaaaatgaagatgactggattacaagatacttctttactggaggaactatgccttcggcaaatctacttctttatttccaagatgatgttactgtcaccaaccattggctagtaaatgggaaacactacgcacagaccagtgaagaatggctcaaaagaatggaccagagaatgactttcatcaagccaattatgcaatcaacatacggcaaggactcagctaccaagtggactgcttattggagaacattcttcatagctgtagcagaactttttggatacaataacggtgaagaatggatggttgcacacttccttttcaaaaagaaataaataagccgaaacctagtctttttatttgactatttgagaacggccttaggacaaaaaagctgctacacgaggttgcacccttcaataatgttgtatacttttattagttaacttgttttagttggttgcttgtctttatttttccctgttgtaatggtgttgccactccaaccttattttatcttaaattttgggaaagtccaattcaaccctcgg

SEQ ID NO: 17450 - protein, 374 aa, Glycine max
VVVGRCCCCFHSYSYSEGSMEGTMQLAYETVVKLMLAALERNVLPDVITRRLTRLLLATRLRSAYKPSSQLQLSDLLYFAHSLQEMPIAINTDKPKSQHYELPTAFFKLVLGNNLKYSCCYFSSASMTLDDAEEAMLKLYCERSNLKDGHTVLDVGCGWGSLALYIAKNYTNCRVTGICNSTTQKAYIEEKCRDLQLQNLNIIVADISTFEMETSYDRIFSIEMFEHMKNYKDLLKKISKWMKEDSLLFVHYFCHKAFAYHFEDKNEDDWITRYFFTGGTMPSANLLLYFQDDVTVTNHWLVNGKHYAQTSEEWLKRMDQRMTFIKPIMQSTYGKDSATKWTAYWRTFFIAVAELFGYNNGEEWMVAHFLFKKK

SEQ ID NO: 17451 - protein, 355 aa, Glycine max
MEGTMQLAYETVVKLMLAALERNVLPDVITRRLTRLLLATRLRSAYKPSSQLQLSDLLYFAHSLQEMPIAINTDKPKSQHYELPTAFFKLVLGNNLKYSCCYFSSASMTLDDAEEAMLKLYCERSNLKDGHTVLDVGCGWGSLALYIAKNYTNCRVTGICNSTTQKAYIEEKCRDLQLQNLNIIVADISTFEMETSYDRIFSIEMFEHMKNYKDLLKKISKWMKEDSLLFVHYFCHKAFAYHFEDKNEDDWITRYFFTGGTMPSANLLLYFQDDVTVTNHWLVNGKHYAQTSEEWLKRMDQRMTFIKPIMQSTYGKDSATKWTAYWRTFFIAVAELFGYNNGEEWMVAHFLFKKK

SEQ ID NO: 17452 - protein, 351 aa, Glycine max
MQLAYETVVKLMLAALERNVLPDVITRRLTRLLLATRLRSAYKPSSQLQLSDLLYFAHSLQEMPIAINTDKPKSQHYELPTAFFKLVLGNNLKYSCCYFSSASMTLDDAEEAMLKLYCERSNLKDGHTVLDVGCGWGSLALYIAKNYTNCRVTGICNSTTQKAYIEEKCRDLQLQNLNIIVADISTFEMETSYDRIFSIEMFEHMKNYKDLLKKISKWMKEDSLLFVHYFCHKAFAYHFEDKNEDDWITRYFFTGGTMPSANLLLYFQDDVTVTNHWLVNGKHYAQTSEEWLKRMDQRMTFIKPIMQSTYGKDSATKWTAYWRTFFIAVAELFGYNNGEEWMVAHFLFKKK

SEQ ID NO: 17453 - DNA, 1691 bp, Glycine max
gaagattgtatttcttcttgcagaagtagagaaaagttgaagaaggaatctcctaagactgaaaaaaacccaatggatttgaattcctctccttccaacaacacaattgccgtgaatggaacaatccccgtcgcttccacgttcgcaaccgccaccgcgccgtcggataaccctccgccggcggacagctccggcgaccggaaacccatcgccctgtggccggggatgtaccattctccggtgaccaccgccctatgggaagctcgcagcaatattttcgagaggcttctggaccctcccagggacgctcctccgcagagtgaattgctcacgagaaccccctcgcagagcaggaccagcatcttgtacaacttctcctctgatttcgtgctcagagaacagtatagggatccctggaatgaggttcgaattgggaagttgctcgaagatcttgatgccctcgctggaactatttccgtcaagcattgttctgatgaagctagcacaacaaggccacttatagttgtcactgcttcagttgataagattgtactaaagaagccaattagtgttgacattgatctcaagatagttggttttgttatatgggttgggcactcttcaatagagattcaactggaggttactcagtccaatgaagagggcaatgattcagactcagtagcactgacagccaacttcatatttgttgctcgggactcaaaaactgggaaagctgctccggtgaatcgactttcaccagaaaatgctcatgaaaaacttctgtttgaacaagctgaggcaagaagtaatttgaggaaaacgaaaagaggaggggaaaagagggactttgagaatggggagaaaaataggcttcgggccctattggctgaaggaagaatcttctgtgacatgccagctttagcagaccgaaacagcattcttctaaaggataccagccttgagaatgccttaatatgccagccacagcaaaggaacatccatggtcgaatatttggaggtttcttgatgcatcgtgcatttgaattggctttctcaacagcatatgcctttgctggattagctccttgctttcttgaagttgatcatgttgatttcttaagacctgttgatgtaggggactttttgcgtctcaaatcttgtgttctgtacacggaggttcacgatccagatcagccacttattaacgttgaagttgttgctcatgttacacgacccgagctgcgtactagtgaggtatcaaatactttccacttctctttcactgtccgtccagaagccaaggcgatgaaaaatggatttaaacttcgcaatgtagtaccagcaacggaggaagaagcacgacgtatattagagcgcatagatgctgacaacttgaatgaattcttcagagcataagaagaaaaacatcaattagctgataaagtatttaaaatatccaccgctaattatgtgagcagaatttcaaagatgattaactctcttatataataaatttttctgcccaattttaagagggaactagtatgccttatatgtctagcatcattggacttgatagaaggcaactggtgtttagacaagtatatgaacctgaatctagtaggcacctgctgtgcaagttgtataaggaaaaacataggtaagccaatgaaagaaagtttacaatg

SEQ ID NO: 17454 - protein, 472 aa, Glycine max
EDCISSCRSREKLKKESPKTEKNPMDLNSSPSNNTIAVNGTIPVASTFATATAPSDNPPPADSSGDRKPIALWPGMYHSPVTTALWEARSNIFERLLDPPRDAPPQSELLTRTPSQSRTSILYNFSSDFVLREQYRDPWNEVRIGKLLEDLDALAGTISVKHCSDEASTTRPLIVVTASVDKIVLKKPISVDIDLKIVGFVIWVGHSSIEIQLEVTQSNEEGNDSDSVALTANFIFVARDSKTGKAAPVNRLSPENAHEKLLFEQAEARSNLRKTKRGGEKRDFENGEKNRLRALLAEGRIFCDMPALADRNSILLKDTSLENALICQPQQRNIHGRIFGGFLMHRAFELAFSTAYAFAGLAPCFLEVDHVDFLRPVDVGDFLRLKSCVLYTEVHDPDQPLINVEVVAHVTRPELRTSEVSNTFHFSFTVRPEAKAMKNGFKLRNVVPATEEEARRILERIDADNLNEFFRA

SEQ ID NO: 17455 - protein, 448 aa, Glycine max
MDLNSSPSNNTIAVNGTIPVASTFATATAPSDNPPPADSSGDRKPIALWPGMYHSPVTTALWEARSNIFERLLDPPRDAPPQSELLTRTPSQSRTSILYNFSSDFVLREQYRDPWNEVRIGKLLEDLDALAGTISVKHCSDEASTTRPLIVVTASVDKIVLKKPISVDIDLKIVGFVIWVGHSSIEIQLEVTQSNEEGNDSDSVALTANFIFVARDSKTGKAAPVNRLSPENAHEKLLFEQAEARSNLRKTKRGGEKRDFENGEKNRLRALLAEGRIFCDMPALADRNSILLKDTSLENALICQPQQRNIHGRIFGGFLMHRAFELAFSTAYAFAGLAPCFLEVDHVDFLRPVDVGDFLRLKSCVLYTEVHDPDQPLINVEVVAHVTRPELRTSEVSNTFHFSFTVRPEAKAMKNGFKLRNVVPATEEEARRILERIDADNLNEFFRA

SEQ ID NO: 17456 - protein, 397 aa, Glycine max
MYHSPVTTALWEARSNIFERLLDPPRDAPPQSELLTRTPSQSRTSILYNFSSDFVLREQYRDPWNEVRIGKLLEDLDALAGTISVKHCSDEASTTRPLIVVTASVDKIVLKKPISVDIDLKIVGFVIWVGHSSIEIQLEVTQSNEEGNDSDSVALTANFIFVARDSKTGKAAPVNRLSPENAHEKLLFEQAEARSNLRKTKRGGEKRDFENGEKNRLRALLAEGRIFCDMPALADRNSILLKDTSLENALICQPQQRNIHGRIFGGFLMHRAFELAFSTAYAFAGLAPCFLEVDHVDFLRPVDVGDFLRLKSCVLYTEVHDPDQPLINVEVVAHVTRPELRTSEVSNTFHFSFTVRPEAKAMKNGFKLRNVVPATEEEARRILERIDADNLNEFFRA

SEQ ID NO: 17457 - DNA, 1363 bp, Glycine max
tagtagcatctttattctcagaatatggtcagaagctgaggactatgtatcaggcaaatacaactgtgaccagggaagtaataagagtttatcagccaagtcatgaagagcgtcaaaagtcaaataatgacatgcacaacattaaggcatggacagaaatatatttgctgagtttgtgtgatgcattggttacaagcccgaagtctacttttgggtatgttgctcatagtcttggaggtttgaagccatggattttgcagagggcgtatggggaaaccatcccagatccaccttgtcgtcgagctaagtccatggagccttgtttccattatcctcccaagtatgactgtagggccaatagcacagttgattttacttccatttttcatcatatgaagcattgtgaagatgtatctagtggtttgaggctggttaatgttaagcactaggtaacaaacaaacttgacacgagcactgagttatttgctaattgctattacaactaatgtcaataatccctgtttgctctaatatttcattactttactttctcctcctttttttgatagcgtttgatattgtctagactagagagacagagcatttggttttgcgatttccttgtcacttttcactatttccagtcactcagcacagggatcctcctatttctaaatctctgggttagaggctaaagattttattattggcaagagatacattgtaggccttagacgaatttccagttataccaaatggagtgcaactgcttaggatattgttctccaccattaagtcttgtactatgtaatggttgtttgcgatttaaacctgttttaccacattgaaggtggtttgtgttcatgtggactacacacaaatgcttgtaagctttaagaatgaatggcatttgaggtgaaatcctaaatatatcatcaatgacaacatcgaggctattttttatggatgtattttttacagcagggacctatgatggtgttggttctccattctgagaaaggtcgtagatataattcaacttgagaaggatggtctgtccacagaaacctgcacaagatatatgcattattattcaatatcgttatggcaaacttctttagttggttccaggaattctgaaggtctctgccaattttgctgctgaactacctcaaaggcatgtaatgattagtttagctaaaatgtttctagccaaacaactccttttcccccttgttttaactgttatttattcattatcttacattatttaattgtgaattagaacttttgtagtatttaaacaagcaattgaagttgttataagcataaataatttatgacaacattgacaagtaccatt

SEQ ID NO: 17458 - protein, 148 aa, Glycine max
VASLFSEYGQKLRTMYQANTTVTREVIRVYQPSHEERQKSNNDMHNIKAWTEIYLLSLCDALVTSPKSTFGYVAHSLGGLKPWILQRAYGETIPDPPCRRAKSMEPCFHYPPKYDCRANSTVDFTSIFHHMKHCEDVSSGLRLVNVKH

SEQ ID NO: 17459 - protein, 134 aa, Glycine max
MYQANTTVTREVIRVYQPSHEERQKSNNDMHNIKAWTEIYLLSLCDALVTSPKSTFGYVAHSLGGLKPWILQRAYGETIPDPPCRRAKSMEPCFHYPPKYDCRANSTVDFTSIFHHMKHCEDVSSGLRLVNVKH

SEQ ID NO: 17460 - protein, 105 aa, Glycine max
MHNIKAWTEIYLLSLCDALVTSPKSTFGYVAHSLGGLKPWILQRAYGETIPDPPCRRAKSMEPCFHYPPKYDCRANSTVDFTSIFHHMKHCEDVSSGLRLVNVKH

SEQ ID NO: 17461 - DNA, 1682 bp, Glycine max
tgtcattaacggaaaagaagccgtgcaaccttctttccaatgtacgaaaccaattctcaccaaactgatttcgtccgacgatgatatcatcattgtcgactctgtcataaacgggaccgtcccatcgtattctctcgaatcgtgcctgggggattcccgccgggcggcagcgatccggcgggaggtggtgcagagagaaacggggcggtcgctggcgggtctacccctggaggattttgattacgatgcaattctggggcagtgctgcgagatgccggtggggtacgtgcagcttccggtgggggtggcggggccgctgctgctggacggggcggagtacacggtgccgatggcgacgacggaggggtgcctcgtggcgagtacaaacagagggtgcaaggcgatttacgcgtccggtggggcgagcagtgtggtgttcagagatgggatgagtagagcgccggttgtgagattcgcgaccgtgactagggctgcggagttgatgttctatttggaagatcctctcaattttgataccttggcggtcgttttcaacaggtcaagtagatttggcaggcttcaaagcattaagtgctctattgcagggaagaatgtttatattagatttacctgtagcacaggtgacgccatggggatgaacatggtttccaaaggggtccagaatgttcttgatttccttcaaagtgatttccctgatatggatgttattggcatctctggaaattactgttcagacaagaaacctgctgcagtaaattggattgagggacgtgggaagtcagtggtttgtgaagcaattatcaaagatgatgtggtgaagaaggtgctgaagaccagtgtggctgctttggtagagcttaacatgctcaaaaaccttgctggttctgctgttgctggtgctcttggtggattcaatgctcatgccagcaacattgtttctgccatttttatagccactggtcaagatccagctcagaatgtggagagttctcattgcataaccatgatggaagccgtgaatgatggcagagaccttcacatctcagtgaccatgccttccatagaggttggtacagtggggggtggaacacaactaccatctcaatctgcttgcttgaatctgctcggcgtaaagggtgcgagcaaggattcaccgggatcgaactcgagacttttggccaccattgttgctggatctgttctagcaggggagctgtcactgatgtctgctatagctgcagggcagctagtgaagagccacatgaaatataacagatcaagcaaagatatgtctaaagtgtcatcatcctgagaaggaaggagcatgtggttccagccttacttgatgccaaaagcagagaaaagcgtcgttttgatgggtcaggaattttgagagggaaaaggaagacatcactttgctggcaccccatgtgaggttttttggcttgtattgattgatgtctgggaatgtatcattagttgtaatgtgcaaaagcagaggtcttctttattggtgacccccctctggaccattcattcattatacaagtttggtagcatagatggtgatccattggttggatcttaaggttctccgaagcctgagatattttttatgggttgtattataaattctaggcttaattattatttctcattcg

SEQ ID NO: 17462 - protein, 443 aa, Glycine max
VINGKEAVQPSFQCTKPILTKLISSDDDIIIVDSVINGTVPSYSLESCLGDSRRAAAIRREVVQRETGRSLAGLPLEDFDYDAILGQCCEMPVGYVQLPVGVAGPLLLDGAEYTVPMATTEGCLVASTNRGCKAIYASGGASSVVFRDGMSRAPVVRFATVTRAAELMFYLEDPLNFDTLAVVFNRSSRFGRLQSIKCSIAGKNVYIRFTCSTGDAMGMNMVSKGVQNVLDFLQSDFPDMDVIGISGNYCSDKKPAAVNWIEGRGKSVVCEAIIKDDVVKKVLKTSVAALVELNMLKNLAGSAVAGALGGFNAHASNIVSAIFIATGQDPAQNVESSHCITMMEAVNDGRDLHISVTMPSIEVGTVGGGTQLPSQSACLNLLGVKGASKDSPGSNSRLLATIVAGSVLAGELSLMSAIAAGQLVKSHMKYNRSSKDMSKVSSS

SEQ ID NO: 17463 - protein, 353 aa, Glycine max
MPVGYVQLPVGVAGPLLLDGAEYTVPMATTEGCLVASTNRGCKAIYASGGASSVVFRDGMSRAPVVRFATVTRAAELMFYLEDPLNFDTLAVVFNRSSRFGRLQSIKCSIAGKNVYIRFTCSTGDAMGMNMVSKGVQNVLDFLQSDFPDMDVIGISGNYCSDKKPAAVNWIEGRGKSVVCEAIIKDDVVKKVLKTSVAALVELNMLKNLAGSAVAGALGGFNAHASNIVSAIFIATGQDPAQNVESSHCITMMEAVNDGRDLHISVTMPSIEVGTVGGGTQLPSQSACLNLLGVKGASKDSPGSNSRLLATIVAGSVLAGELSLMSAIAAGQLVKSHMKYNRSSKDMSKVSSS

SEQ ID NO: 17464 - protein, 327 aa, Glycine max
MATTEGCLVASTNRGCKAIYASGGASSVVFRDGMSRAPVVRFATVTRAAELMFYLEDPLNFDTLAVVFNRSSRFGRLQSIKCSIAGKNVYIRFTCSTGDAMGMNMVSKGVQNVLDFLQSDFPDMDVIGISGNYCSDKKPAAVNWIEGRGKSVVCEAIIKDDVVKKVLKTSVAALVELNMLKNLAGSAVAGALGGFNAHASNIVSAIFIATGQDPAQNVESSHCITMMEAVNDGRDLHISVTMPSIEVGTVGGGTQLPSQSACLNLLGVKGASKDSPGSNSRLLATIVAGSVLAGELSLMSAIAAGQLVKSHMKYNRSSKDMSKVSSS

SEQ ID NO: 17465 - DNA, 1636 bp, Glycine max
agttagaactccaccgccacccaagaggccacgcgccgatggcgatgacggacagctagtcatctacgaggatccgccggagtcatcccctccttcggagcaaatgctctgcacctatcaatgtcgccaaatggtcaaatccgattttattgatgccttaagcaaagctgaaaatcaagctcgtcattatcaatccaagtttgagacattggagcctcatttccgcaaagttgaatctgagaggaagaaatttcaggaccaattcttatacgcccaacaggaacttgcagctgcaaaaggccgcgagcaggcactccaagaccaactcttgaaggaggccactcagtctcaagaacgattaagaaaacaaattcaattaaacactcaactccaggttaagctccaaaatgagacagaccttcgccaaaaagctgactctcatgctgcttcaacagaggagaaagcagcatctttagaaggaaaactaggccatctctccgaaagtatagagagggaaaaaaagcgacttcatgatgagcattcacaactgaaaagcgactcaaacttgtctatttctagaatatccgcaaatcttgaacaaatggaatgcagagctaataatgctgagaaagaagcagagctgctaaaagaacaactgaaacatcttaaggatcaacttgatgagtgtttgcatcagaagattgaagttgaaaaaaactatctactttaatgtctcaagaagttgcttctacagagagtaatgttttagttaaacatttgcaacaggagcttcggaactatgaatctgaagtaagggaggcaagaaaactaagttcaagtcatgagaacattgagcttttgaaggagaaaattttggaggaaaagagccaccgggaaagggcagaatcagagctatccaagttacaggatatccagttaaacatgaaaaagttagaggatcaaatatcatcatggagagtgatgattacagacatacctggtgtctcatgttttgaggacctgcctgttaaatttgcagctttacaaaaagaagtcatttatggcacacagaaggagggtgagatcactgctcgcttgaaacaaatggaggtggctctggatgctgctgaaattggtaaacaaaatgctgaagctgaggctgagttggcaaaagacaaagcagaagtattaaaatcagaaattaaaggaattgaattaatgcttgctgttgttaccgaggaaaggaataaattaagaaattttgccaatttgaagaatgatgaaactctagatgcttcaaaaaatgcaaactctgttcaggaacctgaatcatctcttatgaagaaagatgattgtgttaaagatttagaaagtaccttgcatgagcagagattggttaataattgtcaattagaggaaatcaagttacttaatgaaaagttgcacagtgaagcaagaagagtgaagtcattggagagggagagtgaccggctccggtcagagatttcattattagaggcaaagttgggtcatggtgatttttctgctgctaatacaaaagttctgcggatggtgaatacacttaccgttgataatgaggccaaacaaacaatagaggcactgcaaactgagctgc

SEQ ID NO: 17466 - protein, 302 aa, Glycine max
MSQEVASTESNVLVKHLQQELRNYESEVREARKLSSSHENIELLKEKILEEKSHRERAESELSKLQDIQLNMKKLEDQISSWRVMITDIPGVSCFEDLPVKFAALQKEVIYGTQKEGEITARLKQMEVALDAAEIGKQNAEAEAELAKDKAEVLKSEIKGIELMLAVVTEERNKLRNFANLKNDETLDASKNANSVQEPESSLMKKDDCVKDLESTLHEQRLVNNCQLEEIKLLNEKLHSEARRVKSLERESDRLRSEISLLEAKLGHGDFSAANTKVLRMVNTLTVDNEAKQTIEALQTEL

SEQ ID NO: 17467 - protein, 242 aa, Glycine max
VRTPPPPKRPRADGDDGQLVIYEDPPESSPPSEQMLCTYQCRQMVKSDFIDALSKAENQARHYQSKFETLEPHFRKVESERKKFQDQFLYAQQELAAAKGREQALQDQLLKEATQSQERLRKQIQLNTQLQVKLQNETDLRQKADSHAASTEEKAASLEGKLGHLSESIEREKKRLHDEHSQLKSDSNLSISRISANLEQMECRANNAEKEAELLKEQLKHLKDQLDECLHQKIEVEKNYLL

SEQ ID NO: 17468 - protein, 231 aa, Glycine max
MKKLEDQISSWRVMITDIPGVSCFEDLPVKFAALQKEVIYGTQKEGEITARLKQMEVALDAAEIGKQNAEAEAELAKDKAEVLKSEIKGIELMLAVVTEERNKLRNFANLKNDETLDASKNANSVQEPESSLMKKDDCVKDLESTLHEQRLVNNCQLEEIKLLNEKLHSEARRVKSLERESDRLRSEISLLEAKLGHGDFSAANTKVLRMVNTLTVDNEAKQTIEALQTEL

SEQ ID NO: 17469 - DNA, 1419 bp, Glycine max
agtaattgaaacttgtctccatgaaaatggctatcaaagttcaagagataacaaaagcactttgataccagatggggtttcagatttgctgagtgtgaaggcaaggattagagcggttgaaaaatcaatggtggaagaaatcaagaagcttgtgaaggaagacaatttaaccactaaagctaatccaggagctctgacaaaggcaacaaatgtggaagtttcaccctatgtggagaattgcaacagaaaagaagacaaggtacccaaggatgagagcacacatgatgtcaactcgtggagaacaaaaactgaaaatgggtcattgatgaaagatattccacttgatcacatctcagacaattcagcctccaaaagttgcaggagagaaaatagtggtactgatgatcagatgcttgaattatgggaaactgccgagcaagattgctttgctagttccatgattagtgaagcaatgaaacaaagttctgttccaacagaggatgttattgcataccatcagtcagatcattcaggtaaattccaaaatacctcttcagaattggatgtggaaaaggaattgggtgttgacaggcttcagttgtcgagaagtataaaagagagaactcaagatggcaagaggagaaagatactggagaggctttcttctgatgcgcagaaactgaccattctcaagacagctgtgcaagatttgaaacagaaaatggagacgaagagaagcaagaagggagtcgagactgaatatgaaacagtcaaaagacaaatagacgaagttgagggagctgttgtcaaattagtagatactaatgatcaactgacaaaggatcttgaagagagcgccccatctctaaacaggcagacttcagccgagttggaaaagagtagacacatccagagaaaaagagtaaccgagcaggcgcgaaaaggttctgaacagataggaaggttgcagtttgaggtgcagaacatccaatacactttgctgaaattggctgatgaaaagagcaaagggaagagcagattcactggaaaaacagtggtcttgcttaaggactttattcacagtggcaagagaagtagcaaaaagcgcaacaaggggttctgtggatgctcaaggccttcaactaatgaggactaagtgagaaaatttagaatcattttgttgtaagtaccttctttaattggtatgtgtctaatcttagcataataattttaattttagctgttaaagatgctgttaggctttatctgatcacagtaacttatgtcagatttgtatgttctagctttcagaggacatgtactgagcgacattttcgctaaggagttgcgctgtcatgtttgacaatgtttaagctatgaaagcacagagcagagaataaagcttttcaccctttcttc

SEQ ID NO: 17470 - protein, 384 aa, Glycine max
VIETCLHENGYQSSRDNKSTLIPDGVSDLLSVKARIRAVEKSMVEEIKKLVKEDNLTTKANPGALTKATNVEVSPYVENCNRKEDKVPKDESTHDVNSWRTKTENGSLMKDIPLDHISDNSASKSCRRENSGTDDQMLELWETAEQDCFASSMISEAMKQSSVPTEDVIAYHQSDHSGKFQNTSSELDVEKELGVDRLQLSRSIKERTQDGKRRKILERLSSDAQKLTILKTAVQDLKQKMETKRSKKGVETEYETVKRQIDEVEGAVVKLVDTNDQLTKDLEESAPSLNRQTSAELEKSRHIQRKRVTEQARKGSEQIGRLQFEVQNIQYTLLKLADEKSKGKSRFTGKTVVLLKDFIHSGKRSSKKRNKGFCGCSRPSTNED

SEQ ID NO: 17471 - protein, 342 aa, Glycine max
MVEEIKKLVKEDNLTTKANPGALTKATNVEVSPYVENCNRKEDKVPKDESTHDVNSWRTKTENGSLMKDIPLDHISDNSASKSCRRENSGTDDQMLELWETAEQDCFASSMISEAMKQSSVPTEDVIAYHQSDHSGKFQNTSSELDVEKELGVDRLQLSRSIKERTQDGKRRKILERLSSDAQKLTILKTAVQDLKQKMETKRSKKGVETEYETVKRQIDEVEGAVVKLVDTNDQLTKDLEESAPSLNRQTSAELEKSRHIQRKRVTEQARKGSEQIGRLQFEVQNIQYTLLKLADEKSKGKSRFTGKTVVLLKDFIHSGKRSSKKRNKGFCGCSRPSTNED

SEQ ID NO: 17472 - protein, 276 aa, Glycine max
MKDIPLDHISDNSASKSCRRENSGTDDQMLELWETAEQDCFASSMISEAMKQSSVPTEDVIAYHQSDHSGKFQNTSSELDVEKELGVDRLQLSRSIKERTQDGKRRKILERLSSDAQKLTILKTAVQDLKQKMETKRSKKGVETEYETVKRQIDEVEGAVVKLVDTNDQLTKDLEESAPSLNRQTSAELEKSRHIQRKRVTEQARKGSEQIGRLQFEVQNIQYTLLKLADEKSKGKSRFTGKTVVLLKDFIHSGKRSSKKRNKGFCGCSRPSTNED

SEQ ID NO: 17473 - DNA, 1197 bp, Glycine max
tttcttccaaggaagagcttcgcttcctcatcgaacctctcgctaaaccccagctcgtcgatcttcttgccaaactagggtcccaatatccttcaattgcagaagaaataaaaagtattgcaagtgcagatcctgcccatcgaaagctttttgtccgtggcttggcctggaataccacttcagaaactttgcgtgctgcatttcaagagcatggagaaattgaggaaggagctgtgatctatgataaagtgacaggaaaatcccgtggctatggatttataactttcaaaaatatggaatcaactcagcaagcattgagagcccctagcaagttaatcgatgggagattggctgtctgtaatctagcttgtgagagtctaagtggaacaagtagtgctcctgatctttccctgaggaagctttacattggaagcttatcaccagaagtcacaagtgaaattctccttaactattttgcaaggcatggtgaaatagaggaaggttcagttgcatatgacagggatacaaatgaatcacgtggttttggctttgtcacatacaagacagcggaggctgcgaagaaggccatagatgacctagaaaagacacttgggggaagaaatatagttgtaaaatatgctgattcccaaaaaggtaaaactggccagccaccatttcctgctggagtggttccgatggcagcattacctatgaacccaggatatatgcagcagcctggaaaagctaatgttagttcaaggcccccaatcaattacagttacccccaaactgtagcaccatattctgcacttccttatccaaaccctcccactgctccctctccttatccgacacaagggcagattccttatcctcaagtttctgcaaagaaagaccgacatgggtttctgcctactcaacctgtaggaatgaacaactacccttattactatcccaagcaatgaatgtatttttaaaactaaagatgatgattttggtactcctttctttgctttccttttcaaatctttttagcccctagttatctcttccatgcagcttttgatctcttgtagaattttgacattcttatgttacttgtaatattgagtagaattttttttatatatttttttctgaatattttaaacgggagtaacattttttctgcatttaagctaagactttgaagtttcg

SEQ ID NO: 17474 - protein, 320 aa, Glycine max
SSKEELRFLIEPLAKPQLVDLLAKLGSQYPSIAEEIKSIASADPAHRKLFVRGLAWNTTSETLRAAFQEHGEIEEGAVIYDKVTGKSRGYGFITFKNMESTQQALRAPSKLIDGRLAVCNLACESLSGTSSAPDLSLRKLYIGSLSPEVTSEILLNYFARHGEIEEGSVAYDRDTNESRGFGFVTYKTAEAAKKAIDDLEKTLGGRNIVVKYADSQKGKTGQPPFPAGVVPMAALPMNPGYMQQPGKANVSSRPPINYSYPQTVAPYSALPYPNPPTAPSPYPTQGQIPYPQVSAKKDRHGFLPTQPVGMNNYPYYYPKQ

SEQ ID NO: 17475 - protein, 223 aa, Glycine max
MESTQQALRAPSKLIDGRLAVCNLACESLSGTSSAPDLSLRKLYIGSLSPEVTSEILLNYFARHGEIEEGSVAYDRDTNESRGFGFVTYKTAEAAKKAIDDLEKTLGGRNIVVKYADSQKGKTGQPPFPAGVVPMAALPMNPGYMQQPGKANVSSRPPINYSYPQTVAPYSALPYPNPPTAPSPYPTQGQIPYPQVSAKKDRHGFLPTQPVGMNNYPYYYPKQ

SEQ ID NO: 17476 - DNA, 1659 bp, Glycine max
attctaggttccgcaccccgcaaaggaacccgaacctgccatgtgctcgtcgcattccccgaaccaccgttcgaaatgcagagctccagcacctgccaatgccatcatcttcctccttgtaccactcctctgttccctctccttcattaacgtcaattcccagattctagaagcatgctctgccgctacggattgtgggccaggtttgttctgtggcaattgcccctctttgggcttgaagcaacccatctgcaccagaggccaagtcacacttcccacttccattgtcaatgggttgcccttcaacaagtacacgtggatagtgacccacaattccttcagcattgtcgatgcaccgcctttgcccggtgttcagagaattaccttttacaatcaagaagacactgtcactaaccagttgaggaatggagttaggggactgatgttggacatgtacgacttccagaatgatatatggctctgtcactcatttcgcgggcaatgcttcaacttcactgcatttcaaccggcagttaatactttgaaagaagtggaggcgttcttgacggaaaatccaactgagattgttaccatcataattgaagactatgtgcacactccaaaggggttgactaatgtgttcacaagtgctggactggataagtattggtttcctgtgtccaagatgccgaaaaagggtgacgattggcccactgtgacggagatggttcaagcaaatcaccgacttgttgttttcacttccgatgcttcaaaggaagcaggggaaggaatagcttatcagtggaagcacatggttgaaaatgagtctggagatcctggagtgcaacagggttcttgtccgcacagaaaagaatcaaaggcattaaattctaaaagtcattcacttttcctgatgaattactttccgacatatccagttgaagctgactcttgcaaagagcattcagctccacttgctgagatggtcaatacctgttacaaagctgcagggaatttgatgcccaactttatagctgttaatttttacatgaggagtgatggaggtggtgtttttgatattgtggataaaatgaatggccatacactgtgtgggtgtagcactgtcacagcctgccaggtgggtgtaccctttgggtcttgcaagaatatttctgtacctagtacgagtccagtgactaatactgctggaagctttactggatctgttcagttctctaaatcagcttcagctgtccatcttccaaattgtttgcttgtcgtcttttacttcctgcaaagtcttgctgcaactatgatgactataagcactgttttataacttatgtaaggtagtctttaaagaaggatctctagtatcttagcatgtacactgcagtattgtctcaagctgtgaaatgtcatggaactgttactaggttagaaaaattagatatagacaaattcttgtttcttgctgaggttatgttcaaggatctgtgaagttatttgagttggtagtcatgagagaccaagaatttatctggagctataagtagttcaggtatgttatagttatacttatattcttggatgtacaaatcaaattctagatattgcaagtatgcaactctggatgcatcactttctttcttttctctc

SEQ ID NO: 17477 - protein, 432 aa, Glycine max
MCSSHSPNHRSKCRAPAPANAIIFLLVPLLCSLSFINVNSQILEACSAATDCGPGLFCGNCPSLGLKQPICTRGQVTLPTSIVNGLPFNKYTWIVTHNSFSIVDAPPLPGVQRITFYNQEDTVTNQLRNGVRGLMLDMYDFQNDIWLCHSFRGQCFNFTAFQPAVNTLKEVEAFLTENPTEIVTIIIEDYVHTPKGLTNVFTSAGLDKYWFPVSKMPKKGDDWPTVTEMVQANHRLVVFTSDASKEAGEGIAYQWKHMVENESGDPGVQQGSCPHRKESKALNSKSHSLFLMNYFPTYPVEADSCKEHSAPLAEMVNTCYKAAGNLMPNFIAVNFYMRSDGGGVFDIVDKMNGHTLCGCSTVTACQVGVPFGSCKNISVPSTSPVTNTAGSFTGSVQFSKSASAVHLPNCLLVVFYFLQSLAATMMTISTVL

SEQ ID NO: 17478 - protein, 298 aa, Glycine max
MLDMYDFQNDIWLCHSFRGQCFNFTAFQPAVNTLKEVEAFLTENPTEIVTIIIEDYVHTPKGLTNVFTSAGLDKYWFPVSKMPKKGDDWPTVTEMVQANHRLVVFTSDASKEAGEGIAYQWKHMVENESGDPGVQQGSCPHRKESKALNSKSHSLFLMNYFPTYPVEADSCKEHSAPLAEMVNTCYKAAGNLMPNFIAVNFYMRSDGGGVFDIVDKMNGHTLCGCSTVTACQVGVPFGSCKNISVPSTSPVTNTAGSFTGSVQFSKSASAVHLPNCLLVVFYFLQSLAATMMTISTVL

SEQ ID NO: 17479 - protein, 295 aa, Glycine max
MYDFQNDIWLCHSFRGQCFNFTAFQPAVNTLKEVEAFLTENPTEIVTIIIEDYVHTPKGLTNVFTSAGLDKYWFPVSKMPKKGDDWPTVTEMVQANHRLVVFTSDASKEAGEGIAYQWKHMVENESGDPGVQQGSCPHRKESKALNSKSHSLFLMNYFPTYPVEADSCKEHSAPLAEMVNTCYKAAGNLMPNFIAVNFYMRSDGGGVFDIVDKMNGHTLCGCSTVTACQVGVPFGSCKNISVPSTSPVTNTAGSFTGSVQFSKSASAVHLPNCLLVVFYFLQSLAATMMTISTVL

SEQ ID NO: 17480 - DNA, 1128 bp, Glycine max
acaagctgatgatgacaagatgaacttcattgaatcggtcttctcctttgtatttggagatggtgatcccaatcaaggaattgaagaagagagatggaagttgattgggcaatacatagcatctaatggtggcgttgttgcagctgaagaacttgctccatatcttgatatagattccacagagggaattaaggatgatgaatcctatattttacctgtgctcttacgatttgatggtcaacctgatgttgatgaggagggaaatattctgtataggtttccatctttgcagaggacagcttctcaaaagagtaagagaaaagaatatgttggaaggagatgggcagattgggttggaattgagaagtttttcaaggagaaaaaatggcaattcagtaaaactggcacgccagagagagcaatggtcattggcctgggtggcctcaatctgtttggagttattattcttggaaccatgttgaaagatatggcagttgcacccagtagcttcattaaatttgtagccgacatatttcctcttcttcagatttatgctggttccttctttgcaattcctcttgttcggtggttttttattcggaaaaagaatgctgatattgaaaagagaaacaaagctaggcagcagtgtgcacaagttcttgaattacctgacacttcactaaggcagaagcttttcagtgctcgggacatggcccaaaagacagtcataggacaggatcaaattgtgtatagtactgacaaggacttacttgagcaagagtatgaagctcgcgaatgggataaaaagtttcgggagctagagaggtctgattaagggtcaactattaatctgttatacagggcgttgagctctcattttgccatcattgacaactttagcacagcatctaggctgccttctgtgaaagcattgggtagccctggtttattgcaggcatttactggtccatgtatcaatcttaattcgtttctcttaggtccagcaatttaagtgataaatttgtaatgtgatctataaaaaaggaatagtgaaagtttctataggacaaacaatgtaacttaataggcattacctttgtatttatgattttatacgccagagtttcg

SEQ ID NO: 17481 - protein, 277 aa, Glycine max
QADDDKMNFIESVFSFVFGDGDPNQGIEEERWKLIGQYIASNGGVVAAEELAPYLDIDSTEGIKDDESYILPVLLRFDGQPDVDEEGNILYRFPSLQRTASQKSKRKEYVGRRWADWVGIEKFFKEKKWQFSKTGTPERAMVIGLGGLNLFGVIILGTMLKDMAVAPSSFIKFVADIFPLLQIYAGSFFAIPLVRWFFIRKKNADIEKRNKARQQCAQVLELPDTSLRQKLFSARDMAQKTVIGQDQIVYSTDKDLLEQEYEAREWDKKFRELERSD

SEQ ID NO: 17482 - protein, 271 aa, Glycine max
MNFIESVFSFVFGDGDPNQGIEEERWKLIGQYIASNGGVVAAEELAPYLDIDSTEGIKDDESYILPVLLRFDGQPDVDEEGNILYRFPSLQRTASQKSKRKEYVGRRWADWVGIEKFFKEKKWQFSKTGTPERAMVIGLGGLNLFGVIILGTMLKDMAVAPSSFIKFVADIFPLLQIYAGSFFAIPLVRWFFIRKKNADIEKRNKARQQCAQVLELPDTSLRQKLFSARDMAQKTVIGQDQIVYSTDKDLLEQEYEAREWDKKFRELERSD

SEQ ID NO: 17483 - DNA, 917 bp, Glycine max
gaagactcaaactctttcccatggatactctatcatcctactgtttcaaccctcaatgttcccccactcccatcatcaaccttcacaaatcgcgatttctatcgattcaaagcatcccccacccgttcccaacaacaacaacaacatcatgttttctccacttccacacccaattttctccccaaaaccaaaactttctcccacaaatcttccccttctcttccattctccccctcacccctcaaacccaaaccgtcttctccaactttccatccaaatcccgctactgggtatgcggcagcgctggtggacgtcgcccacaacagcaattcccttcactttgttcacagcgatgttcagaggctcttgaaattgctgcagggtgccaagtttcagtcacccgcggttgagcagggaaactttcacaggcacgtggtggcgttgctgaagatgctgctgaagaagaacaaggtggggattgtgaaggaggtgctgcaagagttcgagaggatttacgatcggctttgtgggactcaaatggttttggtttcgtccaagactaagatgagggaagatcaactgtttgggattgcaaagagcgtgcatcaattgagtggggctgtgagagtcaaggtaaggaatttggttcaagagagtatgccctcttttgctatgtgaaatcaaagtcaccattttcatttgatttcatcaatcaatcatagtttgtgcttcttttgatttcatgtacgcacgcatcaatttaatggggactttatatttagttgcgaaatttcactagaatttattttgcccatttacatgccaaacgcaagagcactgctattggaaaaatattgttcatactctgcattatgcaaaatgcaacactaatactttgcaattctatgcaaattacg

SEQ ID NO: 17484 - protein, 225 aa, Glycine max
EDSNSFPWILYHPTVSTLNVPPLPSSTFTNRDFYRFKASPTRSQQQQQHHVFSTSTPNFLPKTKTFSHKSSPSLPFSPSPLKPKPSSPTFHPNPATGYAAALVDVAHNSNSLHFVHSDVQRLLKLLQGAKFQSPAVEQGNFHRHVVALLKMLLKKNKVGIVKEVLQEFERIYDRLCGTQMVLVSSKTKMREDQLFGIAKSVHQLSGAVRVKVRNLVQESMPSFAM

SEQ ID NO: 17485 - protein, 135 aa, Glycine max
RLKLFPMDTLSSYCFNPQCSPTPIINLHKSRFLSIQSIPHPFPTTTTTSCFLHFHTQFSPQNQNFLPQIFPFSSILPLTPQTQTVFSNFPSKSRYWVCGSAGGRRPQQQFPSLCSQRCSEALEIAAGCQVSVTRG

SEQ ID NO: 17486 - protein, 129 aa, Glycine max
MDTLSSYCFNPQCSPTPIINLHKSRFLSIQSIPHPFPTTTTTSCFLHFHTQFSPQNQNFLPQIFPFSSILPLTPQTQTVFSNFPSKSRYWVCGSAGGRRPQQQFPSLCSQRCSEALEIAAGCQVSVTRG

SEQ ID NO: 17487 - DNA, 876 bp, Glycine max
atttttagaggaatggctgtggcggatccaaatgcaccacatggcctaaagctaacaattgaagattaccctttcgccaatgatggtctccttatatgggatgccatcaaagaatgggtatctgagtatgttaaccattactatccaagctcaagcacaatagagtttgaccaagagctccaagcatggtggacagaaattagaacagttggtcatggagacaaatctgaagaaccatggtggccaaatcttaaaacaccaaaggaccttattgaaatcattacaactatagcatgggtatcatctgctcatcatgcagctgttaactttgcccaatatacttatggaggctatttccctaataggccaacaattgttagaaataacattcctacagaggacccctcgaaggaagagttggaaaaactcataaacaacccggagaaaacatttttggagtctttaccatcacaaattcaagcaactttggtgatggtagttttgaatttattatcgaatcattcgccagatgaagagtacattgggcaatatgtggaacaatcgtgggttgagaatcaaactataaaggcagcctttgaaaggtttagtacgaaattgaaggagattgaaggtattatagactcaaggaatgcaaattgtgatttgaaaaataggaatggagctggggtggtgccttatgaactaatgaagccattctcagggcctggagtcactggaaagggtgttccatatagcatatctatttaaagattgttattttatatacaatatttataattaatttcttactaatgcaatgtatgtgttttgtggaatctttaataaaatattcacatagaattttattccccccct

SEQ ID NO: 17488 - protein, 255 aa, Glycine max
IFRGMAVADPNAPHGLKLTIEDYPFANDGLLIWDAIKEWVSEYVNHYYPSSSTIEFDQELQAWWTEIRTVGHGDKSEEPWWPNLKTPKDLIEIITTIAWVSSAHHAAVNFAQYTYGGYFPNRPTIVRNNIPTEDPSKEELEKLINNPEKTFLESLPSQIQATLVMVVLNLLSNHSPDEEYIGQYVEQSWVENQTIKAAFERFSTKLKEIEGIIDSRNANCDLKNRNGAGVVPYELMKPFSGPGVTGKGVPYSISI

SEQ ID NO: 17489 - protein, 251 aa, Glycine max
MAVADPNAPHGLKLTIEDYPFANDGLLIWDAIKEWVSEYVNHYYPSSSTIEFDQELQAWWTEIRTVGHGDKSEEPWWPNLKTPKDLIEIITTIAWVSSAHHAAVNFAQYTYGGYFPNRPTIVRNNIPTEDPSKEELEKLINNPEKTFLESLPSQIQATLVMVVLNLLSNHSPDEEYIGQYVEQSWVENQTIKAAFERFSTKLKEIEGIIDSRNANCDLKNRNGAGVVPYELMKPFSGPGVTGKGVPYSISI

SEQ ID NO: 17490 - DNA, 1289 bp, Glycine max
aagatgaagcagctgaggctgctgaattatgcaggctgcttatggatgattatgaagctgacagaaagaaaaagaagaaagctaaagttatggtgggagaagcaagattggtaccgaagatgcaatcaaaattttcctttgacaatgctgaacaagttaagcaaataactaatactttacaattagatggaactaatcacttgaaagaggatgcaatcacagatcttagggaggaggaaaacgttcctgctaaaaaaagcaaatcactgaaggtcaataaagccaagaagaatgatattatgcctattagtatacccaataaaaaaatcaaattgaatatgggagaaggaattaagaaccaggtatttaaggagaaaaaaccatcaagggaaacttttgtttgtggagcatgtggtaaggctgggcacatgcgaacgaataagaactgtccaaaatatggtgaagatctagaaactcaacttgaatctgcagacatggaaaaatcatctggaaaatctagctttgtggatccctctagtctctcccagcataaagctccctccaaaaagtcaatgtctaaaagcgcaacaaaagttgctcctgttgacaattcaacaaaaattccattgaaattcaaatgcagctccacagagaaatcttctgataaacctgcagtagaaaccctgcagagttctgacaagccagtcacttctgactcagaaactgcaaagtctgctaaggttaataagataattattcccaagaaagtgaaaccagatgatacgctggctgaatctcgtaagcatgctattgttatacggcctcctactgattcaggtagaggacaggttgattctcataagttcccaattaaaatacgcccgccaacagaaatagatagggagcaaagccacaaaaagattgttataaagcgtacaaaggaagttattgatctggaactggacagtcctggtggaaacactggacttcaacacagaaaaactaaaagaattgttgaattgtcaaattttgagaaacaaaagaaacaggagactgtgtatggaactgaaggttttaaaaaatggaacagtaaagaggacagaagatggagggaagagcaagagaaatggagaaatgatgcaaggcttcgagaagaagacagagcaagaaggcatcacaaagaagaaatcaggatgctcaaagagcaagaaaggttagacgagataaaaagatttgaagaagatattagaagagaaagggaggaggaagagcgacaaaaagctaagaag

SEQ ID NO: 17491 - protein, 429 aa, Glycine max
DEAAEAAELCRLLMDDYEADRKKKKKAKVMVGEARLVPKMQSKFSFDNAEQVKQITNTLQLDGTNHLKEDAITDLREEENVPAKKSKSLKVNKAKKNDIMPISIPNKKIKLNMGEGIKNQVFKEKKPSRETFVCGACGKAGHMRTNKNCPKYGEDLETQLESADMEKSSGKSSFVDPSSLSQHKAPSKKSMSKSATKVAPVDNSTKIPLKFKCSSTEKSSDKPAVETLQSSDKPVTSDSETAKSAKVNKIIIPKKVKPDDTLAESRKHAIVIRPPTDSGRGQVDSHKFPIKIRPPTEIDREQSHKKIVIKRTKEVIDLELDSPGGNTGLQHRKTKRIVELSNFEKQKKQETVYGTEGFKKWNSKEDRRWREEQEKWRNDARLREEDRARRHHKEEIRMLKEQERLDEIKRFEEDIRREREEEERQKAKK

SEQ ID NO: 17492 - protein, 416 aa, Glycine max
MDDYEADRKKKKKAKVMVGEARLVPKMQSKFSFDNAEQVKQITNTLQLDGTNHLKEDAITDLREEENVPAKKSKSLKVNKAKKNDIMPISIPNKKIKLNMGEGIKNQVFKEKKPSRETFVCGACGKAGHMRTNKNCPKYGEDLETQLESADMEKSSGKSSFVDPSSLSQHKAPSKKSMSKSATKVAPVDNSTKIPLKFKCSSTEKSSDKPAVETLQSSDKPVTSDSETAKSAKVNKIIIPKKVKPDDTLAESRKHAIVIRPPTDSGRGQVDSHKFPIKIRPPTEIDREQSHKKIVIKRTKEVIDLELDSPGGNTGLQHRKTKRIVELSNFEKQKKQETVYGTEGFKKWNSKEDRRWREEQEKWRNDARLREEDRARRHHKEEIRMLKEQERLDEIKRFEEDIRREREEEERQKAKK

SEQ ID NO: 17493 - protein, 400 aa, Glycine max
MVGEARLVPKMQSKFSFDNAEQVKQITNTLQLDGTNHLKEDAITDLREEENVPAKKSKSLKVNKAKKNDIMPISIPNKKIKLNMGEGIKNQVFKEKKPSRETFVCGACGKAGHMRTNKNCPKYGEDLETQLESADMEKSSGKSSFVDPSSLSQHKAPSKKSMSKSATKVAPVDNSTKIPLKFKCSSTEKSSDKPAVETLQSSDKPVTSDSETAKSAKVNKIIIPKKVKPDDTLAESRKHAIVIRPPTDSGRGQVDSHKFPIKIRPPTEIDREQSHKKIVIKRTKEVIDLELDSPGGNTGLQHRKTKRIVELSNFEKQKKQETVYGTEGFKKWNSKEDRRWREEQEKWRNDARLREEDRARRHHKEEIRMLKEQERLDEIKRFEEDIRREREEEERQKAKK

SEQ ID NO: 17494 - DNA, 1253 bp, Glycine max
gattacctaccttctggatccagtgttcaacaagaacggcatggcaagctccgactgtgtgatttgctagacatttctcctagtctatctgaggcagcacgtgccattgtagatgatacattcacaaggtgcttcaagtcaaatcctccagaaccttggaactggaatgtttatttgtttcctttgtggtgctgtggagttgtggttcgatatttgattttgttccctattaggattctagtgttggcattaggatggattatatttctttcagccttcattccagtgcactccctcctgaaaggaaatgatgatttgaggaaaaagattgagaggtgtttggtggagatgatgtgcagtttctttgttgcatcatggactggggttgtcaagtaccatgggccaagacctagtatccgaccaaaacaggtttttgtggccaatcatacttccatgattgatttcattatcttagaacagatgactgcatttgctgttattatgcagaagcatcctggatgggttggattattgcagagcaccattttggagagtgtggggtgtatctggttcaatcgtacagaggcaaaggatcgagaaattgtggcaaggaaattgagggatcatgtcctgggagctaacaataaccctcttctcatatttcctgaaggaacttgtgtaaataatcactactctgtcatgttcaagaagggtgcatttgaacttggctgcacaatttgcccagttgcaatcaagtacaataaaattttcgtcgatgctttttggaatagtcgaaagcaatcattcaccactcatctcttgcaattaatgacatcttgggctgtagtttgtgatgtttggtacttggagccacaaaatttgaagccaggagagacacccattgaatttgcagagagagttagagacataatctcacatcgtgctgggcttaaaaaggttccttgggatggatatctgaagtattctcgccctagtcccaagcacagagaaggaaagcaacaaatattcgctgagtctgtgttgcggcgctttgaggaaaaataatgtatatctttttactttttcagtaatgattttctccaacccttgtttgtactccacttactactatgatatacatgtagatcttacatgaaattgcctgaaaattttccatgaccagttgcgctctgttatggacaaaactaacaggaactattcatttttaggtatgaaaactttttgcagttaag

SEQ ID NO: 17495 - protein, 354 aa, Glycine max
DYLPSGSSVQQERHGKLRLCDLLDISPSLSEAARAIVDDTFTRCFKSNPPEPWNWNVYLFPLWCCGVVVRYLILFPIRILVLALGWIIFLSAFIPVHSLLKGNDDLRKKIERCLVEMMCSFFVASWTGVVKYHGPRPSIRPKQVFVANHTSMIDFIILEQMTAFAVIMQKHPGWVGLLQSTILESVGCIWFNRTEAKDREIVARKLRDHVLGANNNPLLIFPEGTCVNNHYSVMFKKGAFELGCTICPVAIKYNKIFVDAFWNSRKQSFTTHLLQLMTSWAVVCDVWYLEPQNLKPGETPIEFAERVRDIISHRAGLKKVPWDGYLKYSRPSPKHREGKQQIFAESVLRRFEEK

SEQ ID NO: 17496 - protein, 238 aa, Glycine max
MMCSFFVASWTGVVKYHGPRPSIRPKQVFVANHTSMIDFIILEQMTAFAVIMQKHPGWVGLLQSTILESVGCIWFNRTEAKDREIVARKLRDHVLGANNNPLLIFPEGTCVNNHYSVMFKKGAFELGCTICPVAIKYNKIFVDAFWNSRKQSFTTHLLQLMTSWAVVCDVWYLEPQNLKPGETPIEFAERVRDIISHRAGLKKVPWDGYLKYSRPSPKHREGKQQIFAESVLRRFEEK

SEQ ID NO: 17497 - protein, 237 aa, Glycine max
MCSFFVASWTGVVKYHGPRPSIRPKQVFVANHTSMIDFIILEQMTAFAVIMQKHPGWVGLLQSTILESVGCIWFNRTEAKDREIVARKLRDHVLGANNNPLLIFPEGTCVNNHYSVMFKKGAFELGCTICPVAIKYNKIFVDAFWNSRKQSFTTHLLQLMTSWAVVCDVWYLEPQNLKPGETPIEFAERVRDIISHRAGLKKVPWDGYLKYSRPSPKHREGKQQIFAESVLRRFEEK

SEQ ID NO: 17498 - DNA, 1528 bp, Glycine max
agttcggctttgtcttcaccgaagcaaatttccaacccaattgtatacaagcttgttcgggttgaaggtgatgggaagttagtgcctgcaacggatgatgaagtaatggaggtgggggattttcttgagtatgaaaatagtgaaatgcatgttgtcacaaacactggacaaagtttggaatgcatatcaattgaaagatcatcttctgggaagcttcgattggagtgtttggaagaggcagatttggggaaactaaatgcaaaattacagattttgcaaaaggtcaaagaagaggagaaacatcgcatatcatgtggatcacctgttcattctcatgaaaatatagatagccagtgttcagctgataaatttcctgtcatggatgggaaggttcaatctgaaactccctgccaggaaattccttctatagcatcaagttttaattatactcatagtaatcaatctgggagtattgatcagtgttccagaccttcagaaggagtaatagagagcggatcatctgcttctgctgtctattccaatttaaagtctgatatttcaatgtcagatggagaaatatgcttggacaagctatcaatcagagaactgcatgaactgtttaaggtaacgtttggtcgggaaactactgtgaaagacaaacagtggctgaaaaggaggattgccatgagtttaaccaactcatgtgatgtttcagctacaactttcattattaaagataacaaaatagttagaaaatttgaagaagacagttctggaaatatgaatgctggatctttaatctcttcggaaaatatgactgaagaagatgtcaactttaaggattcatctgctgtagatgcttgtggaattgatgataaccaagttgtttctgaaacaagatcagaaaatggattggaatatgagaattatcagacaggacaaagagctgcaaaaagaattcggagacctacgaagagatatattgaagagctctctgaaaatgaatctagagagcacaatccgaggttgtcaatttctaataaaaccgtgggatttggacatgtttctccaacttcgaatgtcaggcctgctagaaatgctttttcagaggcgagaacatatagcaccaggttagactctcttggaggttctaatgtccaaattccttgtgtgtctcgggttcggagaagtcgtccaagaaaagatatcgcgtctcttatgaaattccatccaactggaatgggtgaggctgaaaaactgagtaataagctccttgagcatagttctgatgctggtagtgacttttcagacaaagttttgaagtcaagaatgcctgcaaagtttcatcaaccatcctcttctgaacctgtgaaagagcagtgtccagtaatatgcccgattgagctacggcaggaattgaggccaaaaagggcagatccatctggccatacttcagatgacaataatatagttactgttcccactgcaaaaggagggatgaggaggaagcatcatcgtgcatggactc

SEQ ID NO: 17499 - protein, 509 aa, Glycine max
SSALSSPKQISNPIVYKLVRVEGDGKLVPATDDEVMEVGDFLEYENSEMHVVTNTGQSLECISIERSSSGKLRLECLEEADLGKLNAKLQILQKVKEEEKHRISCGSPVHSHENIDSQCSADKFPVMDGKVQSETPCQEIPSIASSFNYTHSNQSGSIDQCSRPSEGVIESGSSASAVYSNLKSDISMSDGEICLDKLSIRELHELFKVTFGRETTVKDKQWLKRRIAMSLTNSCDVSATTFIIKDNKIVRKFEEDSSGNMNAGSLISSENMTEEDVNFKDSSAVDACGIDDNQVVSETRSENGLEYENYQTGQRAAKRIRRPTKRYIEELSENESREHNPRLSISNKTVGFGHVSPTSNVRPARNAFSEARTYSTRLDSLGGSNVQIPCVSRVRRSRPRKDIASLMKFHPTGMGEAEKLSNKLLEHSSDAGSDFSDKVLKSRMPAKFHQPSSSEPVKEQCPVICPIELRQELRPKRADPSGHTSDDNNIVTVPTAKGGMRRKHHRAWT

SEQ ID NO: 17500 - protein, 474 aa, Glycine max
MEVGDFLEYENSEMHVVTNTGQSLECISIERSSSGKLRLECLEEADLGKLNAKLQILQKVKEEEKHRISCGSPVHSHENIDSQCSADKFPVMDGKVQSETPCQEIPSIASSFNYTHSNQSGSIDQCSRPSEGVIESGSSASAVYSNLKSDISMSDGEICLDKLSIRELHELFKVTFGRETTVKDKQWLKRRIAMSLTNSCDVSATTFIIKDNKIVRKFEEDSSGNMNAGSLISSENMTEEDVNFKDSSAVDACGIDDNQVVSETRSENGLEYENYQTGQRAAKRIRRPTKRYIEELSENESREHNPRLSISNKTVGFGHVSPTSNVRPARNAFSEARTYSTRLDSLGGSNVQIPCVSRVRRSRPRKDIASLMKFHPTGMGEAEKLSNKLLEHSSDAGSDFSDKVLKSRMPAKFHQPSSSEPVKEQCPVICPIELRQELRPKRADPSGHTSDDNNIVTVPTAKGGMRRKHHRAWT

SEQ ID NO: 17501 - protein, 461 aa, Glycine max
MHVVTNTGQSLECISIERSSSGKLRLECLEEADLGKLNAKLQILQKVKEEEKHRISCGSPVHSHENIDSQCSADKFPVMDGKVQSETPCQEIPSIASSFNYTHSNQSGSIDQCSRPSEGVIESGSSASAVYSNLKSDISMSDGEICLDKLSIRELHELFKVTFGRETTVKDKQWLKRRIAMSLTNSCDVSATTFIIKDNKIVRKFEEDSSGNMNAGSLISSENMTEEDVNFKDSSAVDACGIDDNQVVSETRSENGLEYENYQTGQRAAKRIRRPTKRYIEELSENESREHNPRLSISNKTVGFGHVSPTSNVRPARNAFSEARTYSTRLDSLGGSNVQIPCVSRVRRSRPRKDIASLMKFHPTGMGEAEKLSNKLLEHSSDAGSDFSDKVLKSRMPAKFHQPSSSEPVKEQCPVICPIELRQELRPKRADPSGHTSDDNNIVTVPTAKGGMRRKHHRAWT

SEQ ID NO: 17502 - DNA, 1393 bp, Glycine max
gattcaacaagagctagctccgcaagataaagaaaggtcttagaatacttgcaaacacacaaacacaaaacaccctttttccaagaacaagagcaagagcctcaacctcagagctgtgataacttgttccaatgagcatgttaggcctgagagacctagttctcatagctcaaaccccttcttcccttcaccaccaacaccaaggccaacccatttcagaaaaccagactcacactcacactccaaaccttcctttgccttcttcagcagcttctctcagtgttggctttggaattttccctctcctcactgccacaccatgtgtgccacagcctcatcaaaacaatgaggttcaagagtgtggtggtggtggtgccaatagtaacactaccaccaccaattattggaacctcaagatgtgccaagaagtgaataatcctccaaagaagggtgtgatcaacgtggctgatcatgatgatgagaagggtgtgatggagagtgaggaaaacggggtctatgggcctgactttagggtgtgccaagattgtggcaacagggctaagaaagattgcgtctttagaagatgcaggacttgctgcaagggacgtgggtatgattgtaacactcacgtgaagagcacgtggatcccctccgttcgccgccgcgagcgcgagatcacggtggcttccggtggcggtgttggcggcaatggtggttgtaagaggccaagagctgtggtggggtcatctcaaaatgccacttctcatagttccaactctaatgctacaactcctaagaccttagctactagctcttttcatcaagatgctagcttcaagcagtctttaccgggtcatgttcgtgcaccagcagtgttcaagtgccatagagtctctgccattgggaatggtgaagatgagtttgcatacttggcaacggtccagattagtgggcatgtgttcaaagggtttctctatgaccatggtgttgatgggaaaaccgcaaatgtagtcccttgtgtctcggaactgcagctgggaaacaattgcagtgggaagaacagagaatgttcctctgcaattgcaattggggttgcaaataacaatgcataccctgcttctgcgagttgaagattgctttagagatggaaagatttcaccacagagaacaaattgttttagaatcccatgttgcacctcaaattattgaaagaggtagagggctatgtacccacaaggccacgacgaggactggccaaatggtgatggatcagtttcgtgaacctcaaaagaagccagttcatttgcaattttgttttctgggaaaaatgaccatatatgctaaattggtctttaattgtgtaaatttatcttccaaaaatgtttatatctac

SEQ ID NO: 17503 - protein, 332 aa, Glycine max
MSMLGLRDLVLIAQTPSSLHHQHQGQPISENQTHTHTPNLPLPSSAASLSVGFGIFPLLTATPCVPQPHQNNEVQECGGGGANSNTTTTNYWNLKMCQEVNNPPKKGVINVADHDDEKGVMESEENGVYGPDFRVCQDCGNRAKKDCVFRRCRTCCKGRGYDCNTHVKSTWIPSVRRREREITVASGGGVGGNGGCKRPRAVVGSSQNATSHSSNSNATTPKTLATSSFHQDASFKQSLPGHVRAPAVFKCHRVSAIGNGEDEFAYLATVQISGHVFKGFLYDHGVDGKTANVVPCVSELQLGNNCSGKNRECSSAIAIGVANNNAYPASAS

SEQ ID NO: 17504 - protein, 330 aa, Glycine max
MLGLRDLVLIAQTPSSLHHQHQGQPISENQTHTHTPNLPLPSSAASLSVGFGIFPLLTATPCVPQPHQNNEVQECGGGGANSNTTTTNYWNLKMCQEVNNPPKKGVINVADHDDEKGVMESEENGVYGPDFRVCQDCGNRAKKDCVFRRCRTCCKGRGYDCNTHVKSTWIPSVRRREREITVASGGGVGGNGGCKRPRAVVGSSQNATSHSSNSNATTPKTLATSSFHQDASFKQSLPGHVRAPAVFKCHRVSAIGNGEDEFAYLATVQISGHVFKGFLYDHGVDGKTANVVPCVSELQLGNNCSGKNRECSSAIAIGVANNNAYPASAS

SEQ ID NO: 17505 - protein, 237 aa, Glycine max
MCQEVNNPPKKGVINVADHDDEKGVMESEENGVYGPDFRVCQDCGNRAKKDCVFRRCRTCCKGRGYDCNTHVKSTWIPSVRRREREITVASGGGVGGNGGCKRPRAVVGSSQNATSHSSNSNATTPKTLATSSFHQDASFKQSLPGHVRAPAVFKCHRVSAIGNGEDEFAYLATVQISGHVFKGFLYDHGVDGKTANVVPCVSELQLGNNCSGKNRECSSAIAIGVANNNAYPASAS

SEQ ID NO: 17506 - DNA, 1412 bp, Glycine max
agatatggaagagttactgagctttatgtgtatgacaaattcaatagggtccctgcaaataaggtggaggcaggagatatatgtgcagtatgtggaattactgatattcagatcggggagacaattgctgataaagtatctgggaaaccactaccttcaatcaaggtggaagaaccaacagtgaaaatgtctttctccataaacacttcaccttttgttggccgtgagggaaagtatgttactagtaggaatttaagggacaggctttatcgtgaacttgagcggaatctggctatgaaagttgaagatggtgaaacagctgatacatttgttgtcagtgggcgtggaactttgcatatcaccatacttatagaaaatatgcgaagagaaggatatgaattcatggttgggcctcccaaagttatcaacaagaaggtggatgaaaaactgttggaaccgtatgagattgcaactgtggaggtaccagaagagcacatgggagctgttgttgaacttcttggcaagagacgaggacaaatgttcgatatgcaaggagttggattggaaggaactacactactcaaatataagatcccaacccgtggccttcttggattgcggaattcaattttaactgcctcccgagggactgctattctcaacactgtttttgatagctatgggccttgggctggtgaaattagtactcgggatcaaggctcattggttgcttttgaggatggaacaagtacttcttatgcaatctctagttcacaggagaggggacagatgtttattggtcctggagtggatgtttataaaggtcaaattgttggcatccatcagcgacctggggacttgtccttgaatgtttgcaagaagaaagctgcaaccaacatacgttccaacaaggaacaaacagtgattcttgatacgccattggactatagtctggatgactgcattgaatacatccaagaagatgaactagtagaggtcacccccgcaagtatccgaatgtccaagaatccaaaaattacaaacaagaaaacaaggtagactttcaccgtgaagctgtaacttgcaaatgctttttgagttaaccagttaccgctggtgtgctgaagcgcataactcattaatgtgttgctgctaaagtgacgaagaagtaaatcattaccattgatgtaatgtcacatatattcttccaaagatgcagacagtataggagctggctgaaagccgtattcattatagatattggtcatcacagttgattaaagggatgaagttacactgaattttgttcaatttgtaaagtctatatattagcagtaaggaacaagatattaattcttcatcatatggttattgattggagaatagcaatgcaacaccttggttaaatttcc

SEQ ID NO: 17507 - protein, 352 aa, Glycine max
RYGRVTELYVYDKFNRVPANKVEAGDICAVCGITDIQIGETIADKVSGKPLPSIKVEEPTVKMSFSINTSPFVGREGKYVTSRNLRDRLYRELERNLAMKVEDGETADTFVVSGRGTLHITILIENMRREGYEFMVGPPKVINKKVDEKLLEPYEIATVEVPEEHMGAVVELLGKRRGQMFDMQGVGLEGTTLLKYKIPTRGLLGLRNSILTASRGTAILNTVFDSYGPWAGEISTRDQGSLVAFEDGTSTSYAISSSQERGQMFIGPGVDVYKGQIVGIHQRPGDLSLNVCKKKAATNIRSNKEQTVILDTPLDYSLDDCIEYIQEDELVEVTPASIRMSKNPKITNKKTR

SEQ ID NO: 17508 - protein, 290 aa, Glycine max
MSFSINTSPFVGREGKYVTSRNLRDRLYRELERNLAMKVEDGETADTFVVSGRGTLHITILIENMRREGYEFMVGPPKVINKKVDEKLLEPYEIATVEVPEEHMGAVVELLGKRRGQMFDMQGVGLEGTTLLKYKIPTRGLLGLRNSILTASRGTAILNTVFDSYGPWAGEISTRDQGSLVAFEDGTSTSYAISSSQERGQMFIGPGVDVYKGQIVGIHQRPGDLSLNVCKKKAATNIRSNKEQTVILDTPLDYSLDDCIEYIQEDELVEVTPASIRMSKNPKITNKKTR

SEQ ID NO: 17509 - protein, 254 aa, Glycine max
MKVEDGETADTFVVSGRGTLHITILIENMRREGYEFMVGPPKVINKKVDEKLLEPYEIATVEVPEEHMGAVVELLGKRRGQMFDMQGVGLEGTTLLKYKIPTRGLLGLRNSILTASRGTAILNTVFDSYGPWAGEISTRDQGSLVAFEDGTSTSYAISSSQERGQMFIGPGVDVYKGQIVGIHQRPGDLSLNVCKKKAATNIRSNKEQTVILDTPLDYSLDDCIEYIQEDELVEVTPASIRMSKNPKITNKKTR

SEQ ID NO: 17510 - DNA, 849 bp, Glycine max
atatttcaagcctcttcatagtttccatggttatctaaatataccatttgagattttgaatactatttgggtattgaatgtcacttgagaggagtgaggactaatactttttcttttgtataattgcatcaaattttgcagaatactactcaagtgagatactttgatttaactccctttgttcatggatgaaaaactcaattgaagtaattcactggactactttgtcctcttggtctgaggttgaagctatttgatttctgaatttcgctagtttcttaatctgagtatggctgggaaccaagatcagttagagatcaagtttctgttgagtgatggtacagatattggccccaaaagttatgctgctgccactagtattgcaacactgaaagaaagtgttcttgctcaatggccaaaagataaagagtatggaccaagaactgtaaaagatttgaagttaattagtgccggaaaaatattggagaacaacagaacagtgggagaatgtcagagtcccctgtgtgatctacctggtggagttataacaatgcatgtggttgtgcaaccaccttctgtggagaaagataagaaagtagcaagtgaagcgaagcagagcaaatgtgtttgtgtgatattatagtgtccaaattgaatagaagttgtcatgtatttaggtggttaaaagttacacttgtattcattttaaaagtaatctatggctttcaaaagatttcctcatacacaaattctttgggtgcatgcctcattgtctgattgatgtaaatgctgattgaaatgaactctaaaattattctcgtgcttcagcttgaaaaaaaaaaaaaaaag

SEQ ID NO: 17511 - protein, 117 aa, Glycine max
MAGNQDQLEIKFLLSDGTDIGPKSYAAATSIATLKESVLAQWPKDKEYGPRTVKDLKLISAGKILENNRTVGECQSPLCDLPGGVITMHVVVQPPSVEKDKKVASEAKQSKCVCVIL

SEQ ID NO: 17512 - DNA, 1478 bp, Glycine max
aaaatctctgccccggaacagaaatgagaaagaacctcagaccaataatgccaggagcctcaaaagcatgaatgagaagcggcagccagctgtcccaaacaagagcaaggcagtcaaagcaaaagtgacgaaagcttctgaagaagcctctgttccttcaaagactagcattggtaacaagggaaccaagaaaagcagtgtggtgccattggaatcaaaaccatttctacgcaagggttctcgaatggggcatggaactgctgatcttaacaagaaaaaaggtcctcctaagatggacaaatctctgagagtaagtgcagatcttattgaagatcaagaaagtgagttggttgtcaatgcttcttacttggtcagtcagcattcagatggggacacaatgacacctattcatcagaatgctgctacagaaccagacccacagatacataaccaattgcaatgcggtgagacagaaaacttggaccaaaatcctacagatggtgaggtcttaacatacacaggagagtcttccataaatataaggaatgaagaagaatcaaccatatcaccttctgcctggttggagacagaagaggatctggaaatgcccaagccatgtgaggatgacaccttccaatctgcatctctagccaatgctgccccagtgggatcagctagtcctcgtgttcgtcattctctgtcacagatgctgcaagaagaaagtagtgaacctgacacatgtgagtggggaaatgctgagaatcctcctgccatgatataccaaaaaaatgcacccaaaggtttgaaaagactcctgaaatttgctcggaagagcaagggcgatacaggttccactggctggtctagcccatctgttttttctgaaggagaggatgatgctgaggaatttaaaaattctaataaaaggaatgctgataatctactgagaaaggccgcacaaaatgtgaaaagctacggacaaccgaaaaattcagtacatgaaggatatgaaagaaatttaggtagagatgatggcaagggttctcacaagatgcgagatggacgagatttaggtgctggttcaaccacaagagcgtcaaggtcattcttttctctttcagcttttaggggaagcaagccctccgagtcaaagtttcattagtgccatgggaaactaccattaattttgccatcatcccggcacatggattttgtcaggtttaatatggagttcttcctatttcttctgctagttgcatcaactacagctaaatcagaaataatttcagtgcgttgatgttataaattatatggcaatgtggggtttggtgggaatgctgtaaattcattaaattgtgacgcggtatttcaaaaattataatttatatcatctggctttccctaggaaattttcctatagctggattctttgttgtaatgttgtcccaaacgttcatgaatatggtgctgttacttcg

SEQ ID NO: 17513 - protein, 386 aa, Glycine max
KSLPRNRNEKEPQTNNARSLKSMNEKRQPAVPNKSKAVKAKVTKASEEASVPSKTSIGNKGTKKSSVVPLESKPFLRKGSRMGHGTADLNKKKGPPKMDKSLRVSADLIEDQESELVVNASYLVSQHSDGDTMTPIHQNAATEPDPQIHNQLQCGETENLDQNPTDGEVLTYTGESSINIRNEEESTISPSAWLETEEDLEMPKPCEDDTFQSASLANAAPVGSASPRVRHSLSQMLQEESSEPDTCEWGNAENPPAMIYQKNAPKGLKRLLKFARKSKGDTGSTGWSSPSVFSEGEDDAEEFKNSNKRNADNLLRKAAQNVKSYGQPKNSVHEGYERNLGRDDGKGSHKMRDGRDLGAGSTTRASRSFFSLSAFRGSKPSESKFH

SEQ ID NO: 17514 - protein, 364 aa, Glycine max
MNEKRQPAVPNKSKAVKAKVTKASEEASVPSKTSIGNKGTKKSSVVPLESKPFLRKGSRMGHGTADLNKKKGPPKMDKSLRVSADLIEDQESELVVNASYLVSQHSDGDTMTPIHQNAATEPDPQIHNQLQCGETENLDQNPTDGEVLTYTGESSINIRNEEESTISPSAWLETEEDLEMPKPCEDDTFQSASLANAAPVGSASPRVRHSLSQMLQEESSEPDTCEWGNAENPPAMIYQKNAPKGLKRLLKFARKSKGDTGSTGWSSPSVFSEGEDDAEEFKNSNKRNADNLLRKAAQNVKSYGQPKNSVHEGYERNLGRDDGKGSHKMRDGRDLGAGSTTRASRSFFSLSAFRGSKPSESKFH

SEQ ID NO: 17515 - protein, 305 aa, Glycine max
MGHGTADLNKKKGPPKMDKSLRVSADLIEDQESELVVNASYLVSQHSDGDTMTPIHQNAATEPDPQIHNQLQCGETENLDQNPTDGEVLTYTGESSINIRNEEESTISPSAWLETEEDLEMPKPCEDDTFQSASLANAAPVGSASPRVRHSLSQMLQEESSEPDTCEWGNAENPPAMIYQKNAPKGLKRLLKFARKSKGDTGSTGWSSPSVFSEGEDDAEEFKNSNKRNADNLLRKAAQNVKSYGQPKNSVHEGYERNLGRDDGKGSHKMRDGRDLGAGSTTRASRSFFSLSAFRGSKPSESKFH

SEQ ID NO: 17516 - DNA, 1182 bp, Glycine max
gagaaatgttcgtggatcatgaagatagggttcctgtaaagcttgaagagaatggagcagttggagggccagaaccaatggacatctctacaacatcaacatctcagctatgtggaattcctagttcagatgtgacaattttggaaggtcatacttcagaggtgtgtgcttgtgcatggagccctacaggatctcttcttgcatccggatctggagattcgacagctcgtatctggacaatagcagaagggagatgtaagcctggttcagagaatggccctttgaatgtgttggtgttgaagcatgttaggggtaaaacaaatgaaaagagtaaagatgttactacacttgactggaatggggaagggacacttctcgcaactggttcatatgatgggcaagcaagaatttggaccaccaatggtgaactgaagagtacattaagcaaacacaagggaccaatattctctctgaagtggaataagaaaggagattatcttctgactggaagttgtgatcaaactgcaattgtgtgggatgtgaaggcagaagaatggaaacaacaatttgaatttcattcaggtccaacacttgatgttgattggcgcaacaatgtgtcttttgccacaagttccacagacaatatgatacatgtttgcaaaattggagaaacccaccctataaaaacttttactgggcaccagggtgaagttaattgtgtcaaatgggatcccacaggttcattgctggcctcctgttctgatgatatcacagcaaagatatggagtatgaagcaggatacttatcttcatgacttaagggagcattccaaggagatatataccatcagatggagccccactggtcctggtacaaataaccctaatcataaactggtgttggctagtgcttcatttgactcaactgtaaagctatgggatgtggaacttgggaaactcatctacagcttggatggacacaggcatcctgtatattctgttgctttcagtcccaatggcgattatctagttagtgggtctcttgacagatccatgcacatatggtcattgagggacggcaagattgtcaaaacatacacaggcaatgggggcatttttgaggtctgctggaataaggagggtgacaagattgctgcatgttttgctaataatacagtttgcg

SEQ ID NO: 17517 - protein, 393 aa, Glycine max
EMFVDHEDRVPVKLEENGAVGGPEPMDISTTSTSQLCGIPSSDVTILEGHTSEVCACAWSPTGSLLASGSGDSTARIWTIAEGRCKPGSENGPLNVLVLKHVRGKTNEKSKDVTTLDWNGEGTLLATGSYDGQARIWTTNGELKSTLSKHKGPIFSLKWNKKGDYLLTGSCDQTAIVWDVKAEEWKQQFEFHSGPTLDVDWRNNVSFATSSTDNMIHVCKIGETHPIKTFTGHQGEVNCVKWDPTGSLLASCSDDITAKIWSMKQDTYLHDLREHSKEIYTIRWSPTGPGTNNPNHKLVLASASFDSTVKLWDVELGKLIYSLDGHRHPVYSVAFSPNGDYLVSGSLDRSMHIWSLRDGKIVKTYTGNGGIFEVCWNKEGDKIAACFANNTVC

SEQ ID NO: 17518 - protein, 392 aa, Glycine max
MFVDHEDRVPVKLEENGAVGGPEPMDISTTSTSQLCGIPSSDVTILEGHTSEVCACAWSPTGSLLASGSGDSTARIWTIAEGRCKPGSENGPLNVLVLKHVRGKTNEKSKDVTTLDWNGEGTLLATGSYDGQARIWTTNGELKSTLSKHKGPIFSLKWNKKGDYLLTGSCDQTAIVWDVKAEEWKQQFEFHSGPTLDVDWRNNVSFATSSTDNMIHVCKIGETHPIKTFTGHQGEVNCVKWDPTGSLLASCSDDITAKIWSMKQDTYLHDLREHSKEIYTIRWSPTGPGTNNPNHKLVLASASFDSTVKLWDVELGKLIYSLDGHRHPVYSVAFSPNGDYLVSGSLDRSMHIWSLRDGKIVKTYTGNGGIFEVCWNKEGDKIAACFANNTVC

SEQ ID NO: 17519 - protein, 368 aa, Glycine max
MDISTTSTSQLCGIPSSDVTILEGHTSEVCACAWSPTGSLLASGSGDSTARIWTIAEGRCKPGSENGPLNVLVLKHVRGKTNEKSKDVTTLDWNGEGTLLATGSYDGQARIWTTNGELKSTLSKHKGPIFSLKWNKKGDYLLTGSCDQTAIVWDVKAEEWKQQFEFHSGPTLDVDWRNNVSFATSSTDNMIHVCKIGETHPIKTFTGHQGEVNCVKWDPTGSLLASCSDDITAKIWSMKQDTYLHDLREHSKEIYTIRWSPTGPGTNNPNHKLVLASASFDSTVKLWDVELGKLIYSLDGHRHPVYSVAFSPNGDYLVSGSLDRSMHIWSLRDGKIVKTYTGNGGIFEVCWNKEGDKIAACFANNTVC

SEQ ID NO: 17520 - DNA, 1004 bp, Glycine max
ttgttttatgctcatcttgctaagctggctggaattccggatggagtgcttaatgtggtacctggatttggccaaactgcaggtgttgcaataagcttacacatggacattgataaggtaagctttacgggttcgacagaagtggggcgtgaagtaatgcgtgctgcagctaatagtaatttgaaaccagtttcacttgaactaggaggcaagtcacccgtcatagtttttgatgatgctgatgtagataaagctgctgaacttgctctcctgggcatcctatttaataagggagaaatttgtgttgcgggctcccgtgtgttggttcaagaaggaatctatgatgaatttgagaagaaattggtggagaaagcaaaagcttgggtggttggtgatccttttgatcctaaagttcaacaagggcctcaggttgacaagaagcaatttgaaaagattctttcctatatcgaacaaggaaagaaagaaggggcaactcttttgacagggggcaaaagagtgggcaacaagggttactacattgagcctacaattttctctaatgttaaggaggacatgctcatagtacaagatgaaatatttggccctgtgatggctttgatgaagtttaagactattgaggatgcaattaagattgccaacaatacaagatatggcctagcatcaggcattgtgacaaagagtttggacacagccaacactgtgtcaaggtccattcgtgctggcattgtttggatcaactgttactttgcctttgggaatgacattccttatggagggtacaagatgagtggatttggaagagattttggaatggaagccctacacaagtatcttcaagttaaatctgttgtaactcccatttacaattctccctggctttgaatatctctttgtgttgtgtgggtataaacaatcgtgaacaatgcagaagcttctttacacatatacttcatcagattaataaaattggggcaagttatctc

SEQ ID NO: 17521 - protein, 300 aa, Glycine max
LFYAHLAKLAGIPDGVLNVVPGFGQTAGVAISLHMDIDKVSFTGSTEVGREVMRAAANSNLKPVSLELGGKSPVIVFDDADVDKAAELALLGILFNKGEICVAGSRVLVQEGIYDEFEKKLVEKAKAWVVGDPFDPKVQQGPQVDKKQFEKILSYIEQGKKEGATLLTGGKRVGNKGYYIEPTIFSNVKEDMLIVQDEIFGPVMALMKFKTIEDAIKIANNTRYGLASGIVTKSLDTANTVSRSIRAGIVWINCYFAFGNDIPYGGYKMSGFGRDFGMEALHKYLQVKSVVTPIYNSPWL

SEQ ID NO: 17522 - protein, 266 aa, Glycine max
MDIDKVSFTGSTEVGREVMRAAANSNLKPVSLELGGKSPVIVFDDADVDKAAELALLGILFNKGEICVAGSRVLVQEGIYDEFEKKLVEKAKAWVVGDPFDPKVQQGPQVDKKQFEKILSYIEQGKKEGATLLTGGKRVGNKGYYIEPTIFSNVKEDMLIVQDEIFGPVMALMKFKTIEDAIKIANNTRYGLASGIVTKSLDTANTVSRSIRAGIVWINCYFAFGNDIPYGGYKMSGFGRDFGMEALHKYLQVKSVVTPIYNSPWL

SEQ ID NO: 17523 - protein, 248 aa, Glycine max
MRAAANSNLKPVSLELGGKSPVIVFDDADVDKAAELALLGILFNKGEICVAGSRVLVQEGIYDEFEKKLVEKAKAWVVGDPFDPKVQQGPQVDKKQFEKILSYIEQGKKEGATLLTGGKRVGNKGYYIEPTIFSNVKEDMLIVQDEIFGPVMALMKFKTIEDAIKIANNTRYGLASGIVTKSLDTANTVSRSIRAGIVWINCYFAFGNDIPYGGYKMSGFGRDFGMEALHKYLQVKSVVTPIYNSPWL

SEQ ID NO: 17524 - DNA, 795 bp, Glycine max
tttctgcgacgatggtggcacattcgagttcttggggcagggcactcgtggccatctcgccctataccttctctgccatcggcatcgccgtcgctatcggcgtctccgttctcggcgccgcctgggggatctacatcaccggtagtagcttgatcggcgctgcaatcagggctcctcgaatcacttccaaaaatctcattagtgtaatcttctgtgaagctgttgctatatatggtgttattgtggctattattcttcaaacaaaattagaaagtgttccagcatcaaatatctatgcacctgagtctcttagggctggatatgcaatctttgcatcgggattaatcgtgggctttgcaaatcttgtttgtgggttgtgtgtaggaataattggaagcagctgtgcattgtctgatgcccagaactcttctctctttgtgaaaattcttgtgattgagatctttggtagtgcgctggggctattcggagttattgtcggaattattatgtcagctcaagcaacatggccgacaaaagtttagtttcccttgtatcagaatgtggtgtgggaatgctattatggtagagtgcaatatatcctctgcactgcccgggattaaaagttttctctgtttcctgttggtagaaatgtaaaatccagcgtaatagtttgcctccattacaacattaggctgtattatttaccaatgagttgttaggtcttgtgtatcatcagatatatctgtctgttggttgaattttaatatttttggaggactaaatctttcattaatc

SEQ ID NO: 17525 - protein, 179 aa, Glycine max
SATMVAHSSSWGRALVAISPYTFSAIGIAVAIGVSVLGAAWGIYITGSSLIGAAIRAPRITSKNLISVIFCEAVAIYGVIVAIILQTKLESVPASNIYAPESLRAGYAIFASGLIVGFANLVCGLCVGIIGSSCALSDAQNSSLFVKILVIEIFGSALGLFGVIVGIIMSAQATWPTKV

SEQ ID NO: 17526 - protein, 176 aa, Glycine max
MVAHSSSWGRALVAISPYTFSAIGIAVAIGVSVLGAAWGIYITGSSLIGAAIRAPRITSKNLISVIFCEAVAIYGVIVAIILQTKLESVPASNIYAPESLRAGYAIFASGLIVGFANLVCGLCVGIIGSSCALSDAQNSSLFVKILVIEIFGSALGLFGVIVGIIMSAQATWPTKV

SEQ ID NO: 17527 - DNA, 856 bp, Glycine max
ttcagatggttgtggaagagatgaacatactaagtacaatctttttgagatatgacaatgagaagattttctatccaaattcagttctggcaaccaagccaatcagtaacttctacaggagtccagaaatgagtgattctgttgaatttgctgttgatgtttctacttctattgaaagtattggagctttaaagacgaagttaaaagcatatttggagagtaagcctcaacactggcgccccaaccacagcgtattggttaaggatattgagaatgtaaataagatgaaaatggctttttatgttactcacaccataaattttcagaattatggggataagaacaaccgaagatctgaattagtcctggagttaaagaaaattcttgaagatcttaatattaaatatcatctgctgccccaagaagttcatctcagccatgtaaggtcataagactcaacagcacagacattttgaagataccttatcctttcatacggtgcaagtgtgtagcacaaattttctgtgctattattattgttctagactaatggtttccctcatagtctatccagtttgagatcaaagatggtgtgacaaattgatgattcagttgtttctaggaaaatgtgaatttggtttgtgcactcagcgtttcactatgaattagctgaggtcaagaaagaaagaaagaggaaatttaatggcattgttctgagtaacaaagatcactccaagagctcttacttgaagaacacaagttgtgtcatgtctttgtactcttgtgaagttgcaaattgcacaaagaatgccatgccaagttgccaaataataaagaaaagggactggctgtgagg

SEQ ID NO: 17528 - protein, 149 aa, Glycine max
QMVVEEMNILSTIFLRYDNEKIFYPNSVLATKPISNFYRSPEMSDSVEFAVDVSTSIESIGALKTKLKAYLESKPQHWRPNHSVLVKDIENVNKMKMAFYVTHTINFQNYGDKNNRRSELVLELKKILEDLNIKYHLLPQEVHLSHVRS

SEQ ID NO: 17529 - protein, 148 aa, Glycine max
MVVEEMNILSTIFLRYDNEKIFYPNSVLATKPISNFYRSPEMSDSVEFAVDVSTSIESIGALKTKLKAYLESKPQHWRPNHSVLVKDIENVNKMKMAFYVTHTINFQNYGDKNNRRSELVLELKKILEDLNIKYHLLPQEVHLSHVRS

SEQ ID NO: 17530 - protein, 143 aa, Glycine max
MNILSTIFLRYDNEKIFYPNSVLATKPISNFYRSPEMSDSVEFAVDVSTSIESIGALKTKLKAYLESKPQHWRPNHSVLVKDIENVNKMKMAFYVTHTINFQNYGDKNNRRSELVLELKKILEDLNIKYHLLPQEVHLSHVRS

SEQ ID NO: 17531 - DNA, 1056 bp, Glycine max
tttgcatcggagattgttccaaccatggatgcggaggtccggaagcagtttcagcgttctcttgagaagcaaggcatgaaattcaagctgaagactaaggtggttggagttgatacttctggggatggtgtgaagctaactcttgaaccagcagctggtggtgatcagactacacttgaagcagatgttgtcctggtatctgctggtaggaccccattcactgccgaacttgggttggacaagataggagttgaaactgacaagattggacggattttggtaaatgaaagatttgccacaaatgtctctggtgtttatgcaattggagatgtaattccaggcccaatgttggcacacaaggcggaagaagatggtgttgcttgtgttgagtacatagctggtaaggttggtcatgtggattatgacaaagtccctggcgttgtctatacaatgcccgaggttgcatctgttgggaagacagaggagcaggtgaaggaacttggagttgaataccgtgttggcaagttcccattcctggctaatagcagagctaaggcaattgacaatgctgaaggactggtgaagatattggctgaaaaggagacagacaagatattgggagtgcacattatggcgcccaatgcaggagagcttattcatgaagctgcaatagcactacagtatgatgcatcaagtgaggacattgcacgtgtgtgccatgcacatccaacaatgagcgaggctgtgaaagaagccgcaatggccacttatgacaagcccattcacatctaaagagacggttgctactttcttcttgttatcatttttgtccaagaattttacaatgacttggagatgataccacctctgttaaatttagattcagatttttaaatgcaaattagccccttgtttacttgtttgcataataagaggaatggttgtgttgttcttatccttgttgaataatatatatatctccccttctctctgggacaatattgtaattctgacagggtgaagacaacttaatggaagtgtgggacggttttgatt

SEQ ID NO: 17532 - protein, 263 aa, Glycine max
FASEIVPTMDAEVRKQFQRSLEKQGMKFKLKTKVVGVDTSGDGVKLTLEPAAGGDQTTLEADVVLVSAGRTPFTAELGLDKIGVETDKIGRILVNERFATNVSGVYAIGDVIPGPMLAHKAEEDGVACVEYIAGKVGHVDYDKVPGVVYTMPEVASVGKTEEQVKELGVEYRVGKFPFLANSRAKAIDNAEGLVKILAEKETDKILGVHIMAPNAGELIHEAAIALQYDASSEDIARVCHAHPTMSEAVKEAAMATYDKPIHI

SEQ ID NO: 17533 - protein, 255 aa, Glycine max
MDAEVRKQFQRSLEKQGMKFKLKTKVVGVDTSGDGVKLTLEPAAGGDQTTLEADVVLVSAGRTPFTAELGLDKIGVETDKIGRILVNERFATNVSGVYAIGDVIPGPMLAHKAEEDGVACVEYIAGKVGHVDYDKVPGVVYTMPEVASVGKTEEQVKELGVEYRVGKFPFLANSRAKAIDNAEGLVKILAEKETDKILGVHIMAPNAGELIHEAAIALQYDASSEDIARVCHAHPTMSEAVKEAAMATYDKPIHI

SEQ ID NO: 17534 - protein, 238 aa, Glycine max
MKFKLKTKVVGVDTSGDGVKLTLEPAAGGDQTTLEADVVLVSAGRTPFTAELGLDKIGVETDKIGRILVNERFATNVSGVYAIGDVIPGPMLAHKAEEDGVACVEYIAGKVGHVDYDKVPGVVYTMPEVASVGKTEEQVKELGVEYRVGKFPFLANSRAKAIDNAEGLVKILAEKETDKILGVHIMAPNAGELIHEAAIALQYDASSEDIARVCHAHPTMSEAVKEAAMATYDKPIHI

SEQ ID NO: 17535 - DNA, 1082 bp, Glycine max
gatggtatcataaaaatctcacccttttctgcaactttctctctgacacacaccgaacactcaaacacacacagtgtgcagcagcagcagcaacaacaagagaagaagatggctctgcaactatgggagacattgaaggaggccatagttgcctacacggggctctccccgcccaccttcttcacccttctggccctgatcctagccctatactacgtcgtttctgggctcttcccctcttccgaccaccgccacaacaccgcctcgcgcgacttggagccccagatggagcctctgcgaccccccgttcagatcggcgaggtcaccgaggacgacctcaaggcctacgacggcaccgatcccgagaagcctctcctcatggccatcaagggccagatctatgatgtttcccagagcagaatgttttatggacctggtggaccctatgctctatttgctggcaaggatgctagcagagctttagcaaaaatgtcttttgaagagaaagatctaactggagatatctctggtcttggaccgtttgagcttgaggccttgcaagactgggaatacaaatttatgggcaagtatgtaaaagttggaaccgtaacaaagacagttccagtaactgaaccagaatccactgctgaaccatcagaatctactccccatgatgaatcttcaaagcctactgaagatgatggcccatcagaatcagcagctgctaaaaatgatgaaaccccttcaaaggttgatgcagataaagagtaataatcgttggataaagagtaattgtcttgcaaattctcttgcaaacagtggaaacggttacttagaagcttctgagaaatactgagccttgctgaatgtattcagcaaatgtgggacaaagtttgcctaagtattctgtttgataaataaggaaatcttggtatttaatttcagttttcctgggtttatagcttcttcttgtattccataagatctatattacttagaggcaacaaatcaatgaacatttgagaccatgtactgagccaagtattgaatgaatgcatttggtcttatatatggtatggtat

SEQ ID NO: 17536 - protein, 256 aa, Glycine max
DGIIKISPFSATFSLTHTEHSNTHSVQQQQQQQEKKMALQLWETLKEAIVAYTGLSPPTFFTLLALILALYYVVSGLFPSSDHRHNTASRDLEPQMEPLRPPVQIGEVTEDDLKAYDGTDPEKPLLMAIKGQIYDVSQSRMFYGPGGPYALFAGKDASRALAKMSFEEKDLTGDISGLGPFELEALQDWEYKFMGKYVKVGTVTKTVPVTEPESTAEPSESTPHDESSKPTEDDGPSESAAAKNDETPSKVDADKE

SEQ ID NO: 17537 - protein, 220 aa, Glycine max
MALQLWETLKEAIVAYTGLSPPTFFTLLALILALYYVVSGLFPSSDHRHNTASRDLEPQMEPLRPPVQIGEVTEDDLKAYDGTDPEKPLLMAIKGQIYDVSQSRMFYGPGGPYALFAGKDASRALAKMSFEEKDLTGDISGLGPFELEALQDWEYKFMGKYVKVGTVTKTVPVTEPESTAEPSESTPHDESSKPTEDDGPSESAAAKNDETPSKVDADKE

SEQ ID NO: 17538 - protein, 161 aa, Glycine max
MEPLRPPVQIGEVTEDDLKAYDGTDPEKPLLMAIKGQIYDVSQSRMFYGPGGPYALFAGKDASRALAKMSFEEKDLTGDISGLGPFELEALQDWEYKFMGKYVKVGTVTKTVPVTEPESTAEPSESTPHDESSKPTEDDGPSESAAAKNDETPSKVDADKE

SEQ ID NO: 17539 - DNA, 1448 bp, Glycine max
tatatatatatattaaaatctcagatatataattatatgacttaaatttaattttttcactctcaatcagatatcctgctgttatatgatatctcatataatatatatttgtgtgtcaacttaacccttactacaagatttaaatgcgtaggagttttttcaagcatcgggaccatcattctactctttggtttgtggcggttgcgtaaagttgtaaggaaaaagatagcaaagaaacgcaaagaaaagttcttcaaacaaaatggaggattgttgttagaacaaagactatctactggtgaagttaatgttgacaaaactaaactctttagcttaaaggaattagggaaggccactgatcactttaatataaacagaatacttggaaaaggaggtcaaggtacagtttacaaaggtatgttagtagatggaaaaattgttgcagtgaaaaaatttaaggtcaacggaaatgttgaagaattcatcaacgaatttgtcattctttcacaaattaaccacagaaatgtggttaagttgttgggatgttgtttggagactgaaatccctttgcttgtttatgaattcattcccaatggtaacctttatgaatatttacatggacaaaatgatgagttaccaatgacatgggatatgcgtttgagaattgccactgaagtggctggagctctattttacttgcactcagctgcttctcaacccatttatcatagagatgtgaagtcaacaaatatattattggatgagaagtataaggcaaaagtagcagactttggggcatcaagaatggtttccattgaagccactcacctcactactgcagttcaaggaacttttggatacttagatcctgaatattttcatacaagtcaattgacagagaagagtgatgtctacagctttggagtggttcttgttgaacttttaacaggacaaaaaccaatatcctcagtgaacgaacaaggacttcaaagtttagcttcatattttcttctttgtatggaggaaaatcgtttttttgatattgttgatgcaagagtcatgcaggaagtggagaaagaacacataattgtagttgccaatcttgcaagaagatgcttacagttgaatgggagaaagcgaccaactatgaaagaagtcacattagaattggaaagtatccaaaaactggaaaaccagtgtaatgcacaagagcaacaagaagaacttgagcttgctggaaatgaagatagccaattttgggctgcgtattctacaacttcgactgcagggcaaacttcagacagcaaaacatcaaccttggagattatgcctattcttatcaaataattgttgaattctcttaacttgttttgttgtgtgtaaaattaaaaataaaaataaaaacatatggacgaatttaacgttcaaaagcataattatggtatgat

SEQ ID NO: 17540 - protein, 309 aa, Glycine max
MLVDGKIVAVKKFKVNGNVEEFINEFVILSQINHRNVVKLLGCCLETEIPLLVYEFIPNGNLYEYLHGQNDELPMTWDMRLRIATEVAGALFYLHSAASQPIYHRDVKSTNILLDEKYKAKVADFGASRMVSIEATHLTTAVQGTFGYLDPEYFHTSQLTEKSDVYSFGVVLVELLTGQKPISSVNEQGLQSLASYFLLCMEENRFFDIVDARVMQEVEKEHIIVVANLARRCLQLNGRKRPTMKEVTLELESIQKLENQCNAQEQQEELELAGNEDSQFWAAYSTTSTAGQTSDSKTSTLEIMPILIK

SEQ ID NO: 17541 - protein, 235 aa, Glycine max
MTWDMRLRIATEVAGALFYLHSAASQPIYHRDVKSTNILLDEKYKAKVADFGASRMVSIEATHLTTAVQGTFGYLDPEYFHTSQLTEKSDVYSFGVVLVELLTGQKPISSVNEQGLQSLASYFLLCMEENRFFDIVDARVMQEVEKEHIIVVANLARRCLQLNGRKRPTMKEVTLELESIQKLENQCNAQEQQEELELAGNEDSQFWAAYSTTSTAGQTSDSKTSTLEIMPILIK

SEQ ID NO: 17542 - protein, 231 aa, Glycine max
MRLRIATEVAGALFYLHSAASQPIYHRDVKSTNILLDEKYKAKVADFGASRMVSIEATHLTTAVQGTFGYLDPEYFHTSQLTEKSDVYSFGVVLVELLTGQKPISSVNEQGLQSLASYFLLCMEENRFFDIVDARVMQEVEKEHIIVVANLARRCLQLNGRKRPTMKEVTLELESIQKLENQCNAQEQQEELELAGNEDSQFWAAYSTTSTAGQTSDSKTSTLEIMPILIK

SEQ ID NO: 17543 - DNA, 987 bp, Glycine max
gcgaaattctcccatctgcttctcactgatctccattcccattccatggcttccactgaatcatcccctttcaagaaaattcagattcaaagggatgacactacatttgacgcatatgtggttggaaaagaggatgctcctggaattgttgtgattcaggagtggtggggtgtggattacgaaattaagaaccatgccgtgaagatttctcagcttggtagtgggtttaaagctcttattccagatttatacagaggaaaggttggtctggatgttgctgaagctcagcatttgatggatggtcttgattggcaaggtgctgtgaaggatattgctgcttcggttaactggcttaaagcaaatggctcaaagaaggctggtgtaactggattttgtatgggaggtgctctctctattgccagttctgtcttggttcaagaggttgacgcttctgtagcattctatggagttcctgcttctcaacttgctgaccctgcacaagccaaggctcctgttcaggctcattttggagagctggacaattttgttggcttttcagatgttacagcggccaaggcattggaagagaagctgaaggcatccggaattccacatgaggtacatatctatcctggcaatgcacatgcattcatgaacaggtcaactgaaggaatccagaggaggaagaacatgggaatgcctgatgaagatgaagctgcagttcagcttgcttggtctcgctttgagacatggatgacccgttatctgtctagttagataatttcctagctagctcaattccgaagtcacatgctgcatgtgtattccaccttttaagtggttatattgaacccgttttaatggccccacaaactgtggagaccctgctgcttgctacacttcatttatttcctgaagtttggatgcatgtgtgaaatttgagttggaaataatattgaaatatttgtggcttttcttcaattaagt

SEQ ID NO: 17544 - protein, 258 aa, Glycine max
AKFSHLLLTDLHSHSMASTESSPFKKIQIQRDDTTFDAYVVGKEDAPGIVVIQEWWGVDYEIKNHAVKISQLGSGFKALIPDLYRGKVGLDVAEAQHLMDGLDWQGAVKDIAASVNWLKANGSKKAGVTGFCMGGALSIASSVLVQEVDASVAFYGVPASQLADPAQAKAPVQAHFGELDNFVGFSDVTAAKALEEKLKASGIPHEVHIYPGNAHAFMNRSTEGIQRRKNMGMPDEDEAAVQLAWSRFETWMTRYLSS

SEQ ID NO: 17545 - protein, 243 aa, Glycine max
MASTESSPFKKIQIQRDDTTFDAYVVGKEDAPGIVVIQEWWGVDYEIKNHAVKISQLGSGFKALIPDLYRGKVGLDVAEAQHLMDGLDWQGAVKDIAASVNWLKANGSKKAGVTGFCMGGALSIASSVLVQEVDASVAFYGVPASQLADPAQAKAPVQAHFGELDNFVGFSDVTAAKALEEKLKASGIPHEVHIYPGNAHAFMNRSTEGIQRRKNMGMPDEDEAAVQLAWSRFETWMTRYLSS

SEQ ID NO: 17546 - protein, 160 aa, Glycine max
MDGLDWQGAVKDIAASVNWLKANGSKKAGVTGFCMGGALSIASSVLVQEVDASVAFYGVPASQLADPAQAKAPVQAHFGELDNFVGFSDVTAAKALEEKLKASGIPHEVHIYPGNAHAFMNRSTEGIQRRKNMGMPDEDEAAVQLAWSRFETWMTRYLSS

SEQ ID NO: 17547 - DNA, 1745 bp, Glycine max
aaaaataaaataaaaaggaaacgtatagaaaaagcttttccaagaattggcaaaaagagaagaagggagagagattcatgttcatattttccccttcgtgcccgtcaagtttctgattctctttttcaattcctttctctttcaggtgattttttctccacgataaagttgcgatttcgccggtgtcgttttgccgcaagatggtgtcgttttcgggaatataaaatcagggttgaagttctttcttcagcattgaatctttggttacataggttggtttctttagaactcgattcaatttcaaataattggtcctccctttttgtggaactcaattctattaggttagtggaaagagaaaaaaaaaacatggttgaatcaattgctgcaacttcactccttggccaccgtccaatttgtggtggaaatttaaccagggatgtatctgttaaacgcaaatctttgaatactgttcggttcccaacaactgagtttcttggtggtggaaggattgtggtttctctggctttgcctaaatctgataagcaagataggtttgtgttttcatcaattaaggccttggctgtggagttaacaagagaagcacatgcttatagggaagagaaattgcccaacagggataccaagattgatcgtggatttgatcaaaggcctgattcgtggcctcctgcgaatagggcagataaaccgtcgcttcggaatccactactccgtcatgagaggatgggatgtggttggttgggtgctatatttgagtgggagggtgttctaattgaagacaaccctgatttagagaagcaggcttggctggcactctctcaggaagaaggcaaaccctctcctcctgcttttatcctcaagagaatagagggcatgaagaatgaacaggcgatttcagaagtgctgtgttggtctagggatccggcacagttgagaagaatggctaatagaaaggaagaaatctaccaatctttgcagggtgggatatataggttcttgtctggatccaaggagtttgttagtgttttgatgcattataagataccaatggcattggtttccacgcggcctaggaaggctcttgagtctgctataggggagattgggattgaggacactttcagtgttattgtagcagcagaggatgttcataggggaaagcctgatccagaaatgtttgtgtatgctgcacagcttttgaacttcatacctgagaggtgcattgtgtttggtaactccaatctaacagtggaggctgcacatgaagcgcggatgaagtgtgtggctgttgctagcaagcatcctgtatatgagcttggggctgcagacttggttgtcaggcgcctagatgagctttcagtggttgatttgaagaatcttgcagacattgaaatgactgaatttgggtctgtggagcctgagatggagctggaggtggaaaaagattatggctcatcatcagttgatgacaatttctggtaaatcctataatgtacagttgattgaacctcatctgattgttgatgatattagttacaggttagttacttgtgtatatggtaatcagaataaatggggggaaaaaatgataagtggtatgcattgaacattgatgttactactaatgcattttctgttcatatacattcacgaatttttagatttgatttactggtgtttccatccataaaatagaatacaaattacctcatgaagtttaggtc

SEQ ID NO: 17548 - protein, 500 aa, Glycine max
KNKIKRKRIEKAFPRIGKKRRRERDSCSYFPLRARQVSDSLFQFLSLSGDFFSTIKLRFRRCRFAARWCRFREYKIRVEVLSSALNLWLHRLVSLELDSISNNWSSLFVELNSIRLVEREKKNMVESIAATSLLGHRPICGGNLTRDVSVKRKSLNTVRFPTTEFLGGGRIVVSLALPKSDKQDRFVFSSIKALAVELTREAHAYREEKLPNRDTKIDRGFDQRPDSWPPANRADKPSLRNPLLRHERMGCGWLGAIFEWEGVLIEDNPDLEKQAWLALSQEEGKPSPPAFILKRIEGMKNEQAISEVLCWSRDPAQLRRMANRKEEIYQSLQGGIYRFLSGSKEFVSVLMHYKIPMALVSTRPRKALESAIGEIGIEDTFSVIVAAEDVHRGKPDPEMFVYAAQLLNFIPERCIVFGNSNLTVEAAHEARMKCVAVASKHPVYELGAADLVVRRLDELSVVDLKNLADIEMTEFGSVEPEMELEVEKDYGSSSVDDNFW

SEQ ID NO: 17549 - protein, 377 aa, Glycine max
MVESIAATSLLGHRPICGGNLTRDVSVKRKSLNTVRFPTTEFLGGGRIVVSLALPKSDKQDRFVFSSIKALAVELTREAHAYREEKLPNRDTKIDRGFDQRPDSWPPANRADKPSLRNPLLRHERMGCGWLGAIFEWEGVLIEDNPDLEKQAWLALSQEEGKPSPPAFILKRIEGMKNEQAISEVLCWSRDPAQLRRMANRKEEIYQSLQGGIYRFLSGSKEFVSVLMHYKIPMALVSTRPRKALESAIGEIGIEDTFSVIVAAEDVHRGKPDPEMFVYAAQLLNFIPERCIVFGNSNLTVEAAHEARMKCVAVASKHPVYELGAADLVVRRLDELSVVDLKNLADIEMTEFGSVEPEMELEVEKDYGSSSVDDNFW

SEQ ID NO: 17550 - protein, 252 aa, Glycine max
MGCGWLGAIFEWEGVLIEDNPDLEKQAWLALSQEEGKPSPPAFILKRIEGMKNEQAISEVLCWSRDPAQLRRMANRKEEIYQSLQGGIYRFLSGSKEFVSVLMHYKIPMALVSTRPRKALESAIGEIGIEDTFSVIVAAEDVHRGKPDPEMFVYAAQLLNFIPERCIVFGNSNLTVEAAHEARMKCVAVASKHPVYELGAADLVVRRLDELSVVDLKNLADIEMTEFGSVEPEMELEVEKDYGSSSVDDNFW

SEQ ID NO: 17551 - DNA, 1249 bp, Glycine max
tttgaaagaagaagaaaaagaccatgacatagtttggcccccaatggttgtcattcagaatacaaagcttgaacaggatgaaaatgataagtggataggtatgggtaaccaagaacttcttgattattttagcacatatgatgctgtgagagcacgacactcttatggcccacagggtcatcgtgggatgagtgttttgatatttgaagcctcagctagtggctatctagaggcagagcgtctccacaagcattttgcagagcaaggaactgataaagattcttggttcagtcgccctattttatatctccctggggggaatcgccagctctatggatacatggctacaaaagaagatatggactttttcaacagacattcccaaggtaaatctagactcaaatatgacataagatcatatcaggagatggttgtacaccaaattcggcaaatgaatgaagacaaccaacagctgctctattttaagaacaaggctgtgaaaggtgcaaaacacacaaaagctcttgaagaatctattggtataatgtctgagaagctgcggaagacaatggaggaaaatcgcattgtgaggaggagaactaaaatgcaacatgaagagaccaaagaagagatgtatatgcaagaacaattcttcaaggaccagatcaaaatcattcatgattcaagggatgcaaaggaagaagatttcgagaggatgcaacaggaggaacgtgagaaggtgaagcagtcaagtactactggtcatgtgaatgctgaggaatatagactcaaggtggaagagtatctgaaatttgttgaggtccaagataaagaaatggagaactttgttgctgaaaaggaaaagctgttacatgctcatggcacgggttatgctgcaatgaagcgaaggcattgggaggaagaagttcagtatgagcagaagtttgatgaggaattggctaacctcatggaaaagtactccccgtcgtagaagtccaatggtatctaatggtagggtcttttgcacagactcatacaaacagataaacacagccaaataggtagagaaaataaatagagacatcagctttctagagattgagacttttactaaattcagtatgtcattttcttttctttagtacttgttggcatttggtacattcttggatatagaaacctggttaaaattttaaatggtggtgcatgcggttcgaattgaatgacaaattttacaaattggacgttg

SEQ ID NO: 17552 - protein, 329 aa, Glycine max
LKEEEKDHDIVWPPMVVIQNTKLEQDENDKWIGMGNQELLDYFSTYDAVRARHSYGPQGHRGMSVLIFEASASGYLEAERLHKHFAEQGTDKDSWFSRPILYLPGGNRQLYGYMATKEDMDFFNRHSQGKSRLKYDIRSYQEMVVHQIRQMNEDNQQLLYFKNKAVKGAKHTKALEESIGIMSEKLRKTMEENRIVRRRTKMQHEETKEEMYMQEQFFKDQIKIIHDSRDAKEEDFERMQQEEREKVKQSSTTGHVNAEEYRLKVEEYLKFVEVQDKEMENFVAEKEKLLHAHGTGYAAMKRRHWEEEVQYEQKFDEELANLMEKYSPS

SEQ ID NO: 17553 - protein, 315 aa, Glycine max
MVVIQNTKLEQDENDKWIGMGNQELLDYFSTYDAVRARHSYGPQGHRGMSVLIFEASASGYLEAERLHKHFAEQGTDKDSWFSRPILYLPGGNRQLYGYMATKEDMDFFNRHSQGKSRLKYDIRSYQEMVVHQIRQMNEDNQQLLYFKNKAVKGAKHTKALEESIGIMSEKLRKTMEENRIVRRRTKMQHEETKEEMYMQEQFFKDQIKIIHDSRDAKEEDFERMQQEEREKVKQSSTTGHVNAEEYRLKVEEYLKFVEVQDKEMENFVAEKEKLLHAHGTGYAAMKRRHWEEEVQYEQKFDEELANLMEKYSPS

SEQ ID NO: 17554 - protein, 296 aa, Glycine max
MGNQELLDYFSTYDAVRARHSYGPQGHRGMSVLIFEASASGYLEAERLHKHFAEQGTDKDSWFSRPILYLPGGNRQLYGYMATKEDMDFFNRHSQGKSRLKYDIRSYQEMVVHQIRQMNEDNQQLLYFKNKAVKGAKHTKALEESIGIMSEKLRKTMEENRIVRRRTKMQHEETKEEMYMQEQFFKDQIKIIHDSRDAKEEDFERMQQEEREKVKQSSTTGHVNAEEYRLKVEEYLKFVEVQDKEMENFVAEKEKLLHAHGTGYAAMKRRHWEEEVQYEQKFDEELANLMEKYSPS

SEQ ID NO: 17555 - DNA, 2036 bp, Glycine max
aaaacaaacacattcgtgcattggttcacctctacttttcctcttccaacacaaacactttccgtttcgttttttttttcttcagattcaaaccaaaccagagcaaaccaaaaaaggaaaagaaaaatcccaaaatccacaacgttacttcctttccttattagcgagaggaaaaaaaattaatttaaaaggcttcttgttaatttccctggaaacttcattttattttcctcttttctcttcttcgcgctcgttcgttcgttcctctgattattattcatcgatcagaattgatgatggagtcctccttcgatccaacggtcaacggctcaccacacctatcccttttcaacggccacgattgaatcggcgagatccgtcggtcaacggtctcttctaaggcgcggttaggttaggaaagagaaagagaaagaaaatgaaggtggcaaagtcgcgtgtgtggcagccactgaagaagaagaggagctaatatttaattttatatattatagagagagaaagagagaagagagagagagaaagggaagggagagagatgacgtcacgatcggggcaggggagcagcggcggagggagcagcaggacccgtgtggggaagtacgagctgggtcggacgctgggcgagggcaatttcgccaaggtgaaattcgcgaggcacgtggaaactagagagaacgtcgccatcaagattctcgacaaggagaaactactcaaacacaaaatgattgcgcagataaaacgagaaatatcaacaatgaaactgattagacacccaaatgtcatacgcatgtatgaggtaatggctagcaaaacaaagatatacattgtattggaatttgtgactggtggggagctgtttgataaaattgcacgcagtgggaggttgaaagaagatgaagcaagaaaatactttcaacagcttatatgtgctgtggattactgtcatagtagaggtgttttccatagagacttaaagcctgagaatttattgctggatgctaatggagtgcttaaagtatcagattttggattgagtgcattgcctcaacaagttcgggaagatggactacttcacacaacatgcggtacgccgaattatgttgctccagaggtgattaacaacaaaggttatgacggtgcaaaggcagatttatggtcatgtggtgttattctctttgttttaatggctggctatttgccctttgaagaaaccaatctatcagctttatataaaaagattttcaaggccgagttcacatgtcctccgtggttctcttcaagtgcaaagaagctaatcaacaaaatccttgatcccaatcctgccactcggattacatttgctgaggtcattgagaatgactggttcaagaagggatataagcctcccgtatttgaacaggctaatgttagtcttgatgatttagattctattttcagtgattctacggattcacaaaatcttgttgtagagaggcgtgaagagggacctatggcacctgtggcacctgtgactatgaatgcctttgagcttatctctaaatctcagggcctcaatcttagtagtctttttgagaagcaaatgggactagttaaaagggaaacacgatttacatccaaatgttcagcagatgaaataatttcaaaaatagagaaagctgcaggacccctgggttttgatgttaagaagaacaactgtaagttaaagattcaaggtgaaaagacaggacggaaaggtcatctatctgtagccactgagtgttgctttccagatcttagaggtggccccttcactatacatggttgagctgcgaaagtctgaaggagatactctcgaatttcacaagttctacaaaaatcttgctactgggctgaaggatattgtttggaaagccgagcctatcgatgaagaaaaagatggtgccaatccatcgaaataattgttatccaaatttccatctccgtacgaagtacagtcactagttgtgttgttattcagattgggcaatggagcagtt

SEQ ID NO: 17556 - protein, 422 aa, Glycine max
MTSRSGQGSSGGGSSRTRVGKYELGRTLGEGNFAKVKFARHVETRENVAIKILDKEKLLKHKMIAQIKREISTMKLIRHPNVIRMYEVMASKTKIYIVLEFVTGGELFDKIARSGRLKEDEARKYFQQLICAVDYCHSRGVFHRDLKPENLLLDANGVLKVSDFGLSALPQQVREDGLLHTTCGTPNYVAPEVINNKGYDGAKADLWSCGVILFVLMAGYLPFEETNLSALYKKIFKAEFTCPPWFSSSAKKLINKILDPNPATRITFAEVIENDWFKKGYKPPVFEQANVSLDDLDSIFSDSTDSQNLVVERREEGPMAPVAPVTMNAFELISKSQGLNLSSLFEKQMGLVKRETRFTSKCSADEIISKIEKAAGPLGFDVKKNNCKLKIQGEKTGRKGHLSVATECCFPDLRGGPFTIHG

SEQ ID NO: 17557 - protein, 360 aa, Glycine max
MIAQIKREISTMKLIRHPNVIRMYEVMASKTKIYIVLEFVTGGELFDKIARSGRLKEDEARKYFQQLICAVDYCHSRGVFHRDLKPENLLLDANGVLKVSDFGLSALPQQVREDGLLHTTCGTPNYVAPEVINNKGYDGAKADLWSCGVILFVLMAGYLPFEETNLSALYKKIFKAEFTCPPWFSSSAKKLINKILDPNPATRITFAEVIENDWFKKGYKPPVFEQANVSLDDLDSIFSDSTDSQNLVVERREEGPMAPVAPVTMNAFELISKSQGLNLSSLFEKQMGLVKRETRFTSKCSADEIISKIEKAAGPLGFDVKKNNCKLKIQGEKTGRKGHLSVATECCFPDLRGGPFTIHG

SEQ ID NO: 17558 - protein, 349 aa, Glycine max
MKLIRHPNVIRMYEVMASKTKIYIVLEFVTGGELFDKIARSGRLKEDEARKYFQQLICAVDYCHSRGVFHRDLKPENLLLDANGVLKVSDFGLSALPQQVREDGLLHTTCGTPNYVAPEVINNKGYDGAKADLWSCGVILFVLMAGYLPFEETNLSALYKKIFKAEFTCPPWFSSSAKKLINKILDPNPATRITFAEVIENDWFKKGYKPPVFEQANVSLDDLDSIFSDSTDSQNLVVERREEGPMAPVAPVTMNAFELISKSQGLNLSSLFEKQMGLVKRETRFTSKCSADEIISKIEKAAGPLGFDVKKNNCKLKIQGEKTGRKGHLSVATECCFPDLRGGPFTIHG

SEQ ID NO: 17559 - DNA, 1318 bp, Glycine max
ttgtttcttgcccctttgatcaacggatcttttcaaccgtctactctaacggtgaaacgtatggggcagcaatatggcagatccccgagctatatggcgagttaaattcacctcagctagagagaattacctccctcgacactgattctggcaagattaaatgtattctatggtggccatctggaaggcatgataaattgatcagcatcaatgaggaaaacctgtacttgtggaatttagatgtttcaaagaaaactgctcaggtacaatcacaagattcagctggtatgctgcacaagttatctggaggggcatgggatccacatgatgtgagttctgttgctgcaacttgtgaatcatatctccaattttgggatgtcagaacaatgaagaagactatgtcaatcgagtgttcccatgtatgcagtgttgattaccatccccaaaagcagcacatacttgttactgcagaacatgagtctgggatacacatttgggatctaagaaaacctaaagttcccatccaagagcttccaggacatactcattggacttggactgtcaagtgtaacccagagtatgatggaatgatcttgagtgctggtacggattcaactgtcaacttgtggcttgcctcaacaaatcatgatgagttaacaactgaaagacaagtcgattcatctgcccgatgggttgatccgttgcttaatacgtacagtgattatgaagacagcatttatgggctcacatggagttctcgtgaaccatggatctttgcatcattatcctatgatggcagggttgttgtagaatcagttaagcctttcatctccaaaaaataaagttcagcaccaattgccatgttgccatcatttgtcatgtcatcttcttgtgtatgtcagtaatttcctgcctctcgggtcttgagataaatagatctgaaagaccctaatatttattccatcatgtcaccgttgctgggtttgacgaggctgaacaggtttaatgttacatgtgcattacatctttgacgagaaagcattgatagctcagaaatcaacatttttggttttatcttttttatctttcaacgttgaatggttttaggctggattatgtgcaagtttattctttgattagacatccatgctatgtaattcgtggagtcgttgtatatctatggaactacaagttcatacaagttctttctttgtatctcgagtttgtcctctaatatgtcttcgtggaaaggtaataaatctactgtaattgggaaacagaaagttgctatatgaaattggctgagtgtcgttatagc

SEQ ID NO: 17560 - protein, 279 aa, Glycine max
VSCPFDQRIFSTVYSNGETYGAAIWQIPELYGELNSPQLERITSLDTDSGKIKCILWWPSGRHDKLISINEENLYLWNLDVSKKTAQVQSQDSAGMLHKLSGGAWDPHDVSSVAATCESYLQFWDVRTMKKTMSIECSHVCSVDYHPQKQHILVTAEHESGIHIWDLRKPKVPIQELPGHTHWTWTVKCNPEYDGMILSAGTDSTVNLWLASTNHDELTTERQVDSSARWVDPLLNTYSDYEDSIYGLTWSSREPWIFASLSYDGRVVVESVKPFISKK

SEQ ID NO: 17561 - protein, 184 aa, Glycine max
MLHKLSGGAWDPHDVSSVAATCESYLQFWDVRTMKKTMSIECSHVCSVDYHPQKQHILVTAEHESGIHIWDLRKPKVPIQELPGHTHWTWTVKCNPEYDGMILSAGTDSTVNLWLASTNHDELTTERQVDSSARWVDPLLNTYSDYEDSIYGLTWSSREPWIFASLSYDGRVVVESVKPFISKK

SEQ ID NO: 17562 - protein, 151 aa, Glycine max
MKKTMSIECSHVCSVDYHPQKQHILVTAEHESGIHIWDLRKPKVPIQELPGHTHWTWTVKCNPEYDGMILSAGTDSTVNLWLASTNHDELTTERQVDSSARWVDPLLNTYSDYEDSIYGLTWSSREPWIFASLSYDGRVVVESVKPFISKK

SEQ ID NO: 17563 - DNA, 1411 bp, Glycine max
tcagctacgtaccccccccccccctgtctgatggaaggattgatcaatggggcaggttgcagtgtgtgtaccatggttggtgtttcaatggcaaaggagaatgccagctcattcctcaggcactccctgatggccctccggtacatacgtccaaaaaagcatgtgtagctgcttacccaagtactgtgcagaatgatatcttgtggttctggccaaatactgatcctcaatacaaagatattattacaagaaaaagacccccattcataccagaaatagatgatccatcgtatactaaatcaatgggaaacagagacattccttatgggtatgaagtactgatagaaaatcttatggatcctgcacatgttccatatgcacactatggactaatgcgtactccgcaaccaaaagtgaaagctgatagagaagggggcaggccacttgacatgtctattgaaaagttagatatcaatggcttttcagcaaatcaggcttggggcaaaagcaaatttatgccaccatgcattttttatgcatatactccagatcaacctgcctcatctggtgaaactaagaaatcatcagctaagaagaaaatgtgtttaatctttgtttgcgttccggttagtcctggtaaaagcagattgatatggtgcttcccaagaaactttggattgtggatggacaaaattgtaccacgatggatatttcatgtgggacaaaacctgattctggattcagatttatatctcctccatgttgaggaacataaactaaaggatattggtccaaacaattggcacaaagcctgttttgtgccaacaaagtcagacgcccttgttattggttatagaacgtggctaaggaagtatgcaggtggtcaggttgattggagaggaaaatatagtggagctcttcctccaacacctccgagagaacagcttttggacaggtactggtcccatgtggtgaattgcaagagttgcaattctgcttataagagcctcaatgcggttgaagtaatgctgcagatcatatctgttgcttcaattgggattgttgccgtcatgaagcatggtacaatgtcagtggcaaaaagaaattcaatggttgccttagcagtgctatcatttgcactgtcacggtggttagctcacttcatatacaaaaacttccgttatcatgactatgagcatgccttccgctgaaatgtgttttccatatttcttcatgtctaaaaatatgtgtatagactatagtgaaggtccactagaatgaagtcactggcacttcatttgactttttaaattttaaaagttaattcctctatgacaagtattcgcaacctcttcatacagaggacaaataagttgatatcaatctcatgtaaatctaatttacattgtcc

SEQ ID NO: 17564 - protein, 402 aa, Glycine max
SYVPPPPLSDGRIDQWGRLQCVYHGWCFNGKGECQLIPQALPDGPPVHTSKKACVAAYPSTVQNDILWFWPNTDPQYKDIITRKRPPFIPEIDDPSYTKSMGNRDIPYGYEVLIENLMDPAHVPYAHYGLMRTPQPKVKADREGGRPLDMSIEKLDINGFSANQAWGKSKFMPPCIFYAYTPDQPASSGETKKSSAKKKMCLIFVCVPVSPGKSRLIWCFPRNFGLWMDKIVPRWIFHVGQNLILDSDLYLLHVEEHKLKDIGPNNWHKACFVPTKSDALVIGYRTWLRKYAGGQVDWRGKYSGALPPTPPREQLLDRYWSHVVNCKSCNSAYKSLNAVEVMLQIISVASIGIVAVMKHGTMSVAKRNSMVALAVLSFALSRWLAHFIYKNFRYHDYEHAFR

SEQ ID NO: 17565 - protein, 302 aa, Glycine max
MGNRDIPYGYEVLIENLMDPAHVPYAHYGLMRTPQPKVKADREGGRPLDMSIEKLDINGFSANQAWGKSKFMPPCIFYAYTPDQPASSGETKKSSAKKKMCLIFVCVPVSPGKSRLIWCFPRNFGLWMDKIVPRWIFHVGQNLILDSDLYLLHVEEHKLKDIGPNNWHKACFVPTKSDALVIGYRTWLRKYAGGQVDWRGKYSGALPPTPPREQLLDRYWSHVVNCKSCNSAYKSLNAVEVMLQIISVASIGIVAVMKHGTMSVAKRNSMVALAVLSFALSRWLAHFIYKNFRYHDYEHAFR

SEQ ID NO: 17566 - protein, 285 aa, Glycine max
MDPAHVPYAHYGLMRTPQPKVKADREGGRPLDMSIEKLDINGFSANQAWGKSKFMPPCIFYAYTPDQPASSGETKKSSAKKKMCLIFVCVPVSPGKSRLIWCFPRNFGLWMDKIVPRWIFHVGQNLILDSDLYLLHVEEHKLKDIGPNNWHKACFVPTKSDALVIGYRTWLRKYAGGQVDWRGKYSGALPPTPPREQLLDRYWSHVVNCKSCNSAYKSLNAVEVMLQIISVASIGIVAVMKHGTMSVAKRNSMVALAVLSFALSRWLAHFIYKNFRYHDYEHAFR

SEQ ID NO: 17567 - DNA, 1212 bp, Glycine max
ttgttctttcacaaatggtagccccaaaagtgaggtcatggagcctgagattaagaacaaagatgtctttaagaaaagaaagaccatgtcaacgtgcacagaacaagtgaaggtgtgcttgggaacggcgcatgaaggatctctggatgatggctatagttggagaaaatatggacagaaggatattctcggagctaagtttccaagaggatattacagatgcacatatagaaatgtacaaggatgtctggccacaaagcaggtgcaaaagtcagatgaagacccaatgatatgtgaaataacctacaaaggaagacacacatgcacccaagcaagtcacttaaacaaaacagtgatacccccatcaaagacaaaggtgaacttgttgggagaaaataagcaccaaacccatcaaattaagaatcaaccacggcaagagaaaatagaacaacaaccaccagagacatttttcacatttggatcatcatcaggtcttgaagttaaaatagaggacatcgaccacaaggagggcatattcccatcattttgcttttcttctccatcaatagtagggtcagaaaatggggacgacaacaacagcagcatattctcatacaccatgattgagaacaacttaatggaaagcttctctcctgccttcatatctccaacaacttcagatatagaatcaaacactttctgccactgggggagcactggactaggccaaagtgtgcaaagctcagggtctgatatcactgatatagtttcagcaccaacttcagtcaccaattcaccaataatggaccttgatttctttttcgataagatcgatttcgacacagatttccctttgagcaccatggaactttgcacttaataaattgtccccacttctaagtttacagcatatgtgatttctatgcggattaactgtgagttttgtagatcctgactagcaccataaccgagggaaggaagtctataataatcaccatagatcatgtccataaatgaagacaatgaaaaacttccctcttgtgctaattaagagagttttcatgtacctaggctgcaatgtgaaaataatttgtaggttgtagcttaatttggtgcatgtttggtttgcaatggaaattgttgtaatgcgcgttccaatgtagatcttatggataaaagtaaaatgaaatcaaaagagttctaatcttttag

SEQ ID NO: 17568 - protein, 292 aa, Glycine max
CSFTNGSPKSEVMEPEIKNKDVFKKRKTMSTCTEQVKVCLGTAHEGSLDDGYSWRKYGQKDILGAKFPRGYYRCTYRNVQGCLATKQVQKSDEDPMICEITYKGRHTCTQASHLNKTVIPPSKTKVNLLGENKHQTHQIKNQPRQEKIEQQPPETFFTFGSSSGLEVKIEDIDHKEGIFPSFCFSSPSIVGSENGDDNNSSIFSYTMIENNLMESFSPAFISPTTSDIESNTFCHWGSTGLGQSVQSSGSDITDIVSAPTSVTNSPIMDLDFFFDKIDFDTDFPLSTMELCT

SEQ ID NO: 17569 - protein, 280 aa, Glycine max
MEPEIKNKDVFKKRKTMSTCTEQVKVCLGTAHEGSLDDGYSWRKYGQKDILGAKFPRGYYRCTYRNVQGCLATKQVQKSDEDPMICEITYKGRHTCTQASHLNKTVIPPSKTKVNLLGENKHQTHQIKNQPRQEKIEQQPPETFFTFGSSSGLEVKIEDIDHKEGIFPSFCFSSPSIVGSENGDDNNSSIFSYTMIENNLMESFSPAFISPTTSDIESNTFCHWGSTGLGQSVQSSGSDITDIVSAPTSVTNSPIMDLDFFFDKIDFDTDFPLSTMELCT

SEQ ID NO: 17570 - protein, 264 aa, Glycine max
MSTCTEQVKVCLGTAHEGSLDDGYSWRKYGQKDILGAKFPRGYYRCTYRNVQGCLATKQVQKSDEDPMICEITYKGRHTCTQASHLNKTVIPPSKTKVNLLGENKHQTHQIKNQPRQEKIEQQPPETFFTFGSSSGLEVKIEDIDHKEGIFPSFCFSSPSIVGSENGDDNNSSIFSYTMIENNLMESFSPAFISPTTSDIESNTFCHWGSTGLGQSVQSSGSDITDIVSAPTSVTNSPIMDLDFFFDKIDFDTDFPLSTMELCT

SEQ ID NO: 17571 - DNA, 484 bp, Glycine max
ttctccactatggctgcacaagaaaacaacttccaagactacttgcctgtgatggccaacaagcttggtggggatggcctaattgatgaactgtgcaatgggttcgatcttttgaaggattctgataaaggggtcatcacttttgagagcctcaagaggaattcttacttgcttggtcttcagggtctcagtgatgaggatcttcgctccatggttttggaaggtgactttgatggtgacggtgcactcaaccagatggagttctgtgtcttgatgttcagactcagccctgaattgatggagggctcaaagatgtggcttgaacaagtccttcaacaagagcttaaagattatttctaattcttgtaatttttttctctttctcccttactcttttaattcatttgtcattttgggcaatttcccatatacttatgtaagaaaatttaaaaaaaaatgaaatggcaaaagtgattaatttgat

SEQ ID NO: 17572 - protein, 119 aa, Glycine max
FSTMAAQENNFQDYLPVMANKLGGDGLIDELCNGFDLLKDSDKGVITFESLKRNSYLLGLQGLSDEDLRSMVLEGDFDGDGALNQMEFCVLMFRLSPELMEGSKMWLEQVLQQELKDYF

SEQ ID NO: 17573 - protein, 116 aa, Glycine max
MAAQENNFQDYLPVMANKLGGDGLIDELCNGFDLLKDSDKGVITFESLKRNSYLLGLQGLSDEDLRSMVLEGDFDGDGALNQMEFCVLMFRLSPELMEGSKMWLEQVLQQELKDYF

SEQ ID NO: 17574 - protein, 102 aa, Glycine max
MANKLGGDGLIDELCNGFDLLKDSDKGVITFESLKRNSYLLGLQGLSDEDLRSMVLEGDFDGDGALNQMEFCVLMFRLSPELMEGSKMWLEQVLQQELKDYF

SEQ ID NO: 17575 - DNA, 1226 bp, Glycine max
aacgtttcttattctgatatcaacaagtggctgcaccacggaatttggatgtcttggttctttccagttatttgtagggaccgatgcggaaagggtgtgagttgctacatcgatcaaaccacgcgagaaactcgatgtgcagatagctactgccaaatctttggcattcaaacatacaagtgcggaattcgtaatcagattcttgaatatatgcggcaaattcttggctacacagtaggttatcttaaaagcgttataatgggatatgtaaatagaataagatatcgtgagcaactaacaagctgggatagtgaagcagaattctttgaacaaaatgctatagcaatattcctggcaaccagattgctatttggaatcacacttttactaatgctatatatctatatgtggcgacgtagacattattcaatgtatgaaaacattgaaatttttttgctagatagcaatctaaatcctattaggtacgaatacagagaaataagaaaaatgaccaaagatttcaaagtgaaattgggtgaaggaggtttcggctctgtatacaaaggaaaacttcgaagcgggctagatgtggcaataaagatgttgaccaaatccaaaactagaggacaaggagggtatcagtgaagtggctacaattggaagaatacatcacgtgaatgtggtgcgtcttattggatattgtgctgaaggagaaaagcatgctctagtttatgaattcatgcctaatggttcattggataaatacattttctctaaagaagaaagtgtctccttaagttatgacaaaacatatgaaatatgtcttggcatagctcgtgggattgcttatttgcatcaagattgtgatgtgcaaattctacattttgatatcaagcctcataatattcttctagatgataacttcattccaaaggtttcggattttggacttgcaaagctatatcctatcaaagataagtcaattattttaactggactaagaggaacttttggttacatggctccagaattattctacaaaaatattggtggagtgtcatataaggcagacgtctatagctttggaatgcttttgatggaaatgggaagtagaaggaggaactcaaatcctcacacagagcactcaagccaacatttcttccccttttggatctatgatcattttatggaagaaaaggatattcacatggaagaggtctcagaag

SEQ ID NO: 17576 - protein, 214 aa, Glycine max
NVSYSDINKWLHHGIWMSWFFPVICRDRCGKGVSCYIDQTTRETRCADSYCQIFGIQTYKCGIRNQILEYMRQILGYTVGYLKSVIMGYVNRIRYREQLTSWDSEAEFFEQNAIAIFLATRLLFGITLLLMLYIYMWRRRHYSMYENIEIFLLDSNLNPIRYEYREIRKMTKDFKVKLGEGGFGSVYKGKLRSGLDVAIKMLTKSKTRGQGGYQ

SEQ ID NO: 17577 - protein, 198 aa, Glycine max
MSWFFPVICRDRCGKGVSCYIDQTTRETRCADSYCQIFGIQTYKCGIRNQILEYMRQILGYTVGYLKSVIMGYVNRIRYREQLTSWDSEAEFFEQNAIAIFLATRLLFGITLLLMLYIYMWRRRHYSMYENIEIFLLDSNLNPIRYEYREIRKMTKDFKVKLGEGGFGSVYKGKLRSGLDVAIKMLTKSKTRGQGGYQ

SEQ ID NO: 17578 - protein, 162 aa, Glycine max
MPNGSLDKYIFSKEESVSLSYDKTYEICLGIARGIAYLHQDCDVQILHFDIKPHNILLDDNFIPKVSDFGLAKLYPIKDKSIILTGLRGTFGYMAPELFYKNIGGVSYKADVYSFGMLLMEMGSRRRNSNPHTEHSSQHFFPFWIYDHFMEEKDIHMEEVSE

SEQ ID NO: 17579 - DNA, 1245 bp, Glycine max
aatctttcttcccagtttttctccaaccttctcaaagatgacgcaacgcacccatcttcttcacactcactatcacaaccaaacgattctttggaaggagtgccaccctatcccttatacaagcgcttttcttcagctctgttgaagtgtatggattctgaaacattttgtaggacaggcgccaatttagccatgaccgatgaatttgaagattcttccatgcagcagaagcgtaatgagtggcacagattgattgtggagaaggggtttgaaatagagaatattttgaagagtgtttcctttgaattccatgtccaagagcctttcttttcacagctaaatgatggcctaaaaacaattgaagggaggtgtgccactgggaaatacaataggatcaaatcaggaaatctaattctctttaataagtcggtggtgtttgaagttcagggagtaagacggtatcctacattctttgccatgttggaggcagaaagccttggaaaagttcttcctggagttgaaagtagtgaagaaggtgtaaaagtctaccagagattttgcacagaggagaaggaacaagcaaatggtgtcctttgcaatcgttgtttcaaaattcacccctcaaccatacgattctttggctagattattctgtgaattgagctatgagggtgttcaaagccttctaggtctcatgcataccacagggacaattcctaatgcacttcctccaccaatatcaactctattagcatcatttaattttccatgcaatccaaatgaaaatggcttgactgatggagctcgtgcattggccaagcatgcttgtaggagtagcagtggttattggggttctctgaatggaaatgttgtctttgaaataagggttgctaatggatatggtgcacgctggacagaagatggaagtaagtttattggatttttagaaccctacatgcaagatgggcactcaaagcgatggaagcactagttctgctggccagaccacgacaactacagctaaaaatgtcactagttttccttttatcttgtgatggaactatgtttatggcacagtatttgtttttctctctctttatttcagctaaggactttagctaactatctagtctaatgtctcagagtaatctacttaagtagacttctgtatacagatgatggattcagtataagtattacttgtttcatcctgtacttttaagaaagaagtatccgtttagctcg

SEQ ID NO: 17580 - protein, 214 aa, Glycine max
NLSSQFFSNLLKDDATHPSSSHSLSQPNDSLEGVPPYPLYKRFSSALLKCMDSETFCRTGANLAMTDEFEDSSMQQKRNEWHRLIVEKGFEIENILKSVSFEFHVQEPFFSQLNDGLKTIEGRCATGKYNRIKSGNLILFNKSVVFEVQGVRRYPTFFAMLEAESLGKVLPGVESSEEGVKVYQRFCTEEKEQANGVLCNRCFKIHPSTIRFFG

SEQ ID NO: 17581 - protein, 164 aa, Glycine max
MDSETFCRTGANLAMTDEFEDSSMQQKRNEWHRLIVEKGFEIENILKSVSFEFHVQEPFFSQLNDGLKTIEGRCATGKYNRIKSGNLILFNKSVVFEVQGVRRYPTFFAMLEAESLGKVLPGVESSEEGVKVYQRFCTEEKEQANGVLCNRCFKIHPSTIRFFG

SEQ ID NO: 17582 - protein, 150 aa, Glycine max
MTDEFEDSSMQQKRNEWHRLIVEKGFEIENILKSVSFEFHVQEPFFSQLNDGLKTIEGRCATGKYNRIKSGNLILFNKSVVFEVQGVRRYPTFFAMLEAESLGKVLPGVESSEEGVKVYQRFCTEEKEQANGVLCNRCFKIHPSTIRFFG

SEQ ID NO: 17583 - DNA, 1845 bp, Glycine max
agctttcagcaacatccatgaagacatttgcaccagtgcgcaccaaaagagagcagcaatcatattcctcccattccacaaacaccaacgcttcgacgggacaatggagtcggtaggaaactcgttgcgcgcgatgaacggcctagttctcagccatgctccttgctcagtcggaatcttggttgatcgcggccttggtggtacaagccaagtccaagccagtgatgtgtcatacaaggttgttgtaggtttctttggtgggcgagacgaccgcgaagcactcgcctatgggatgagaatggctgagcatcctggtgtttcaatcactgttgtgaagtttgtagttccacctgggatgacattggcctttggtgccaaattgattggtgtaacagcagacaaggatagaaaggtaattaaagtggctgaaggaactaccactgatgtagagaaacaagaggatgagcacttttggtctgagttcttaggtgtgtgttgcaaaaatgcagaatcaataatgtatgaggaaaggttggtagaaagcaaagaagatattctgacaacaatgagggagatgaataagagcaatctaattttggtaggtagaatgcccccggtggtacctttggtagacacaagtgattgccctgaacttggtcctgttggaagctacttggcttcttctgagttctccacttctgcatcagttatagtgtttcagcaatacaatcccaaaacagatgtttatccattggttatggagatttctgattacttgaacatgccagacacgccaccacattctccgtagtagagatgcagatatatgccaaggttttgaaaaatggtcctccactgtgattttggcctcaacgtcaagatttttttaattatccatgacctaaatttggatttgtccgcggtttgccacgatatcaacaaacatgatgaaactgcatgcaacgcgaccgtgagttacccggcgggcgcgcctcgttcattcacgtttttgaacccgtggaggacgggcagactcgcggtgcaaatgtgttttacagcgtgatggagcagatgaagatgctcgacacgctgcagaacacgcagctgcagagcgccattgtgaaggcgatgtatgccgccaccattgagagtgagctggatacgcagtcagcgatggattttattctgggcgcgaacagtcaggagcagcgggaaaggctgaccggctggattggtgaaattgccgcgtattacgccgcagcgccggtccggctgggaggcgcaaaagtaccgcacctgatgccgggtgactcactgaacctgcagacggctcaggatacggataacggctactccgtgtttgagcagtcactgctgcggtatatcgctgccgggctgggtgtctcgtatgagcagctttcccggaattacgcccagatgagctactccacggcacgggccagtgcgaacgagtcgtgggcgtactttatggggcggcgaaaattcgtcgcatcccgtcaggcgagccagatgtttctgtgctggctggaagaggccatcgttcgccgcgtggtgacgttaccttcaaaagcgcgcttcagttttcaggaagcccgcagtgcctgggggaactgcgactggataggctccggtcgtatggccatcgatggtctgaaagaagttcaggaagcggtgatgctgatagaagccggactgagtacctacgagaaagagtgcgcaaaacgcggtgacgactatcaggaaatttttgcccagcaggtccgtgaaacgatggagcgccgtgcagccggtcttaaaccgcccgcctgggcggctgcagcattt

SEQ ID NO: 17584 - protein, 296 aa, Glycine max
MQRDRELPGGRASFIHVFEPVEDGQTRGANVFYSVMEQMKMLDTLQNTQLQSAIVKAMYAATIESELDTQSAMDFILGANSQEQRERLTGWIGEIAAYYAAAPVRLGGAKVPHLMPGDSLNLQTAQDTDNGYSVFEQSLLRYIAAGLGVSYEQLSRNYAQMSYSTARASANESWAYFMGRRKFVASRQASQMFLCWLEEAIVRRVVTLPSKARFSFQEARSAWGNCDWIGSGRMAIDGLKEVQEAVMLIEAGLSTYEKECAKRGDDYQEIFAQQVRETMERRAAGLKPPAWAAAAF

SEQ ID NO: 17585 - protein, 269 aa, Glycine max
AFSNIHEDICTSAHQKRAAIIFLPFHKHQRFDGTMESVGNSLRAMNGLVLSHAPCSVGILVDRGLGGTSQVQASDVSYKVVVGFFGGRDDREALAYGMRMAEHPGVSITVVKFVVPPGMTLAFGAKLIGVTADKDRKVIKVAEGTTTDVEKQEDEHFWSEFLGVCCKNAESIMYEERLVESKEDILTTMREMNKSNLILVGRMPPVVPLVDTSDCPELGPVGSYLASSEFSTSASVIVFQQYNPKTDVYPLVMEISDYLNMPDTPPHSP

SEQ ID NO: 17586 - protein, 261 aa, Glycine max
MEQMKMLDTLQNTQLQSAIVKAMYAATIESELDTQSAMDFILGANSQEQRERLTGWIGEIAAYYAAAPVRLGGAKVPHLMPGDSLNLQTAQDTDNGYSVFEQSLLRYIAAGLGVSYEQLSRNYAQMSYSTARASANESWAYFMGRRKFVASRQASQMFLCWLEEAIVRRVVTLPSKARFSFQEARSAWGNCDWIGSGRMAIDGLKEVQEAVMLIEAGLSTYEKECAKRGDDYQEIFAQQVRETMERRAAGLKPPAWAAAAF

SEQ ID NO: 17587 - protein, 235 aa, Glycine max
MESVGNSLRAMNGLVLSHAPCSVGILVDRGLGGTSQVQASDVSYKVVVGFFGGRDDREALAYGMRMAEHPGVSITVVKFVVPPGMTLAFGAKLIGVTADKDRKVIKVAEGTTTDVEKQEDEHFWSEFLGVCCKNAESIMYEERLVESKEDILTTMREMNKSNLILVGRMPPVVPLVDTSDCPELGPVGSYLASSEFSTSASVIVFQQYNPKTDVYPLVMEISDYLNMPDTPPHSP

SEQ ID NO: 17588 - DNA, 1225 bp, Glycine max
tttatttgctatgactgagaaaagacttcaaaatagcaagcttcataattgggtgatgtgccctacatgtcgacagcatactgattttggaaacattgcttatgctgttgatgcacagcatgaatcttccgatccttcagtgctgcatccaattgacagcagtgaaaaatttgaagcatccattagtgttaaaggttcatatggaaccaagattgaagcagtcacaagaagaatcttgtgggtaaaggctaatgatcatagagcaaaagttcttgtattttcaagttggaatgatgtacttgatgtattggagcatgccttcgctgccaataacattacctatattcggatgaagggaggcagaaaagcacatgttgctatcagtcaatttagaggaaaacaaaatggcacaaaaaaatgtgaggggtcaacaccaaaatctattcaggtgttgttgcttttaattcaacatggagccaatggactcaatctattggaagcacagcatgtagtccttgtagaaccattactcaatccagctgccgaagcacaagcaatcagtcgtgtacatcggattggacaaaaaataagaccctcattcatcgtttcattgtaaaagacacggttgaagagagcatatataaattgaacagaagcaggagcaatcattcgttcatcagtgggaacactaaaaatcaagatcaacctgttctaaccctgaaggatgtggaagccttgctttctagagcaccactaacaatgccagaaagtgatgaaaatcctaacagggacacgaatcttagacacttgccaccatcagtggcagctgctgtagctgctgagaggagacttaatgaacaaaggacatgattttgcttgcttctctcttagttcaatagatggagttgcattgcattgcaaagattccactaaacacaagtgcagtaatttcaagaggctagaggagatgcaatgcaataataacctttcagccgtagatccttctaaccaaaattctatggtataatatccataaatttatttactcttgtacatataattagatatattttagttgagtagagatctgtataatattaatcctttaggtgagctttgttactctatttgtaaacctcttgcacggtataatggcttatactacaggcattttaattaaacaatgaaaaaaaaatccatagcagttaaaagttaactgttaact

SEQ ID NO: 17589 - protein, 204 aa, Glycine max
LFAMTEKRLQNSKLHNWVMCPTCRQHTDFGNIAYAVDAQHESSDPSVLHPIDSSEKFEASISVKGSYGTKIEAVTRRILWVKANDHRAKVLVFSSWNDVLDVLEHAFAANNITYIRMKGGRKAHVAISQFRGKQNGTKKCEGSTPKSIQVLLLLIQHGANGLNLLEAQHVVLVEPLLNPAAEAQAISRVHRIGQKIRPSFIVSL

SEQ ID NO: 17590 - protein, 201 aa, Glycine max
MTEKRLQNSKLHNWVMCPTCRQHTDFGNIAYAVDAQHESSDPSVLHPIDSSEKFEASISVKGSYGTKIEAVTRRILWVKANDHRAKVLVFSSWNDVLDVLEHAFAANNITYIRMKGGRKAHVAISQFRGKQNGTKKCEGSTPKSIQVLLLLIQHGANGLNLLEAQHVVLVEPLLNPAAEAQAISRVHRIGQKIRPSFIVSL

SEQ ID NO: 17591 - protein, 186 aa, Glycine max
MCPTCRQHTDFGNIAYAVDAQHESSDPSVLHPIDSSEKFEASISVKGSYGTKIEAVTRRILWVKANDHRAKVLVFSSWNDVLDVLEHAFAANNITYIRMKGGRKAHVAISQFRGKQNGTKKCEGSTPKSIQVLLLLIQHGANGLNLLEAQHVVLVEPLLNPAAEAQAISRVHRIGQKIRPSFIVSL

SEQ ID NO: 17592 - DNA, 539 bp, Glycine max
atacctattaaagcacctggaagagctcgtggggaactggaaataacatatttggacgaagaactgcggttatcaagaggtgataaaggaaacttgttcatcttgaaaatggtggatccgtcttacagggttcctatatgatggcattgtcagcattgcaatgcagtacttgtgttcttcctctctagggattcaaactaccatcatagctcactgaaaatacacgttggagcttatactagcactgcactattattcaagttgacttgaagcattttgggaccgttcttccagacttccagtacaaaagataaactgaaatagtataatcttaatctctgtaatgagttctactctttatctcctcaaggtcggtgaataaaataaaaaaaaataatcattaatattaatgagggcgagtcctggtgcagcggtaaagttgtgccttggtgacttgtgacaattatgtgagcttatcaattttttccctacttatttttccgtctaaacaaataagagaaaatatctcttcatttccc

SEQ ID NO: 17593 - protein, 46 aa, Glycine max
IPIKAPGRARGELEITYLDEELRLSRGDKGNLFILKMVDPSYRVPI

SEQ ID NO: 17594 - DNA, 1326 bp, Glycine max
gagggacaacacaacagagaagaaaggggccaaaaccaaaagacaaatcagaaactgaaaaggaactgcacataagcattcacaaaagcaccaaccaacgtaacgcctcaacctcaatctcttcaaactcgcgcgttcttcccccttcgcctcgcagtatatgtattgcaatcctcccaatttggttgagactccacatacgcgacaaggactgccttgtttccgtctctgcactctattctggaactttgtttgaaattaaacgatttacattaactttggtcattgatgtggcccatttgcttgctattcaacaagattctcaaggcaggggatgaaggagaattaaaaggggataatttgaatgcgatagatccgtacctgtttcagcaaccatcaattaacatagattcccatcctccctccttgcgctgttcacacttcattgaagtaccacacataaaccaaatatatacatgggattgtggccttgcttgtgtcttgatggttttgaaaactattggcgtcaacaactgtgatattcaaacactggctgaactatgctgcacaactagcatttggactgttgatttggcatatttattacagagatttgctgttgctttttcctacttcacagttacatttggggcaaacccaaactatagcattgaatcattctacaaggaggaactgcctaatgatctagtgagagtggatttgctatttcaaaaagcagtggaggctggcattgatatacagtgcaggtcaattagtgaagaagagatttctattctcatattgtctgggaaatatattgcaattgtattagttgatcacaacaaattgagtcatgttttgcaagaagatgttcccatgcctggtcttttcagcaacaaccctggctacacaggtcactatgtgttgatatgtggctatgatgctggagcagatatgtttgagattagagatcctgccagctctaagaaacataagaggatttcttcaaagtctttagaagaagctcgcaacacctttggaactgatgaggatcttctgttgatatctttggagaaaagcagtaaccatcatcaaccttttctgcaactttccaatgatgtcaataccgattcttgattttctttacctgttttgaaataattatgttgctgcttttttttttctgcatccttgtgtattttagttgctacactaggcctattatttatttatattcccagtataaacctcttaaaatggttttgtctgggctgtatgtaccgtgtaggtttactcaaaactgtatagtaaatataaattcatttc

SEQ ID NO: 17595 - protein, 282 aa, Glycine max
MWPICLLFNKILKAGDEGELKGDNLNAIDPYLFQQPSINIDSHPPSLRCSHFIEVPHINQIYTWDCGLACVLMVLKTIGVNNCDIQTLAELCCTTSIWTVDLAYLLQRFAVAFSYFTVTFGANPNYSIESFYKEELPNDLVRVDLLFQKAVEAGIDIQCRSISEEEISILILSGKYIAIVLVDHNKLSHVLQEDVPMPGLFSNNPGYTGHYVLICGYDAGADMFEIRDPASSKKHKRISSKSLEEARNTFGTDEDLLLISLEKSSNHHQPFLQLSNDVNTDS

SEQ ID NO: 17596 - protein, 210 aa, Glycine max
MVLKTIGVNNCDIQTLAELCCTTSIWTVDLAYLLQRFAVAFSYFTVTFGANPNYSIESFYKEELPNDLVRVDLLFQKAVEAGIDIQCRSISEEEISILILSGKYIAIVLVDHNKLSHVLQEDVPMPGLFSNNPGYTGHYVLICGYDAGADMFEIRDPASSKKHKRISSKSLEEARNTFGTDEDLLLISLEKSSNHHQPFLQLSNDVNTDS

SEQ ID NO: 17597 - DNA, 927 bp, Glycine max
ggatcatcacttcacttcactaatacatcatggcagacgagacccagaacaagtatgagagctctgaggttgaggtccaggatcgtggtgtttttgactttctcggtaagaaaaaggatgaagaagacaagcctcatcctcaggaggaggtcatcgccaccgagtttcaaaaagtcactgtctcagaccaaggagagaacaagcacagcctcttagaaaagcttcaccgatctgacagcagctctagctcttcaagtgaggaggaaggagaagatggagagaaaaggaagaagaagaagaaggaaaagaaagggctgaaagagaagatcgaggagaaaatagagggtgatcatcatcatcacaaggatgaggacacaagtgtccctgttgagaaagttgaggttgttgaaacagcacatgctgaggaaaagaaggggttcctcgacaagattaaggagaagctaccagggcacaagaagacagaggaggccacagctactactcctcctccaccaccacctgttgcatcattggagcatggtgaaggtgctcatcatgaaggagaggccaaggagaagaaaggtatattagaaaagataaaagagaagcttcctggttatcactccaagacagaggaggaaaaggaaaaggaaaaggagagtggtgctcattgatatttaagattgagacaaggcttttttgttggttggagatgcatgattgtggtgtgctttgttttcatttcatcatatgacagccttgtgggtttctttggtgtttcttgatgcatacttaatttactttattattgtgtatttatctcttccatttacaaaaaaaaaagtttgtgtaggtttccttctttgaagtaaaaagaaattaaatatgtactgaaaatggaataatagtgtgttttatttgtgtttg

SEQ ID NO: 17598 - protein, 214 aa, Glycine max
MADETQNKYESSEVEVQDRGVFDFLGKKKDEEDKPHPQEEVIATEFQKVTVSDQGENKHSLLEKLHRSDSSSSSSSEEEGEDGEKRKKKKKEKKGLKEKIEEKIEGDHHHHKDEDTSVPVEKVEVVETAHAEEKKGFLDKIKEKLPGHKKTEEATATTPPPPPPVASLEHGEGAHHEGEAKEKKGILEKIKEKLPGYHSKTEEEKEKEKESGAH

SEQ ID NO: 17599 - DNA, 2284 bp, Glycine max
tcttcatgaggatgacgacgacggcgatgacaagaacagaaagaagaagaagaggaagtatcacaggcacaccgctgaacagatcagagaaatggaagcgcttttcaaggaatcaccgcatcctgatgaaaagcagaggcaacaactcagcaaccaacttggccttgctccaaggcaagttaagttttggttccaaaatcgtcgaacccaaatcaaggcaatacaagagcgccatgaaaattcattgttgaagacagaattagacagacttagggaggaaaataaggccatgagagagaccataaacaaatcttgttgccccaattgtggcatggtaacggctaccatagatgcttccatgtccactgaagaaaaacaacttcttattgaaaatgccaaactcaaagccgaggtagagaagctccgaacagctttagggaaattctcaccaagaacaacgtctcctactacatcttctgctggccatcatgatgaggaagagaatagaagctctttggatttttacaatggaattttcgggctcgacaaatcaaggataatggatatagcaaaccgagcaacggaggagctcataaagatggcaaatatgggggaacccttatgggttcgtagcgttgaaacaggtcgtgatatacttaactacgatgaatatgtgaaggagttcgaagttgaaaattctggtagtgaaaggccaaagacattcatcgaagcctcaagagaaactgaggttgtttttatggatcttcctcggcttctccaaagttttctagacgtgaatcaatggaaggaaatgtttccatgcttaatatcaaaggctgcaactgttgatgttatatgcaatggggaaggttctaacaggaatggtgcagtgcaattgatgtttgctgagcttcaaatgctcactccaatggtgcccaccagagaagtgtatttcgtgaggtgcggcaaacagttaagtgatgaacagtgggctatagttgatgtctccatagacaaagtagaagacaacattgacgcatcccttgtgaaatgcagaaaacgcccatctggttgtattattgaggataagtcaaatggccattgcaaggtgatatgggtggagcacttggagtgccaaaagagcacaattcatacaatgtatcgaaccattgtcaatagtggtctagcttttggggcaaggcattggatagaaacactacaacttcaatgtgaacgtttggttttttacatggcaacgaatgttccaatgaaggattcaactggtgttgcgacgttggctgggaggaagagcatattgaagttggcacaaagaatgacatggagtttctgccatgcagttggtgcatcaagtttccatacatggaccaaggtcacaagtaaaacaggagaagacataaggattagctctaggaagaacttgaatgagcctggtgaacctcttggggttatcttgtgtgccgtttcttctgtgtggcttcctgtctctcctaatgtgctgtttgatttcttgagggatgaagctcgtcgaaatgagtgggatatcatgtccagtggtgggtcagtgcagtccattgcaaatttagctaaaggaaaagaccgaggcaatgttgtaaacatccaaaaaataatacaatcaaaagataacagtgtgtggatattgcaagatagctgcacaagtgcttatgagtcaacggtggtatatgctcctgtggaatttgctggtatacaatctgtgctgacaggatgtgattcaagtaatcttgcaatattgccgtcaggattttcaattcttcctgatgggattgagggaaggccattggtaattacgtcaaggcaagaagaaaaatacactgaaggaggctctttgtttacaatggcattccagatccttgccaatccttctccaacaaccaagttaacaatggagtctgtggaatcggtcaataatcttgtgtcttgtacattaagaaatattagaacaagtttgcagtgtgaagatggttagtcaagataaaagataattagatagatcataggatttgattagctgctacagttatataggctttaatttctaccccttttacagttgggatgaatatttatttagtgttcccttgaaactataggaggcgaaattcatggatggactttattttatatggaaaactcatccttgaattttgacctctgattaactttaaggaatatcaaattgaatcgtagtatccggttcagcagtagaatagatttttttttgtcc

SEQ ID NO: 17600 - protein, 674 aa, Glycine max
LHEDDDDGDDKNRKKKKRKYHRHTAEQIREMEALFKESPHPDEKQRQQLSNQLGLAPRQVKFWFQNRRTQIKAIQERHENSLLKTELDRLREENKAMRETINKSCCPNCGMVTATIDASMSTEEKQLLIENAKLKAEVEKLRTALGKFSPRTTSPTTSSAGHHDEEENRSSLDFYNGIFGLDKSRIMDIANRATEELIKMANMGEPLWVRSVETGRDILNYDEYVKEFEVENSGSERPKTFIEASRETEVVFMDLPRLLQSFLDVNQWKEMFPCLISKAATVDVICNGEGSNRNGAVQLMFAELQMLTPMVPTREVYFVRCGKQLSDEQWAIVDVSIDKVEDNIDASLVKCRKRPSGCIIEDKSNGHCKVIWVEHLECQKSTIHTMYRTIVNSGLAFGARHWIETLQLQCERLVFYMATNVPMKDSTGVATLAGRKSILKLAQRMTWSFCHAVGASSFHTWTKVTSKTGEDIRISSRKNLNEPGEPLGVILCAVSSVWLPVSPNVLFDFLRDEARRNEWDIMSSGGSVQSIANLAKGKDRGNVVNIQKIIQSKDNSVWILQDSCTSAYESTVVYAPVEFAGIQSVLTGCDSSNLAILPSGFSILPDGIEGRPLVITSRQEEKYTEGGSLFTMAFQILANPSPTTKLTMESVESVNNLVSCTLRNIRTSLQCEDG

SEQ ID NO: 17601 - protein, 644 aa, Glycine max
MEALFKESPHPDEKQRQQLSNQLGLAPRQVKFWFQNRRTQIKAIQERHENSLLKTELDRLREENKAMRETINKSCCPNCGMVTATIDASMSTEEKQLLIENAKLKAEVEKLRTALGKFSPRTTSPTTSSAGHHDEEENRSSLDFYNGIFGLDKSRIMDIANRATEELIKMANMGEPLWVRSVETGRDILNYDEYVKEFEVENSGSERPKTFIEASRETEVVFMDLPRLLQSFLDVNQWKEMFPCLISKAATVDVICNGEGSNRNGAVQLMFAELQMLTPMVPTREVYFVRCGKQLSDEQWAIVDVSIDKVEDNIDASLVKCRKRPSGCIIEDKSNGHCKVIWVEHLECQKSTIHTMYRTIVNSGLAFGARHWIETLQLQCERLVFYMATNVPMKDSTGVATLAGRKSILKLAQRMTWSFCHAVGASSFHTWTKVTSKTGEDIRISSRKNLNEPGEPLGVILCAVSSVWLPVSPNVLFDFLRDEARRNEWDIMSSGGSVQSIANLAKGKDRGNVVNIQKIIQSKDNSVWILQDSCTSAYESTVVYAPVEFAGIQSVLTGCDSSNLAILPSGFSILPDGIEGRPLVITSRQEEKYTEGGSLFTMAFQILANPSPTTKLTMESVESVNNLVSCTLRNIRTSLQCEDG

SEQ ID NO: 17602 - protein, 578 aa, Glycine max
MRETINKSCCPNCGMVTATIDASMSTEEKQLLIENAKLKAEVEKLRTALGKFSPRTTSPTTSSAGHHDEEENRSSLDFYNGIFGLDKSRIMDIANRATEELIKMANMGEPLWVRSVETGRDILNYDEYVKEFEVENSGSERPKTFIEASRETEVVFMDLPRLLQSFLDVNQWKEMFPCLISKAATVDVICNGEGSNRNGAVQLMFAELQMLTPMVPTREVYFVRCGKQLSDEQWAIVDVSIDKVEDNIDASLVKCRKRPSGCIIEDKSNGHCKVIWVEHLECQKSTIHTMYRTIVNSGLAFGARHWIETLQLQCERLVFYMATNVPMKDSTGVATLAGRKSILKLAQRMTWSFCHAVGASSFHTWTKVTSKTGEDIRISSRKNLNEPGEPLGVILCAVSSVWLPVSPNVLFDFLRDEARRNEWDIMSSGGSVQSIANLAKGKDRGNVVNIQKIIQSKDNSVWILQDSCTSAYESTVVYAPVEFAGIQSVLTGCDSSNLAILPSGFSILPDGIEGRPLVITSRQEEKYTEGGSLFTMAFQILANPSPTTKLTMESVESVNNLVSCTLRNIRTSLQCEDG

SEQ ID NO: 17603 - DNA, 1331 bp, Glycine max
aatttgaagtgcgactaggaagtttgagtgaggttactgcccaaggagatcttcaacaaggagtcatctcaagggttttcagcaagccaccatcttctaatcaagccgattctggtaaatcaccagtgacatgcacctatgatgtctactgttttgggaagattttacttgagctcattaccggtaacattgaagtcagcaagtcagatgatgccactacaaaggagtggttagagcaaaccttgccttacatcactatatacgataaagaacgggtgactaagattattgacccatcattgatcgtggatgaggacctattggaagaggtatgggctatggcaattgtggccaatgcatgcttgaaacccaagccttccaaacgtcctcctatgagacatgtcctgaaagcattggaaaatccattgaagattgtgagagaagaaaatactagctcagcaaggttgagaacaaactcttctaggaaatcttggagcactgcattctttggtagctggaggcacagctcatcagacagtgttgttgccacaaacaaagagggttcaaatgacactaaaaaatcaggaaaagtaggttctcaaagtagtggaaatgatcactcttcttccaataaaagatcgtccaatgaaattttccctgaaccattggaaatacaagatgtggagacaggagtgacaagataaccacttgtgaaatgggtttggttattctttagtctgtgagatttttttaccactttctcggataattggtggtgccatagcaattgcttgttattagcacgtcagactccacccagcatccattatggtccatattgaagcaacggagtaccataatactgctattgatagcttttgctttccaaagcttagattaagcagtacagattgaaatgcctggtatgagagctccaaaaaaactgaataattttactcattcaatagattgtttgaaacacacagccctctcttaggttaaaagtgtgtgacaaaatgaaaaataatgaaagggttttcattttaatgagtaattgtaagggggaaaaacgttgttactcagcttttctttggtaggttatatgtatttagcattgtaaatcttcttgagctctgtagcatttgccctaatcttgagtgttgaaagttaatctttttgcgcttaagaaaaacacaaaatggttaattggttgagttagttaagtttattagttagttctttagcatgtgtcattagttagtactagattgattggttggaagtcatgtgctactagaggttctctgtgtaagttcatgatgtgattattg

SEQ ID NO: 17604 - protein, 233 aa, Glycine max
FEVRLGSLSEVTAQGDLQQGVISRVFSKPPSSNQADSGKSPVTCTYDVYCFGKILLELITGNIEVSKSDDATTKEWLEQTLPYITIYDKERVTKIIDPSLIVDEDLLEEVWAMAIVANACLKPKPSKRPPMRHVLKALENPLKIVREENTSSARLRTNSSRKSWSTAFFGSWRHSSSDSVVATNKEGSNDTKKSGKVGSQSSGNDHSSSNKRSSNEIFPEPLEIQDVETGVTR

SEQ ID NO: 17605 - protein, 121 aa, Glycine max
MAIVANACLKPKPSKRPPMRHVLKALENPLKIVREENTSSARLRTNSSRKSWSTAFFGSWRHSSSDSVVATNKEGSNDTKKSGKVGSQSSGNDHSSSNKRSSNEIFPEPLEIQDVETGVTR

SEQ ID NO: 17606 - DNA, 1468 bp, Glycine max
gttgttggcactgcatcgatcaagaaagtctcagaaacagcaaaggcccttggtgcagttggatttgttctttgtgttgaaaacatttccctaggaacaaaatttaatccagttcctgttggccttcctgggattctcatcatagatgtcagcaattcaaaggaactgatagattattataatatcactacaccaagagactggactgggcgtgtaaagagtttcgaaggtaaaggtaaaatcggtgatggtttgatgcctattctgcataaatctgcaccacaggtagcattattctctgctcgagggccaaatataaaggacttcagcttccaagaggcagatcttctcaaaccagatatattagctcctggttcattgatttgggctgcttggtgtccaaatggaactgatgagccaaattatgttggtgaagcgtttgccatgatatctggaaccagcatggctgcaccacatatagctggaattgctgctcttataaagcagaagcatcctcattggagccctgcagccattaaatcagctttgatgactacatcaacgactctagacagagcaggggatcctcttctagcccagcaaacttctgaatcagaagctatgaggctggtcaaagctactccttttgattatgggagtggtcatgttgatccaactgctgcattggaccctgggctcatctttgatgcagggtacgaggattatataggcttcttgtgcacaacacctagcattgatgttcatgagataaggaactacactcacaccccatgtaacacctccatgggcaaaccatcaaatttaaacaccccatcaataacaatttcccatcttgtgagaactcaagttgtcacgcgcacggtcacaaatgttgccgaggaagaaacctatgtgatcacagccagaatggaaccggctgttgccattgaagtcaaccctccagcaatgactatcaaagcaggcgcatcgcgccagtttttggtgtcacttacagtgcgctcggtgacaggaaggtatagttttggagaggttttgatgaaagggagcagagggcacaaggtgaggattcctgttctggccaacggataccgacgatagatagcatagtgaagtttggtcagcaaaggaaaggaaagcaagtgctgcttgtaatattctttgtaacctgtggggaataaggtatggcgctacatttattcgtctaaatatataaatatgtaatgttaaattatgaataggtgtaaaggtaagcaggtgtaaggggtcactcctagtttcttccacatatagttttgcttatattgtctagtaattttgttggaatgcttcatcacaagttttaacctgtatctgccccattccccaaaagttcgttgcttacagcatgtgtaatacatgaaataatttgtataacataaggtatcaatggcacagcgtaaaaaaaaag

SEQ ID NO: 17607 - protein, 372 aa, Glycine max
VVGTASIKKVSETAKALGAVGFVLCVENISLGTKFNPVPVGLPGILIIDVSNSKELIDYYNITTPRDWTGRVKSFEGKGKIGDGLMPILHKSAPQVALFSARGPNIKDFSFQEADLLKPDILAPGSLIWAAWCPNGTDEPNYVGEAFAMISGTSMAAPHIAGIAALIKQKHPHWSPAAIKSALMTTSTTLDRAGDPLLAQQTSESEAMRLVKATPFDYGSGHVDPTAALDPGLIFDAGYEDYIGFLCTTPSIDVHEIRNYTHTPCNTSMGKPSNLNTPSITISHLVRTQVVTRTVTNVAEEETYVITARMEPAVAIEVNPPAMTIKAGASRQFLVSLTVRSVTGRYSFGEVLMKGSRGHKVRIPVLANGYRR

SEQ ID NO: 17608 - protein, 287 aa, Glycine max
MPILHKSAPQVALFSARGPNIKDFSFQEADLLKPDILAPGSLIWAAWCPNGTDEPNYVGEAFAMISGTSMAAPHIAGIAALIKQKHPHWSPAAIKSALMTTSTTLDRAGDPLLAQQTSESEAMRLVKATPFDYGSGHVDPTAALDPGLIFDAGYEDYIGFLCTTPSIDVHEIRNYTHTPCNTSMGKPSNLNTPSITISHLVRTQVVTRTVTNVAEEETYVITARMEPAVAIEVNPPAMTIKAGASRQFLVSLTVRSVTGRYSFGEVLMKGSRGHKVRIPVLANGYRR

SEQ ID NO: 17609 - protein, 224 aa, Glycine max
MISGTSMAAPHIAGIAALIKQKHPHWSPAAIKSALMTTSTTLDRAGDPLLAQQTSESEAMRLVKATPFDYGSGHVDPTAALDPGLIFDAGYEDYIGFLCTTPSIDVHEIRNYTHTPCNTSMGKPSNLNTPSITISHLVRTQVVTRTVTNVAEEETYVITARMEPAVAIEVNPPAMTIKAGASRQFLVSLTVRSVTGRYSFGEVLMKGSRGHKVRIPVLANGYRR

SEQ ID NO: 17610 - DNA, 1384 bp, Glycine max
gtcccaaacttgttcatgaaacaaatattgattttctttgtgaacttgttgatatacttaaaatggaagttctgggggaacagcatagtaggaggagtgaatcactagctggtcttcgtcctacatttgagagaattttagcagatgttcatgagcggttaacatttcgtgctcggactcatatacgggatgagatagcaaattacattccaactaatgaagacttggactaccctgaaaagctaaagaaatctgctgaaagtacttctgagatcaatcctgctgatgacaacccagatatttttaaaacatggtatccacccctggagaaaactctatcatgtctttcaaagttgtatcgttgtttagagtctgcagttttcacgggcttagcacaggaagtagtggaagtttgctcagcatctattcagaaagcaagcaaattaattgcaaagagatcatcacaaatggacggacagctcttccttataaagcatcttttaattttaagggagcagattgcacctttcaatattgaattttcagtcacacaaaaggagctcgatttctctcatttgctggagcatctacgaagacttctaagagggcaagcctctctatttgaatggtcaagatcaacttcattggcaaggacattgtctccaagagttttggaaaatcaaattgacacaaagaaggaactggaaaagagccttaaagccacttgtgaggagttcatcatgtctgttactaagcttgttgtggatcctttgctttcatttgttacaaaggttacagcagttaaagttgcgatgagcatcaggtggtcagaatcaaaagctagagtcagttatggccaaacctctgaaggatcaggcttttgctactccagataaggtggctgaacttgttcaaaaggtcaggactgctattcaggagcaactgccggtggtgatagaaaagatgaagctttatttacagaattcatcaacaagaacgatacttttcagaccaataaagacaaatattgttgaagcccatatccaagttcaatccctactacaatcagaatacacgagtgaagagatccagaccattaatctcaaatccgtacaggatctgcaaaatgagcttgataattatctctaatttgtatgtaaaggccattggataatttcatgtccatttttcccctgctggaggatcttgaacaaacaaagacttggttacatacattctagataattttgtagaattattagcaagagatggcagagttgtggttttgctgcggacgatctatatatacccttttcttttctaacaccggtggatatttttgtacatttttttcattagtcaccaacaaaccctatacttaccc

SEQ ID NO: 17611 - protein, 297 aa, Glycine max
PKLVHETNIDFLCELVDILKMEVLGEQHSRRSESLAGLRPTFERILADVHERLTFRARTHIRDEIANYIPTNEDLDYPEKLKKSAESTSEINPADDNPDIFKTWYPPLEKTLSCLSKLYRCLESAVFTGLAQEVVEVCSASIQKASKLIAKRSSQMDGQLFLIKHLLILREQIAPFNIEFSVTQKELDFSHLLEHLRRLLRGQASLFEWSRSTSLARTLSPRVLENQIDTKKELEKSLKATCEEFIMSVTKLVVDPLLSFVTKVTAVKVAMSIRWSESKARVSYGQTSEGSGFCYSR

SEQ ID NO: 17612 - protein, 277 aa, Glycine max
MEVLGEQHSRRSESLAGLRPTFERILADVHERLTFRARTHIRDEIANYIPTNEDLDYPEKLKKSAESTSEINPADDNPDIFKTWYPPLEKTLSCLSKLYRCLESAVFTGLAQEVVEVCSASIQKASKLIAKRSSQMDGQLFLIKHLLILREQIAPFNIEFSVTQKELDFSHLLEHLRRLLRGQASLFEWSRSTSLARTLSPRVLENQIDTKKELEKSLKATCEEFIMSVTKLVVDPLLSFVTKVTAVKVAMSIRWSESKARVSYGQTSEGSGFCYSR

SEQ ID NO: 17613 - DNA, 1240 bp, Glycine max
aaaggtggaacccccatggctgttacagcctctagctttggaactacatggtgtcttagaagagcagctcaggcttttgctatctctcattctcatattctccgcaacaatgttaaactctctttgcagaggaacttttgctctcatcttctctccgtttctacttctttagcttcaggtgtaagccagacagtacaagctctaaagggagaagttgacttgttactcaaaggagtaggagaaagaagtgtaacgaaagaagtaaaacatattcttgagatggctagacgagcatcattaaagcgagagattctccatacagattttctaacccctccagtgttaaaggaatctatgcaagttttggaaaaactagcagacgtgaaagcaattgctcaaggaggttaccctcaggctgaacgttgtcggatttctgttggacatccagaagaactgaccagtgatccagatattatttcagcattaagcattacaggaaacttccagtttgaaccttgctcgcatggtgacttccttggctcaattcttggtacaggaattgtcagggagaaacttggagacattatattgcagggggaacagggtgctcagataattgttgtacctgaactcgttgaatttctcatgtcaacactggttaaggttcgtaatgttcctgtatcttgcactaagattccattaatttctcttgattatgaaccaccaagaacaaaatcattcaaaactatagaagcatcactaagagttgatgcactagctagtgctggatttaaagtttcacgttcaaagctagttgacatgatcagcaatggtgatgtgcgtatcaactggatccctgttactaccaaaggaaccacactcaagagtggagatattgtatcaattagtggcaagggaagattaaagataggagaaataaactccacaaagaaaggaaagtttgcagtggagctcattcggtatttgtagaagtttagagagttcagaagtactttcactctcaaagtaacaactttttctttcttcatttgtgtattggatttcacaaacatacttttcaaactttaaaccaacacagccgtagcctgtctaaaacgacatgcttttattttttgtggaaagatttgcttagcctcgcataacagttatgaagatagaaaaaaattgtacagacagaaccttgatgatgaaaccttaatatgaatcaaatttcagcatc

SEQ ID NO: 17614 - protein, 329 aa, Glycine max
KGGTPMAVTASSFGTTWCLRRAAQAFAISHSHILRNNVKLSLQRNFCSHLLSVSTSLASGVSQTVQALKGEVDLLLKGVGERSVTKEVKHILEMARRASLKREILHTDFLTPPVLKESMQVLEKLADVKAIAQGGYPQAERCRISVGHPEELTSDPDIISALSITGNFQFEPCSHGDFLGSILGTGIVREKLGDIILQGEQGAQIIVVPELVEFLMSTLVKVRNVPVSCTKIPLISLDYEPPRTKSFKTIEASLRVDALASAGFKVSRSKLVDMISNGDVRINWIPVTTKGTTLKSGDIVSISGKGRLKIGEINSTKKGKFAVELIRYL

SEQ ID NO: 17615 - protein, 324 aa, Glycine max
MAVTASSFGTTWCLRRAAQAFAISHSHILRNNVKLSLQRNFCSHLLSVSTSLASGVSQTVQALKGEVDLLLKGVGERSVTKEVKHILEMARRASLKREILHTDFLTPPVLKESMQVLEKLADVKAIAQGGYPQAERCRISVGHPEELTSDPDIISALSITGNFQFEPCSHGDFLGSILGTGIVREKLGDIILQGEQGAQIIVVPELVEFLMSTLVKVRNVPVSCTKIPLISLDYEPPRTKSFKTIEASLRVDALASAGFKVSRSKLVDMISNGDVRINWIPVTTKGTTLKSGDIVSISGKGRLKIGEINSTKKGKFAVELIRYL

SEQ ID NO: 17616 - protein, 236 aa, Glycine max
MARRASLKREILHTDFLTPPVLKESMQVLEKLADVKAIAQGGYPQAERCRISVGHPEELTSDPDIISALSITGNFQFEPCSHGDFLGSILGTGIVREKLGDIILQGEQGAQIIVVPELVEFLMSTLVKVRNVPVSCTKIPLISLDYEPPRTKSFKTIEASLRVDALASAGFKVSRSKLVDMISNGDVRINWIPVTTKGTTLKSGDIVSISGKGRLKIGEINSTKKGKFAVELIRYL

SEQ ID NO: 17617 - DNA, 1286 bp, Glycine max
agaaaggcctaatccagctgagaaaaaaaatggatgtagagaaagccttccacatgactggaggagttggcaaaactagctatgccaagaattcctcactacagaagaaggaatctgataaagtgaagcacataatcatacaaacagttgaggagctttaccttgcaaccactccaaagagcataggcattgctgatttgggatgttcctctggaccaaacaccctatcaatcatcaaagacatctttcaggccatccaaggcacaagccaaaggatcatgcaccactccacagagttcagggtgtacttcaatgatcttccaacaaatgacttcaattcaatcttcaaggccctcccagagttccaaaagttgcttaggcaagacaggaaaaatgggttcccttccattttcatgggaggctaccctggctcattttatggaagactgttcccaaacagttacttgcactttgtccactcctccttcagtcttcactggctttcaagggttcctccatcactctatgatgagcacaaaaggccattgaacaaagggtgtgtttacatttgtgaatcaagccctgaagtggtgtctcaagcatactatcaacaattccaagaagatttttccttgttccttaggtcaaggtcagaagaactagtagtaggtggaagaatggtgctgatatttttggggagaaggggcccagaacatgttgacagaggcaactctttcttctgggagattctttcccgttcatttgctattctagtctcacagggagaagtagagcaagagaagtttgattcatatgatgtacatttctatgcaccatcaagggaagagatagaagaagaggtgagaaaagaagggtcattgaagttggagaggctagagatgtttgaaatggacaagagtcacaatgagcatggaagtgatgagagctatggcacacaggttgctgtggcagttagggccattcaagaatcaatgatctcacaccactttggagaagggatcttggaaagtttgtttcagaattttgcaaagttggtagatgaagaaatggctaaggaggatattagaccaatctcttttgttctggttctcagaaaaatatgatactatgattattattattattatacaaaaatattaattatatagtaatattaattattttggtttgcagtaattagacgtgtttaaattgcagccatttactgcccatcactgtaatcatcatgatcagtctaatgtaaagtgttggtgtttcggtttaag

SEQ ID NO: 17618 - protein, 373 aa, Glycine max
KGLIQLRKKMDVEKAFHMTGGVGKTSYAKNSSLQKKESDKVKHIIIQTVEELYLATTPKSIGIADLGCSSGPNTLSIIKDIFQAIQGTSQRIMHHSTEFRVYFNDLPTNDFNSIFKALPEFQKLLRQDRKNGFPSIFMGGYPGSFYGRLFPNSYLHFVHSSFSLHWLSRVPPSLYDEHKRPLNKGCVYICESSPEVVSQAYYQQFQEDFSLFLRSRSEELVVGGRMVLIFLGRRGPEHVDRGNSFFWEILSRSFAILVSQGEVEQEKFDSYDVHFYAPSREEIEEEVRKEGSLKLERLEMFEMDKSHNEHGSDESYGTQVAVAVRAIQESMISHHFGEGILESLFQNFAKLVDEEMAKEDIRPISFVLVLRKI

SEQ ID NO: 17619 - protein, 364 aa, Glycine max
MDVEKAFHMTGGVGKTSYAKNSSLQKKESDKVKHIIIQTVEELYLATTPKSIGIADLGCSSGPNTLSIIKDIFQAIQGTSQRIMHHSTEFRVYFNDLPTNDFNSIFKALPEFQKLLRQDRKNGFPSIFMGGYPGSFYGRLFPNSYLHFVHSSFSLHWLSRVPPSLYDEHKRPLNKGCVYICESSPEVVSQAYYQQFQEDFSLFLRSRSEELVVGGRMVLIFLGRRGPEHVDRGNSFFWEILSRSFAILVSQGEVEQEKFDSYDVHFYAPSREEIEEEVRKEGSLKLERLEMFEMDKSHNEHGSDESYGTQVAVAVRAIQESMISHHFGEGILESLFQNFAKLVDEEMAKEDIRPISFVLVLRKI

SEQ ID NO: 17620 - protein, 356 aa, Glycine max
MTGGVGKTSYAKNSSLQKKESDKVKHIIIQTVEELYLATTPKSIGIADLGCSSGPNTLSIIKDIFQAIQGTSQRIMHHSTEFRVYFNDLPTNDFNSIFKALPEFQKLLRQDRKNGFPSIFMGGYPGSFYGRLFPNSYLHFVHSSFSLHWLSRVPPSLYDEHKRPLNKGCVYICESSPEVVSQAYYQQFQEDFSLFLRSRSEELVVGGRMVLIFLGRRGPEHVDRGNSFFWEILSRSFAILVSQGEVEQEKFDSYDVHFYAPSREEIEEEVRKEGSLKLERLEMFEMDKSHNEHGSDESYGTQVAVAVRAIQESMISHHFGEGILESLFQNFAKLVDEEMAKEDIRPISFVLVLRKI

SEQ ID NO: 17621 - DNA, 1063 bp, Glycine max
tctcgtcccgcaagtattcctccaatctccgtcgatcaccaccaccatgtcgtggctcctccgatccaccaagtctaagttcctctcttcctcttcctcttcttctctttctagaaccttcccctctctccctcgccctcagattggagccatctctcccctccccgatctcttccaccgcaacaccgccaccatgcctttcgcgaaggaaaacgcttccggtggaaacttgaccggtcttcccaaagttcccgcgaataagcttggcagtgattctgatgcgaccaattcttcgaggtacaaagcttctggactgaacaccaatgtgctggctggagctagatatgtctctagagtttgggctgcacagggtcaaatgccattgggagtcaatactgtgatggctagaagttttgagagaagtatggaagctggcacattgggaatgattggtcataaacgttttatgagtgacatcccaagtaaaaccagtgagacaaacccatctggttttcgtccgttatctcctcatcttcctctttatcagccccaactttcttcgaccctctcaattttcaatagaattgctggagctttcctagctggtgtcattttggttttttatatgatctatatgaagttgggtttggttagcctcacctatgactctttctaccagttcatattttattcatcgaaactcaacctacttgtcatggagatttctgccttagccgtgtcctatcatctgtatagtgcaattcgtcatttattcttatgatttgaatcagcaactgacgcctgaactttaggtttgaacctgaggtggaactttgcataattcgaccttggaggcatacttccatatgtctgtcagtcataaggaacttcatttagaaatgtgattttgcttaattgtagttatgtattatcggcttaataattacaattgtggcacaacttaaggagtattttgcacctgacattcggtcatgctttttgctgccctctcaaattgcatgcaagtaactgttgcatttaataaatgcatttgagttttggc

SEQ ID NO: 17622 - protein, 259 aa, Glycine max
LVPQVFLQSPSITTTMSWLLRSTKSKFLSSSSSSSLSRTFPSLPRPQIGAISPLPDLFHRNTATMPFAKENASGGNLTGLPKVPANKLGSDSDATNSSRYKASGLNTNVLAGARYVSRVWAAQGQMPLGVNTVMARSFERSMEAGTLGMIGHKRFMSDIPSKTSETNPSGFRPLSPHLPLYQPQLSSTLSIFNRIAGAFLAGVILVFYMIYMKLGLVSLTYDSFYQFIFYSSKLNLLVMEISALAVSYHLYSAIRHLFL

SEQ ID NO: 17623 - protein, 244 aa, Glycine max
MSWLLRSTKSKFLSSSSSSSLSRTFPSLPRPQIGAISPLPDLFHRNTATMPFAKENASGGNLTGLPKVPANKLGSDSDATNSSRYKASGLNTNVLAGARYVSRVWAAQGQMPLGVNTVMARSFERSMEAGTLGMIGHKRFMSDIPSKTSETNPSGFRPLSPHLPLYQPQLSSTLSIFNRIAGAFLAGVILVFYMIYMKLGLVSLTYDSFYQFIFYSSKLNLLVMEISALAVSYHLYSAIRHLFL

SEQ ID NO: 17624 - protein, 195 aa, Glycine max
MPFAKENASGGNLTGLPKVPANKLGSDSDATNSSRYKASGLNTNVLAGARYVSRVWAAQGQMPLGVNTVMARSFERSMEAGTLGMIGHKRFMSDIPSKTSETNPSGFRPLSPHLPLYQPQLSSTLSIFNRIAGAFLAGVILVFYMIYMKLGLVSLTYDSFYQFIFYSSKLNLLVMEISALAVSYHLYSAIRHLFL

SEQ ID NO: 17625 - DNA, 1490 bp, Glycine max
aacaagaatgctgcaaaatgcttttagaatgtctctcagaggactcagtatgtccactcctccaagtggtttcttcaatgccatcatgtagacttattaaagaatcattgcagaggagaatttccatgaactttgactattatatcagtgcgagtactgactttgtgttattagatgagacaactttaatcaatatcattaagcatccagatctgacagtaacgtctgaagagaaagtccttaatgcaattctaatgtttggcatgaatgcaaaacagttgtttgggtgggaagtggtggatcagttaatggaaaattcaaaaccagaactcctttttggtgagaggcttcagttaatctatgacttgttgccatttgtgcgatttccactactacaatattccttacttgagaagttgcagcatagcagcattggccggcatattcctgttttccaaaatcttgttaacgaggctatcaattttgttaaatgtgggctggcagagtcagaaaatgaagagaatgttagattccaacatagacgatccagttacagggaactccagtacatctgtgatggggatgaccatggagttctgtactttgctggaacatcctatggtgaacacccgtgggttaatcctcttttggcagagccaaggaaaattaccatcacagctagcagcccccactcaagatacactgatcccaaggttttggtctcaagaacctaccagggaacatgttttgctgggcctcgattggaaaatggacagaactgtagctggtggatggtggatcttggccaagatcatcagcttatgtgcaactactataccctgaggcaggacggttctaaggccttcccgagatgttggaatgttcagggctcacttgacggaaagagctggacaaacttgagagtccatgaaaatgatcggagtatatgtaaacctggccagtttgcctcttggcccataattggccccaacgctctgcttcccttcaggtatttccgggttgtgctcacaggaaccaccaccgatgccaccaatccctggaatttctgcatttgttacttggaattgtatggctacttcctttaaaagcctagccatgccaataccataccttcctaaaatacaattccagctccttcatgtacattatggtttgcttattgactaaattatttgaatcaagtcatggataaagggttgtggttctaagagaagatgaagtttctttattgttcttatttcatcattcaaacttgtaggctgctttatatgtaattatgtagactgtagtatctctagtcttcccataatttcaatcgacaaaatccttttcacaaataagaaaggtgcaccagacgatgaaaaaccaccttttgatatatgaaactcacgatggaaaaaaaatcagtaccaagcatcaatattgccaatttcattcgcagtaaagctctaaaataaaatattttcacg

SEQ ID NO: 17626 - protein, 367 aa, Glycine max
QECCKMLLECLSEDSVCPLLQVVSSMPSCRLIKESLQRRISMNFDYYISASTDFVLLDETTLINIIKHPDLTVTSEEKVLNAILMFGMNAKQLFGWEVVDQLMENSKPELLFGERLQLIYDLLPFVRFPLLQYSLLEKLQHSSIGRHIPVFQNLVNEAINFVKCGLAESENEENVRFQHRRSSYRELQYICDGDDHGVLYFAGTSYGEHPWVNPLLAEPRKITITASSPHSRYTDPKVLVSRTYQGTCFAGPRLENGQNCSWWMVDLGQDHQLMCNYYTLRQDGSKAFPRCWNVQGSLDGKSWTNLRVHENDRSICKPGQFASWPIIGPNALLPFRYFRVVLTGTTTDATNPWNFCICYLELYGYFL

SEQ ID NO: 17627 - protein, 362 aa, Glycine max
MLLECLSEDSVCPLLQVVSSMPSCRLIKESLQRRISMNFDYYISASTDFVLLDETTLINIIKHPDLTVTSEEKVLNAILMFGMNAKQLFGWEVVDQLMENSKPELLFGERLQLIYDLLPFVRFPLLQYSLLEKLQHSSIGRHIPVFQNLVNEAINFVKCGLAESENEENVRFQHRRSSYRELQYICDGDDHGVLYFAGTSYGEHPWVNPLLAEPRKITITASSPHSRYTDPKVLVSRTYQGTCFAGPRLENGQNCSWWMVDLGQDHQLMCNYYTLRQDGSKAFPRCWNVQGSLDGKSWTNLRVHENDRSICKPGQFASWPIIGPNALLPFRYFRVVLTGTTTDATNPWNFCICYLELYGYFL

SEQ ID NO: 17628 - protein, 342 aa, Glycine max
MPSCRLIKESLQRRISMNFDYYISASTDFVLLDETTLINIIKHPDLTVTSEEKVLNAILMFGMNAKQLFGWEVVDQLMENSKPELLFGERLQLIYDLLPFVRFPLLQYSLLEKLQHSSIGRHIPVFQNLVNEAINFVKCGLAESENEENVRFQHRRSSYRELQYICDGDDHGVLYFAGTSYGEHPWVNPLLAEPRKITITASSPHSRYTDPKVLVSRTYQGTCFAGPRLENGQNCSWWMVDLGQDHQLMCNYYTLRQDGSKAFPRCWNVQGSLDGKSWTNLRVHENDRSICKPGQFASWPIIGPNALLPFRYFRVVLTGTTTDATNPWNFCICYLELYGYFL

SEQ ID NO: 17629 - DNA, 1277 bp, Glycine max
agaagtcccagaagcctaacaaaaatgtattgtcagcagccaaaattgcgaagaagacgaagttaaaatttactaaagcatggattgcatatcttagattgcctcttccacatgatgtttacaaagaggttcttgtttgtcttcaccaagcagttattcctcatctatctaatcccatcatcttatgtgatttcttaacaagatcatatgatgttggtggtgtagttagtgtgatggctcttagcagcctttttgtcctaatgacccagtatggattggaatacccaaatttctatgacaaactatatgccctcttagttccatctatcttcatggcaaaacatcgagcaaggtttttccagcttcttgattcttgcctcaagtcacctcttcttccagcttacctggctgcttcctttgcaaagaaattgagtaggttgttgctttcagttcctccttcaggtgcattagttattacagctctgatacacaatcttctgcgtagacatccttcaatcaactgtttggtgcaccgggaagatggtgttgacgaagggaaaggggatgaaggaatggctactaactcggataatgcaaagactgccatgcccagccagaaatcaggcattgaccattttaacagtagtgaaactgatcctaagaagtcaggtgctatgaggagttctctttgggaaattgatactattcttcaccactactgtcctcctgcctcacggtttgctttgtctcttgggaatgatttgacagtcagggccaaaacaactgaagttaatgttggtgattttagtgctggttcatatgcaacaatccttggagcagagatatcgcggagggtaaagcaggttcccctagcattcttcaaagcaactccttcctctttattttcagagactgattttgctggttggactttcaaatgtgaagaaacacccaaaatgatcaatgacagggagagtacctaagatttatcgtaacatgaatgctgttctgtgaaatgactcaacagagtgctcaccattcattgttgtccatctcggaaatgtctgcttgttttgtgaagagatgtcacttgtttgatttatttatttttacttgaggaagcaaatcataaaggaagagggttttgggttggggtgagcgcctgggaacatgttcgagttcccttgtggctcactattggaacataaacttaagattaaattgaagtgttagatgtaacattcagaagataaattttgccacattctttttactgc

SEQ ID NO: 17630 - protein, 326 aa, Glycine max
KSQKPNKNVLSAAKIAKKTKLKFTKAWIAYLRLPLPHDVYKEVLVCLHQAVIPHLSNPIILCDFLTRSYDVGGVVSVMALSSLFVLMTQYGLEYPNFYDKLYALLVPSIFMAKHRARFFQLLDSCLKSPLLPAYLAASFAKKLSRLLLSVPPSGALVITALIHNLLRRHPSINCLVHREDGVDEGKGDEGMATNSDNAKTAMPSQKSGIDHFNSSETDPKKSGAMRSSLWEIDTILHHYCPPASRFALSLGNDLTVRAKTTEVNVGDFSAGSYATILGAEISRRVKQVPLAFFKATPSSLFSETDFAGWTFKCEETPKMINDREST

SEQ ID NO: 17631 - protein, 249 aa, Glycine max
MALSSLFVLMTQYGLEYPNFYDKLYALLVPSIFMAKHRARFFQLLDSCLKSPLLPAYLAASFAKKLSRLLLSVPPSGALVITALIHNLLRRHPSINCLVHREDGVDEGKGDEGMATNSDNAKTAMPSQKSGIDHFNSSETDPKKSGAMRSSLWEIDTILHHYCPPASRFALSLGNDLTVRAKTTEVNVGDFSAGSYATILGAEISRRVKQVPLAFFKATPSSLFSETDFAGWTFKCEETPKMINDREST

SEQ ID NO: 17632 - protein, 240 aa, Glycine max
MTQYGLEYPNFYDKLYALLVPSIFMAKHRARFFQLLDSCLKSPLLPAYLAASFAKKLSRLLLSVPPSGALVITALIHNLLRRHPSINCLVHREDGVDEGKGDEGMATNSDNAKTAMPSQKSGIDHFNSSETDPKKSGAMRSSLWEIDTILHHYCPPASRFALSLGNDLTVRAKTTEVNVGDFSAGSYATILGAEISRRVKQVPLAFFKATPSSLFSETDFAGWTFKCEETPKMINDREST

SEQ ID NO: 17633 - DNA, 1404 bp, Glycine max
gtgaaaaaatatgaggttgaatttaataaggctgcacagtctttaacagatgctgtgattccaaccactcagaagaaaactgccttgaatagattggttaaggataatgttgcactaatagttgttttagaagcaaaagttaacaatcagcctgttgataatccagggaaaagacagcttctttgtgtggcaaatacacatgtaaatgttcaccatgatttaaaggatgtcaaactgtggcaggtgcacactctcttgaaaggattggagaaaattgctgcaagtgcagatattccaatgttggtttgtggggactttaattcaattccaggaagtgctcctcatgcacttcttgcaatggggaaggtagatccatcgcatcctgatttagcagttgacccacttaatatattgcgtcctcacagcaagttggttcaccagttgccactggtcagtgcttattcgtcttttgctagaacggttggtcttggatttgagcagcataaagggagactagacaatgcaacaaatgaacctttattcacaaatgtaacgagagattttattggctctcttgattacatattttacacagcggattcattggttgtggagtcattgttggagctattggatgaggaaagtttgaggaaagacacagcacttccttctcctgaatggtcctctgatcatatagctatgttagctgagttccgctgctgcaagaatagatctaggcgttgacttataaggtcagatccagaggcacatacagaaaatggttgaaagaagcttttggttgataagttattattaaagtggtagatcttgcctttgtctttttcccaggtatctccttgtaggggagtccttgcaatgatctgctctgtattatgccacctttgtctcatagaaaaattatgataatgccttactgattttcgcccatatcttacccaatcttttttccctataaagtgaaaattttcttcgtacgtttccattggttcaatatgtagcaattaatcgccccattctcaagccattccgatcttgtggctaatgagccttgggctttaatatctcactactgtagtgataatattcacagcttaggttattttgtatctgcttgatcatcagaaagtagacaaattcgaaacggtatatattgatattaaacagaaaagtgtttatgagaatactaccagtaagaagggacacagggagagattgttgcatggcaagtagaatactttatttctgtttttacctcctaattgctgatacggggaccagactaaattcattccatgttttgtaagaatattagcgtgttttctgggtagaatgtgatttagttgcgcttcattttacgaagtgcttctacaaaaaaaaaaaaag

SEQ ID NO: 17634 - protein, 247 aa, Glycine max
VKKYEVEFNKAAQSLTDAVIPTTQKKTALNRLVKDNVALIVVLEAKVNNQPVDNPGKRQLLCVANTHVNVHHDLKDVKLWQVHTLLKGLEKIAASADIPMLVCGDFNSIPGSAPHALLAMGKVDPSHPDLAVDPLNILRPHSKLVHQLPLVSAYSSFARTVGLGFEQHKGRLDNATNEPLFTNVTRDFIGSLDYIFYTADSLVVESLLELLDEESLRKDTALPSPEWSSDHIAMLAEFRCCKNRSRR

SEQ ID NO: 17635 - protein, 148 aa, Glycine max
MLVCGDFNSIPGSAPHALLAMGKVDPSHPDLAVDPLNILRPHSKLVHQLPLVSAYSSFARTVGLGFEQHKGRLDNATNEPLFTNVTRDFIGSLDYIFYTADSLVVESLLELLDEESLRKDTALPSPEWSSDHIAMLAEFRCCKNRSRR

SEQ ID NO: 17636 - protein, 128 aa, Glycine max
MGKVDPSHPDLAVDPLNILRPHSKLVHQLPLVSAYSSFARTVGLGFEQHKGRLDNATNEPLFTNVTRDFIGSLDYIFYTADSLVVESLLELLDEESLRKDTALPSPEWSSDHIAMLAEFRCCKNRSRR

SEQ ID NO: 17637 - DNA, 1849 bp, Glycine max
gttgttacttagtgcaggtaagttaagaaaatggtatccatttcccaagcacaccattgacttggtacagtttcgagggcgcatcatcatcaccgattcaccgatgggtgacgcgaacttcgccttctttgttctctttcttcttcccgtgtttcttctggcggtgctctacttcctggtccgtccgcgtcccgtgaagatcccgattaagaaccggcacgttttcatcacgggcggatccagcggtatcgggctggcgctggcgcaccgcgcggcggcggagggtgcgcgcgtctcgatcctcgcccggtcaccggacaagctagaggaggcgcgcaacgcgatccgcctcgccacagggatggaggtggcggcattcgcggcagacgtgcgggacttcgaggcggtgaagcgcgcggtcgacgatgcgggccccatcgacgtgctgctgctgaaccacggcgtcttcgtggcgctggagctggataagatggaactgagtgaggtcaagttcaccatggacgtaaatctcatgggaacgttgaatctcatcaaggccgcgctgcctgcaatgaagaaccgcaacgatccgctgcccgcttccattgctcttgtttcctcacaggccggtcaggtgggaatttatggttatgtagcttattcggcaagtaaatttggtcttcgtggtttagcagaatcattgcaacaagaggttatagaagataacattcatgtttctatgatattccctccagatacggatactcctgggttagcagaagaaaacaagagaagaccggagctcaccaaaatcattacagcctcctctggttctatgaaagctgatgaagttgctcagaaagctttggatggtataaaatgtggcgattttattgtttcttgcaatttcgagggaattgcactatccctagcaactgcaggtttatcccctcagaggtctttcttaatggcgtttcttgaggttgttgctgctggaatcctacggattgttgcactaggtatgcagtggacttggtatagaagtatagagaaatatcacagccaaaggaagggtaagtgttgcacaaaattatatatctatgaagggatgaggaaatcatctcttattttgtcttaatttaattctcatttggccaataacttgttaagattaacaaaaaagtgttacttattctatctatctattggttcctatagtttacccagtttccaaattagtctctagaatttaaaagtttcacattagacccatagaattaccaaatgtttctgattggctcccaattgtgaccaaatgtacggcatctgttaattagagccgacatgggaaatggtgaggttgtggcaaccacttttgcttgcttggactagagaggtggccaaattaatccatttctctcccgggatagtgaaaatcaaatcacatgacagtgtagggcacatgaaatgggttgatttggttaccttatgatacacacaagcaaaatcattgccacatcaattcaccatatgcttatcatagcactaactaacagatgcccagcagttggtaaaggtattggttttggaccaaattagaaacatttagcaattccaaggatccatttagaaacttttaagcaacaggaactaatttaaacttgggttaaactatggaccaataaaatatttaaagtataaaaccattaacaagcttcaaagtggttactaagagtttgcattggatattagtcattaacaatttgtttagcaatttgcatgaaccatgcccatttatgttcctgggctgtagaagtcataatgtaatactaaggcagtctttctaatc

SEQ ID NO: 17638 - protein, 378 aa, Glycine max
LLLSAGKLRKWYPFPKHTIDLVQFRGRIIITDSPMGDANFAFFVLFLLPVFLLAVLYFLVRPRPVKIPIKNRHVFITGGSSGIGLALAHRAAAEGARVSILARSPDKLEEARNAIRLATGMEVAAFAADVRDFEAVKRAVDDAGPIDVLLLNHGVFVALELDKMELSEVKFTMDVNLMGTLNLIKAALPAMKNRNDPLPASIALVSSQAGQVGIYGYVAYSASKFGLRGLAESLQQEVIEDNIHVSMIFPPDTDTPGLAEENKRRPELTKIITASSGSMKADEVAQKALDGIKCGDFIVSCNFEGIALSLATAGLSPQRSFLMAFLEVVAAGILRIVALGMQWTWYRSIEKYHSQRKGKCCTKLYIYEGMRKSSLILS

SEQ ID NO: 17639 - protein, 344 aa, Glycine max
MGDANFAFFVLFLLPVFLLAVLYFLVRPRPVKIPIKNRHVFITGGSSGIGLALAHRAAAEGARVSILARSPDKLEEARNAIRLATGMEVAAFAADVRDFEAVKRAVDDAGPIDVLLLNHGVFVALELDKMELSEVKFTMDVNLMGTLNLIKAALPAMKNRNDPLPASIALVSSQAGQVGIYGYVAYSASKFGLRGLAESLQQEVIEDNIHVSMIFPPDTDTPGLAEENKRRPELTKIITASSGSMKADEVAQKALDGIKCGDFIVSCNFEGIALSLATAGLSPQRSFLMAFLEVVAAGILRIVALGMQWTWYRSIEKYHSQRKGKCCTKLYIYEGMRKSSLILS

SEQ ID NO: 17640 - protein, 258 aa, Glycine max
MEVAAFAADVRDFEAVKRAVDDAGPIDVLLLNHGVFVALELDKMELSEVKFTMDVNLMGTLNLIKAALPAMKNRNDPLPASIALVSSQAGQVGIYGYVAYSASKFGLRGLAESLQQEVIEDNIHVSMIFPPDTDTPGLAEENKRRPELTKIITASSGSMKADEVAQKALDGIKCGDFIVSCNFEGIALSLATAGLSPQRSFLMAFLEVVAAGILRIVALGMQWTWYRSIEKYHSQRKGKCCTKLYIYEGMRKSSLILS

SEQ ID NO: 17641 - DNA, 1289 bp, Glycine max
ggtgaagacgagcgagtacgacgaagagcgcgtgatggagtgggaggcgggtctcccaactgccaacgatctcacgcctctctctcagccgctgatcccgccggaactcgcgtcggccttcagcatcttgccggagccccaccgcaccctcctcgacgtcaaccgcgcctctcgcaacacgctctccacgctccgcggcggcggagggagcgtgcaccaggccttctcctcctccaacaacaaccacaactacgacggcgacggcgacggaggcgtcgaggaggaggaggaggaggacgacgatcgcgacggctcggggccggattcacggaagcagcggaagatcgactgcggcgcggccgaggaggcggactcggcggttcagacggagacctcggcggagcggacggcggtgaagcggccgcggctggtgtggaccccacagcttcacaagaggttcgttgacgtggtggcgcacctcgggatcaagaacgcggtgccgaagacgattatgcaattgatgaacgtggaagggttgacccgcgagaatgtcgcaagccatctccagaagtatcgtctctacctgaaacggatgcagggtctctccaacgagggtccttctgcttcggatcagttatttgcgtcgacacctgtgcctcagagcttgcatgactctgctcctcccagtaaccatagcaatggtcatgggcatgggcatggccatagcaatggccgtggtcatggtcatggtcatggtcatggtcatctctctgttccgatgatgtccatgccatatccacctcccctgatgtccatgccatatccacctcccatgatgtcgggcatgccccatggccacatgggcatccccatgcctaattcctccgccacctcagcttaccatccttataatatgttgcatcaaagggattggcctcaccttgctcctaatgataaatgaacctataaggtcagccatcaccatcatatgcaaaagattcaaaggcttgattattggtagtatagctttctgagaagggaggagctgcattgatgattaccctgtaattcactcaaaaggattattgaggaagtatatgaagaagagtatatggagctagattacaatcttagtcagtagtgtgtatcctgtgggagatttacaaacttattggtacacatctctaattcctgtcacctaattgtatgacgagaattctggcttatttcttctggtctgcctagacagctgattctaaagtaaattcttaactggttctctgattcat

SEQ ID NO: 17642 - protein, 319 aa, Glycine max
VKTSEYDEERVMEWEAGLPTANDLTPLSQPLIPPELASAFSILPEPHRTLLDVNRASRNTLSTLRGGGGSVHQAFSSSNNNHNYDGDGDGGVEEEEEEDDDRDGSGPDSRKQRKIDCGAAEEADSAVQTETSAERTAVKRPRLVWTPQLHKRFVDVVAHLGIKNAVPKTIMQLMNVEGLTRENVASHLQKYRLYLKRMQGLSNEGPSASDQLFASTPVPQSLHDSAPPSNHSNGHGHGHGHSNGRGHGHGHGHGHLSVPMMSMPYPPPLMSMPYPPPMMSGMPHGHMGIPMPNSSATSAYHPYNMLHQRDWPHLAPNDK

SEQ ID NO: 17643 - protein, 308 aa, Glycine max
MEWEAGLPTANDLTPLSQPLIPPELASAFSILPEPHRTLLDVNRASRNTLSTLRGGGGSVHQAFSSSNNNHNYDGDGDGGVEEEEEEDDDRDGSGPDSRKQRKIDCGAAEEADSAVQTETSAERTAVKRPRLVWTPQLHKRFVDVVAHLGIKNAVPKTIMQLMNVEGLTRENVASHLQKYRLYLKRMQGLSNEGPSASDQLFASTPVPQSLHDSAPPSNHSNGHGHGHGHSNGRGHGHGHGHGHLSVPMMSMPYPPPLMSMPYPPPMMSGMPHGHMGIPMPNSSATSAYHPYNMLHQRDWPHLAPNDK

SEQ ID NO: 17644 - DNA, 1285 bp, Glycine max
atttgttttagccattacagtcagtgggttgccatcatttcctctaagggaacttgtcatatttttgttcttgccccatttggtggtgagacagttcttaagatgcacgatcaagacactgatgggcctgctctgttgccaatttttcctctgccatggtggttcactccacatttcacagtaaaccagcagcagtattgcctgacacccccacctcctgttgttctttctgtggttagccgaataaaaaatagtaatgctggatggctcaatacggttagtaatgctgcgtcttctgcggcagggaaagtctcaatcccatctggtgctgtttctgctgtctttcatagttccattccttataattcacacaatgcatactcaaaaattcatgccatggagcacttattagtttataccccttctggtcatttaattcaatataaactactgccaccattggtggcagagccaagtgaaactgcttcaagaacagccccagttccttcagcacagatacaagaagaagatttgcgtgtgaaggttgaacctgttcaatggtgggatgtctgtaggagatatgattggccagaaaaagaagtgggcatattggggaatactgttgttagactggaagctgtggaaatgatcttggatagttcagattatgaagataataatagtgtcgggaacaataattctataaaacttaataatgagcaatgccacttctcaaatgtagaggtacatataagctctgggcggataccaatttggcaggaatctgaggtgtctttctttgtgatgagtcattcggaagccggagagctgaatttatgtgaacttaatacaagtggagaaattgaaatagagaatattcccgttaacgagattgaaataaaacagaaggatctgttgcccatctttgaccatttccatagaattcaatctacttggggtgacagaggtattgttatgggaagatgctctagctcttcatctgattcacatggaactgaagagaagttgtcagaagatgctgcaattttccattcaaagttgatggtacctggcttagctgaaaagacatttgttggtgcctcaaattttgcagatggtgcaagtgcaaagttaaaatcatcaaaacatgaaaaagccggtgacagtttcaattcaagcttaagtggctgtgatttgaatatgaatgtcactcgcgaggagtcaataagtgactcaccagactttgagcaatgttttcaagaaggttattgtaaagcatcagttg

SEQ ID NO: 17645 - protein, 428 aa, Glycine max
ICFSHYSQWVAIISSKGTCHIFVLAPFGGETVLKMHDQDTDGPALLPIFPLPWWFTPHFTVNQQQYCLTPPPPVVLSVVSRIKNSNAGWLNTVSNAASSAAGKVSIPSGAVSAVFHSSIPYNSHNAYSKIHAMEHLLVYTPSGHLIQYKLLPPLVAEPSETASRTAPVPSAQIQEEDLRVKVEPVQWWDVCRRYDWPEKEVGILGNTVVRLEAVEMILDSSDYEDNNSVGNNNSIKLNNEQCHFSNVEVHISSGRIPIWQESEVSFFVMSHSEAGELNLCELNTSGEIEIENIPVNEIEIKQKDLLPIFDHFHRIQSTWGDRGIVMGRCSSSSSDSHGTEEKLSEDAAIFHSKLMVPGLAEKTFVGASNFADGASAKLKSSKHEKAGDSFNSSLSGCDLNMNVTREESISDSPDFEQCFQEGYCKASV

SEQ ID NO: 17646 - protein, 394 aa, Glycine max
MHDQDTDGPALLPIFPLPWWFTPHFTVNQQQYCLTPPPPVVLSVVSRIKNSNAGWLNTVSNAASSAAGKVSIPSGAVSAVFHSSIPYNSHNAYSKIHAMEHLLVYTPSGHLIQYKLLPPLVAEPSETASRTAPVPSAQIQEEDLRVKVEPVQWWDVCRRYDWPEKEVGILGNTVVRLEAVEMILDSSDYEDNNSVGNNNSIKLNNEQCHFSNVEVHISSGRIPIWQESEVSFFVMSHSEAGELNLCELNTSGEIEIENIPVNEIEIKQKDLLPIFDHFHRIQSTWGDRGIVMGRCSSSSSDSHGTEEKLSEDAAIFHSKLMVPGLAEKTFVGASNFADGASAKLKSSKHEKAGDSFNSSLSGCDLNMNVTREESISDSPDFEQCFQEGYCKASV

SEQ ID NO: 17647 - protein, 296 aa, Glycine max
MEHLLVYTPSGHLIQYKLLPPLVAEPSETASRTAPVPSAQIQEEDLRVKVEPVQWWDVCRRYDWPEKEVGILGNTVVRLEAVEMILDSSDYEDNNSVGNNNSIKLNNEQCHFSNVEVHISSGRIPIWQESEVSFFVMSHSEAGELNLCELNTSGEIEIENIPVNEIEIKQKDLLPIFDHFHRIQSTWGDRGIVMGRCSSSSSDSHGTEEKLSEDAAIFHSKLMVPGLAEKTFVGASNFADGASAKLKSSKHEKAGDSFNSSLSGCDLNMNVTREESISDSPDFEQCFQEGYCKASV

SEQ ID NO: 17648 - DNA, 1195 bp, Glycine max
aaagtaaaccatgaattctctatcactcttcaccttcctctgcgcaatttgtgcgcactccgtcgccgtcacctccgcggcatatccttccatccccggcacggaaaccggagagtgctccctccgcggcgtcggcgtcggcgacggtgttctggtccctccgcggcgagaagtgtacgaggaggggcgaatcttcgacatcacccacaggtatgtccccgagatgccggtgtgggactcgacggaggggctcgggcagcacttcctgtggctcgaaaagagcatgaagaatggctcgcgcgctaacaactccaacatgaagctcggtgttcacaccggcacccatgtcgacgcgcccggtcacttttacgacaattactacgacgccggcttcgatgttgactcactcgacctaacactcctcaatggccttgcacttttggttgatgttccacgggataaaaacattactgctgaggttatgaagtccttgaatatccctagaggtgtaagccgcgtgcttttcagaactttaaacactgacaggcaactcatgtttaagaaagaatttgacacaagctatgtgggattcaaggaggatggtgcaaaatggctggcagagaacaccgacatcaaacttgtaggagtcgattacttatctgttgctgcttatgatcactccattccatctcatcttgttttcctggaaagcaaggaaatcattcttgtggaaggcctaaagcttgatgatgtcccagcaggaatatattcactgaattgcttgcctcttaggttggttcactctgaggcatcaccaattcgatgcattctgatcaaatgatcaaatgatggggtcaaacctggttttcaattgcacggatgaacctgccacaagaagcaacgtagccacgaatacaattagtggtgtccataagaagcagtttgatgcaaattgcaagctaagctgatagtagtatgttgaattactcttagtttacgtccttgggttggaaagtactgaattattgtgattaaacttcagttgcggactagggggtccacctgtattaacttatgcttttaatattttcctaggcaagtacttgtgcaattctgaagacgcatgcttgtacgtctcaataattatatctatttctctttgaaaaataatgaaatactactaataatctcgggc

SEQ ID NO: 17649 - protein, 276 aa, Glycine max
MNSLSLFTFLCAICAHSVAVTSAAYPSIPGTETGECSLRGVGVGDGVLVPPRREVYEEGRIFDITHRYVPEMPVWDSTEGLGQHFLWLEKSMKNGSRANNSNMKLGVHTGTHVDAPGHFYDNYYDAGFDVDSLDLTLLNGLALLVDVPRDKNITAEVMKSLNIPRGVSRVLFRTLNTDRQLMFKKEFDTSYVGFKEDGAKWLAENTDIKLVGVDYLSVAAYDHSIPSHLVFLESKEIILVEGLKLDDVPAGIYSLNCLPLRLVHSEASPIRCILIK

SEQ ID NO: 17650 - protein, 205 aa, Glycine max
MPVWDSTEGLGQHFLWLEKSMKNGSRANNSNMKLGVHTGTHVDAPGHFYDNYYDAGFDVDSLDLTLLNGLALLVDVPRDKNITAEVMKSLNIPRGVSRVLFRTLNTDRQLMFKKEFDTSYVGFKEDGAKWLAENTDIKLVGVDYLSVAAYDHSIPSHLVFLESKEIILVEGLKLDDVPAGIYSLNCLPLRLVHSEASPIRCILIK

SEQ ID NO: 17651 - protein, 185 aa, Glycine max
MKNGSRANNSNMKLGVHTGTHVDAPGHFYDNYYDAGFDVDSLDLTLLNGLALLVDVPRDKNITAEVMKSLNIPRGVSRVLFRTLNTDRQLMFKKEFDTSYVGFKEDGAKWLAENTDIKLVGVDYLSVAAYDHSIPSHLVFLESKEIILVEGLKLDDVPAGIYSLNCLPLRLVHSEASPIRCILIK

SEQ ID NO: 17652 - DNA, 1305 bp, Glycine max
aaaccaatgaacacggtgtcaagccacctgaaaccctagttcaaaaatttgcatatcctacagtaacaacctcaatagacccaacaatcccagtcccagctcccccaatagatcaaggtcagaagatgaggaagaaaatgagaaagagaagtgcccttataagcaaaggagcagaacctgatgaacatgatgacaagccacctggaaccccagttcaaagatctatacatcctatagcagaaccctcaatagacccaacaattccagcaagccaaactcctccagtagacccagcaaccccagtagaccctgaaccgatgaccaagaaaaagaggaagaagaaaaggaacagtgcaaaaaatgaagggttagaatctgagaaacacaatgctgatcgaattgcaraaaccccagttcaaaaaactgaaggatccacaactgaaaattctatgggcagatgcaatgttgagccagctggtaaaaccctggttcagattactgacactctcagagtgactaaatccccctttaaacatcatggtgaaagttccttgagatgccgggcatgccgacagcctggtcatagattccaacaatgccagcggctgaaatgtctttccatggatgaggaagtttgcttcttttgtggggaaattggacattcccttggaaaatgcgatgtgtctcaagcagggggaggaaggtttgctaagtgcttactctgttatggacatggacacttcagctataactgtcctcaaaatggtcatggaattgatccaaaggtgcttgcagtcaatggggctatcaatagaacagcagtggaagctcgaagagagctcttgccgaggtttaatatgtgagcagggatggtctttcggatcactccaagtcaatttacacaagtactcgtgctcatgtatatagttctggatctcggttccttagcggcctaagttttgatgattttatatcatgtctggtagcatggtgcccaatttttttttttttttatttcaagttctcttatgtaacataaacggtaatattatttcagaccttgttgggtttttgaatccattttgtatttcttttctacgtggggactagttgggataatgcctcagtctactccttgcagaagttagaattaagatagtggagtagtaagttcaacacgggaattggcccccaaatttctgaattcagttgatgataatagttgagacaatttggtcgcagtccctcggaatatagaatggattgcctgagtaatgatgtatgaactttatttacgattttttt

SEQ ID NO: 17653 - protein, 286 aa, Glycine max
  misc_feature (135)..(135): Xaa can be any naturally occurring amino acid
TNEHGVKPPETLVQKFAYPTVTTSIDPTIPVPAPPIDQGQKMRKKMRKRSALISKGAEPDEHDDKPPGTPVQRSIHPIAEPSIDPTIPASQTPPVDPATPVDPEPMTKKKRKKKRNSAKNEGLESEKHNADRIAXTPVQKTEGSTTENSMGRCNVEPAGKTLVQITDTLRVTKSPFKHHGESSLRCRACRQPGHRFQQCQRLKCLSMDEEVCFFCGEIGHSLGKCDVSQAGGGRFAKCLLCYGHGHFSYNCPQNGHGIDPKVLAVNGAINRTAVEARRELLPRFNM

SEQ ID NO: 17654 - protein, 245 aa, Glycine max
  misc_feature (94)..(94): Xaa can be any naturally occurring amino acid
MRKKMRKRSALISKGAEPDEHDDKPPGTPVQRSIHPIAEPSIDPTIPASQTPPVDPATPVDPEPMTKKKRKKKRNSAKNEGLESEKHNADRIAXTPVQKTEGSTTENSMGRCNVEPAGKTLVQITDTLRVTKSPFKHHGESSLRCRACRQPGHRFQQCQRLKCLSMDEEVCFFCGEIGHSLGKCDVSQAGGGRFAKCLLCYGHGHFSYNCPQNGHGIDPKVLAVNGAINRTAVEARRELLPRFNM

SEQ ID NO: 17655 - protein, 241 aa, Glycine max
  misc_feature (90)..(90): Xaa can be any naturally occurring amino acid
MRKRSALISKGAEPDEHDDKPPGTPVQRSIHPIAEPSIDPTIPASQTPPVDPATPVDPEPMTKKKRKKKRNSAKNEGLESEKHNADRIAXTPVQKTEGSTTENSMGRCNVEPAGKTLVQITDTLRVTKSPFKHHGESSLRCRACRQPGHRFQQCQRLKCLSMDEEVCFFCGEIGHSLGKCDVSQAGGGRFAKCLLCYGHGHFSYNCPQNGHGIDPKVLAVNGAINRTAVEARRELLPRFNM

SEQ ID NO: 17656 - DNA, 1346 bp, Glycine max
atcaacaatttcaagtaattaattgctgcatctctcggaaaaggttccgtattattgccactgaatctttagactctatgatgatgcaagctaattcagacataaaagaatcaactgattgtagcgctgaagcttctgcaagccctgttctatatgctagattgaatagtggggagcttgttcttcgacttggtgctgatcatcctgctggagatatgacattgttggaaactggcgagcctgtgtattctccaatcactcaggaaggacctttgcttacagaagatctaatcagggaaacagaggagtttgtgctgcggacagggagtgttggtgctgggtgctctcaattgctctcagatatgcaggcttttcaaggctgcaaatcctggatgtattttggaggattttgtaagatggcactctcctcctgattggacagataatgaagcaagtacagaggatagtgatgtttttgatagtggtgagccattgtctgccagaggtcagctaagtcggcgaatgcaaaaagaaggtaatttatggcgtgaattgtgggaaacatccaaaccagtacctgctgttaagcaggcgcctctgtttgatgaggatttggcagtggagggcatcctcaatgcatttgaagaaatgcatccatctgatctttttggacagctgtttgtttctttacttggtttaggatttggaattgccgaacctatgctgtctggtaacagtgacttctcgaagttattctatgactgcaaggagtacataattactgcttgtcaaaacaacaaattgaatgagaaagttgatggtctcgtccaggtatatgaaacagtggagaaaatgttattgaatcctgaagaagctctaaaaatgattaagcagacagaggaatcaactacagttaccggtgaaccaaggagcccgtttaagaggcttagccttatctttggaggcaaagataaactattgaggaagtctgtctcaaaagatcagacaaacgacgaagaaaagtcaggtcggcaatcattctccagtttctttgacagcaagtcatctttgtttggaaagaagcctcccaagtctggatccccatctccttctgagaaatcttctatcgatactggttggccagttgtttagacaaatttcatcttccactgtttattgaggataagcaatatttttgggttccccctccccctgcagataactgtaaattttctctattcttttgccaaatacttggtggttgtattctgtagaaattttaattaatacttcattcttttttatttgagggaattgaaaatataattttcgggcctttagtaaac

SEQ ID NO: 17657 - protein, 209 aa, Glycine max
MQKEGNLWRELWETSKPVPAVKQAPLFDEDLAVEGILNAFEEMHPSDLFGQLFVSLLGLGFGIAEPMLSGNSDFSKLFYDCKEYIITACQNNKLNEKVDGLVQVYETVEKMLLNPEEALKMIKQTEESTTVTGEPRSPFKRLSLIFGGKDKLLRKSVSKDQTNDEEKSGRQSFSSFFDSKSSLFGKKPPKSGSPSPSEKSSIDTGWPVV

SEQ ID NO: 17658 - protein, 167 aa, Glycine max
MHPSDLFGQLFVSLLGLGFGIAEPMLSGNSDFSKLFYDCKEYIITACQNNKLNEKVDGLVQVYETVEKMLLNPEEALKMIKQTEESTTVTGEPRSPFKRLSLIFGGKDKLLRKSVSKDQTNDEEKSGRQSFSSFFDSKSSLFGKKPPKSGSPSPSEKSSIDTGWPVV

SEQ ID NO: 17659 - protein, 143 aa, Glycine max
MLSGNSDFSKLFYDCKEYIITACQNNKLNEKVDGLVQVYETVEKMLLNPEEALKMIKQTEESTTVTGEPRSPFKRLSLIFGGKDKLLRKSVSKDQTNDEEKSGRQSFSSFFDSKSSLFGKKPPKSGSPSPSEKSSIDTGWPVV

SEQ ID NO: 17660 - DNA, 1246 bp, Glycine max
ttgtttgccttccagatacctttcataacttaaactccctcatagttctgaatgtttctggctgctcaaaacttggttgcttaccagagggtttaaaggaaatcaagtctttggaggaacttgatgcaagtggaactgctattcaagagctaccttcatctgtcttttatttggaaaacctaaaaagtatctcatttgctgggtgcaaaaagccagtatctaactcagtaagtggatttcttctcccctttcagtgggtatttgggaatcaacaaactcctactgcatttagattaccaccttctaaactgaatctaccctctttgatgagaataaatttaagttactgcaatctatctgaagagtcattcccagatggttttcgtcacttatcttcattgcagtttctagatctcactggcaacaattttgttaccctaccaagttgcatttcgaacctcacaaagcttgaaattcttctcctaaacttgtgcaaaaaacttaaaaggttgccagagctcccttcaagaatgaaacatttggatgcaagcaattgcacttcattggaaacttccaaattcaatccatccaagccatgcagtctctttgcatcatcaccttcaaattttcatttttcgagagaattgatacgctatcttgaggaactccctcttcccagaacaagatttgagatgttaatcccagggagtgaaattccatcatggtttgtccctcaaaaatgtgtttcattagctaaaataccagtccctcataattgccctgtaaatgaatgggtgggatttgctctgtgcttcctattagtaagttatgcaaatcctcctgaggcgtgccatcatgaagttgagtgctacttgtttggacctaatggtaaggcgattatcagttccaggaatttacctcccatggagctagattgccctcacctttatattctctacttgtccattgataaataccgtgacatgatttgtgaaggtgttgtcggcagtgaaattgaatttgtattgaaaagttatggttgccaatcattggaaatagtgaggtgcggatgtcgtttggtatgtaagcaagatgttgaagatatttatgaaaatagtatcatttcttctagtgaagagatcggagtggccagtgagaaggtgcgaattatctaaaaacttgtcatgtaattacgtatgtcttgttatttgtatagaaacttctcattctccatatttgcagtttg

SEQ ID NO: 17661 - protein, 390 aa, Glycine max
VCLPDTFHNLNSLIVLNVSGCSKLGCLPEGLKEIKSLEELDASGTAIQELPSSVFYLENLKSISFAGCKKPVSNSVSGFLLPFQWVFGNQQTPTAFRLPPSKLNLPSLMRINLSYCNLSEESFPDGFRHLSSLQFLDLTGNNFVTLPSCISNLTKLEILLLNLCKKLKRLPELPSRMKHLDASNCTSLETSKFNPSKPCSLFASSPSNFHFSRELIRYLEELPLPRTRFEMLIPGSEIPSWFVPQKCVSLAKIPVPHNCPVNEWVGFALCFLLVSYANPPEACHHEVECYLFGPNGKAIISSRNLPPMELDCPHLYILYLSIDKYRDMICEGVVGSEIEFVLKSYGCQSLEIVRCGCRLVCKQDVEDIYENSIISSSEEIGVASEKVRII

SEQ ID NO: 17662 - protein, 282 aa, Glycine max
MRINLSYCNLSEESFPDGFRHLSSLQFLDLTGNNFVTLPSCISNLTKLEILLLNLCKKLKRLPELPSRMKHLDASNCTSLETSKFNPSKPCSLFASSPSNFHFSRELIRYLEELPLPRTRFEMLIPGSEIPSWFVPQKCVSLAKIPVPHNCPVNEWVGFALCFLLVSYANPPEACHHEVECYLFGPNGKAIISSRNLPPMELDCPHLYILYLSIDKYRDMICEGVVGSEIEFVLKSYGCQSLEIVRCGCRLVCKQDVEDIYENSIISSSEEIGVASEKVRII

SEQ ID NO: 17663 - protein, 214 aa, Glycine max
MKHLDASNCTSLETSKFNPSKPCSLFASSPSNFHFSRELIRYLEELPLPRTRFEMLIPGSEIPSWFVPQKCVSLAKIPVPHNCPVNEWVGFALCFLLVSYANPPEACHHEVECYLFGPNGKAIISSRNLPPMELDCPHLYILYLSIDKYRDMICEGVVGSEIEFVLKSYGCQSLEIVRCGCRLVCKQDVEDIYENSIISSSEEIGVASEKVRII

SEQ ID NO: 17664 - DNA, 1826 bp, Glycine max
atccatggcagccaaaacatctaccaacggcactcattattctcgctctcgccccgagtacattccaaaccgcatccccgacccgcattatgtccgcatcctggacaccacgcttcgcgacggcgagcaagcccccggagcctccatggtttccagccagaagcttgctcgccagctcgcgaagcttggcgtcgatgtcatcgaaggaggctttccttcagcgtcgcaggaagacttcaatgctgtcaagatgatagcacaagaagttggcaacaactgtgatgctgatggctatgttcccgtcattgccgccctctgtaggtgcaatgagaaggacattgccacagcgtgggaggctctgaaatacgccaagaggccgaggcttatgcctttcatagcagtgagccccattcacatggagtacaagctcaataagactaaagaagaggtgcttcaaatagctaaagatatgatcaaatttgcacgcagtttaggttgcagtgacatccagttctgttccgaagatgcagccagatcggatagagagtttctttatcaaattttggaagaagttatcaaagctggggcaacaactttgggcataggtgacactgtgggcataacaatgccattcgagattagacaattgattgctgatataaaagccaatgtccctggagcagaaaatgttattatttctatgcactgtcataatgatcttggacatgctactgcaaacgcaatagaggctgctcaagctggtgcaatgcaattagaagtaacaattaatgggattggtgaaagggctggtaatgcctcattagaagaggttgtgatggccctaaaatgcaggggagatcaagtcttaggtggtttgtatactggaattaatacaaggcacttattgaagacaagcaagatggtcgaagagttttctggtatgtatttacaaccacacaaagctgttgtaggtgataatgcctttctccatgaaagtggcgttcaccaggctggattgttaaagcatagagctacatatgaaataatgtctcccgaagatattggtcatgaaaagtccagtggagttaatatggtactagggaagctaagtggacgccaagctttgaaaagtcgtctcaaagagcttggctatgaacttagggatgaagaagttgagagtgtgtttaggaacttcaaagcaatagccgagaaaaaaaagagagttaccgatgttgacctcaaagcattggtgtcaaatcaagtttctcatgatgaacctatttggaagcttgatggtttgcaggtgacttgtggaactatgggttcttcaacagcaactatcaaacttgtcactagtgatggtatcacacatgttgcttgttctgttggtgtaggaccagtagattcagcttacaaggctatcaatctcatcgtgaaggaaactgtaaaagtacttgagtactcactaagtacagttacagaaggcactgatgcaattgcaactacacgtgttgtaattcgtagagagaataagcaatcaccaactcctgctttgaatggaaacgtaatttatccaacatttagtggaaccggagaaggggtggatgttgttacttcaagtgtagaggcttatcttactgcactaaacaaaatgctcgatttaaaggaatgatttatatttgatgaaagaattctagcacctaaatgttagaattaacacttcaagttatatattgttctagaatgttacctttgtcaagtctccatataatgtacgagaaatggacttaataatgtcttcttaaaatatgtgaatttcaaatatc

SEQ ID NO: 17665 - protein, 556 aa, Glycine max
SMAAKTSTNGTHYSRSRPEYIPNRIPDPHYVRILDTTLRDGEQAPGASMVSSQKLARQLAKLGVDVIEGGFPSASQEDFNAVKMIAQEVGNNCDADGYVPVIAALCRCNEKDIATAWEALKYAKRPRLMPFIAVSPIHMEYKLNKTKEEVLQIAKDMIKFARSLGCSDIQFCSEDAARSDREFLYQILEEVIKAGATTLGIGDTVGITMPFEIRQLIADIKANVPGAENVIISMHCHNDLGHATANAIEAAQAGAMQLEVTINGIGERAGNASLEEVVMALKCRGDQVLGGLYTGINTRHLLKTSKMVEEFSGMYLQPHKAVVGDNAFLHESGVHQAGLLKHRATYEIMSPEDIGHEKSSGVNMVLGKLSGRQALKSRLKELGYELRDEEVESVFRNFKAIAEKKKRVTDVDLKALVSNQVSHDEPIWKLDGLQVTCGTMGSSTATIKLVTSDGITHVACSVGVGPVDSAYKAINLIVKETVKVLEYSLSTVTEGTDAIATTRVVIRRENKQSPTPALNGNVIYPTFSGTGEGVDVVTSSVEAYLTALNKMLDLKE

SEQ ID NO: 17666 - protein, 555 aa, Glycine max
MAAKTSTNGTHYSRSRPEYIPNRIPDPHYVRILDTTLRDGEQAPGASMVSSQKLARQLAKLGVDVIEGGFPSASQEDFNAVKMIAQEVGNNCDADGYVPVIAALCRCNEKDIATAWEALKYAKRPRLMPFIAVSPIHMEYKLNKTKEEVLQIAKDMIKFARSLGCSDIQFCSEDAARSDREFLYQILEEVIKAGATTLGIGDTVGITMPFEIRQLIADIKANVPGAENVIISMHCHNDLGHATANAIEAAQAGAMQLEVTINGIGERAGNASLEEVVMALKCRGDQVLGGLYTGINTRHLLKTSKMVEEFSGMYLQPHKAVVGDNAFLHESGVHQAGLLKHRATYEIMSPEDIGHEKSSGVNMVLGKLSGRQALKSRLKELGYELRDEEVESVFRNFKAIAEKKKRVTDVDLKALVSNQVSHDEPIWKLDGLQVTCGTMGSSTATIKLVTSDGITHVACSVGVGPVDSAYKAINLIVKETVKVLEYSLSTVTEGTDAIATTRVVIRRENKQSPTPALNGNVIYPTFSGTGEGVDVVTSSVEAYLTALNKMLDLKE

SEQ ID NO: 17667 - protein, 508 aa, Glycine max
MVSSQKLARQLAKLGVDVIEGGFPSASQEDFNAVKMIAQEVGNNCDADGYVPVIAALCRCNEKDIATAWEALKYAKRPRLMPFIAVSPIHMEYKLNKTKEEVLQIAKDMIKFARSLGCSDIQFCSEDAARSDREFLYQILEEVIKAGATTLGIGDTVGITMPFEIRQLIADIKANVPGAENVIISMHCHNDLGHATANAIEAAQAGAMQLEVTINGIGERAGNASLEEVVMALKCRGDQVLGGLYTGINTRHLLKTSKMVEEFSGMYLQPHKAVVGDNAFLHESGVHQAGLLKHRATYEIMSPEDIGHEKSSGVNMVLGKLSGRQALKSRLKELGYELRDEEVESVFRNFKAIAEKKKRVTDVDLKALVSNQVSHDEPIWKLDGLQVTCGTMGSSTATIKLVTSDGITHVACSVGVGPVDSAYKAINLIVKETVKVLEYSLSTVTEGTDAIATTRVVIRRENKQSPTPALNGNVIYPTFSGTGEGVDVVTSSVEAYLTALNKMLDLKE

SEQ ID NO: 17668 - DNA, 1244 bp, Glycine max
aacatcacacatcacaacacaacttccacattccgatggaggagtcatgggaaaattggcatcttcatatggaaaccggttgcgagaacgatttcttaggcaagtgtcacggcactgacgatgacgagttcttcagagacatccttcagcaaccaccacctgcggctttctcttccgaaagcgaaagcgatcactccttcctcgctgtccaaaacacttctagcatccccaacgacggtgccgttttgtctcctaggaattacctcgtcaaaagcagcagctccaactccttggtctctcaaaacgcttccaaacgacctcgtcgtttgtcctctcccaggacttacattctgtccttcgacaactcaaccatggttccggccacacccgaaacccgcccccgctcctccaataattcccctctgcctgccaaacgggccctggaaagcccaggcccagtagcccgaaggcccaaccaaggagctaagaagataagaacctcttctcagaccatcgatcacataatggccgagagacgacggaggcaggaactcacggagaggttcatagcactctcagccacgattcccggcttgaacaagacggacaaggcttctgtacttcgagcagcaattgattacgtgaaacaacttcaagaaagggtacaggaactggagaaacaagacaaaaaaaggagtacagagtcagtaatattcatcaagaaacccgacccaaatggaaacgatgaagacaccacctccactgaaacgaactgtagcatccttcctgagatggaagcaagggtgatggggaaggaggtgctcattgagatccactgtgagaaagaaaatggtgttgagctaaaaatattggaccaccttgaaaatcttcatctcagtgttaccggaagcagtgtcttgccatttggaaattctgctctctgcattaccatcacaactcagatgggtgacgggtaccaaatgactgtgaatgatctagtgaaaaaccttagacaattgttctcaaaatcacatgtgctaagcgacagcgatccgtactagtgtatcaaacaatgagttgtagtgtatggaaatcgaaagttttggatttattactctctttgattttggcttgttttcatgttgatcgtaacgttaataaacaaatactaaatgtctgacatgaatttatgcccggcatctaccctgatatcccattaatgtgaaaacgaaatttctttttag

SEQ ID NO: 17669 - protein, 352 aa, Glycine max
HHTSQHNFHIPMEESWENWHLHMETGCENDFLGKCHGTDDDEFFRDILQQPPPAAFSSESESDHSFLAVQNTSSIPNDGAVLSPRNYLVKSSSSNSLVSQNASKRPRRLSSPRTYILSFDNSTMVPATPETRPRSSNNSPLPAKRALESPGPVARRPNQGAKKIRTSSQTIDHIMAERRRRQELTERFIALSATIPGLNKTDKASVLRAAIDYVKQLQERVQELEKQDKKRSTESVIFIKKPDPNGNDEDTTSTETNCSILPEMEARVMGKEVLIEIHCEKENGVELKILDHLENLHLSVTGSSVLPFGNSALCITITTQMGDGYQMTVNDLVKNLRQLFSKSHVLSDSDPY

SEQ ID NO: 17670 - protein, 341 aa, Glycine max
MEESWENWHLHMETGCENDFLGKCHGTDDDEFFRDILQQPPPAAFSSESESDHSFLAVQNTSSIPNDGAVLSPRNYLVKSSSSNSLVSQNASKRPRRLSSPRTYILSFDNSTMVPATPETRPRSSNNSPLPAKRALESPGPVARRPNQGAKKIRTSSQTIDHIMAERRRRQELTERFIALSATIPGLNKTDKASVLRAAIDYVKQLQERVQELEKQDKKRSTESVIFIKKPDPNGNDEDTTSTETNCSILPEMEARVMGKEVLIEIHCEKENGVELKILDHLENLHLSVTGSSVLPFGNSALCITITTQMGDGYQMTVNDLVKNLRQLFSKSHVLSDSDPY

SEQ ID NO: 17671 - protein, 330 aa, Glycine max
METGCENDFLGKCHGTDDDEFFRDILQQPPPAAFSSESESDHSFLAVQNTSSIPNDGAVLSPRNYLVKSSSSNSLVSQNASKRPRRLSSPRTYILSFDNSTMVPATPETRPRSSNNSPLPAKRALESPGPVARRPNQGAKKIRTSSQTIDHIMAERRRRQELTERFIALSATIPGLNKTDKASVLRAAIDYVKQLQERVQELEKQDKKRSTESVIFIKKPDPNGNDEDTTSTETNCSILPEMEARVMGKEVLIEIHCEKENGVELKILDHLENLHLSVTGSSVLPFGNSALCITITTQMGDGYQMTVNDLVKNLRQLFSKSHVLSDSDPY

SEQ ID NO: 17672 - DNA, 1692 bp, Glycine max
agaagatctcacttttcatgtctctggttttcctgaccctgtgcctaatgtcctggccccaaaagtcgatattcaaatggaaattctctccattggtcccttgtttgggcgctatttgtatactaaaaatagttcggaatctgaacaggaaacaccagatcttgccaaggctgctgaatatacagaaaaacagcttcttataaatgtatctgcacagctcagtcttactggaaaaggttatagtaatttttctgtgctttttctggagggtctttatgatccacatgtgggaaagttgtatctaattggttgcagagatgtgcgagcaccatggaaggtcttatatcagagctatgaccttgaggctggaatggactgtttgattcaggtggttgtggcttatcctcctaccacaactcggtggctagtcgatcccagagctacaatttcgatagaaagtcaaaggactgatgacgatgcccttcgattcgatccaataaagctcaaaacatttccaatcatatacaggaaacaacgtgaggatgttctctcacgcagaggtgttgaagggattctccgaatcttgacgctttcatttgccatcgggtgcattttaagccaactgttttatatacaacagaatgtggattctctttcctatatatctcttgtggtgctaggtgttcaagctcttgggtatagcattcctctggtcacaggtgcagaagctctttttaagaaaatggtttctgaatcttatgatgtgtcatctagtgaattggagagcagtgagtggctccatgtcattgattacactgtgaaactgctactgattgtatcattgctagtaactctgcgactttttcaaaaggtatggaagtctcgcatcagattgcaaatgcgtacccctcttgagccacatcgtgtccccagtgataaattgatatttctttgtaccgtcaccatacatgtgatagggtatgtaattgttctaatgattcatggcacaaagaccagccagaaggctcttatagcaaagacttatttggttgatggaagaaattctcattcattgccgggttgggcaacagacctggaagaatatgtaggtcttgttgaagactttttcttgcttcctcaaattattgggaacttagtctggcatatcgattgcaaacctctcagaaaactatattttattggaatcactctggtcagacttcttcctcacatatatgactacattcgagctccagttccaaatccttacttttctgaggactctgaatttgtcaatcctaatttggatttttactcaaaatttggggatattgccattcctgtgactgctattattcttgcaattgtggtctatattcaacaaagatggggctatgagaagctgagtcagtttctgacatttgggcagtataagcttctcccaactttcagataccaaaggttgtcttctagggctggtgaatccgaactagttcctggtatcaatggtgctgctgtaaaagagaatgagcaagttgatgtagaatgatgtaaacactttagaattactgacaacagcttttgtacacccatatatgaaaagtaagtaagggtttgggtggatgtactattatgtatgaggttgctcacatactcaataatcaagtgaattttgttgtggttttactcttc

SEQ ID NO: 17673 - protein, 515 aa, Glycine max
EDLTFHVSGFPDPVPNVLAPKVDIQMEILSIGPLFGRYLYTKNSSESEQETPDLAKAAEYTEKQLLINVSAQLSLTGKGYSNFSVLFLEGLYDPHVGKLYLIGCRDVRAPWKVLYQSYDLEAGMDCLIQVVVAYPPTTTRWLVDPRATISIESQRTDDDALRFDPIKLKTFPIIYRKQREDVLSRRGVEGILRILTLSFAIGCILSQLFYIQQNVDSLSYISLVVLGVQALGYSIPLVTGAEALFKKMVSESYDVSSSELESSEWLHVIDYTVKLLLIVSLLVTLRLFQKVWKSRIRLQMRTPLEPHRVPSDKLIFLCTVTIHVIGYVIVLMIHGTKTSQKALIAKTYLVDGRNSHSLPGWATDLEEYVGLVEDFFLLPQIIGNLVWHIDCKPLRKLYFIGITLVRLLPHIYDYIRAPVPNPYFSEDSEFVNPNLDFYSKFGDIAIPVTAIILAIVVYIQQRWGYEKLSQFLTFGQYKLLPTFRYQRLSSRAGESELVPGINGAAVKENEQVDVE

SEQ ID NO: 17674 - protein, 490 aa, Glycine max
MEILSIGPLFGRYLYTKNSSESEQETPDLAKAAEYTEKQLLINVSAQLSLTGKGYSNFSVLFLEGLYDPHVGKLYLIGCRDVRAPWKVLYQSYDLEAGMDCLIQVVVAYPPTTTRWLVDPRATISIESQRTDDDALRFDPIKLKTFPIIYRKQREDVLSRRGVEGILRILTLSFAIGCILSQLFYIQQNVDSLSYISLVVLGVQALGYSIPLVTGAEALFKKMVSESYDVSSSELESSEWLHVIDYTVKLLLIVSLLVTLRLFQKVWKSRIRLQMRTPLEPHRVPSDKLIFLCTVTIHVIGYVIVLMIHGTKTSQKALIAKTYLVDGRNSHSLPGWATDLEEYVGLVEDFFLLPQIIGNLVWHIDCKPLRKLYFIGITLVRLLPHIYDYIRAPVPNPYFSEDSEFVNPNLDFYSKFGDIAIPVTAIILAIVVYIQQRWGYEKLSQFLTFGQYKLLPTFRYQRLSSRAGESELVPGINGAAVKENEQVDVE

SEQ ID NO: 17675 - protein, 392 aa, Glycine max
MDCLIQVVVAYPPTTTRWLVDPRATISIESQRTDDDALRFDPIKLKTFPIIYRKQREDVLSRRGVEGILRILTLSFAIGCILSQLFYIQQNVDSLSYISLVVLGVQALGYSIPLVTGAEALFKKMVSESYDVSSSELESSEWLHVIDYTVKLLLIVSLLVTLRLFQKVWKSRIRLQMRTPLEPHRVPSDKLIFLCTVTIHVIGYVIVLMIHGTKTSQKALIAKTYLVDGRNSHSLPGWATDLEEYVGLVEDFFLLPQIIGNLVWHIDCKPLRKLYFIGITLVRLLPHIYDYIRAPVPNPYFSEDSEFVNPNLDFYSKFGDIAIPVTAIILAIVVYIQQRWGYEKLSQFLTFGQYKLLPTFRYQRLSSRAGESELVPGINGAAVKENEQVDVE

SEQ ID NO: 17676 - DNA, 1363 bp, Glycine max
tcagatatgtaggccccccccccggtgatgaagaaaagttctggtacctcccagaaacttggttcatttctaagtccaggggcaccaaactatagagagaaaagcattgggagccaaaaggggtggagctcagagagggtgttgctgcagccatcatcaaacagcataaggaatgctagtgtggctaacttgacacccttcaacagtggaagaacaataccttcaaaatgggatgatgctgagaggtggatttgtagccccgtttcaggctatgccaacaacaaaaccaattcctatacacaacttcagcagcggcgaccaaaatcgaaaagtggtccaattatgcctccaggaacaggctactactccaattactcacccacaattccactgagccaaggtttggtagtgaagaacttcatgatgggtggttctcccttttcaactggggtgttggcaccggatgctatctctcttcaccattattatgcacatgaggctgtttttggtacccgttatgactttgacaatagtatgcaatgcttcagtccattcctcaatgaaaatagtgtagctctcccatcagtgtctagtgcacccatgtggtcagaactgctatgtgacccttcgcctaattctcaagacgagaaacgaaacgaaattaagaatgaggacaccgtgacatctcctctctcaaaatgtgacaaaggcactcaaatgagccctcctgagcctgagaatgatgcacccacttcgacaatggatcaacaaaataacctttctgcaaagttagaggtcagagatgtagagatagacagcgaggctagtattattaggtggtctaagagccatgtacccaagctgagcttgctacctggtaaacactcaagaaaaattagtagaacggaaaccaaagcttcaggtttggataatgcagagtcgacgttggactcatccaagattcagagggaggaagccaaaatcgttgcatgggagagtttgcagaaagccaaggctgaagctgaaatacgaaaactagagatgaaattagaaaagaagaaatcgtcatcaatggataagattcaaagcaaactgagaagggcgcagatggaggctgaaaagatgagaaaccaaataactgtagaagaggagggtcagcaggtttccaagactcgaaaagtattttcattccacaaatatgcccagatatggtttccaaggagctgcttcggcactcatgctctccatgattaattcattatttaatatttaatcccatatctgaaatcactaaggtttagtcccgataaacgcatcgataatcatatttcaagtcataggtcatttttattttttatttttg

SEQ ID NO: 17677 - protein, 408 aa, Glycine max
MKKSSGTSQKLGSFLSPGAPNYREKSIGSQKGWSSERVLLQPSSNSIRNASVANLTPFNSGRTIPSKWDDAERWICSPVSGYANNKTNSYTQLQQRRPKSKSGPIMPPGTGYYSNYSPTIPLSQGLVVKNFMMGGSPFSTGVLAPDAISLHHYYAHEAVFGTRYDFDNSMQCFSPFLNENSVALPSVSSAPMWSELLCDPSPNSQDEKRNEIKNEDTVTSPLSKCDKGTQMSPPEPENDAPTSTMDQQNNLSAKLEVRDVEIDSEASIIRWSKSHVPKLSLLPGKHSRKISRTETKASGLDNAESTLDSSKIQREEAKIVAWESLQKAKAEAEIRKLEMKLEKKKSSSMDKIQSKLRRAQMEAEKMRNQITVEEEGQQVSKTRKVFSFHKYAQIWFPRSCFGTHALHD

SEQ ID NO: 17678 - protein, 303 aa, Glycine max
MPPGTGYYSNYSPTIPLSQGLVVKNFMMGGSPFSTGVLAPDAISLHHYYAHEAVFGTRYDFDNSMQCFSPFLNENSVALPSVSSAPMWSELLCDPSPNSQDEKRNEIKNEDTVTSPLSKCDKGTQMSPPEPENDAPTSTMDQQNNLSAKLEVRDVEIDSEASIIRWSKSHVPKLSLLPGKHSRKISRTETKASGLDNAESTLDSSKIQREEAKIVAWESLQKAKAEAEIRKLEMKLEKKKSSSMDKIQSKLRRAQMEAEKMRNQITVEEEGQQVSKTRKVFSFHKYAQIWFPRSCFGTHALHD

SEQ ID NO: 17679 - protein, 277 aa, Glycine max
MMGGSPFSTGVLAPDAISLHHYYAHEAVFGTRYDFDNSMQCFSPFLNENSVALPSVSSAPMWSELLCDPSPNSQDEKRNEIKNEDTVTSPLSKCDKGTQMSPPEPENDAPTSTMDQQNNLSAKLEVRDVEIDSEASIIRWSKSHVPKLSLLPGKHSRKISRTETKASGLDNAESTLDSSKIQREEAKIVAWESLQKAKAEAEIRKLEMKLEKKKSSSMDKIQSKLRRAQMEAEKMRNQITVEEEGQQVSKTRKVFSFHKYAQIWFPRSCFGTHALHD

SEQ ID NO: 17680 - DNA, 1337 bp, Glycine max
ggaagcaacaacttcttctgtttcaacctcatcgtcatcgtactactactacccacgttctgctcctttgcggatcgtgtccacaaaagatggcagacaatgaggatggaagggataagactactcgtgggaatgaatgggaggttgtatctctgacagcatcgacatatgcagctgctcctggtcctgatgaagttgagatgaaggatgatgggaacgaagatgtatatggacaagatgaaggagaaacgtcacatgctttatttatgtctcgtcactttgtctttcctcccagtcagcatgaaaacttgcctgtggaacctgactatggtgagattcatgatgattctggagacaaagatgttgcctctgaagagactcctgaagaagtgaccataccaagtggaaaggatgaagaaaacttgacattaccaggattggaagtttcagaggagtttgagggcatgcggtattttgacgagaaaatcaacagattatctgttcgtggtaaacagtttgaggaaagtacaactctaccagcatttggtttgactgaaaagggggagagcatgtatgaccctgcaaaatacacttctttcgacagtgaaactgctattggtggcataacagcttatggtgaaagcatagttgatcctgaaacaactgaatcagcagagcaagggtcaaacgtatctcctgatctatcattgtcaaactactcttccaaagataatgaatacaactcctcagatcttccttgtggagcttggtggaagcggagagctgcctccttatatgctcatgcaaaagaggcaaatgcattctggtctgtcttcattgcagctgctgtgatgggtcttgtaatgcttggtcaacgctggcagcaggaaagagctttacaacttaaatggcaaatcagtataaatgatgaggcgaggagcagggtgcttgctcccatatatcgactcaaagatgtgattgttggtggcaaccgtcgtggctccttgatcaggggaagctcctctggtgaaagttaagggaaaggtggctcagtgcgtatgggctcctatccttgtggtaaaagtgaagatgatgacgaaaaaatgtatgtcagagagaggttgagaatgaaaagtgctacaattgtgaaatgcaggtttggtactaggattggttgacctttcccaattatgaatgccaatgttcaaacattttatgttatggattttcttctttgtattgattagcaatgtatagctcttgaagttattcaacttatgtattctgattgtgtgaaattggcagtttaaacacaaaaagatgtaaatgattgcttg

SEQ ID NO: 17681 - protein, 344 aa, Glycine max
KQQLLLFQPHRHRTTTTHVLLLCGSCPQKMADNEDGRDKTTRGNEWEVVSLTASTYAAAPGPDEVEMKDDGNEDVYGQDEGETSHALFMSRHFVFPPSQHENLPVEPDYGEIHDDSGDKDVASEETPEEVTIPSGKDEENLTLPGLEVSEEFEGMRYFDEKINRLSVRGKQFEESTTLPAFGLTEKGESMYDPAKYTSFDSETAIGGITAYGESIVDPETTESAEQGSNVSPDLSLSNYSSKDNEYNSSDLPCGAWWKRRAASLYAHAKEANAFWSVFIAAAVMGLVMLGQRWQQERALQLKWQISINDEARSRVLAPIYRLKDVIVGGNRRGSLIRGSSSGES

SEQ ID NO: 17682 - protein, 315 aa, Glycine max
MADNEDGRDKTTRGNEWEVVSLTASTYAAAPGPDEVEMKDDGNEDVYGQDEGETSHALFMSRHFVFPPSQHENLPVEPDYGEIHDDSGDKDVASEETPEEVTIPSGKDEENLTLPGLEVSEEFEGMRYFDEKINRLSVRGKQFEESTTLPAFGLTEKGESMYDPAKYTSFDSETAIGGITAYGESIVDPETTESAEQGSNVSPDLSLSNYSSKDNEYNSSDLPCGAWWKRRAASLYAHAKEANAFWSVFIAAAVMGLVMLGQRWQQERALQLKWQISINDEARSRVLAPIYRLKDVIVGGNRRGSLIRGSSSGES

SEQ ID NO: 17683 - protein, 278 aa, Glycine max
MKDDGNEDVYGQDEGETSHALFMSRHFVFPPSQHENLPVEPDYGEIHDDSGDKDVASEETPEEVTIPSGKDEENLTLPGLEVSEEFEGMRYFDEKINRLSVRGKQFEESTTLPAFGLTEKGESMYDPAKYTSFDSETAIGGITAYGESIVDPETTESAEQGSNVSPDLSLSNYSSKDNEYNSSDLPCGAWWKRRAASLYAHAKEANAFWSVFIAAAVMGLVMLGQRWQQERALQLKWQISINDEARSRVLAPIYRLKDVIVGGNRRGSLIRGSSSGES

SEQ ID NO: 17684 - DNA, 1477 bp, Glycine max
tttgaagaagaaacgactcggaaccctaacaacccctttccgctgccgaacgacgacgttgaaggttccgcttcgtcgtcgtcttcgtcttcgcttgctgcgaaagctattagagcttcttcggcccgtcgcgactcttcgttgtcctctctctacggcctctcctctgcttcttcttctccggtttcttcttctcaacctactccaactcctcctccttcttccaaggattcaagaccctatgaatatacatctatgaagaacatgaatgagtccaagaatggattttggggtgttctggccagaaaagccaaatcaattattgaggatgataatgtaccccagcaatctgaaatgtctgggactgggaggtcccaatttcctggtgtagcatctaggagcaagttccaaaattcaaatcacttagaggatagcaatctcaaaagggacggtccatcatttataaagggattggatgctatcacatcttctcttactcatattggtggtaccattggtaaatccttggaggaaggtttaacaattgttgagaatcggacttcagatatcattcaggaaactcgtaaacatattaagaagaagcctggaaactctgtaggacaaaatcaggagacaaaccattctactacattgcatcaatcccaactgcggaaccagatgtcaccgaagcaaacagaccaagaacttcaactgaaggcatctcgcgacgttgcaatggcaatggctgccaaagcaaaactacttcttcgggagttgaagactgtcaaagctgatctggcttttgcaaaggatcgatgtgctcagctagaggaagaaaataaaatcctccgtgagaatcgggaaaggggagatagccatgatgatgatgatttgatacgacttcaacttgaatctcttctagctgaaaaagctcgcctggcacacgagaactcggtttatgcccgtgagaatcgctttctaagggaggttgtcgagtatcaccaacttacaatgcaggatgttgtctaccttgacgagagcaatgaggaagtcactgaagttaaccctcttaaccttcccccagtgcctaatatggccctggattctattactccatctgcaacctcccttttgcattctcctgaaccgaaccttggcatggcttcagaattaacaagaggcacctcatctactatatctggaaaagatgcaaagagtaatgagattactataaaggattcacggagttctgaagcgactagataactcttctgtcacaggacatgatgcaaaataacatgaaattcttctgttacaacttacaatggtgatgcaccgcgttttgatgcttcatttgttattatttgtgtgctgctcgtttcatgtatcgtgggtgacattaccttgatgtaattgtgtaccgtatattgtgtaactcgagttttatttatttattttttccattatatcagcaaag

SEQ ID NO: 17685 - protein, 421 aa, Glycine max
FEEETTRNPNNPFPLPNDDVEGSASSSSSSSLAAKAIRASSARRDSSLSSLYGLSSASSSPVSSSQPTPTPPPSSKDSRPYEYTSMKNMNESKNGFWGVLARKAKSIIEDDNVPQQSEMSGTGRSQFPGVASRSKFQNSNHLEDSNLKRDGPSFIKGLDAITSSLTHIGGTIGKSLEEGLTIVENRTSDIIQETRKHIKKKPGNSVGQNQETNHSTTLHQSQLRNQMSPKQTDQELQLKASRDVAMAMAAKAKLLLRELKTVKADLAFAKDRCAQLEEENKILRENRERGDSHDDDDLIRLQLESLLAEKARLAHENSVYARENRFLREVVEYHQLTMQDVVYLDESNEEVTEVNPLNLPPVPNMALDSITPSATSLLHSPEPNLGMASELTRGTSSTISGKDAKSNEITIKDSRSSEATR

SEQ ID NO: 17686 - protein, 336 aa, Glycine max
MKNMNESKNGFWGVLARKAKSIIEDDNVPQQSEMSGTGRSQFPGVASRSKFQNSNHLEDSNLKRDGPSFIKGLDAITSSLTHIGGTIGKSLEEGLTIVENRTSDIIQETRKHIKKKPGNSVGQNQETNHSTTLHQSQLRNQMSPKQTDQELQLKASRDVAMAMAAKAKLLLRELKTVKADLAFAKDRCAQLEEENKILRENRERGDSHDDDDLIRLQLESLLAEKARLAHENSVYARENRFLREVVEYHQLTMQDVVYLDESNEEVTEVNPLNLPPVPNMALDSITPSATSLLHSPEPNLGMASELTRGTSSTISGKDAKSNEITIKDSRSSEATR

SEQ ID NO: 17687 - protein, 333 aa, Glycine max
MNESKNGFWGVLARKAKSIIEDDNVPQQSEMSGTGRSQFPGVASRSKFQNSNHLEDSNLKRDGPSFIKGLDAITSSLTHIGGTIGKSLEEGLTIVENRTSDIIQETRKHIKKKPGNSVGQNQETNHSTTLHQSQLRNQMSPKQTDQELQLKASRDVAMAMAAKAKLLLRELKTVKADLAFAKDRCAQLEEENKILRENRERGDSHDDDDLIRLQLESLLAEKARLAHENSVYARENRFLREVVEYHQLTMQDVVYLDESNEEVTEVNPLNLPPVPNMALDSITPSATSLLHSPEPNLGMASELTRGTSSTISGKDAKSNEITIKDSRSSEATR

SEQ ID NO: 17688 - DNA, 1616 bp, Glycine max
tgcgtgcatatgagaagagcaggatgcggtactattttgctgtggtggaatgtgactcaagtgccacagcaaattacatttacaaagaatgtgatggtcttgagttaaaacaatcatctaatgcgctcgatttaaggtttattccagacaacatggaattcaaacacccgcctcgggatgttgctactgaggtgcctgcaaattatgagtgcaaagatttctattctcgagcacttcagcacagtgaggttaatcttacttgggatgatgatgaacctcttcgtgcaaagacattgaatcggaaactcactgatgagcagttagccgagtttgaagtgaaggaattcttgacttctgatgagagtgaaagtgatgatagcaaggataacaacgagacagatgatcagcctgataaaatggcaaaaaaacgagccaagtaccgtgctttgctccagtctggtgatgattcagatggaggcaatgaacatgataatgcccagaatatggaggtcaccttcaatacaggtttggaagatttaagcaaatatattatggaaaagaaggataaaaaatcagaaacagtttgggatgcttatttgagtaaaaaaagtgagaaaaagaaggccgggaaaaataaaagaaagtattcatcagatgatgatgatagtgatgatactgatcaagaggcaactgaagaagcagatgactcgttcattgaggagcctggctgctaagaagaggaagaagccacaaaataaagaagatgaagaacaaaggcatgaagagattgatgggctagacaaagcgaggaaagaggagcttgaactgctacttgctgatgataggggacagatactggtgtcaagggatataatctaaaatttaaaaaaggcaagggaaaaaaaaggagagagaatgatattgacgaggagaagataccaagtaatgcatacaatgatccacgtttttcagctcttttctcaccaaactatgcaattgatcctaccgatccacaatttaaaaggagtgcaacatatgccaggcagctagcacagaagcaacagaaggataatgcggatccaccagtggaaagggaacctacaaaactaaaaggaacacaattgtcttctgaagattctggtaggatgaaggatgaggaagaaggattagatgctttgaagtcaaagaaagataaatatgaattatcatctttggtaaaatcaattaagatgaaatcaaagcaagttcagttaccctctgataataagacaaggaaagatggaaaatcatacattaaaggtatgaagaaaaagaggcactagctctgaaccttttggttcaattaacacacttgaatgcaggaggggaattggcctcttttatgtgctatagaacccagcaagggaaaaagaaacaaagcagtattattaaagaagtgtagacagaaggtgagcaatggaggttcatgtagtttaatcttctgccaaaacgttgaatgtcttgttcctgttcaaatcatccttttgaaattttgaatccacataattgaaatgcttaattcatttttattttgttgcaactaaatgtagtacgacatcaattaatgagtttgatat

SEQ ID NO: 17689 - protein, 243 aa, Glycine max
RAYEKSRMRYYFAVVECDSSATANYIYKECDGLELKQSSNALDLRFIPDNMEFKHPPRDVATEVPANYECKDFYSRALQHSEVNLTWDDDEPLRAKTLNRKLTDEQLAEFEVKEFLTSDESESDDSKDNNETDDQPDKMAKKRAKYRALLQSGDDSDGGNEHDNAQNMEVTFNTGLEDLSKYIMEKKDKKSETVWDAYLSKKSEKKKAGKNKRKYSSDDDDSDDTDQEATEEADDSFIEEPGC

SEQ ID NO: 17690 - protein, 236 aa, Glycine max
MRYYFAVVECDSSATANYIYKECDGLELKQSSNALDLRFIPDNMEFKHPPRDVATEVPANYECKDFYSRALQHSEVNLTWDDDEPLRAKTLNRKLTDEQLAEFEVKEFLTSDESESDDSKDNNETDDQPDKMAKKRAKYRALLQSGDDSDGGNEHDNAQNMEVTFNTGLEDLSKYIMEKKDKKSETVWDAYLSKKSEKKKAGKNKRKYSSDDDDSDDTDQEATEEADDSFIEEPGC

SEQ ID NO: 17691 - protein, 193 aa, Glycine max
MEFKHPPRDVATEVPANYECKDFYSRALQHSEVNLTWDDDEPLRAKTLNRKLTDEQLAEFEVKEFLTSDESESDDSKDNNETDDQPDKMAKKRAKYRALLQSGDDSDGGNEHDNAQNMEVTFNTGLEDLSKYIMEKKDKKSETVWDAYLSKKSEKKKAGKNKRKYSSDDDDSDDTDQEATEEADDSFIEEPGC

SEQ ID NO: 17692 - DNA, 1825 bp, Glycine max
gaaagtattctgcttcttatatcagtgggaagttatgtgacattgcagaggcatattccaatgatgaaaatgttaaggcttatgcaatttcagcactgttgaaaatttatgcatttgaagtagcagctgggaggaaagtggatatcctatctgagtgccaatcgttgattgaagaatcattggcatcacactctacagatttgcagcaacgtgcttatgaattgcaagctcttataggtttggatgtacaagctgttgaaacaataatgccacgagatgcaagttgtgaagacattgaggttgataagaatctttctttcctcaatgggtatgttcagcagtctttagaaaggggtgctaaatcctatattcctgaggatgtgcgcactggaatggggaatatgaacaatttcagaagccaagatcatcatgaaactttgcagcatggtctaagatttgaggcatatgaagttccgaaggctccaatgcaaccaaaagttactccagtttcatttgcatcctcagcagacattgttccagtacccgaggttttgtcttccagggagacccaccatatctcatcagtgggatcaacatctgaggctggatcatcagagcttaagctacggcttgatggtgttcaaaagaaatgtggtaaaccaatgtattcgtcatcaacatcatctgcctctgtctcgtattctacttcccaaaaaccaacgaatggggcaactcaggtggatggtgctacaactgtcaattcaaaagtgcgtgatagttatgattcaagaaagacacaggttgagattactccagaaaagcaaaagcttgctgcttctttgtttggtggttcaactaaacctgagaaaagatcatctacaagtcataaggtttcaaaatctagtgctagtgctgcagacggatctcagggatcaaaggctgcggttgtacccaatgacgtaggtgtggaaaaaacaattcatcaaccacctcctcctgatttgcttgacttgggtgagccaactgtcactacagctcctccttatgtggacccattcaaggaattggaaggacttcttgacccaagcactaagtgtgcaacaaatcataatgtagctggtgctacaaatgcccctgatattatgtcactctatgccgagactactgccagtggtggttattctatacccgtgagtggggggtatgatgtaaatcttttatctgaattgtcaaatgcagcagcaaaagctactagtggagaaacaattgtgacgtctttgccacaatctattatgggtcgaaatgctaaagattctttggagaaggatgctttagtgaggcagatgggtgtgaatccctcgagtcagaatcctaacttgttcagtgacttgcttggctaatcttttttttaagccaattctagatcatgatgcttgaagatagattgcctagcgactttgctgctttatcgagttgcctgaaatagtttaatgtctgatatacacgctgaattgaataatacaagttattgtcaggcatggataaatgcagcctcctagaatggggtgattcaatgtcctggaatgatggcagaaccaggttaaagcttgaactcattgcagaatagcttttgtagctataatagaatggacgagtttcctcgcatcaactcggtcatattgttatttacacgtaggaagttcctggccatctttgttgtaccaaagctgtatttttttgtttgttttaaacatttatgtgcagttttccatgtccataagatgttttttcaacaatgagaagtttgacactgcggttaacaatc

SEQ ID NO: 17693 - protein, 465 aa, Glycine max
KYSASYISGKLCDIAEAYSNDENVKAYAISALLKIYAFEVAAGRKVDILSECQSLIEESLASHSTDLQQRAYELQALIGLDVQAVETIMPRDASCEDIEVDKNLSFLNGYVQQSLERGAKSYIPEDVRTGMGNMNNFRSQDHHETLQHGLRFEAYEVPKAPMQPKVTPVSFASSADIVPVPEVLSSRETHHISSVGSTSEAGSSELKLRLDGVQKKCGKPMYSSSTSSASVSYSTSQKPTNGATQVDGATTVNSKVRDSYDSRKTQVEITPEKQKLAASLFGGSTKPEKRSSTSHKVSKSSASAADGSQGSKAAVVPNDVGVEKTIHQPPPPDLLDLGEPTVTTAPPYVDPFKELEGLLDPSTKCATNHNVAGATNAPDIMSLYAETTASGGYSIPVSGGYDVNLLSELSNAAAKATSGETIVTSLPQSIMGRNAKDSLEKDALVRQMGVNPSSQNPNLFSDLLG

SEQ ID NO: 17694 - protein, 377 aa, Glycine max
MPRDASCEDIEVDKNLSFLNGYVQQSLERGAKSYIPEDVRTGMGNMNNFRSQDHHETLQHGLRFEAYEVPKAPMQPKVTPVSFASSADIVPVPEVLSSRETHHISSVGSTSEAGSSELKLRLDGVQKKCGKPMYSSSTSSASVSYSTSQKPTNGATQVDGATTVNSKVRDSYDSRKTQVEITPEKQKLAASLFGGSTKPEKRSSTSHKVSKSSASAADGSQGSKAAVVPNDVGVEKTIHQPPPPDLLDLGEPTVTTAPPYVDPFKELEGLLDPSTKCATNHNVAGATNAPDIMSLYAETTASGGYSIPVSGGYDVNLLSELSNAAAKATSGETIVTSLPQSIMGRNAKDSLEKDALVRQMGVNPSSQNPNLFSDLLG

SEQ ID NO: 17695 - protein, 335 aa, Glycine max
MGNMNNFRSQDHHETLQHGLRFEAYEVPKAPMQPKVTPVSFASSADIVPVPEVLSSRETHHISSVGSTSEAGSSELKLRLDGVQKKCGKPMYSSSTSSASVSYSTSQKPTNGATQVDGATTVNSKVRDSYDSRKTQVEITPEKQKLAASLFGGSTKPEKRSSTSHKVSKSSASAADGSQGSKAAVVPNDVGVEKTIHQPPPPDLLDLGEPTVTTAPPYVDPFKELEGLLDPSTKCATNHNVAGATNAPDIMSLYAETTASGGYSIPVSGGYDVNLLSELSNAAAKATSGETIVTSLPQSIMGRNAKDSLEKDALVRQMGVNPSSQNPNLFSDLLG

SEQ ID NO: 17696 - DNA, 1606 bp, Glycine max
cgcggccgcccgatggagatcgacccgctcgtcaccgtggtgcaggagatgggccgcttgaccggtcgcccgacgccggcgctggattcggtgctggcgatggtgacccagcgcgcccgcatcgccggcctctatgacggcgtctccgcgcccgcggatcctcgcgcgctggcggtggcgtgatggcgggcgagacaaaaaagtggctgcgcttccgccacgccggcaccaccggcttcggcacgctctccgcatccggcatcagcgtgcatgagggcgagatgttcggccgcaacgccgccaccggcaggatgctggcgctgccggaggtcgagctgctggcgccctgcgcccccagcaagatcgtcgcgctctggaataattttcacgcgctcgcggccaagctcaaccagccggagccgcctgagccgctctatctgctcaaggccaccacgaccatcacgacaccaggcgccgtgatccgccgcccgtcctattacgacggcaagaccacctatgaaggcgagctcggcatcatcatcggcaagacctgcgcgcgcgtctcgcccgatgaagccgacagcttcatcttcggctacacctgcgtcaacgacatcaccgccaacgacatcctgaccagcgaccccacctttccccaatgggcccgcgccaagggcatcgacgattacggcccgttcggccctgtcatcaccaccggcctcgatccggccaggctcaccgtccgcaccatcctcaacggcgccgagcggcagaactatccgatctccgacatgattttttccgcgcaagccctggtgagcaagatctcccatgacatgaccctgcttccgggcgacctcatcgcggtcggcacctcggtcggcgtcggcgtgatgaaggagccggtcaatacggtgacggtcgcgatcgacggcatcggcgagctgaccaacgagtttcggttgtagccccgacgtcattccggggcgcgcgtagcgcgagctacggtgccaattgcgaacctgagaatccactcccctaccgtctctgctgctcgatggattccgggctcggcgctttcgcgccgccccggaatgacggctaagccgcccacctccacccgaccggccgacgcaaccagccgtggatcgcgcctccggacacgcccagcaacccgtccgccccttgatctcggttccactctccaatagcaatcatggcgaaaatatgcaccggcgtggggcgtcgcgatgtggctgtttttcctggctgcctggtttgtcctgctcgccgccatcgcgctggtcgccccgcaggcgtttggcctggacatcacccatttgcccgccctgttcgcgagccagccgatgccacagcgcatcgcgatcggtgcgatcctcgtggccgggctgacgctgatcggcgcctcggcctggcggctctcgcgccaggaccggcgcctcgacacgctccgtgatcgcctcaagaagacccgggaagacgtcgtcgtcgcccatgccttacagaaccatctcgacaccacggtccagcacctgatcgagagcgatccccgggaggccgtgtccgcactgcacgacaagctcgg

SEQ ID NO: 17697 - protein, 261 aa, Glycine max
MAGETKKWLRFRHAGTTGFGTLSASGISVHEGEMFGRNAATGRMLALPEVELLAPCAPSKIVALWNNFHALAAKLNQPEPPEPLYLLKATTTITTPGAVIRRPSYYDGKTTYEGELGIIIGKTCARVSPDEADSFIFGYTCVNDITANDILTSDPTFPQWARAKGIDDYGPFGPVITTGLDPARLTVRTILNGAERQNYPISDMIFSAQALVSKISHDMTLLPGDLIAVGTSVGVGVMKEPVNTVTVAIDGIGELTNEFRL

SEQ ID NO: 17698 - protein, 228 aa, Glycine max
MFGRNAATGRMLALPEVELLAPCAPSKIVALWNNFHALAAKLNQPEPPEPLYLLKATTTITTPGAVIRRPSYYDGKTTYEGELGIIIGKTCARVSPDEADSFIFGYTCVNDITANDILTSDPTFPQWARAKGIDDYGPFGPVITTGLDPARLTVRTILNGAERQNYPISDMIFSAQALVSKISHDMTLLPGDLIAVGTSVGVGVMKEPVNTVTVAIDGIGELTNEFRL

SEQ ID NO: 17699 - protein, 218 aa, Glycine max
MLALPEVELLAPCAPSKIVALWNNFHALAAKLNQPEPPEPLYLLKATTTITTPGAVIRRPSYYDGKTTYEGELGIIIGKTCARVSPDEADSFIFGYTCVNDITANDILTSDPTFPQWARAKGIDDYGPFGPVITTGLDPARLTVRTILNGAERQNYPISDMIFSAQALVSKISHDMTLLPGDLIAVGTSVGVGVMKEPVNTVTVAIDGIGELTNEFRL

SEQ ID NO: 17700 - DNA, 1538 bp, Glycine max
gtcgaaagagaatagcaaaaagcacagaacaatccgaaaatggcggaacgcgaaacctccgaatccgaggacccctcgagttcagggtcggagtacgaggatgcacaaacggtagagggcaatggtgtgaagaagaagaagggtttgtcggagtacgagaaacagaggatgccgagaattgccgagaacagagccaggttggaggctctgggtttgccccaaatcgcttcctcgttaaagggttcttcgcagcctcataaagccacgaagggcaaagagaagaagaataaggttaacgatgacgatgatgaagaatatgaacccgaagaagacgagggagaacaagtatcgggttcttcaagtgaagaaaatgaggaccgtaaagacgaggactttgcaattgaaaacgcttcagggtcacggaaaagaaaggtgaagaacaaaagtttgaaaaagaaagccagagtttctgggaagaaacatgttagtaattcagagtacattgattacgatgatgatgaagctcttaggcaggcaattgctctttccttgcaagactctgcagaaggttcttatttgcctgacaagaatgtagtgaacaccagcaagaccgagaaaaagggaagcggtcatgttcaagaagataagggaagaaagaagaacaaaaaatcgtttgctagtcggctgcaactgactgaggatgagctcattgtacacttcttccagctagatgaagcaggaaaaggaactataagtgtaagggatatacaaagggcagctacagctcatgattttttatggacagacaaagagttagttgatatgattcgctacttcgatagtgatggagatggaaaggtaaggatcagaaggtctttctgattctgtttttctggcaggaggtcaggaagaaaacctataggctttttatgactttcaatttgaattttggcggataattgctaaaaccttttgaactatagaatgtattctttaggattcttagttcttacactagtccaaatatgttttgttgattgcaagtacttactgagcagtttaacctctttcactttattcatatttttcagtataacttcaaggtcagaaagcatagttctttcttacatcttttgagaaatatgaaaattggtgaatttgaccccttagcatcaaaattgtggaaaattaccatgaaaaattttgtgcactatgtttgattattgttgttgttattattattgttaaaaataattggctctgttgcagataagccttgatgatttctggaagattgttgttcgttgcaacttgattaaagggtcttgaaaatcttgatagaatcatggttagccagagatgatagcacattggaagatattacaaggactgttaaatatatatatatatatatatatatatatatatatatatatatatatatatatatatatatatatatatatatttcatggagtgacacagatttagtattccttgtatcccattatcactatatataacttatattgtactgt

SEQ ID NO: 17701 - protein, 280 aa, Glycine max
MAERETSESEDPSSSGSEYEDAQTVEGNGVKKKKGLSEYEKQRMPRIAENRARLEALGLPQIASSLKGSSQPHKATKGKEKKNKVNDDDDEEYEPEEDEGEQVSGSSSEENEDRKDEDFAIENASGSRKRKVKNKSLKKKARVSGKKHVSNSEYIDYDDDEALRQAIALSLQDSAEGSYLPDKNVVNTSKTEKKGSGHVQEDKGRKKNKKSFASRLQLTEDELIVHFFQLDEAGKGTISVRDIQRAATAHDFLWTDKELVDMIRYFDSDGDGKVRIRRSF

SEQ ID NO: 17702 - protein, 237 aa, Glycine max
MPRIAENRARLEALGLPQIASSLKGSSQPHKATKGKEKKNKVNDDDDEEYEPEEDEGEQVSGSSSEENEDRKDEDFAIENASGSRKRKVKNKSLKKKARVSGKKHVSNSEYIDYDDDEALRQAIALSLQDSAEGSYLPDKNVVNTSKTEKKGSGHVQEDKGRKKNKKSFASRLQLTEDELIVHFFQLDEAGKGTISVRDIQRAATAHDFLWTDKELVDMIRYFDSDGDGKVRIRRSF

SEQ ID NO: 17703 - DNA, 1274 bp, Glycine max
acgaccatgtcgtcgcagaatcagaataggtcgttggagcaagctggaccctccggctccggtggacaggtgggagtgagagtagtgaattggagtggttccgataggctttgcataagccctaagcgagatcacaagcccgaaaactatgacgaccttcaattcgagttcaatcctaatatcttcgcctctctcgagcactatttgcctcctcatatgctcaacctctcacgtgatgttaagcttcactacatcaggaacattcttcttcgctatttgcctgagaatgaccgcatttggattcaaaagctgagggaatacaggctaaagatcatattgaattatccaccgctgcataaggagatatttactatggatgctgagagctttttcgtaccatcatttctcagagcaataaaagaaaacacagaagcgagttttagaagtataatggctgaaccttgtaaaggagtttatacatttgaaatgcttcaaccacaattttgtaaaaaactgatgtctgaggtggatcattttgaaagatgggtccatggtaccaaactcagaatcatgcgacctaatgcaatgaataaaaataaacatggtgttattcttgatgattttgcctttgaagccatgcttgacagatttatgtgtgatttcatacaacctatatctcgagttttctaccctgaacttggtggatcctcactggactctcaccatggttttgttgttgaatatggaattaataaggatgtggaacttggcttacatgaggatgaggcagaagtcaccttaaatgtttgcttgggaaaagaattttctggtggagacctgttcttccagggtgttcgatgtgatgcacatgtaactacaaatacgcaaccagaggaggccttcaattattcccatgtcccaggacacgcaattcttcatcctggtcgtaaccggcatggcactagacctacaacatctgggaatcggatgaatttaattctctggtgtagaagttcggcttttatagagttgaagcgatatcaaagagatttttatagctggtgtgcagaatgcagacgcaagaaggcggagagagtgcgtttgtcagttatggccgccaaacaggaattactaaagagcgaaatataatttgcctcatgaacttgcacatgtgaattgtgcttgtatagttgattcacatcattgaacttcttttctgtttctagattctgtattatttttaacgaaatgaaatatgattgaagttgcaagtc

SEQ ID NO: 17704 - protein, 382 aa, Glycine max
TTMSSQNQNRSLEQAGPSGSGGQVGVRVVNWSGSDRLCISPKRDHKPENYDDLQFEFNPNIFASLEHYLPPHMLNLSRDVKLHYIRNILLRYLPENDRIWIQKLREYRLKIILNYPPLHKEIFTMDAESFFVPSFLRAIKENTEASFRSIMAEPCKGVYTFEMLQPQFCKKLMSEVDHFERWVHGTKLRIMRPNAMNKNKHGVILDDFAFEAMLDRFMCDFIQPISRVFYPELGGSSLDSHHGFVVEYGINKDVELGLHEDEAEVTLNVCLGKEFSGGDLFFQGVRCDAHVTTNTQPEEAFNYSHVPGHAILHPGRNRHGTRPTTSGNRMNLILWCRSSAFIELKRYQRDFYSWCAECRRKKAERVRLSVMAAKQELLKSEI

SEQ ID NO: 17705 - protein, 380 aa, Glycine max
MSSQNQNRSLEQAGPSGSGGQVGVRVVNWSGSDRLCISPKRDHKPENYDDLQFEFNPNIFASLEHYLPPHMLNLSRDVKLHYIRNILLRYLPENDRIWIQKLREYRLKIILNYPPLHKEIFTMDAESFFVPSFLRAIKENTEASFRSIMAEPCKGVYTFEMLQPQFCKKLMSEVDHFERWVHGTKLRIMRPNAMNKNKHGVILDDFAFEAMLDRFMCDFIQPISRVFYPELGGSSLDSHHGFVVEYGINKDVELGLHEDEAEVTLNVCLGKEFSGGDLFFQGVRCDAHVTTNTQPEEAFNYSHVPGHAILHPGRNRHGTRPTTSGNRMNLILWCRSSAFIELKRYQRDFYSWCAECRRKKAERVRLSVMAAKQELLKSEI

SEQ ID NO: 17706 - protein, 310 aa, Glycine max
MLNLSRDVKLHYIRNILLRYLPENDRIWIQKLREYRLKIILNYPPLHKEIFTMDAESFFVPSFLRAIKENTEASFRSIMAEPCKGVYTFEMLQPQFCKKLMSEVDHFERWVHGTKLRIMRPNAMNKNKHGVILDDFAFEAMLDRFMCDFIQPISRVFYPELGGSSLDSHHGFVVEYGINKDVELGLHEDEAEVTLNVCLGKEFSGGDLFFQGVRCDAHVTTNTQPEEAFNYSHVPGHAILHPGRNRHGTRPTTSGNRMNLILWCRSSAFIELKRYQRDFYSWCAECRRKKAERVRLSVMAAKQELLKSEI

SEQ ID NO: 17707 - DNA, 1300 bp, Glycine max
aatcatcgacttaggttctcaaaatagagcccagattgttcaccaaatcggtgaagcctgcagaaactatggtttcttccaggtgattaatcacggggtggctttagaagcggcaaaggaaatggaagaagtggcacatggattcttcaagttaccagtggaggagaagctcaagttgtactcggaagacacatcaaagacaatgagactgtctactagttttaatgtgaaaaaagagacggtgcgtaattggagggattatcttaggcttcactgctatccattggagaaatatgcgcctgaatggccttctaatccaccctctttcaaggaaactgttacagaatactgcacaataattagggaattggggttgaggatacaggaatacatatcagagagtttgggcctagaaaaagactacataaagaatgtattaggggaacaagggcagcacatggctgtgaactactatccaccatgcccagaaccagaacttacctatggattgccagggcacactgacccaaatgcacttacaattctgcttcaagaccttcaagttgctggccttcaggttctcaaagatggcaagtggcttgccgttagtccccaacctaatgcctttgtcattaacattggcgatcaacttcaggctttgagtaatgggctttataagagtgtgtggcaccgtgctgttgtcaatgttgagaaaccaaggctttctgtggcttcatttctttgtccaaatgacgaggcattgataagccctgcaaaaccactcaccgaacatggatccgaagccgtatacagaggatttacatatgcagaatactataagaagttttggagcaggaacttagaccaagaacactgtttggaacttttcaagaacaagtaaccctttaggtgtgattggcaagaaccaaaataatgctaataagagtattctttatagtttgtttttcactgcttttgccgttttattgttagtgcatttggtgatggcaaattatagtttgttacacaacttcaatatgtcagagtcagacgctcatcatttctcgtgtggtcatattaatatagctgcaagaccgaactgcttattattttgattcatgtggaacaagttacatttcccaagaagcaatcgtactctagtagctttatcttgggaagataaaatggcatgtaatattcatatgttgaaccttcaaaatttcctagcgctgctcatgcattcttggtcatagagaagcgctacggaaaagtatcttaaatttggaactttatttttgtc

SEQ ID NO: 17708 - protein, 299 aa, Glycine max
IIDLGSQNRAQIVHQIGEACRNYGFFQVINHGVALEAAKEMEEVAHGFFKLPVEEKLKLYSEDTSKTMRLSTSFNVKKETVRNWRDYLRLHCYPLEKYAPEWPSNPPSFKETVTEYCTIIRELGLRIQEYISESLGLEKDYIKNVLGEQGQHMAVNYYPPCPEPELTYGLPGHTDPNALTILLQDLQVAGLQVLKDGKWLAVSPQPNAFVINIGDQLQALSNGLYKSVWHRAVVNVEKPRLSVASFLCPNDEALISPAKPLTEHGSEAVYRGFTYAEYYKKFWSRNLDQEHCLELFKNK

SEQ ID NO: 17709 - protein, 259 aa, Glycine max
MEEVAHGFFKLPVEEKLKLYSEDTSKTMRLSTSFNVKKETVRNWRDYLRLHCYPLEKYAPEWPSNPPSFKETVTEYCTIIRELGLRIQEYISESLGLEKDYIKNVLGEQGQHMAVNYYPPCPEPELTYGLPGHTDPNALTILLQDLQVAGLQVLKDGKWLAVSPQPNAFVINIGDQLQALSNGLYKSVWHRAVVNVEKPRLSVASFLCPNDEALISPAKPLTEHGSEAVYRGFTYAEYYKKFWSRNLDQEHCLELFKNK

SEQ ID NO: 17710 - protein, 232 aa, Glycine max
MRLSTSFNVKKETVRNWRDYLRLHCYPLEKYAPEWPSNPPSFKETVTEYCTIIRELGLRIQEYISESLGLEKDYIKNVLGEQGQHMAVNYYPPCPEPELTYGLPGHTDPNALTILLQDLQVAGLQVLKDGKWLAVSPQPNAFVINIGDQLQALSNGLYKSVWHRAVVNVEKPRLSVASFLCPNDEALISPAKPLTEHGSEAVYRGFTYAEYYKKFWSRNLDQEHCLELFKNK

SEQ ID NO: 17711 - DNA, 1383 bp, Glycine max
agtggttactggtccacctttgatggaaacaactttggcaacagcaataggaaaagaagcaggaacaattattataacaggaactgtaacatttacaatgacaaccggacaaaatttggggaccatggttgcaactttaatttttacacagctgatcatgctaattatgttagatatgatgctgttccatcatctttgaaaaggagaaaatattcagtgcctgcttggcaagaaagccagcaatactatgttccacccatggtccatgacaatatcccttcatcctataatttccaaggtcctcctacaagatctgatggtgatgcctctacatcagctagctgcaagcgtgattgctctatttttgaagatgataagcctgtcttcatgtctagggacgaaattgatagacactctccatcaagaaaagatggtattgatgtacatcatgagacacacttgcggtactcctattgtgccttccttcagaatcttggaatgcgtcttgagctgcctcaaaacatcattgggacagctatggttctgtgccaccgtttctttgttcgacaatcacatgcttgccatgatagatttttgattgctactgctgctctttttcttactgcaaagtcagaggaagctccacgtcctttgaataacatattgagaacatccagtgaaattttacataaacaagattttgctttgttgtcctaccggtttcctgttgattggtttgaacagtatcgggagcgggtgcttgaggctgaacaactgatacttactactctaaattttgaactcaatgtgcaacatccatatgtacctcttacatctgttcttaacaaattaggtctatcaaagactgttttggtgaatctggcattaaacttggtcagtgaagggcttcggagttctctgtggcttcaatttaaaccccatcatattgctgctggagctgcatatcttgctgccaagtttctgaacatggatctcgcagcttatcagaacatctggcaagagttccagacaacaccatccatacttcaagctgtctcgcagcaattaatggagctcttttaaaagtatggaagaactggattacagcatccttcttagtggagtagattttgagtatatataattcaaaatgtcacatactttggagggagagattaggaactacgacataggattttagtgggtgtgacctacggatttttatgttttaccaacttctctgaattctctgctaaaatgtcgagcatgctttgcgttcatttttgttgatgctttgtgatctactgtcagtgtcataatatcaatcatggtcgtgtttagtgaatgaagagcctatccttgaaagcacacagatttgtaacg

SEQ ID NO: 17712 - protein, 360 aa, Glycine max
SGYWSTFDGNNFGNSNRKRSRNNYYNRNCNIYNDNRTKFGDHGCNFNFYTADHANYVRYDAVPSSLKRRKYSVPAWQESQQYYVPPMVHDNIPSSYNFQGPPTRSDGDASTSASCKRDCSIFEDDKPVFMSRDEIDRHSPSRKDGIDVHHETHLRYSYCAFLQNLGMRLELPQNIIGTAMVLCHRFFVRQSHACHDRFLIATAALFLTAKSEEAPRPLNNILRTSSEILHKQDFALLSYRFPVDWFEQYRERVLEAEQLILTTLNFELNVQHPYVPLTSVLNKLGLSKTVLVNLALNLVSEGLRSSLWLQFKPHHIAAGAAYLAAKFLNMDLAAYQNIWQEFQTTPSILQAVSQQLMELF

SEQ ID NO: 17713 - protein, 274 aa, Glycine max
MVHDNIPSSYNFQGPPTRSDGDASTSASCKRDCSIFEDDKPVFMSRDEIDRHSPSRKDGIDVHHETHLRYSYCAFLQNLGMRLELPQNIIGTAMVLCHRFFVRQSHACHDRFLIATAALFLTAKSEEAPRPLNNILRTSSEILHKQDFALLSYRFPVDWFEQYRERVLEAEQLILTTLNFELNVQHPYVPLTSVLNKLGLSKTVLVNLALNLVSEGLRSSLWLQFKPHHIAAGAAYLAAKFLNMDLAAYQNIWQEFQTTPSILQAVSQQLMELF

SEQ ID NO: 17714 - protein, 231 aa, Glycine max
MSRDEIDRHSPSRKDGIDVHHETHLRYSYCAFLQNLGMRLELPQNIIGTAMVLCHRFFVRQSHACHDRFLIATAALFLTAKSEEAPRPLNNILRTSSEILHKQDFALLSYRFPVDWFEQYRERVLEAEQLILTTLNFELNVQHPYVPLTSVLNKLGLSKTVLVNLALNLVSEGLRSSLWLQFKPHHIAAGAAYLAAKFLNMDLAAYQNIWQEFQTTPSILQAVSQQLMELF

SEQ ID NO: 17715 - DNA, 1444 bp, Glycine max
ttttgccacattatgctcaagatattggtagggaagaaagtgaagatgaaagtgatgatcatgatggatatgaaaactatgcacccaaagtttgtgggctgtttcctcggttctgccttttgaacccagttccaggattaagaatggagggtaggattccaagttctacagttcatggagtgcagggtaaatcaattacttctcacagaagaactgcaaaagagcatggtagaactgctacttatgggaaaaagtctgtaaactcccaatctggctatacagaagagagagattttctgagtactgcagaaaaatctaagcatgatattgatccacatcgcagagcttgcagcaaatcattagcctctgagagaactgaatttgaatcaagttgtgaaagccctgttattgagaaaactctatatgtagattctgtacataaggtcaaaacttcaatttcatgttcttcagacaccaatctcagaggggatgattttgatactctaagaaaagacactgaccttgataaaaacctttctattgatttttctattgaggatagcaaacacttgggaattgtggatgagaaggcagtatcagaacctgaaatttcagcttctcttgattcatctctcctggtttgttctgataattcaaatgacaatatgcaaatggaaatgaaaaatcattccaacaaaatatgcccagaaaagcaagaattgacaaagcctgattaccaaggaagtaacctagatcatgatttggttgcgatttcaagtccagaaatggttgcatgggagaaaatagagtctgaaagcaaaggttttagcagtaaggaaagttctaatggcctaatcaagaatcctattgcatggagaaacaggaaatttgctagtgatttgaaatttgattcaatgtgccaacaagctaccaaattggttgatcaagaatgcactatcagatctagcgaggatcctagaactttggctagctcgaaggtggtaggtgacagaaagatcaacttagaaagtcaattgcagatgaagttgggccatggaaagacttcaaatgcaagctcgttgaagcttcctcttgcccttccttcaccaaaagctccttcagagtcttggcttaagcgcactttaccgacagtttcctcgaagaatatatctttacggttgaatcttgctacccactatcatgcaccaactcaaacacccaagacagcattaccggatcctaagtgggaaagaattgttaaatcttctgaagttaatcatgggcatcttcagtttgctcaggaactacttccacccattccagaagcatgaattttctagagatatcaggtcattggtaatttgattttcttgctaaaatgtgccacgttttcttagtgtaattatttgttcttaggattttcattctacagtttggtctccct

SEQ ID NO: 17716 - protein, 442 aa, Glycine max
LPHYAQDIGREESEDESDDHDGYENYAPKVCGLFPRFCLLNPVPGLRMEGRIPSSTVHGVQGKSITSHRRTAKEHGRTATYGKKSVNSQSGYTEERDFLSTAEKSKHDIDPHRRACSKSLASERTEFESSCESPVIEKTLYVDSVHKVKTSISCSSDTNLRGDDFDTLRKDTDLDKNLSIDFSIEDSKHLGIVDEKAVSEPEISASLDSSLLVCSDNSNDNMQMEMKNHSNKICPEKQELTKPDYQGSNLDHDLVAISSPEMVAWEKIESESKGFSSKESSNGLIKNPIAWRNRKFASDLKFDSMCQQATKLVDQECTIRSSEDPRTLASSKVVGDRKINLESQLQMKLGHGKTSNASSLKLPLALPSPKAPSESWLKRTLPTVSSKNISLRLNLATHYHAPTQTPKTALPDPKWERIVKSSEVNHGHLQFAQELLPPIPEA

SEQ ID NO: 17717 - protein, 395 aa, Glycine max
MEGRIPSSTVHGVQGKSITSHRRTAKEHGRTATYGKKSVNSQSGYTEERDFLSTAEKSKHDIDPHRRACSKSLASERTEFESSCESPVIEKTLYVDSVHKVKTSISCSSDTNLRGDDFDTLRKDTDLDKNLSIDFSIEDSKHLGIVDEKAVSEPEISASLDSSLLVCSDNSNDNMQMEMKNHSNKICPEKQELTKPDYQGSNLDHDLVAISSPEMVAWEKIESESKGFSSKESSNGLIKNPIAWRNRKFASDLKFDSMCQQATKLVDQECTIRSSEDPRTLASSKVVGDRKINLESQLQMKLGHGKTSNASSLKLPLALPSPKAPSESWLKRTLPTVSSKNISLRLNLATHYHAPTQTPKTALPDPKWERIVKSSEVNHGHLQFAQELLPPIPEA

SEQ ID NO: 17718 - protein, 221 aa, Glycine max
MQMEMKNHSNKICPEKQELTKPDYQGSNLDHDLVAISSPEMVAWEKIESESKGFSSKESSNGLIKNPIAWRNRKFASDLKFDSMCQQATKLVDQECTIRSSEDPRTLASSKVVGDRKINLESQLQMKLGHGKTSNASSLKLPLALPSPKAPSESWLKRTLPTVSSKNISLRLNLATHYHAPTQTPKTALPDPKWERIVKSSEVNHGHLQFAQELLPPIPEA

SEQ ID NO: 17719 - DNA, 1450 bp, Glycine max
agatggagttgtgctggaagaatttatgaactttataattatgttcatggccagccctgaatttatcaaaaacccatatcttagagcaaagatggttgaagtattgaactgctggatgccccgcaggagcggctcaactgctacagccactctatttgaaggccaccaactctctcttgagtatcttgtgaggaatcttctgaaactctacgttgacattgagttcactggttctcacacacagttctatgacaagtttaacatccgccataatattgctgaactccttgaatacctgtggcaagtccctagtcatcgtaatgcttggagacagattgctaaagaggaggaaaagggtgtctatctgaatttcttaaactttctgattaatgatagtatttatcttcttgatgaaagtctgaacaaaattcttgagctaaaagaattggaggctgagatgtcaaatacggtcgagtgggagcgacgaccagttcaagagaggcaggagaggacccggttattccattctcaagaaaatattattcggatagatatgaagttggcaaacgaagatgtcagtatgcttgcatttacttcagagcagattactgctccattcctacttcccgagatggttgaaagagtggctagcatgctcaattactttctgctgcaattggtgggtcctcaaagaaaatcgcttagtctgaaggatcctgagaaatatgaatttcgtcctaagcatttgctaaaacagattgtgcacatatatgttcatctagctaggggtgacacgaattccatcttcccagctgccatctcaaaggatggccggtcatacaatgatcagttgtttagtgctggggcagatgtccttcacagaattggggaggatgggagaattatacaggaatttattcaacttggtgctaaagctaaagttgctgcttcagaggcaatggatgctgaagctactctaggggagataccagatgaattcctggatccaattcaatacactttgatgaaggatccagttatcttgccttcttcaaggatcacggttgatcgtcctgtcattcagaggcatcttcttagtgatagtactgacccattcaaccgttctcatcttactgcggatatgttgattcccgatgatgcgctaaaagctagaattgaggagtttgtcaggtctcaggaaatgaagaaacacttgagcctacagagtaccaaggccacaattcagactacaaatggggaaacaatgttggttgattaggaaaatatcttgagttccctaagttgtcgaatgaaatatggatttgtgccgtgtgcataaagttagatgttgaaccttaatttaatattttattcaatcatttttggaaaaaattgaagctatcattagaagtttaaggctgtaagatattcggaacagttaatgtaaaga

SEQ ID NO: 17720 - protein, 425 aa, Glycine max
DGVVLEEFMNFIIMFMASPEFIKNPYLRAKMVEVLNCWMPRRSGSTATATLFEGHQLSLEYLVRNLLKLYVDIEFTGSHTQFYDKFNIRHNIAELLEYLWQVPSHRNAWRQIAKEEEKGVYLNFLNFLINDSIYLLDESLNKILELKELEAEMSNTVEWERRPVQERQERTRLFHSQENIIRIDMKLANEDVSMLAFTSEQITAPFLLPEMVERVASMLNYFLLQLVGPQRKSLSLKDPEKYEFRPKHLLKQIVHIYVHLARGDTNSIFPAAISKDGRSYNDQLFSAGADVLHRIGEDGRIIQEFIQLGAKAKVAASEAMDAEATLGEIPDEFLDPIQYTLMKDPVILPSSRITVDRPVIQRHLLSDSTDPFNRSHLTADMLIPDDALKARIEEFVRSQEMKKHLSLQSTKATIQTTNGETMLVD

SEQ ID NO: 17721 - protein, 417 aa, Glycine max
MNFIIMFMASPEFIKNPYLRAKMVEVLNCWMPRRSGSTATATLFEGHQLSLEYLVRNLLKLYVDIEFTGSHTQFYDKFNIRHNIAELLEYLWQVPSHRNAWRQIAKEEEKGVYLNFLNFLINDSIYLLDESLNKILELKELEAEMSNTVEWERRPVQERQERTRLFHSQENIIRIDMKLANEDVSMLAFTSEQITAPFLLPEMVERVASMLNYFLLQLVGPQRKSLSLKDPEKYEFRPKHLLKQIVHIYVHLARGDTNSIFPAAISKDGRSYNDQLFSAGADVLHRIGEDGRIIQEFIQLGAKAKVAASEAMDAEATLGEIPDEFLDPIQYTLMKDPVILPSSRITVDRPVIQRHLLSDSTDPFNRSHLTADMLIPDDALKARIEEFVRSQEMKKHLSLQSTKATIQTTNGETMLVD

SEQ ID NO: 17722 - protein, 412 aa, Glycine max
MFMASPEFIKNPYLRAKMVEVLNCWMPRRSGSTATATLFEGHQLSLEYLVRNLLKLYVDIEFTGSHTQFYDKFNIRHNIAELLEYLWQVPSHRNAWRQIAKEEEKGVYLNFLNFLINDSIYLLDESLNKILELKELEAEMSNTVEWERRPVQERQERTRLFHSQENIIRIDMKLANEDVSMLAFTSEQITAPFLLPEMVERVASMLNYFLLQLVGPQRKSLSLKDPEKYEFRPKHLLKQIVHIYVHLARGDTNSIFPAAISKDGRSYNDQLFSAGADVLHRIGEDGRIIQEFIQLGAKAKVAASEAMDAEATLGEIPDEFLDPIQYTLMKDPVILPSSRITVDRPVIQRHLLSDSTDPFNRSHLTADMLIPDDALKARIEEFVRSQEMKKHLSLQSTKATIQTTNGETMLVD

SEQ ID NO: 17723 - DNA, 1365 bp, Glycine max
gcaccgtcgcatcaccaacaaacccaccctccctcacctctcctttctccctttctccgacggctacgacgacggttacacctccaccgattacgccctccaagcctccgagttcaagcgtcgcggctcagaattcgtcaccaatctcatcgcctccaaggcgcaagagggtcatcctttcacttgtttagtccacaccgtgctccttccttgggcagctcgggcagcccgtgggtttcacctcccgacggcgttgctttggactcaaccagccaccatactcgacatattctactgctactttcacgaacacggtgactacatcaaaggcaaaatcaaagacccctcgagttccattgaactgccaggattgccgttattgcttgcaccacgggacctaccttcatttctattgggttcaaaccctactattgactctctcgcggtttcaatgtttgaagagcaacttcatgatcttgacatgcaagcaaagcccagaatacttgtcaacacctttgaagcgttggaacatgaggctttgagggccgttgataatttcaacatgatccccatcgggccgttgattccctcggccttcttggacgggaaagaccccactgatacttcatttggcggtgacatcttccgcccctcgaatgattgtggtgaatggttggactcaaagccagagatgtcggtggtttatgtctcatttggtagtttttgcgtgttgtcgaagaagcaaatggaagaacttgcacttgcgttattagattgtggaagtcctttcttgtgggtcagtagagaaaaagaagaagaggagctaagctgcagggaggagttggaacagaaggggaagatagtaaattggtgttctcaagtggaagttctttcacatcgttctgtggggtgttttgtgacgcactgtggttggaattcgacaatggaaagcttggcttcgggggttcctatgtttgcatttcctcagtggatcgaacagaagactaatgcgaagctaatagaagatgtgtggaagacgggggtgagagtggataaacaggtaaccgaggaagggatagtagaaaaggaagaaattatcaagtgtttggaagtgaccatggggagtggaaagaaaggacaggaattgagaaacaatgcaaaaaattggaagggtttggccagggaagctgtcaaggaaggtagcggctcttcggataagaatctaagggcttttctggatgatctttgcccacattaaatgcatatataacttcattatctctatttttctatccattctcatgtaatttaaagaacaatagttgtgaaataaaaagttaaatatactataaaaaattgtaatat

SEQ ID NO: 17724 - protein, 418 aa, Glycine max
HRRITNKPTLPHLSFLPFSDGYDDGYTSTDYALQASEFKRRGSEFVTNLIASKAQEGHPFTCLVHTVLLPWAARAARGFHLPTALLWTQPATILDIFYCYFHEHGDYIKGKIKDPSSSIELPGLPLLLAPRDLPSFLLGSNPTIDSLAVSMFEEQLHDLDMQAKPRILVNTFEALEHEALRAVDNFNMIPIGPLIPSAFLDGKDPTDTSFGGDIFRPSNDCGEWLDSKPEMSVVYVSFGSFCVLSKKQMEELALALLDCGSPFLWVSREKEEEELSCREELEQKGKIVNWCSQVEVLSHRSVGCFVTHCGWNSTMESLASGVPMFAFPQWIEQKTNAKLIEDVWKTGVRVDKQVTEEGIVEKEEIIKCLEVTMGSGKKGQELRNNAKNWKGLAREAVKEGSGSSDKNLRAFLDDLCPH

SEQ ID NO: 17725 - protein, 268 aa, Glycine max
MFEEQLHDLDMQAKPRILVNTFEALEHEALRAVDNFNMIPIGPLIPSAFLDGKDPTDTSFGGDIFRPSNDCGEWLDSKPEMSVVYVSFGSFCVLSKKQMEELALALLDCGSPFLWVSREKEEEELSCREELEQKGKIVNWCSQVEVLSHRSVGCFVTHCGWNSTMESLASGVPMFAFPQWIEQKTNAKLIEDVWKTGVRVDKQVTEEGIVEKEEIIKCLEVTMGSGKKGQELRNNAKNWKGLAREAVKEGSGSSDKNLRAFLDDLCPH

SEQ ID NO: 17726 - protein, 258 aa, Glycine max
MQAKPRILVNTFEALEHEALRAVDNFNMIPIGPLIPSAFLDGKDPTDTSFGGDIFRPSNDCGEWLDSKPEMSVVYVSFGSFCVLSKKQMEELALALLDCGSPFLWVSREKEEEELSCREELEQKGKIVNWCSQVEVLSHRSVGCFVTHCGWNSTMESLASGVPMFAFPQWIEQKTNAKLIEDVWKTGVRVDKQVTEEGIVEKEEIIKCLEVTMGSGKKGQELRNNAKNWKGLAREAVKEGSGSSDKNLRAFLDDLCPH

SEQ ID NO: 17727 - DNA, 969 bp, Glycine max
agtacgtaggcccccccccccaaagatatcagggaaagaaggggaaaaaggttcaagtatacaagagtcagaagaaccaaaagaagaatgtgaatcaaaagatgcgaaggatctttgccctgaagatgaggagaagatggaagactctccagtcttaggtcttcttaaagaacaaaaaagggctaaacttgaaaccaaggatgataaaggcaatggaaccaaagtagttccaagtgaggctctaattaagaaagctgttagaaaaagatcttcgtacatcaaggctaatgcagagaaaatcactatggctggtcttcgtcgactcttggaggaagatcttaaacttgataaatttactcttgatccctataagaagtttgtaagtcaacagcttgatgaggtattaacatcttcagaagttcccgaacctgcaaagaatgctaagaaaattgttaagaaaaaacctgataccaaagtaactaaaaaggtcagcagtgaagagaactctgatacttcagataaggagaccgatgaggaagagagtgaggaagatgaagttaaacctagaaaaaaaattcttccaaaaggcaaggtgaagacttctgtccaacccaaaaagcgtaaaggagaggagtctgatctatccagtaagaaaagggtcaaacctgctaaagcagcctcagaagacaatagtgatgcagaagataatgggaagaactctgaagatgatcagtcccattcatcaccagagaaaccttccaagaagaaagaagtttcaaatcctgtgtatggtaaacgtgtggagcacttaaagtctgttattaaagcatgtggaatgagtgttcctcccgtaatttacaaaaaagtcaagcaagtgcctgaaaacaaacgagaagggcagctaattaaggagttggaggaaatactgtctagagaagggttgtcttcaaatccatctgaaaaggaaat

SEQ ID NO: 17728 - protein, 322 aa, Glycine max
VRRPPPPKISGKEGEKGSSIQESEEPKEECESKDAKDLCPEDEEKMEDSPVLGLLKEQKRAKLETKDDKGNGTKVVPSEALIKKAVRKRSSYIKANAEKITMAGLRRLLEEDLKLDKFTLDPYKKFVSQQLDEVLTSSEVPEPAKNAKKIVKKKPDTKVTKKVSSEENSDTSDKETDEEESEEDEVKPRKKILPKGKVKTSVQPKKRKGEESDLSSKKRVKPAKAASEDNSDAEDNGKNSEDDQSHSSPEKPSKKKEVSNPVYGKRVEHLKSVIKACGMSVPPVIYKKVKQVPENKREGQLIKELEEILSREGLSSNPSEKE

SEQ ID NO: 17729 - protein, 277 aa, Glycine max
MEDSPVLGLLKEQKRAKLETKDDKGNGTKVVPSEALIKKAVRKRSSYIKANAEKITMAGLRRLLEEDLKLDKFTLDPYKKFVSQQLDEVLTSSEVPEPAKNAKKIVKKKPDTKVTKKVSSEENSDTSDKETDEEESEEDEVKPRKKILPKGKVKTSVQPKKRKGEESDLSSKKRVKPAKAASEDNSDAEDNGKNSEDDQSHSSPEKPSKKKEVSNPVYGKRVEHLKSVIKACGMSVPPVIYKKVKQVPENKREGQLIKELEEILSREGLSSNPSEKE

SEQ ID NO: 17730 - protein, 221 aa, Glycine max
MAGLRRLLEEDLKLDKFTLDPYKKFVSQQLDEVLTSSEVPEPAKNAKKIVKKKPDTKVTKKVSSEENSDTSDKETDEEESEEDEVKPRKKILPKGKVKTSVQPKKRKGEESDLSSKKRVKPAKAASEDNSDAEDNGKNSEDDQSHSSPEKPSKKKEVSNPVYGKRVEHLKSVIKACGMSVPPVIYKKVKQVPENKREGQLIKELEEILSREGLSSNPSEKE

SEQ ID NO: 17731 - DNA, 1218 bp, Glycine max
actccctcacatcacaagaagcacaatttctctctttctttttgtgtccaaaatggctcctagttctactcacaatactgggttctatgtgcttatgctagttgggatagtgattagcactatggttgctacctgtgctggtagcttctaccaagactttgatctaacatggggtggtgaccgtgctaagatattcaatggtggccagcttctatctctttcccttgacaaagtctctggctctggcttcaaatcaaagaaagaatacctatttgggaggattgatatgcagctcaagctcgttgctggcaactctgctggcactgtcactgcttactacttgtcatcccaagggccaacacatgatgagattgatttcgagtttttgggaaacctaagtggggacccttatattctccacacaaacatcttcacgcaaggcaaaggtaacagggagcaacagttctatctctggttcgaccccaccagaaacttccacacttattctatcatttggaagccccagcacatcatattcttggttgataacacaccaataagggtattcaagaatgctgaatctcttggtgttccttttccaaagaaccagcccatgagaatctattctagcctctggaatgctgatgactgggccaccagaggaggattggtgaaaactgattggtccaaagcaccctttacagcatactaccgcaatttcaaagccactgagttctcactcaagtcttccatttcaaattctggtgctgaatatgaggcaaatgagcttgattcttatagcagaagaagactgagatgggttcagaagtacttcatgatctataactactgcagtgatctcaagcgattcccacaaggtcttcctgctgaatgtagacgctgaaggttccaagagatgaagagaatggccactttctgattggatttgaatcgtctatgtaaaatatgctatgtttattatgtcttagattctttattgacttctgtcttttttttcttcctttttttttagtttctattttatagttgctaatgtatatgtatattaaggggtcttaacaataaatcatattctttgtaccacttttcttgtcaatatgggcagttagtctcatcctagctcgtccacccggtgaaattgatcatgttggaatcaatttctatctgttcatataataaaaaggtgtagtcaagttt

SEQ ID NO: 17732 - protein, 300 aa, Glycine max
LPHITRSTISLFLFVSKMAPSSTHNTGFYVLMLVGIVISTMVATCAGSFYQDFDLTWGGDRAKIFNGGQLLSLSLDKVSGSGFKSKKEYLFGRIDMQLKLVAGNSAGTVTAYYLSSQGPTHDEIDFEFLGNLSGDPYILHTNIFTQGKGNREQQFYLWFDPTRNFHTYSIIWKPQHIIFLVDNTPIRVFKNAESLGVPFPKNQPMRIYSSLWNADDWATRGGLVKTDWSKAPFTAYYRNFKATEFSLKSSISNSGAEYEANELDSYSRRRLRWVQKYFMIYNYCSDLKRFPQGLPAECRR

SEQ ID NO: 17733 - protein, 283 aa, Glycine max
MAPSSTHNTGFYVLMLVGIVISTMVATCAGSFYQDFDLTWGGDRAKIFNGGQLLSLSLDKVSGSGFKSKKEYLFGRIDMQLKLVAGNSAGTVTAYYLSSQGPTHDEIDFEFLGNLSGDPYILHTNIFTQGKGNREQQFYLWFDPTRNFHTYSIIWKPQHIIFLVDNTPIRVFKNAESLGVPFPKNQPMRIYSSLWNADDWATRGGLVKTDWSKAPFTAYYRNFKATEFSLKSSISNSGAEYEANELDSYSRRRLRWVQKYFMIYNYCSDLKRFPQGLPAECRR

SEQ ID NO: 17734 - protein, 269 aa, Glycine max
MLVGIVISTMVATCAGSFYQDFDLTWGGDRAKIFNGGQLLSLSLDKVSGSGFKSKKEYLFGRIDMQLKLVAGNSAGTVTAYYLSSQGPTHDEIDFEFLGNLSGDPYILHTNIFTQGKGNREQQFYLWFDPTRNFHTYSIIWKPQHIIFLVDNTPIRVFKNAESLGVPFPKNQPMRIYSSLWNADDWATRGGLVKTDWSKAPFTAYYRNFKATEFSLKSSISNSGAEYEANELDSYSRRRLRWVQKYFMIYNYCSDLKRFPQGLPAECRR

SEQ ID NO: 17735 - DNA, 1434 bp, Glycine max
acatcgggtgcagcttgaaatccttgttgcaataaatactggaattcagggatttttgcatcctagcattagtctatcccagacttccctgattgagatctttggctataagagatgcagaaacatagcgtgccaaaaccagcttccagctgatgattgtacctgtgaaatatgcaccaacactaatggtttctgcaatctttgcatgtgtgtgatctgcaacaagtttgactttgaggtgaatacatgccgctggattggatgtgatttgtgttctcattggactcacacagattgtgccattcgtgagcgacatatttgcatgggcccttcttcaaagagtggagcaggaccgagtgatatgtttttcaggtgtcaagcatgcaacaggacttcagaattgttgggttgggttaaagatgtcttccagcactgtgcaccgtcatgggatggagaagccttaatgagggaacttgattatgttagtaggatctttcatgggagtaaagacccccgaggaaggaagctattttggaagtgtgatgatctcaaggaaaaatttttaagtaaaaaaatggattcaaaagctgtttgccgggcaatactgatgtttttccaagagcttgaggtgaactctgcaaaatgcctggaaaatggagaaagtggaaggttgattgctccactggacgcatgcaatagaattgctgaagtggtgcatgaggctataagaaagatggaaatggtagctgatgagaagatgaggatgttcaagaaggctcgcttatctctcgaagcttgtgatcgtgaactagctgacaaggccagggaggtgacagagctcaagatggagagacaaaaaaagaagctgcagatagaagagctggagaaaattgtgaggctgaaaaatgcagaggctgatatgttccaattgaaggctgatgaggctaaacgagaggccgagaggcttcaaatgattgctcttgccaagcaagataaatcagaggaagaatttactagcaactacttgaaacaacgattaaacgaggctgaggccgagaagcagtacctttatgaaaagatcaaattgcaggagagttctcgcgcttcgcagggcagtagtggtggtgacccctctcagatgctgatgtattccaaaattcacgatctgctttacagtgttccttccaaagcagacagtcagggtaatgagcgccacccttttcggacaaatccctgagagtccattgtgtttgtaatgccaattatgttagctgttgtagctaagtcacctttgaacaatttaggatgagccacttttatggcaatgtaatcaccatcttcatcaattttatctgcgttttgatattggaaaaagcttcaatatatgtttggaactctaaccattattaatatgcttttgtaaggaatttgttg

SEQ ID NO: 17736 - protein, 411 aa, Glycine max
HRVQLEILVAINTGIQGFLHPSISLSQTSLIEIFGYKRCRNIACQNQLPADDCTCEICTNTNGFCNLCMCVICNKFDFEVNTCRWIGCDLCSHWTHTDCAIRERHICMGPSSKSGAGPSDMFFRCQACNRTSELLGWVKDVFQHCAPSWDGEALMRELDYVSRIFHGSKDPRGRKLFWKCDDLKEKFLSKKMDSKAVCRAILMFFQELEVNSAKCLENGESGRLIAPLDACNRIAEVVHEAIRKMEMVADEKMRMFKKARLSLEACDRELADKAREVTELKMERQKKKLQIEELEKIVRLKNAEADMFQLKADEAKREAERLQMIALAKQDKSEEEFTSNYLKQRLNEAEAEKQYLYEKIKLQESSRASQGSSGGDPSQMLMYSKIHDLLYSVPSKADSQGNERHPFRTNP

SEQ ID NO: 17737 - protein, 343 aa, Glycine max
MCVICNKFDFEVNTCRWIGCDLCSHWTHTDCAIRERHICMGPSSKSGAGPSDMFFRCQACNRTSELLGWVKDVFQHCAPSWDGEALMRELDYVSRIFHGSKDPRGRKLFWKCDDLKEKFLSKKMDSKAVCRAILMFFQELEVNSAKCLENGESGRLIAPLDACNRIAEVVHEAIRKMEMVADEKMRMFKKARLSLEACDRELADKAREVTELKMERQKKKLQIEELEKIVRLKNAEADMFQLKADEAKREAERLQMIALAKQDKSEEEFTSNYLKQRLNEAEAEKQYLYEKIKLQESSRASQGSSGGDPSQMLMYSKIHDLLYSVPSKADSQGNERHPFRTNP

SEQ ID NO: 17738 - protein, 304 aa, Glycine max
MGPSSKSGAGPSDMFFRCQACNRTSELLGWVKDVFQHCAPSWDGEALMRELDYVSRIFHGSKDPRGRKLFWKCDDLKEKFLSKKMDSKAVCRAILMFFQELEVNSAKCLENGESGRLIAPLDACNRIAEVVHEAIRKMEMVADEKMRMFKKARLSLEACDRELADKAREVTELKMERQKKKLQIEELEKIVRLKNAEADMFQLKADEAKREAERLQMIALAKQDKSEEEFTSNYLKQRLNEAEAEKQYLYEKIKLQESSRASQGSSGGDPSQMLMYSKIHDLLYSVPSKADSQGNERHPFRTNP

SEQ ID NO: 17739 - DNA, 1360 bp, Glycine max
aatgatcaatcagtctgcactacagtccttagagtgaccaagaaagaggaagagtttgtattcaccgatatatttgaaaggcctgttccttctttgttaagaggatacagtgctcctattcgtctggaatctgatctcactgatagcgacctgtttttcttactagccaatgattccgatgaattcaaccgttgggaggctggacaagttttggcacggaagttgatgcttaacttagtggatgatttgcaacgtaacaaaccattggttttaaattccaattttgttcaagggttcaaacgtattttatgtgactcaagtctggacaaagagtttgtggcaaaggcaataactttgcctggtgagggagaaataatggatatgatgggggttgcagatcctgatgctgttcatactgttcggactttcatcaggaagcagcttgcaagtgaactgagatcagagttcctcagcacagtggaaaataacaggagctcagaagaatatgtcttcaatcactcaaacttggccaggcgtgctctgaagaatgttgctcttgcttatcttggatgccttgaggaaaaagaattcaccgatcttgtgttgcatgagtataaaactgctacaaatatgactgagcagtttgctgccttggctgccatagctcagaaccctggtaaaacccgtgatgatgttcttgatgacttttatggcaagtggcagcatgatttcttggtggtgaacaaatggtttgctcttcaagcaatgtctgacattcctggtaatgttgagaatgtgcggaaactgttaagccacccagcatttgatctgcgcaatcccaacaaagtgtactctctcattggaggtttctgtgggtctccggtgaactttcatgcaaaggatgggtcaggctacaagtttttgggagagattgtgctgcaacttgacaagctaaatcctcaggtagcctcgagaatggtgtcagccttctcaagatggaggcgttatgatgaagacagacaaaagcttgcaaaggcgcagttggagaggatcatgtctactaatggactatcggagaatgtgtttgagatagcttcgaaaagcttagctgcctaaaagtgttaatggcgtatgaaaaactgccatgatgtgttagtggcgaaagcaattgcagcaacgatcccaatatcttttgcaaagctttggcgccacaatgggtagctctctttttgcatccatgtcttaactcggggtgatttctttatctttttcccaaggatgtgtagggcgttatgcaataaaagctgaactagtttatctacgtaactttaaaatgtgattcagtggatattcgtttgtt

SEQ ID NO: 17740 - protein, 371 aa, Glycine max
NDQSVCTTVLRVTKKEEEFVFTDIFERPVPSLLRGYSAPIRLESDLTDSDLFFLLANDSDEFNRWEAGQVLARKLMLNLVDDLQRNKPLVLNSNFVQGFKRILCDSSLDKEFVAKAITLPGEGEIMDMMGVADPDAVHTVRTFIRKQLASELRSEFLSTVENNRSSEEYVFNHSNLARRALKNVALAYLGCLEEKEFTDLVLHEYKTATNMTEQFAALAAIAQNPGKTRDDVLDDFYGKWQHDFLVVNKWFALQAMSDIPGNVENVRKLLSHPAFDLRNPNKVYSLIGGFCGSPVNFHAKDGSGYKFLGEIVLQLDKLNPQVASRMVSAFSRWRRYDEDRQKLAKAQLERIMSTNGLSENVFEIASKSLAA

SEQ ID NO: 17741 - protein, 296 aa, Glycine max
MLNLVDDLQRNKPLVLNSNFVQGFKRILCDSSLDKEFVAKAITLPGEGEIMDMMGVADPDAVHTVRTFIRKQLASELRSEFLSTVENNRSSEEYVFNHSNLARRALKNVALAYLGCLEEKEFTDLVLHEYKTATNMTEQFAALAAIAQNPGKTRDDVLDDFYGKWQHDFLVVNKWFALQAMSDIPGNVENVRKLLSHPAFDLRNPNKVYSLIGGFCGSPVNFHAKDGSGYKFLGEIVLQLDKLNPQVASRMVSAFSRWRRYDEDRQKLAKAQLERIMSTNGLSENVFEIASKSLAA

SEQ ID NO: 17742 - protein, 246 aa, Glycine max
MDMMGVADPDAVHTVRTFIRKQLASELRSEFLSTVENNRSSEEYVFNHSNLARRALKNVALAYLGCLEEKEFTDLVLHEYKTATNMTEQFAALAAIAQNPGKTRDDVLDDFYGKWQHDFLVVNKWFALQAMSDIPGNVENVRKLLSHPAFDLRNPNKVYSLIGGFCGSPVNFHAKDGSGYKFLGEIVLQLDKLNPQVASRMVSAFSRWRRYDEDRQKLAKAQLERIMSTNGLSENVFEIASKSLAA

SEQ ID NO: 17743 - DNA, 1283 bp, Glycine max
ttctttttgggacccattttcaggatgcttgggatgatcttgtccaagaggtaattatcataatcacaaacatttttatgcatgcttgcttgtgtcaacagtggcacatagcctctattttccattggctgaccaaaaagaagtttgagacactgtagagattaaaagacaaatatgctcaagtgttgtaggcatcaccacaacttatcatgagttttctctggccacgtttaaaataaattggtcccagccgttgattagccacccctatattgatctagccgtccatttcttgatcatcatgtcggcataaataataattaattgccggctggcagtgtcttgtggtccataatgttgaccaacaattaggctttggatatcttaagagcttagaacaaacactgaatcacatcgatcatcatgtcttaaagctatagacaaaatggatatgcattcatctgatcaattttcatacaatgatcattgccaatgggacccaacaatgtctttgaacagggtcaaaggcatctacttataagaatcatcctctaccatgttacgcatccaaattccaaaactgtaatcaatgaagtacagaatataacgacacctacatagtaggatgtgttgagtactttagaacattttcagttacacaaacatatgtcatggcaaatctcacttaccaacttaacactatagatataaggataatttcacattatagttgagtatatatacattattaatagaatggtagatctaaattgtcatatattactgatgtgagaatttatttttttatgttaccttttcaaaagcagaagtcttgatttagtttaaagaccaattcactatctatccttttatgcattgatatgaacatgttattttatagtaaatcatattcttgatttcagggattgattagccaagaaaaacgagacgattttaacattccagtctatgcagcaagcctgcaagacttcaaggaggtggttgaggctaatggttcatttgccatagacaagcttgaggtattcaaaggaggaagtccacttgtggtgaaccaaccagatgatgcaagtgaagtaggaagggctctagccaacagctgcaggactgtgtctggagtccttgttgatgcccacattggtgacaaactaagtgaggaactttttctaagagtggaacgtcgagccactagtcatgccaaagaactattagagcaactacagttctttcacatagttgcatcactttcttttgctcaaatgatt

SEQ ID NO: 17744 - protein, 51 aa, Glycine max
LFGTHFQDAWDDLVQEVIIIITNIFMHACLCQQWHIASIFHWLTKKKFETL

SEQ ID NO: 17745 - protein, 42 aa, Glycine max
MGPNNVFEQGQRHLLIRIILYHVTHPNSKTVINEVQNITTPT

SEQ ID NO: 17746 - protein, 31 aa, Glycine max
MDMHSSDQFSYNDHCQWDPTMSLNRVKGIYL

SEQ ID NO: 17747 - DNA, 1965 bp, Glycine max
ggagtcaaatattcctcaaaacaacgcattcctttcactgccccttcccaattcccttccctgattgtcaattggatcttcatgagttcaacaaccactggagcatacttcgtttcctgtgttgcgggaaacaagaacaacgacctcttctgctgggttttgctctgcttgctgccaaaatttttgggaactccatttgcctacatcaactttctcttgattcaggccattgacaggaatccatcggcggtggaggttttgggaaacttcggggtggttaacctatagtctttattagtttggtcgtcagcagcagcatatttagatcccttattgttgagtggtgtgagaaatggtgtcctctcagttttctgcttttactttggctggctacaaaccgtctcagactcagttactctttcctgcaaagcttgttgatactgtgaacacagagcatattgagctggatttctctgatgtctttggtcctgttacgttagatttgaataacattgattccactaccagtgagcctatggaagaagtgaacgagctggtttatgatgacccaccagtgatttacactcgctcacattctctggttggcccttcaacttgtgttagtcaatcacttaagcttggcaaactcaccatacatgagactgaggattcattggaactagtggagcatgtcaatggagaggccattaaagacatcaaagaatcttcctttgttgaggaatcattgaaagatgaagatgggaatctcatgaagatccacagagttagcattgacgatttcgagattttgaaggttgttgggcagggtgcatttgcaaaagtttatcaggtgaggaaaaagggtacttctgaaatatatgctatgaaggttatgcggaaggacaagattatggagaagaaccatgctgaatacatgaaagctgagagggatatttggacaaagatagaacacccatttgttgttcaactcagatactcttttcagacaaaatacagactgtatcttgtgctggattttgtaaatgggggccatctctttttccagctttatcaccaaggccttttcagagaggatctagcacgcatatatacagctgagattgtttctgcagtttcccatctccatgcaaatggaataatgcatagggatctaaagcctgaaaatatcctactggatgctgatggccatgttatgttgactgattttggcttagctaaacaatttgaagagagtacaagatcaaattcgatgtgtggtacattagagtacatggcacctgaaattattcttggcaaaggccatgataaggctgctgattggtggagtgtaggtgttctactgtttgagatgcttactggaaagccgcctttctgtggtggaaaccgtgacaaaattcagcagaagatagttaaagacaagattaagctgccagcatttttgtcaagtgaagcacattcactgttgaaagggctgctacagaaggaacaagctaggcgcttaggttgtggacctcggggtgttgaggaaattaaaagccacaagtggtttaaaccaatcaattggagaaagttggaagcaagagaaatccaaccaagctttaggccagaagtagctggtgtgcactgtgttgccaactttgagaagcgctggactgatatgcctgttgtggactcaccagctgccagcccaaatggtggaaacccctttaaggatttctcttatgtgaggcctgcagcctcttttcttcaaaggaataaccctgcttactagccagcttgaaatggcgttggcttaagatgccaacatgaaacattttcatgtgcccttgacttgtgtgaactttgcaggttgtgggttcattcacttattatgtgcaccttgctgcggctctctgcaaatgtattgagctgtcatgtatgcagaaaataaattactttatttac

SEQ ID NO: 17748 - protein, 479 aa, Glycine max
MVSSQFSAFTLAGYKPSQTQLLFPAKLVDTVNTEHIELDFSDVFGPVTLDLNNIDSTTSEPMEEVNELVYDDPPVIYTRSHSLVGPSTCVSQSLKLGKLTIHETEDSLELVEHVNGEAIKDIKESSFVEESLKDEDGNLMKIHRVSIDDFEILKVVGQGAFAKVYQVRKKGTSEIYAMKVMRKDKIMEKNHAEYMKAERDIWTKIEHPFVVQLRYSFQTKYRLYLVLDFVNGGHLFFQLYHQGLFREDLARIYTAEIVSAVSHLHANGIMHRDLKPENILLDADGHVMLTDFGLAKQFEESTRSNSMCGTLEYMAPEIILGKGHDKAADWWSVGVLLFEMLTGKPPFCGGNRDKIQQKIVKDKIKLPAFLSSEAHSLLKGLLQKEQARRLGCGPRGVEEIKSHKWFKPINWRKLEAREIQPSFRPEVAGVHCVANFEKRWTDMPVVDSPAASPNGGNPFKDFSYVRPAASFLQRNNPAY

SEQ ID NO: 17749 - protein, 418 aa, Glycine max
MEEVNELVYDDPPVIYTRSHSLVGPSTCVSQSLKLGKLTIHETEDSLELVEHVNGEAIKDIKESSFVEESLKDEDGNLMKIHRVSIDDFEILKVVGQGAFAKVYQVRKKGTSEIYAMKVMRKDKIMEKNHAEYMKAERDIWTKIEHPFVVQLRYSFQTKYRLYLVLDFVNGGHLFFQLYHQGLFREDLARIYTAEIVSAVSHLHANGIMHRDLKPENILLDADGHVMLTDFGLAKQFEESTRSNSMCGTLEYMAPEIILGKGHDKAADWWSVGVLLFEMLTGKPPFCGGNRDKIQQKIVKDKIKLPAFLSSEAHSLLKGLLQKEQARRLGCGPRGVEEIKSHKWFKPINWRKLEAREIQPSFRPEVAGVHCVANFEKRWTDMPVVDSPAASPNGGNPFKDFSYVRPAASFLQRNNPAY

SEQ ID NO: 17750 - protein, 340 aa, Glycine max
MKIHRVSIDDFEILKVVGQGAFAKVYQVRKKGTSEIYAMKVMRKDKIMEKNHAEYMKAERDIWTKIEHPFVVQLRYSFQTKYRLYLVLDFVNGGHLFFQLYHQGLFREDLARIYTAEIVSAVSHLHANGIMHRDLKPENILLDADGHVMLTDFGLAKQFEESTRSNSMCGTLEYMAPEIILGKGHDKAADWWSVGVLLFEMLTGKPPFCGGNRDKIQQKIVKDKIKLPAFLSSEAHSLLKGLLQKEQARRLGCGPRGVEEIKSHKWFKPINWRKLEAREIQPSFRPEVAGVHCVANFEKRWTDMPVVDSPAASPNGGNPFKDFSYVRPAASFLQRNNPAY

SEQ ID NO: 17751 - DNA, 1398 bp, Glycine max
agtcattctcatctgttgatgaaacagcttttgattctcagaaaagttttggatcgatagaggaaatgatattttccatgtctgggtctcgtaattcatcaatattggacccaatgttatatactaaggctatgcatgctagagtttcctttggagtagatggtccccttggcaaggtaaaatattctgtgacttgttactacgccaagcgatttgaagccttaagaagggtctgttgtccttcagagctcgactatataaggtctctgagtcgctgtaagaaatggggagctcaaggtgggaaaagtaatgtattctttgcaaaaactttggatgatcgatttatcatcaaacaagttaccaaaacagagcttgagtcattcattaaatttggtcctgaatacttcaagtacctttctgaatccataggcaccggaagtccaacttgcctggcaaagattcttggcatataccaggttacatcaaagcatcttaaaggagggaaggaatcaaggatggatgttttggttatggagaatcttctgtttaggaggactgtgacccgactttatgatcttaaaggatcttccaggtctcggtataatgcagatagtaccgggaaaaacaaagttctactggaccagaacttaattgaagcaatgccaacttctcctattttcgtgggaaacaaagctaaacgattgttagagagagctgtctggaatgacactggttttcttgcttcagttgatgtgatggactattctttactggttggagtggatgaagaaaagcatgagttggttattggaatcattgatttcatgaggcagtatacttgggacaagcatcttgaaacatgggtaaaagcttcaggtatccttggaggaccaaagaacacacctccaacagtaatatctcccaaacaatacaagaaaaggttcaggaaagcaatgaccacttactttctcatgcttccagatcagtggtctcccccttctattattcctagtcattctcagtctgattttggtgaagacagcacacaacctaggactccagctgaatgattctttgttttgtgtttctgtaaattttactttcaatttggggaattaactcccccaaattttatattaacttcttttttgtttttccctcttaaatgatataggaattcttttggttcatttgtaattttgtcaactagatattatcaattatttgttagaagatgccaaagaagggctgctagcactttagcagccaaggatgtttgtctggggtaaaagtatttgatgacctctggatgaaatctttgtacaaaaacctacagtaacgttctaggaacacgttctatacatgtatatgacttaaatttctcaaatttctttgccg

SEQ ID NO: 17752 - protein, 355 aa, Glycine max
SFSSVDETAFDSQKSFGSIEEMIFSMSGSRNSSILDPMLYTKAMHARVSFGVDGPLGKVKYSVTCYYAKRFEALRRVCCPSELDYIRSLSRCKKWGAQGGKSNVFFAKTLDDRFIIKQVTKTELESFIKFGPEYFKYLSESIGTGSPTCLAKILGIYQVTSKHLKGGKESRMDVLVMENLLFRRTVTRLYDLKGSSRSRYNADSTGKNKVLLDQNLIEAMPTSPIFVGNKAKRLLERAVWNDTGFLASVDVMDYSLLVGVDEEKHELVIGIIDFMRQYTWDKHLETWVKASGILGGPKNTPPTVISPKQYKKRFRKAMTTYFLMLPDQWSPPSIIPSHSQSDFGEDSTQPRTPAE

SEQ ID NO: 17753 - protein, 334 aa, Glycine max
MIFSMSGSRNSSILDPMLYTKAMHARVSFGVDGPLGKVKYSVTCYYAKRFEALRRVCCPSELDYIRSLSRCKKWGAQGGKSNVFFAKTLDDRFIIKQVTKTELESFIKFGPEYFKYLSESIGTGSPTCLAKILGIYQVTSKHLKGGKESRMDVLVMENLLFRRTVTRLYDLKGSSRSRYNADSTGKNKVLLDQNLIEAMPTSPIFVGNKAKRLLERAVWNDTGFLASVDVMDYSLLVGVDEEKHELVIGIIDFMRQYTWDKHLETWVKASGILGGPKNTPPTVISPKQYKKRFRKAMTTYFLMLPDQWSPPSIIPSHSQSDFGEDSTQPRTPAE

SEQ ID NO: 17754 - protein, 330 aa, Glycine max
MSGSRNSSILDPMLYTKAMHARVSFGVDGPLGKVKYSVTCYYAKRFEALRRVCCPSELDYIRSLSRCKKWGAQGGKSNVFFAKTLDDRFIIKQVTKTELESFIKFGPEYFKYLSESIGTGSPTCLAKILGIYQVTSKHLKGGKESRMDVLVMENLLFRRTVTRLYDLKGSSRSRYNADSTGKNKVLLDQNLIEAMPTSPIFVGNKAKRLLERAVWNDTGFLASVDVMDYSLLVGVDEEKHELVIGIIDFMRQYTWDKHLETWVKASGILGGPKNTPPTVISPKQYKKRFRKAMTTYFLMLPDQWSPPSIIPSHSQSDFGEDSTQPRTPAE

SEQ ID NO: 17755 - DNA, 1424 bp, Glycine max
gatctgttcctcagcttcagaggctctgacacacgccagggtttcgccgccaatctctacaaagctcttgctaacaggggaatctacacttccatcgacgatgaggagcttcagagtggagaggagataacaccgacgcttctgaaagcaattgaagagtccaggatttccatggccgtgctctctgtaaactatgcttcttcctcgttttgtttggatgaacttgcaaccatctttgactgcgccgagaggaaagcactgttggttttttataaagtggaaccttctcacgtgcgacaccggaaagttagttatggagaagcgttggctaagaaggaagaaaggttcaagcataacatggacaagttgccaaaatggaagatgcctttttatcaagcagctaacttgtctggctatcatttcaaagatggatatgcacatgaatatgagttcattgggaggatggttgagcaggtctgctgcaagattaatcccacttgtttacatgttgcggattatttggttggactagagtcacaagtgtcaaaagtaatgaagcttttggacgttggatctgatgatggtgtccaccacatgacagggatccatggtatgggtggaatagggaaaacaacacttgctctgtctgtaaattaattgctaactgttttgatagttcatgttttcttcaaaatgtaagaaaaatcaaacaaacatgagctacaacatttccaaagcatccttctttcatatatacttggaaagaagaaaattaagttagcaagtgagcaacaaggactttcaatgatacaacatagactccatcgaaagaaggttctcttgattctagatgatgttgacaagctcgagcaattacttccattggctttggaagtaataggttccaacttgtttggaaaaaatacaagaagaaccaaaatctgtcatcaaacaatataaacaaattcttactattcaaatcctagagatacttaaactaagctttgatgcattggaagaagaagagaagagtgcttttcttgacattgcttgttgcttcaaagaatatggacttatattgcttttcttgacattgcttgttgcttcaaaggatatgcattgatagtgctttgcttgacatttgtgcgttgataaatgttgaagatatacttggtgctcattatggtgacaacgtgaaatagtattgacatattggctgaaaaaatctctcataaaggttagagatggtagaggtacattgcacgactttaggacatggttacaaaaattgtcactcaagaatcaccaagagaaccagggaagctataattcaagttttggaagacaacaccttgagtgagactcatgaatgatttggtttcttatcttgatttatctttttttgactatcatatgttcacatc

SEQ ID NO: 17756 - protein, 218 aa, Glycine max
DLFLSFRGSDTRQGFAANLYKALANRGIYTSIDDEELQSGEEITPTLLKAIEESRISMAVLSVNYASSSFCLDELATIFDCAERKALLVFYKVEPSHVRHRKVSYGEALAKKEERFKHNMDKLPKWKMPFYQAANLSGYHFKDGYAHEYEFIGRMVEQVCCKINPTCLHVADYLVGLESQVSKVMKLLDVGSDDGVHHMTGIHGMGGIGKTTLALSVN

SEQ ID NO: 17757 - protein, 161 aa, Glycine max
MAVLSVNYASSSFCLDELATIFDCAERKALLVFYKVEPSHVRHRKVSYGEALAKKEERFKHNMDKLPKWKMPFYQAANLSGYHFKDGYAHEYEFIGRMVEQVCCKINPTCLHVADYLVGLESQVSKVMKLLDVGSDDGVHHMTGIHGMGGIGKTTLALSVN

SEQ ID NO: 17758 - protein, 112 aa, Glycine max
MLLPRFVWMNLQPSLTAPRGKHCWFFIKWNLLTCDTGKLVMEKRWLRRKKGSSITWTSCQNGRCLFIKQLTCLAIISKMDMHMNMSSLGGWLSRSAARLIPLVYMLRIIWLD

SEQ ID NO: 17759 - DNA, 1602 bp, Glycine max
accaaacctggttcatgtttaagacacggacatgtcacgtaaaccaagccaactattactcgcagatgagacaagaaacaattaaaaaaatcaattaaaatataaaaccagtgaagttgccacataactctttgattcccattactcatttccaccatttcaccttctcaatctgtttctctgctttactaatttgtcccaaatcagaaccagattgagcttctgcacaaccagaccagagattcaacgcagaaactatgcttatccctggtccataggatctgatttggttcataagagagtagtacacgtttcattgctcgaaatagagttgaaaaatctggagtttccatgtctgagaaaccatcttcatcgttgacatctaccgtagctgctcgagaagttgatcccttgttgcaggatttgaatgaaaaaaagcagagctttaggcgcaacgtggtgtcgttagcggtggagttgaaggagctacgtagtcgcctagcttcgcaggaacaatcgtatgctaaggaaactcaaaccagacaggaagcagagacaaatgccaagaacatggaattgcaaattggaaggttgcagaagaatttggaagaaagaaatgagcagcttcaggcgtcagcctcctctgctgagaagtatctgaaggagttggatgatcttagaacacagcttgtaacaacaagagcaactgctgatgcaagtgctgcatcagctcaatcagctcagctccaatgtttagaacttgtaaaagaattaaatgagaaaaatggttcactaagagagcatgaggatcgtgtcctgaggctaggggagcaactagacaatttacagaaggatcttcaggcaagggaatcttcacagaaacaattgaaagatgaagttttgaggattgagcacgatattatggaggctcttgcaaaagccggagagaacaagaattgtgaactgcggaaaatattggatgaggtttctcctaaaaattttgagaagatgaataagattctaggtgttaaggatgatgaaatagcaaaacttaaggatgaaattaagatcatgtctgctcactggaagctcaagactaaggaattagagtcacagttggagaaacagcggcgtgctgatcaagagctgaagaagaaagtgttgaagttagaattctgtctgcaggaagctcgttctcagacacgaaaactgcaaaggatgggtgaacgacgggacaaagctatcaaagaactgagagatcaattagctgcaaagcaacaaagagaagttgcagccgcagataagctaaaccagaatttctgggacacttctggattcaaaatggtggtctcgatgtccatgttgatcttggtggtattttcaaggcggtgaaaccattcctatatccaaaacaattcttgtatatagacccatatataccttcaaattctaggagtctagacaagttgtagaagccattttgcgcggcagtttttatagataatctactagctttagcttgtgcaaaatgtacgcgtagcaccaggatcagaaggcatttttgcggtgatctataaaattacattgcgtagttgcatttac

SEQ ID NO: 17760 - protein, 346 aa, Glycine max
MSEKPSSSLTSTVAAREVDPLLQDLNEKKQSFRRNVVSLAVELKELRSRLASQEQSYAKETQTRQEAETNAKNMELQIGRLQKNLEERNEQLQASASSAEKYLKELDDLRTQLVTTRATADASAASAQSAQLQCLELVKELNEKNGSLREHEDRVLRLGEQLDNLQKDLQARESSQKQLKDEVLRIEHDIMEALAKAGENKNCELRKILDEVSPKNFEKMNKILGVKDDEIAKLKDEIKIMSAHWKLKTKELESQLEKQRRADQELKKKVLKLEFCLQEARSQTRKLQRMGERRDKAIKELRDQLAAKQQREVAAADKLNQNFWDTSGFKMVVSMSMLILVVFSRR

SEQ ID NO: 17761 - protein, 273 aa, Glycine max
MELQIGRLQKNLEERNEQLQASASSAEKYLKELDDLRTQLVTTRATADASAASAQSAQLQCLELVKELNEKNGSLREHEDRVLRLGEQLDNLQKDLQARESSQKQLKDEVLRIEHDIMEALAKAGENKNCELRKILDEVSPKNFEKMNKILGVKDDEIAKLKDEIKIMSAHWKLKTKELESQLEKQRRADQELKKKVLKLEFCLQEARSQTRKLQRMGERRDKAIKELRDQLAAKQQREVAAADKLNQNFWDTSGFKMVVSMSMLILVVFSRR

SEQ ID NO: 17762 - DNA, 1096 bp, Glycine max
ttggaattcataactgatgaggaacaagtgattactggtctagaccgagctgtggcaacaatgaagaagggtgagagggcgataattagcatacatcctgattatgcatttggagatgttgaagtgagacgagatattgctattgtgccaccgggctcaaatgtagtctatgacattgagatgatggattttattaaggagaaagcaccatgggaattgaatagtaaggagaaaattgaggtggctgggaggatgaaagaagaaggaaatgtattatttaaagttggcaattatcagcgagcaggaaagaaatatgaaaaggctgctgattttgttgatgaagatggatcctttgggtttgatgagcaaaagcaagctcagacactgaaagtgtcatgctggttgaatagtgcagcttgtagccttaaacttaatgactttcctggagcaatcaagctatgttcacaggtgcttgatgttgaattttgcaatgtgaaagctttttacagacgagcacaagcatatatagaaactggagattatcttttagcagatgtagacatcaagaaagctcttgtggtggacccacaaaacagagatgttaaggtaattcagaagaaattgaagcaacttcaagctgacagtgacaaaaaagatgctaagctatatgaaaacatgcttgcacgtaaaacaaaggacccatctatggctataaagagattgaaggtagagaaagatcagggggaaaatgaagaggttgcaagaatggaaattgacgaagttgctgatagcgcagtgattcaatagttgattcttgttgaacatgtatagattataatataaagcttctattaacaaaatatgtaaactagtagatggaagttgcaaattggattcggatgaaaacctacatgttccaatagagtacatttatgtattccatcaacttgtaatcttgccacatttcagatgaacattatacatactacattcgcatgcaaatcttgtttaattgttagctctttacatttattttggatagttatattgtacctaatgccattaggtggctaacaaaagaaagagtattgttgtg

SEQ ID NO: 17763 - protein, 268 aa, Glycine max
LEFITDEEQVITGLDRAVATMKKGERAIISIHPDYAFGDVEVRRDIAIVPPGSNVVYDIEMMDFIKEKAPWELNSKEKIEVAGRMKEEGNVLFKVGNYQRAGKKYEKAADFVDEDGSFGFDEQKQAQTLKVSCWLNSAACSLKLNDFPGAIKLCSQVLDVEFCNVKAFYRRAQAYIETGDYLLADVDIKKALVVDPQNRDVKVIQKKLKQLQADSDKKDAKLYENMLARKTKDPSMAIKRLKVEKDQGENEEVARMEIDEVADSAVIQ

SEQ ID NO: 17764 - protein, 248 aa, Glycine max
MKKGERAIISIHPDYAFGDVEVRRDIAIVPPGSNVVYDIEMMDFIKEKAPWELNSKEKIEVAGRMKEEGNVLFKVGNYQRAGKKYEKAADFVDEDGSFGFDEQKQAQTLKVSCWLNSAACSLKLNDFPGAIKLCSQVLDVEFCNVKAFYRRAQAYIETGDYLLADVDIKKALVVDPQNRDVKVIQKKLKQLQADSDKKDAKLYENMLARKTKDPSMAIKRLKVEKDQGENEEVARMEIDEVADSAVIQ

SEQ ID NO: 17765 - protein, 208 aa, Glycine max
MMDFIKEKAPWELNSKEKIEVAGRMKEEGNVLFKVGNYQRAGKKYEKAADFVDEDGSFGFDEQKQAQTLKVSCWLNSAACSLKLNDFPGAIKLCSQVLDVEFCNVKAFYRRAQAYIETGDYLLADVDIKKALVVDPQNRDVKVIQKKLKQLQADSDKKDAKLYENMLARKTKDPSMAIKRLKVEKDQGENEEVARMEIDEVADSAVIQ

SEQ ID NO: 17766 - DNA, 1227 bp, Glycine max
agctttaagcttttaacagtcaaaacttactacaacccagatcaattgcagggactaatatggggataacaaaaattttaatcagttataatttttctgttcttgaaaggtaaagtaggacagtggtgtgaaattggtggaaagaaaaaacatcagtgatcttgagtaactaacaatccatccgtgtaaaacgtgattggatttgggtcagtaatttaatgtacgaattacgaggtggcagcgactttaagtgttgaatggtgtgcaacatagaatcgcattggcgcgaacacgatgatgaggtcaaagatagtgttgtttggagactccatcacggagcaatcgatccgagagaatggatggggtgttcctcttgccaatgcctattctcgcagggctgatgtacttgttcgtggttatggtggatacaacactaggtgggctatgttcttactgggccatctcttccctctggactcaactaaaccacctactgctaccacaattttctttggcgctaatgatgcagctttgttaggaagaaccagtgaaaggcaacatgtacctattgaagaattcaaagagaacctcagaaaatttgttcgacacttaaaggattgctcaccaactatggtaattgtgcttattactccacctccacttagtgaggaaggacgcctggcatacgtaagatccgtatatggtgagaatgctactaaaatacctgaaagaacaaatgaagtaactggtcaatatgcaaatgcctgtgttgaggtagcaaaggaaatgggcgtgtggtatatcaatctatggtccaaaatgcaagaaaccgatggctggcaaacaaaatttttgtgggatggattgcacctgacaacagaaggaaatgcagtagtctacgaagaagtgataaatgtgttcaatgaagcagggctttctgctgataacatgccaatggatttccctcaccactcaaaaattgattccaaacatcctgagagagctttccagcagaatgtttgtgatatcccattgtgacactgctttggtctagtctagcaattttataccacgttctatttgatgatctagattttcttccagaactatattcgagtttaatgctttgatgaaaccacggtgaagaatattttttgtaatgacgtctgattcatgtagttcatctcatataataatggaataaaactattgttgttgtaatgcttt

SEQ ID NO: 17767 - protein, 247 aa, Glycine max
MMRSKIVLFGDSITEQSIRENGWGVPLANAYSRRADVLVRGYGGYNTRWAMFLLGHLFPLDSTKPPTATTIFFGANDAALLGRTSERQHVPIEEFKENLRKFVRHLKDCSPTMVIVLITPPPLSEEGRLAYVRSVYGENATKIPERTNEVTGQYANACVEVAKEMGVWYINLWSKMQETDGWQTKFLWDGLHLTTEGNAVVYEEVINVFNEAGLSADNMPMDFPHHSKIDSKHPERAFQQNVCDIPL

SEQ ID NO: 17768 - protein, 246 aa, Glycine max
MRSKIVLFGDSITEQSIRENGWGVPLANAYSRRADVLVRGYGGYNTRWAMFLLGHLFPLDSTKPPTATTIFFGANDAALLGRTSERQHVPIEEFKENLRKFVRHLKDCSPTMVIVLITPPPLSEEGRLAYVRSVYGENATKIPERTNEVTGQYANACVEVAKEMGVWYINLWSKMQETDGWQTKFLWDGLHLTTEGNAVVYEEVINVFNEAGLSADNMPMDFPHHSKIDSKHPERAFQQNVCDIPL

SEQ ID NO: 17769 - protein, 197 aa, Glycine max
MFLLGHLFPLDSTKPPTATTIFFGANDAALLGRTSERQHVPIEEFKENLRKFVRHLKDCSPTMVIVLITPPPLSEEGRLAYVRSVYGENATKIPERTNEVTGQYANACVEVAKEMGVWYINLWSKMQETDGWQTKFLWDGLHLTTEGNAVVYEEVINVFNEAGLSADNMPMDFPHHSKIDSKHPERAFQQNVCDIPL

SEQ ID NO: 17770 - DNA, 1249 bp, Glycine max
actctagaacatggcatgcaccccccgatttctccaaaaccagaatggcgtgctttgatggatcagatggctgtcattgctactgaggaataccgttccattgtattcaaggaaccacgctttgttgagtatttccgcctggctacaccggagttggagtatggaaggatgaacattggaagtcgaccagcaaagagaaagcctagtggaggcattgaaacactgcgtgcaataccttggatttttgcatggactcagacaaggtttcatcttccagtgtggctaggctttggagcagcatttaaagaagtcattgagaaaaatgttaacaatctcaatatgctgcaagagatgtacaatcaatggcctttctttagggtcacacttgatttggtggaaatggtgtttgccaaaggagatccgaaaattgctggtctgaatgataggctccttgtttcaaaggatctgtggctgtttggggatcaattgaggaacaaatatgaagaaactaagaaactcctacttcaggtggctggacacaaggaaattcttgaaggggacccttacttgaagcaaagactcaggcttcgtcatgctcccattaccaccctcaatattgtccaagcttacacattgaaacgtatccgtgatcctaactacaatgtgaaggtgcgcccccgcatatcaaaggaatctgcagaggcaagcaaatcagctgatgaacttataaaactgaacccaacaagtgaatatgctcctggtttagaagacaccctcattctcactatgaagggtattgctgctggcatgcagaacactggttaagtttgtttgagtcatttattacttgtattttccttttttttattactatcaagatagcatgaatatggttgcagcactgaaagttagtgctctagttttgttctcagatacactttgttttgttttgttttgttattatgctacaccacctttctgcactgaaagagtcagctaccacacaaatgaggcatgccattgatgtgttatgtttcaagacggaaattatgcttagtactgctactactaccctcttctgtacttctttgtatcttcgttccagaaggtcttgttttgttttgtttgccatcattaaatcaggggagtgtttagtactatctctatgtatactaacagagggtttgtactagtctcatgatatgaggggagaaataacaaggaagtaaaagaaattaaatttctttat

SEQ ID NO: 17771 - protein, 274 aa, Glycine max
TLEHGMHPPISPKPEWRALMDQMAVIATEEYRSIVFKEPRFVEYFRLATPELEYGRMNIGSRPAKRKPSGGIETLRAIPWIFAWTQTRFHLPVWLGFGAAFKEVIEKNVNNLNMLQEMYNQWPFFRVTLDLVEMVFAKGDPKIAGLNDRLLVSKDLWLFGDQLRNKYEETKKLLLQVAGHKEILEGDPYLKQRLRLRHAPITTLNIVQAYTLKRIRDPNYNVKVRPRISKESAEASKSADELIKLNPTSEYAPGLEDTLILTMKGIAAGMQNTG

SEQ ID NO: 17772 - protein, 269 aa, Glycine max
MHPPISPKPEWRALMDQMAVIATEEYRSIVFKEPRFVEYFRLATPELEYGRMNIGSRPAKRKPSGGIETLRAIPWIFAWTQTRFHLPVWLGFGAAFKEVIEKNVNNLNMLQEMYNQWPFFRVTLDLVEMVFAKGDPKIAGLNDRLLVSKDLWLFGDQLRNKYEETKKLLLQVAGHKEILEGDPYLKQRLRLRHAPITTLNIVQAYTLKRIRDPNYNVKVRPRISKESAEASKSADELIKLNPTSEYAPGLEDTLILTMKGIAAGMQNTG

SEQ ID NO: 17773 - protein, 255 aa, Glycine max
MDQMAVIATEEYRSIVFKEPRFVEYFRLATPELEYGRMNIGSRPAKRKPSGGIETLRAIPWIFAWTQTRFHLPVWLGFGAAFKEVIEKNVNNLNMLQEMYNQWPFFRVTLDLVEMVFAKGDPKIAGLNDRLLVSKDLWLFGDQLRNKYEETKKLLLQVAGHKEILEGDPYLKQRLRLRHAPITTLNIVQAYTLKRIRDPNYNVKVRPRISKESAEASKSADELIKLNPTSEYAPGLEDTLILTMKGIAAGMQNTG

SEQ ID NO: 17774 - DNA, 1715 bp, Glycine max
actttcctctttctttcccttttcctcgtttccacaaccctcccgaattcttgagacgcttcccgaatcctttcacacacacgttgctgaatctatatatctaaatcccttcacttcccattcctaaatcctcttacaaaaactatacaacgttgcttttgttttgttttgttttgtctctctctaatcattccaatggccaaagaaggacccaactgggacgggttgctcaaatggagcattcctcattccgatgggactcgccccactcgcaatttaagtgaggaggatcggagatggtttatggaagcgatgcagtcacagaccattgatgttgtaaaacgtatgaaagagatcacacttgtgatgcaaactccagaacaagtcttgaaagaccaaggagttacccctgcagacattgaagatatgttggatgagttgcaagagcatgttgagtcaattgacatggccaatgatctccattcaattggtggcttggttcctcttcttggttacctaaagagttctcatgccaatattcgagcaaaggctgctgatgttgtgaccacaatagtccagaataatcctcgaagtcagcaacttgttatggaagcaaatggctttgaacctcttatttctaatttcagttcagatcctgatgtgactgttagaactaaagcactgggtgcaatatcttcactaatccggcacaacaaacaaggcattactgtatttcgtttggcaaatgggtatgctgctttgaaagatgcactagcctctgaaaatgtgagatttcaaaggaaagctctcaacttgacccattacctgttgcatgagaataattcagactgcaacatcgtgaatgagcttgggtttcctcgactgttgatgcaccttgcctcaagtgaagattcagatgtcagagaagctgcccttcggggccttcttgagcttgcttgcaatactcaagatggcaaggatggcaatgaggaagacagtgagaagatgaagcaacttcttcaagaacgaataaacaatatcagtttaatgtcagctgaggaccttggtgtagtcagggaggagaggcaacttgtggactccctgtggagcacttgcttcaacgagccatcttctcttcgagagaaagggtcttcttgtgcttccaggtgaagatgcaccccctccagatgttgctagccaatattttgaggcctcctctaagatattcgagtgtgaatccatcttccaagaaagactcaaacaatgaaaagaaagagatccctttgcttttagggtcagggccttctcttgcagacactaacaaccaaggttcaaatagagaaaatgctaatagctgaaagcttggatgctttctgctctgttttttttttgccgtgctttctttctatcttatcatacaagtaatttcatataggctctttttttcccctttcttttctcaccttagattggtcttccattgtatttcaagaatgatctcatggtatgtgacactataactagccttccattgcagcggtgaatgccttcaattttttgcacttgatatttttaaatacttgtttagatgttacagtcccactcttacatgtataaaaggatctacttgtccacattatccttcaattttgggtttgggcagtgtgtttctagtgaataaaaagagagaatgatagttatgatagttatgatag

SEQ ID NO: 17775 - protein, 324 aa, Glycine max
MAKEGPNWDGLLKWSIPHSDGTRPTRNLSEEDRRWFMEAMQSQTIDVVKRMKEITLVMQTPEQVLKDQGVTPADIEDMLDELQEHVESIDMANDLHSIGGLVPLLGYLKSSHANIRAKAADVVTTIVQNNPRSQQLVMEANGFEPLISNFSSDPDVTVRTKALGAISSLIRHNKQGITVFRLANGYAALKDALASENVRFQRKALNLTHYLLHENNSDCNIVNELGFPRLLMHLASSEDSDVREAALRGLLELACNTQDGKDGNEEDSEKMKQLLQERINNISLMSAEDLGVVREERQLVDSLWSTCFNEPSSLREKGSSCASR

SEQ ID NO: 17776 - protein, 288 aa, Glycine max
MEAMQSQTIDVVKRMKEITLVMQTPEQVLKDQGVTPADIEDMLDELQEHVESIDMANDLHSIGGLVPLLGYLKSSHANIRAKAADVVTTIVQNNPRSQQLVMEANGFEPLISNFSSDPDVTVRTKALGAISSLIRHNKQGITVFRLANGYAALKDALASENVRFQRKALNLTHYLLHENNSDCNIVNELGFPRLLMHLASSEDSDVREAALRGLLELACNTQDGKDGNEEDSEKMKQLLQERINNISLMSAEDLGVVREERQLVDSLWSTCFNEPSSLREKGSSCASR

SEQ ID NO: 17777 - protein, 285 aa, Glycine max
MQSQTIDVVKRMKEITLVMQTPEQVLKDQGVTPADIEDMLDELQEHVESIDMANDLHSIGGLVPLLGYLKSSHANIRAKAADVVTTIVQNNPRSQQLVMEANGFEPLISNFSSDPDVTVRTKALGAISSLIRHNKQGITVFRLANGYAALKDALASENVRFQRKALNLTHYLLHENNSDCNIVNELGFPRLLMHLASSEDSDVREAALRGLLELACNTQDGKDGNEEDSEKMKQLLQERINNISLMSAEDLGVVREERQLVDSLWSTCFNEPSSLREKGSSCASR

SEQ ID NO: 17778 - DNA, 1408 bp, Glycine max
gaaggttaaggttttcacagaattcctctaatggcatccatcgtatccaccaaagccaaccaatttcgctattccacgcgccttctcttctcacaccttcttcgccaaggcagaccctccacgctttcaccacccttctcttctcatcttcaaccactccatcacccttacaaggttcggaatcaaagttatggaaatgggtcgttgaggttgtgtcaaaggtttctatcttcttcttcttctcctcctgctgctaatgttagtggagaaaaaccagcatcagattcagatcactctgcaaaagatggttctggccaagggaaagagtctgggagtggaggagatgagggtcagaaaagtgatgctgggaaatccgttcgtggagggcctgtttcttggttgagctttctcttgctggtgctcactggagctggattggtgttctactatgacagggaaaagaaacgacatattgaagggatacgttctaatacagaggctgttaagcagggaccttctgtaggaacagctgcaattgggggtccatttcaccttgtcaaccatcacggaaaacatgtaactgaaaaggatttcttgggaaagtggactttgttatattttggctttactcactgcccggatatctgtccagaggaactacagaagttagcagctgctgttgataaaataaaggagaaagctggaattgaaactgtaccggtttttatctctgttgatcctgagagggatactgttgaacaagtgggtgaatatgtcaaagaatttcatccaaagttaattggattaactggtagcccggatgagatcaagaatgttgctcgtgcatatcgtgtttattacatgaagacagcagaggaagactcagattatcttgttgatcactccatagttatatacttgatgagtcctgaaatgaaatttgtaaagttttttggcaagaacaatgatgttgattcgcttgccgatggagttattaaagaggtaaagcagtataagaagtaacctgaacaatgctattggtaccctcatttctttagtggaagcgaaattgtcaatgaattctggccttgtggtagtaaactacaacagtatgtctgattatacttctgaaggctagctgttctttaggtgtttctggagattggacagtttcaaaaagcaacttattgtcattgtttcaatgtttagttttgtacttgaaatttttttggtgacatttatttgtgtatttgagatgcaacgacattacaattgtcatgttcaacatatgccttatatcagatatggcatctataataagaaataccatggtttatattgatgagatattaaattacgatcttcaacagggaagagcctacaatttaaaatgaatttgattggtttc

SEQ ID NO: 17779 - protein, 330 aa, Glycine max
MASIVSTKANQFRYSTRLLFSHLLRQGRPSTLSPPFSSHLQPLHHPYKVRNQSYGNGSLRLCQRFLSSSSSPPAANVSGEKPASDSDHSAKDGSGQGKESGSGGDEGQKSDAGKSVRGGPVSWLSFLLLVLTGAGLVFYYDREKKRHIEGIRSNTEAVKQGPSVGTAAIGGPFHLVNHHGKHVTEKDFLGKWTLLYFGFTHCPDICPEELQKLAAAVDKIKEKAGIETVPVFISVDPERDTVEQVGEYVKEFHPKLIGLTGSPDEIKNVARAYRVYYMKTAEEDSDYLVDHSIVIYLMSPEMKFVKFFGKNNDVDSLADGVIKEVKQYKK

SEQ ID NO: 17780 - DNA, 1803 bp, Glycine max
tctctgttcatggctgctctcacttcctttggctcctttcagtttagtcccattttgttttcaaccatgtcgatggctagtaattcatcagggaattctacttttcctaatgatatcaacaaggttacacgttcggactgccagtttaagcttaaggaaactgagagattagaggattctaagagcagcagagagcaaaataacgatgagagagtctcattgctttattcagcatggagtgctgtgttgaatgaacctacaagtggcggtaaagagcacttgcagaaacatggaattagtgggtccagtttgcctcatgccccacatttggaaaactgcaaggtgaaaacacagctatatgactattttgataagcttaaaggaaatgaggttttcccaccatggacaacttggaagggatctttgcagacattccctgtcgctgcaatcaatgagcaaatgcaaaatcttaggcatgatgcagtctctgagggggcttatccaccatggattgcagggtccgatgaagaaaactatcccttgactagaaaagtgcagcgtgacatatggatccatcagcatcctttaaactgtagtagcccggatgtcaagttccttgtcactgactgggagagattacctggatttggtattggggctcagattgctggcatgtgtggacttcttggtattgcaatcaacgaaggaagagtccttgtcactaactattacaacagagctgaacatgggggttgcaaagggtcttcccgttctagttggagttgttacttctttcctgaaacctccctggaatgtcggcggcgtgcatttgaactcatgaaaagtgaagatgcgtggagtaagggaattgtgaccacaaaagaaaattatacaacaaagcatatatgggcaggacctactccaaggaaatggggtcttcagtggaattatttgcaacctactactgatataaatgggactctgttagcttctcatagaaaaatggatatacggtggtggagagcacaggcagtacgctacttaatgaggttcccaactgaatacacatgcaatttaatgaatgaggcccgccatgctagctttggaaaattagctgcagaaatggtccttcaaagtcttgctggggattggccaaaggaaagtagtggcagggcaaggtctaatgatattgatgaatacgtttggtccaatcacaagccacgggtccctaggcctcttctatgtatgcatgtaaggatgggagacaaagcatgcgaaatgaaggtagttggatttgaagaatacatgcagcttgcggataggactcggagacacttccctcaccttaataacatttggctgtcaactgagatgcaggatgtaattgacaagaccagagaatattctcattggaacttttactatacaaaggtaagacgccaagctaagattaacatgtcaatggctgcctacgaagccagtctgggaagggagaccagcacaaattatccacttgttaatttcttgatggctgctgactcagatttttacgttggggcattgggttcttcctggtcctttcttatagatggaatgagaaatactgggggaaaggtaatggctgggtttttgagtgtcaataaagacagattttggtagagagttacacgtttgtaaattaaatcatcagtggctaggctaccatagcaatatgattctctgtatgtataattattgtacatatgcaaaaaacaaaataaaacaacgcaatctcttattgatagagtgatgacgatacaatct

SEQ ID NO: 17781 - protein, 552 aa, Glycine max
SLFMAALTSFGSFQFSPILFSTMSMASNSSGNSTFPNDINKVTRSDCQFKLKETERLEDSKSSREQNNDERVSLLYSAWSAVLNEPTSGGKEHLQKHGISGSSLPHAPHLENCKVKTQLYDYFDKLKGNEVFPPWTTWKGSLQTFPVAAINEQMQNLRHDAVSEGAYPPWIAGSDEENYPLTRKVQRDIWIHQHPLNCSSPDVKFLVTDWERLPGFGIGAQIAGMCGLLGIAINEGRVLVTNYYNRAEHGGCKGSSRSSWSCYFFPETSLECRRRAFELMKSEDAWSKGIVTTKENYTTKHIWAGPTPRKWGLQWNYLQPTTDINGTLLASHRKMDIRWWRAQAVRYLMRFPTEYTCNLMNEARHASFGKLAAEMVLQSLAGDWPKESSGRARSNDIDEYVWSNHKPRVPRPLLCMHVRMGDKACEMKVVGFEEYMQLADRTRRHFPHLNNIWLSTEMQDVIDKTREYSHWNFYYTKVRRQAKINMSMAAYEASLGRETSTNYPLVNFLMAADSDFYVGALGSSWSFLIDGMRNTGGKVMAGFLSVNKDRFW

SEQ ID NO: 17782 - protein, 549 aa, Glycine max
MAALTSFGSFQFSPILFSTMSMASNSSGNSTFPNDINKVTRSDCQFKLKETERLEDSKSSREQNNDERVSLLYSAWSAVLNEPTSGGKEHLQKHGISGSSLPHAPHLENCKVKTQLYDYFDKLKGNEVFPPWTTWKGSLQTFPVAAINEQMQNLRHDAVSEGAYPPWIAGSDEENYPLTRKVQRDIWIHQHPLNCSSPDVKFLVTDWERLPGFGIGAQIAGMCGLLGIAINEGRVLVTNYYNRAEHGGCKGSSRSSWSCYFFPETSLECRRRAFELMKSEDAWSKGIVTTKENYTTKHIWAGPTPRKWGLQWNYLQPTTDINGTLLASHRKMDIRWWRAQAVRYLMRFPTEYTCNLMNEARHASFGKLAAEMVLQSLAGDWPKESSGRARSNDIDEYVWSNHKPRVPRPLLCMHVRMGDKACEMKVVGFEEYMQLADRTRRHFPHLNNIWLSTEMQDVIDKTREYSHWNFYYTKVRRQAKINMSMAAYEASLGRETSTNYPLVNFLMAADSDFYVGALGSSWSFLIDGMRNTGGKVMAGFLSVNKDRFW

SEQ ID NO: 17783 - protein, 530 aa, Glycine max
MSMASNSSGNSTFPNDINKVTRSDCQFKLKETERLEDSKSSREQNNDERVSLLYSAWSAVLNEPTSGGKEHLQKHGISGSSLPHAPHLENCKVKTQLYDYFDKLKGNEVFPPWTTWKGSLQTFPVAAINEQMQNLRHDAVSEGAYPPWIAGSDEENYPLTRKVQRDIWIHQHPLNCSSPDVKFLVTDWERLPGFGIGAQIAGMCGLLGIAINEGRVLVTNYYNRAEHGGCKGSSRSSWSCYFFPETSLECRRRAFELMKSEDAWSKGIVTTKENYTTKHIWAGPTPRKWGLQWNYLQPTTDINGTLLASHRKMDIRWWRAQAVRYLMRFPTEYTCNLMNEARHASFGKLAAEMVLQSLAGDWPKESSGRARSNDIDEYVWSNHKPRVPRPLLCMHVRMGDKACEMKVVGFEEYMQLADRTRRHFPHLNNIWLSTEMQDVIDKTREYSHWNFYYTKVRRQAKINMSMAAYEASLGRETSTNYPLVNFLMAADSDFYVGALGSSWSFLIDGMRNTGGKVMAGFLSVNKDRFW

SEQ ID NO: 17784 - DNA, 1135 bp, Glycine max
ggaaacgcggctttctactgccacgtcttctctcgctccttaaccttaaaccctaaccctctgctcctcgtttccccgtttcggaaacccgaaacgtttcgcctcgcttcacccgtttcgtgcttatcctcctcctcaatggcggtgcctccgtcttcgctggagaagcaattcgatgactttagggttcagctggaagaatctggaaccttgcgcgaacgaattcgaagcgtcgtttcggagattgagtcctccactaggctcatctatgccacacttcttctcgttcaccagtctcgtcccactcccgagcttttagagaaggccaagtctcatgttaatgtgttaaagaagcagtataagcaacttgctgaagttgttggaggatgccctgggcaatactataggtaccatggtgattggaagagtgagacacagtctgtagtttcaatgcttacatttatgcactggcttgaaacaggaagccttctcgagcacaaagaggctgaggaaaaacttgggttgaatagttcagaatttggcctagacgttgaagattacttaataggtgtctgttttatgtctaatgaattgccaaggtatgtggtgaatcaagtgacagctggggactatgattgtccaaggaaggtcttaaagttcttaacagatctccatgctgcattccgcatgcttaatctacgaaatgattttttgcgaaagaagtttgatggcatgaagtatgacttaagaaaagtcgaagaagtttactatgatgttaagattcggggtttgacaccgaatggtgagccagttggagacttggagatcaaggaatcgcaggacaatcttaatcttaagttgtgatacctgtagacccaaagtacatggagctttactagcttcttaacaaactatggaccttaaaaattgataggcttagctttttgttagctgtaacgggagttctatttctaatggttgatgaaagcaagattcatgagtaaggaaatacaattgccagtatgtgctgctgactttcaaccatcgtgagaactaagaaccctgtactcaatgcttgtgggttgaacggggattttcaattcaatccacagcggacaatttgaagtttttcttt

SEQ ID NO: 17785 - protein, 287 aa, Glycine max
GNAAFYCHVFSRSLTLNPNPLLLVSPFRKPETFRLASPVSCLSSSSMAVPPSSLEKQFDDFRVQLEESGTLRERIRSVVSEIESSTRLIYATLLLVHQSRPTPELLEKAKSHVNVLKKQYKQLAEVVGGCPGQYYRYHGDWKSETQSVVSMLTFMHWLETGSLLEHKEAEEKLGLNSSEFGLDVEDYLIGVCFMSNELPRYVVNQVTAGDYDCPRKVLKFLTDLHAAFRMLNLRNDFLRKKFDGMKYDLRKVEEVYYDVKIRGLTPNGEPVGDLEIKESQDNLNLKL

SEQ ID NO: 17786 - protein, 241 aa, Glycine max
MAVPPSSLEKQFDDFRVQLEESGTLRERIRSVVSEIESSTRLIYATLLLVHQSRPTPELLEKAKSHVNVLKKQYKQLAEVVGGCPGQYYRYHGDWKSETQSVVSMLTFMHWLETGSLLEHKEAEEKLGLNSSEFGLDVEDYLIGVCFMSNELPRYVVNQVTAGDYDCPRKVLKFLTDLHAAFRMLNLRNDFLRKKFDGMKYDLRKVEEVYYDVKIRGLTPNGEPVGDLEIKESQDNLNLKL

SEQ ID NO: 17787 - DNA, 1618 bp, Glycine max
acaagaacaagtaccagaacaataggagcatcatggttaggctatggtgctcttctctctcaattacacttttattccaacagctcatcagattgtgcatttcttggagtgtgcaaaccccaacacccccattgccaatcctccctctcccaatatattcccagttgaaatggcaacaaagggagatcataatgtttttccattttggtgtgaacacattcagtgacagagaatggggcactggccaggaaaacccagcaatcttcaatccaacggggctcaacaccacccagtgggccactgtggcagcagatgcaggagtttcattgatgatattaactgcaaaacaccatgatggcttctgcctctggccttccaagtacactgaccattctgtcattagcagcccctggcaaggtggcaagggtgatgtggttcaagactttgtcaatgcagccactgcacaaggaattgatgtaggggtctacctttcaccttgggatagacatgaccctagatatggcaatgatttgctctacaaccaatactacttggctcaactacaagagttgctcaagaaatatccaaatgttagagagatttggttcgatggagcaaagggtgccaatgcaaaaaatatgacgtattacttttcagattggttttccatggtgaaggagctgcagagtttcatcaacatcttctctgatgcaggtcctgatgttaggtgggtgggagatgaaacaggttctgcagggtatacatgttggtctaccattaatcgaacctctctatccattggaagtccagacatcattcagtatataaacactggtgatccaaaagggacagattggctaccggcggaatgtgatgtatccattcgaaaaggatggttttggcacaaatcagaatcaccaaaaaagctaagcgagctacttgacatttattacaattcggttgggagaaattgtgtgttacttctcaatgtgcctcctaatacaagtggccttataactgaagttgatgccaatagattgaaagagtttagaagtgcaatcaagacaattttccatcagaatcttgctgaggattgttttgttaaagttagtagccaaagagggggtttcgggccagaaaagatgctagacagtgaccacttgtggtcatactgggccccaagggacgatgatgatgaaaaggaccattgggttgaaatttgggccaaggaagggagattgagattcaatgtggttagaatacaagaggcaattggtcttggtcaaaggatcaaacggcatgaaatctatgtggatggtaaattgatcatcaaagccacaacggttggttataagaggcttcataggcttgatgggggtgaagtgcacgctcgtggtgtgaggataagaattagaaaggcaagaggagtgcctcttatctcttctattggcttgcattatgatcctttctggcactcaaagtttactgtatcctgaagagttaagtaagtttaggtaaaggagcataactgcaataaattaagtagagccttaagaagaatattgaaatattgttctatcagtaaagaacaaaaaataaatttactttaaatttctac

SEQ ID NO: 17788 - protein, 497 aa, Glycine max
KNKYQNNRSIMVRLWCSSLSITLLFQQLIRLCISWSVQTPTPPLPILPLPIYSQLKWQQREIIMFFHFGVNTFSDREWGTGQENPAIFNPTGLNTTQWATVAADAGVSLMILTAKHHDGFCLWPSKYTDHSVISSPWQGGKGDVVQDFVNAATAQGIDVGVYLSPWDRHDPRYGNDLLYNQYYLAQLQELLKKYPNVREIWFDGAKGANAKNMTYYFSDWFSMVKELQSFINIFSDAGPDVRWVGDETGSAGYTCWSTINRTSLSIGSPDIIQYINTGDPKGTDWLPAECDVSIRKGWFWHKSESPKKLSELLDIYYNSVGRNCVLLLNVPPNTSGLITEVDANRLKEFRSAIKTIFHQNLAEDCFVKVSSQRGGFGPEKMLDSDHLWSYWAPRDDDDEKDHWVEIWAKEGRLRFNVVRIQEAIGLGQRIKRHEIYVDGKLIIKATTVGYKRLHRLDGGEVHARGVRIRIRKARGVPLISSIGLHYDPFWHSKFTVS

SEQ ID NO: 17789 - protein, 487 aa, Glycine max
MVRLWCSSLSITLLFQQLIRLCISWSVQTPTPPLPILPLPIYSQLKWQQREIIMFFHFGVNTFSDREWGTGQENPAIFNPTGLNTTQWATVAADAGVSLMILTAKHHDGFCLWPSKYTDHSVISSPWQGGKGDVVQDFVNAATAQGIDVGVYLSPWDRHDPRYGNDLLYNQYYLAQLQELLKKYPNVREIWFDGAKGANAKNMTYYFSDWFSMVKELQSFINIFSDAGPDVRWVGDETGSAGYTCWSTINRTSLSIGSPDIIQYINTGDPKGTDWLPAECDVSIRKGWFWHKSESPKKLSELLDIYYNSVGRNCVLLLNVPPNTSGLITEVDANRLKEFRSAIKTIFHQNLAEDCFVKVSSQRGGFGPEKMLDSDHLWSYWAPRDDDDEKDHWVEIWAKEGRLRFNVVRIQEAIGLGQRIKRHEIYVDGKLIIKATTVGYKRLHRLDGGEVHARGVRIRIRKARGVPLISSIGLHYDPFWHSKFTVS

SEQ ID NO: 17790 - protein, 434 aa, Glycine max
MFFHFGVNTFSDREWGTGQENPAIFNPTGLNTTQWATVAADAGVSLMILTAKHHDGFCLWPSKYTDHSVISSPWQGGKGDVVQDFVNAATAQGIDVGVYLSPWDRHDPRYGNDLLYNQYYLAQLQELLKKYPNVREIWFDGAKGANAKNMTYYFSDWFSMVKELQSFINIFSDAGPDVRWVGDETGSAGYTCWSTINRTSLSIGSPDIIQYINTGDPKGTDWLPAECDVSIRKGWFWHKSESPKKLSELLDIYYNSVGRNCVLLLNVPPNTSGLITEVDANRLKEFRSAIKTIFHQNLAEDCFVKVSSQRGGFGPEKMLDSDHLWSYWAPRDDDDEKDHWVEIWAKEGRLRFNVVRIQEAIGLGQRIKRHEIYVDGKLIIKATTVGYKRLHRLDGGEVHARGVRIRIRKARGVPLISSIGLHYDPFWHSKFTVS

SEQ ID NO: 17791 - DNA, 1794 bp, Glycine max
tctctctctttcacacagagagatactttctctctctacaccgcaatggacgccggcgaagccctctccgacgatccgaatcggcccaattccgccgccgacgcagctccggcccccgcgggagcaaggtacaagctcctgtcgccggctaagctcccgatctcccgctccccgtgcgtcacgatttcgccggggctcagtccgacgtcgtttctcgagtcgccggtgctgctctccaacatgaaggtggaaccttcaccgactacagggtcgctttctttgcttcatcaaacagcatatggttccatgacttctgctgcatctgctacatttcctgtaaccactgtgtgcttcaatagcaataccgttgatgagagaaaacctagcttctttgagtttaaaccacacagtggatcaaatatggttcccgcagactttgacaaccatgcaagtgaaaaatctactcaaatagacagtcaaggaaaagctcaagcttttgattcatcagccttagtaaaaaatgagtcagcatccccttcaaatgaattaagtctatcatcgcctgttcaaatggattgctcaggagctagtgcccgtgttgaaggtgatttggatgaattgaaccctaggagcaacataacaactgggcttcaagcatcacaagttgacaatagaggtagtggacttaccgttgcagctgagcgagtatctgatgatggatacaactggagaaaatatgggcaaaaacatgttaaaggaagtgaatttccacgcagttattacaaatgtacacatcctaactgtgaagttaagaaactatttgaacgctcccatgatggacaaatcactgagataatttacaagggaacacatgatcatcctaaacctcaaccaaaccgccgttactctgcaggaactataatgtctgtgcaagaagacagatctgataaagcttctttgactagccgagatgacaaaggatccaatatgtgtggccaggggtctcacctggctgagcccgacggtaaaccagagttattgcctgtagcaacaaatgatggtgatctagatggtttgggggttttgtcaaaccggaataatgatgaggttgatgatgatgatcccttctcaaagcgaagaaaaatggacgttggaattgctgacatcactcctgtagttaagcctatccgggagccacgtgttgttgtacaaactctgagtgaggttgatatcttggatgatggctatcgctggcgcaagtatgggcagaaggtggtgagaggcaatcctaaccctaggagttattacaaatgcacgaacaccggttgccccgttagaaaacacgtggagagggcatctcatgatccaaaagctgtgattaccacgtatgaggggaaacacaatcatgatgtaccaactgcaaggaatagttgccatgacatggcaggaccagcaagtgcaagtggacagacaagagttaggcccgaagaaagtgataccatcagccttgaccttgggatgggaattagcccagctgccgaaaacacatcaaacagtcaagggagaatgatgctttctgaatttggggatagtcaaattcacaccagcaattccaatttcaagttcgttcataccacgaccgcgccggggtactttggtgttctaaataacaactctaacccatatggttctaaagaaaatccaagtgatggtccatctttaaaccattctgcttatccttgccctcagaacatagggagaatactaatgggtccttgaaattgtttgtaaaac

SEQ ID NO: 17792 - protein, 592 aa, Glycine max
SLSFTQRDTFSLYTAMDAGEALSDDPNRPNSAADAAPAPAGARYKLLSPAKLPISRSPCVTISPGLSPTSFLESPVLLSNMKVEPSPTTGSLSLLHQTAYGSMTSAASATFPVTTVCFNSNTVDERKPSFFEFKPHSGSNMVPADFDNHASEKSTQIDSQGKAQAFDSSALVKNESASPSNELSLSSPVQMDCSGASARVEGDLDELNPRSNITTGLQASQVDNRGSGLTVAAERVSDDGYNWRKYGQKHVKGSEFPRSYYKCTHPNCEVKKLFERSHDGQITEIIYKGTHDHPKPQPNRRYSAGTIMSVQEDRSDKASLTSRDDKGSNMCGQGSHLAEPDGKPELLPVATNDGDLDGLGVLSNRNNDEVDDDDPFSKRRKMDVGIADITPVVKPIREPRVVVQTLSEVDILDDGYRWRKYGQKVVRGNPNPRSYYKCTNTGCPVRKHVERASHDPKAVITTYEGKHNHDVPTARNSCHDMAGPASASGQTRVRPEESDTISLDLGMGISPAAENTSNSQGRMMLSEFGDSQIHTSNSNFKFVHTTTAPGYFGVLNNNSNPYGSKENPSDGPSLNHSAYPCPQNIGRILMGP

SEQ ID NO: 17793 - protein, 577 aa, Glycine max
MDAGEALSDDPNRPNSAADAAPAPAGARYKLLSPAKLPISRSPCVTISPGLSPTSFLESPVLLSNMKVEPSPTTGSLSLLHQTAYGSMTSAASATFPVTTVCFNSNTVDERKPSFFEFKPHSGSNMVPADFDNHASEKSTQIDSQGKAQAFDSSALVKNESASPSNELSLSSPVQMDCSGASARVEGDLDELNPRSNITTGLQASQVDNRGSGLTVAAERVSDDGYNWRKYGQKHVKGSEFPRSYYKCTHPNCEVKKLFERSHDGQITEIIYKGTHDHPKPQPNRRYSAGTIMSVQEDRSDKASLTSRDDKGSNMCGQGSHLAEPDGKPELLPVATNDGDLDGLGVLSNRNNDEVDDDDPFSKRRKMDVGIADITPVVKPIREPRVVVQTLSEVDILDDGYRWRKYGQKVVRGNPNPRSYYKCTNTGCPVRKHVERASHDPKAVITTYEGKHNHDVPTARNSCHDMAGPASASGQTRVRPEESDTISLDLGMGISPAAENTSNSQGRMMLSEFGDSQIHTSNSNFKFVHTTTAPGYFGVLNNNSNPYGSKENPSDGPSLNHSAYPCPQNIGRILMGP

SEQ ID NO: 17794 - protein, 512 aa, Glycine max
MKVEPSPTTGSLSLLHQTAYGSMTSAASATFPVTTVCFNSNTVDERKPSFFEFKPHSGSNMVPADFDNHASEKSTQIDSQGKAQAFDSSALVKNESASPSNELSLSSPVQMDCSGASARVEGDLDELNPRSNITTGLQASQVDNRGSGLTVAAERVSDDGYNWRKYGQKHVKGSEFPRSYYKCTHPNCEVKKLFERSHDGQITEIIYKGTHDHPKPQPNRRYSAGTIMSVQEDRSDKASLTSRDDKGSNMCGQGSHLAEPDGKPELLPVATNDGDLDGLGVLSNRNNDEVDDDDPFSKRRKMDVGIADITPVVKPIREPRVVVQTLSEVDILDDGYRWRKYGQKVVRGNPNPRSYYKCTNTGCPVRKHVERASHDPKAVITTYEGKHNHDVPTARNSCHDMAGPASASGQTRVRPEESDTISLDLGMGISPAAENTSNSQGRMMLSEFGDSQIHTSNSNFKFVHTTTAPGYFGVLNNNSNPYGSKENPSDGPSLNHSAYPCPQNIGRILMGP

SEQ ID NO: 17795 - DNA, 1448 bp, Glycine max
attgacaacgactcctttagaagacagaaaattcttgaagagtgaaatgaccaatgatgcaaatttatcccgagttaagcctttggcatctgaaatccctcacaaagattatgcggatagatttgatagaaaaatctcgcaagtcggagaaatcaagtatcatgaagaaccagatgaggaacttgtcagacattacaagcgtcttccaaatagtatccttacagagcaatctcttaaagatatgctttctgattccctcacttcactgaatctagctaacctcaagtgggtgaaaaacgaacatttgaataagcttggttttgttgctccaaacttagtggagcttaatatttcaggtaccgttgctaatgacaccacccttgaagaaattggcaagacatgcttgaatcttaagtcaattgacatttctcattgtccggagcttactgagaaaggagtccgagcatttttcgagaactgtccccctattcaaaaattctgggcatcaacttgtcccaattctgtaacagatgagtcattggcctatttcacaaatgctgaagaattaactacattcaatatcgaattttgttctaaggtcagtgacgtatccctccaggtcattgtcgaagctgctcctccactcaaagagttatacgtttcaggctgtactaaaattaccggaaagattgtaaccgctttaatacagataggaaattaccaattagaaattgccgaaatctcaaacttaagccaagctgagtttgataacgagaccatgaaagcggtcggaacatgttcaaagttaagaagattaaacatttcaggggatagtaatattggagatgaaggtgtacacaacttgatctcaggatataaggaagcagatgattcattggtgaagaaagatgaagggttcaagcacttagttgagtttagaatgagttcaaccaagatcaattctgaaggcgctgtgataaaattctgcaatgcttgtccaaacttggagatcttggacatgaatggttttgtgcctgtaggagagactggaataaatatgatctgcaaatcattatctaagcttaagatctgcttgataaactttacggataagatatcagatccttacctagttgagcttcgtcagacttatcctgatgtgaagtttgtccgcacaataattgcgcctagtaatccagctgataatgaattgagagtgccattcccaaggattcaacaaggaaagaagaaaaagaagaagggtaagaagaagaagtaaaaaggcatagtttagcagttgatattgtaataatataaatatttctatattaaagagctttttttttgttgctgcctcagaacctttattttagtttatttttgctgatatatgacttaatttaaggagatatattccatatatactaaaaacactcttagcttaattc

SEQ ID NO: 17796 - protein, 425 aa, Glycine max
LTTTPLEDRKFLKSEMTNDANLSRVKPLASEIPHKDYADRFDRKISQVGEIKYHEEPDEELVRHYKRLPNSILTEQSLKDMLSDSLTSLNLANLKWVKNEHLNKLGFVAPNLVELNISGTVANDTTLEEIGKTCLNLKSIDISHCPELTEKGVRAFFENCPPIQKFWASTCPNSVTDESLAYFTNAEELTTFNIEFCSKVSDVSLQVIVEAAPPLKELYVSGCTKITGKIVTALIQIGNYQLEIAEISNLSQAEFDNETMKAVGTCSKLRRLNISGDSNIGDEGVHNLISGYKEADDSLVKKDEGFKHLVEFRMSSTKINSEGAVIKFCNACPNLEILDMNGFVPVGETGINMICKSLSKLKICLINFTDKISDPYLVELRQTYPDVKFVRTIIAPSNPADNELRVPFPRIQQGKKKKKKGKKKK

SEQ ID NO: 17797 - protein, 410 aa, Glycine max
MTNDANLSRVKPLASEIPHKDYADRFDRKISQVGEIKYHEEPDEELVRHYKRLPNSILTEQSLKDMLSDSLTSLNLANLKWVKNEHLNKLGFVAPNLVELNISGTVANDTTLEEIGKTCLNLKSIDISHCPELTEKGVRAFFENCPPIQKFWASTCPNSVTDESLAYFTNAEELTTFNIEFCSKVSDVSLQVIVEAAPPLKELYVSGCTKITGKIVTALIQIGNYQLEIAEISNLSQAEFDNETMKAVGTCSKLRRLNISGDSNIGDEGVHNLISGYKEADDSLVKKDEGFKHLVEFRMSSTKINSEGAVIKFCNACPNLEILDMNGFVPVGETGINMICKSLSKLKICLINFTDKISDPYLVELRQTYPDVKFVRTIIAPSNPADNELRVPFPRIQQGKKKKKKGKKKK

SEQ ID NO: 17798 - protein, 345 aa, Glycine max
MLSDSLTSLNLANLKWVKNEHLNKLGFVAPNLVELNISGTVANDTTLEEIGKTCLNLKSIDISHCPELTEKGVRAFFENCPPIQKFWASTCPNSVTDESLAYFTNAEELTTFNIEFCSKVSDVSLQVIVEAAPPLKELYVSGCTKITGKIVTALIQIGNYQLEIAEISNLSQAEFDNETMKAVGTCSKLRRLNISGDSNIGDEGVHNLISGYKEADDSLVKKDEGFKHLVEFRMSSTKINSEGAVIKFCNACPNLEILDMNGFVPVGETGINMICKSLSKLKICLINFTDKISDPYLVELRQTYPDVKFVRTIIAPSNPADNELRVPFPRIQQGKKKKKKGKKKK

SEQ ID NO: 17799 - DNA, 1277 bp, Glycine max
gaaaaatcgcaatatcttcaactctatctgcaacagccaactttctcgttcgtcgatcacaaaaatggcggcgaaacttcaaatatttacgggattgccccccgcgccatttcaatcttcctcctccactctctgcgtactcaagaagcctctcactacctccttcttcggcactgcacgagtggaagttctgaaacttcgagtgatgaggattgcgaagcctgcgcgcggtggaggtgctctcggtgctcgcatgaacctctttgacaggttcgccagagttgtgaagtcgtacgcaaacgctgtcttaagctcgtttgaagatccggagaaaatattggagcaagctgtgcttgaaatgaacgacgacttgaccaaaatgcgtcaagctactgcacaagtgttggcatctcaaaagcggttggaaaataaatacaaggctgcacaacaagcttctgaagagtggtaccggaaagcacaacttgctcttcagaaaggtgaagaggatcttgctcgtgaagcacttaagaggcgtaaatcttatgcggataatgccagttctttgaaagctcaacttgatcaacaaaagactgttgttgagaatcttgtctctaatacaaggcttttggagagtaagatacaagaggcaaggtcgaaaaaagatactctcaaagcaagagctcaatcggcaaagactgcaaccaaggtgagtgagatgctgggaaatgtcaatacaagtagtgctctttcagcttttgaaaagatggaagagaaagtgttgacaatggagtcccaagctgaagctcttggccagttgacaagtgatgatcttgaaggaaagtttgctttgcttgagggctcgtccgttgatgacgaccttgcgaatttgaaaaaagaattatctggtgcctcaaagaaaggggaccttcctcctggaagaagtaccaccagcgccaacactgggattccatttcgagatgctgagatcgagttggaacttgatcaattgaggcaaagagcaaaggaattttgaagcatggattcttttttgtttcttcatatcaaatcttcaatttagtttctttatttctgatatcaacgttgtacagctaaaggccaatcacgatattgttcgactactggccaaaaattgattagaaaaatgaactgattagctgcatgctcttgtagctcatgttatatgttaattaccttaagtgtgatgatattgtaatatataatttgtaccatcagaagtcttttttattcctattaag

SEQ ID NO: 17800 - protein, 343 aa, Glycine max
KNRNIFNSICNSQLSRSSITKMAAKLQIFTGLPPAPFQSSSSTLCVLKKPLTTSFFGTARVEVLKLRVMRIAKPARGGGALGARMNLFDRFARVVKSYANAVLSSFEDPEKILEQAVLEMNDDLTKMRQATAQVLASQKRLENKYKAAQQASEEWYRKAQLALQKGEEDLAREALKRRKSYADNASSLKAQLDQQKTVVENLVSNTRLLESKIQEARSKKDTLKARAQSAKTATKVSEMLGNVNTSSALSAFEKMEEKVLTMESQAEALGQLTSDDLEGKFALLEGSSVDDDLANLKKELSGASKKGDLPPGRSTTSANTGIPFRDAEIELELDQLRQRAKEF

SEQ ID NO: 17801 - protein, 322 aa, Glycine max
MAAKLQIFTGLPPAPFQSSSSTLCVLKKPLTTSFFGTARVEVLKLRVMRIAKPARGGGALGARMNLFDRFARVVKSYANAVLSSFEDPEKILEQAVLEMNDDLTKMRQATAQVLASQKRLENKYKAAQQASEEWYRKAQLALQKGEEDLAREALKRRKSYADNASSLKAQLDQQKTVVENLVSNTRLLESKIQEARSKKDTLKARAQSAKTATKVSEMLGNVNTSSALSAFEKMEEKVLTMESQAEALGQLTSDDLEGKFALLEGSSVDDDLANLKKELSGASKKGDLPPGRSTTSANTGIPFRDAEIELELDQLRQRAKEF

SEQ ID NO: 17802 - protein, 275 aa, Glycine max
MRIAKPARGGGALGARMNLFDRFARVVKSYANAVLSSFEDPEKILEQAVLEMNDDLTKMRQATAQVLASQKRLENKYKAAQQASEEWYRKAQLALQKGEEDLAREALKRRKSYADNASSLKAQLDQQKTVVENLVSNTRLLESKIQEARSKKDTLKARAQSAKTATKVSEMLGNVNTSSALSAFEKMEEKVLTMESQAEALGQLTSDDLEGKFALLEGSSVDDDLANLKKELSGASKKGDLPPGRSTTSANTGIPFRDAEIELELDQLRQRAKEF

SEQ ID NO: 17803 - DNA, 1813 bp, Glycine max
gtgattctgaaaatctgaaatttcatttctctctgtataaatatcctagtccttatcagcttcactatttcgattgaaatcgccgaagaaggtattgacgtcgatgatgaaaatgaaattggtgaaaacattactgcttctcctttgtgtgaaactcttctgttatgcagtgattggtgctcctcaaacttgtcctgctaacaatgaggataaatgcggcgattcagatgaatggaaaggggagtttttccctgacattcccaaaattaaatatgagggtccgtcaagtaagaatgtgctttcatttaaatggtataatgcagaggaggaaattcttgggaagaagatgaaggattggttaagatttagtgttgcattttggcatacattccgtggaacaggtgctgacccatttggtgcacctaccaaatactggctatgggaagatggtaccaattcattaaacatggctaaaagacgaatgagagctaactttgagttcataagcaaactcggtgttgacttttggtgtttccacgacagggatatagcccctgatggaaaaactcttgaggaatctaatgcaaacttggatgaagtggttgcccttgctcaagagctccagactaaggctaaaaaaagagtgttatggggaacagctcagttgttcatgcatcctcgttacatgcatggtgctgctactagctctgaattaaaggtctatgcatatgctgctgctcaagtgaagaaagccatagaggtgacacattatttggggggagaaaattatgttttctggggtggtcgtgaaggttatcaatctcttttgaacacagatatggagcgagagcttaatcatttggctaggttttttgaagctgctgttgcatacaaaaagaagattggattcaatgggacatttctaatcgaaccaaagccacaagaacctacaaaacaccagtatgattgggatgctgcaacctcagctaatttcttgcgaaaatatggacttacaggggaattcaaactcaacatagagtgcaaccatgccaccctctctggccacagttgtcatcatgagctcgaaactgcaaggatcaatggattgctgggtaatattgatgcaaacactggtgatcctcaagttggttgggacactgatcagtttcttgtagatattcaagaggcgacactgattatgctcagtgtgatcagaaatggaggacttgcacccggtggattcaacttcgatgcgaaattgcggagagagagcacagatgttgaagacttgttcatagcccacattgttggaatggataccctggcccgtggcctgaggaatgctgccaagttgattgaggatggttctcttgctgagcttgttcgtaagcgttatcagagttttgacactgaaattggggctcaaatagaggctggtaaggctgactttgaactgcttgagaagaaggtcaaggaatggggagaaccaaaggttgcttctgcgaaacaggagctagccgagatgatcctccaatctgttctgtagaaagtagaatctagccgtgtgtggtggctatttttcgtctattatattaggaacaattcggtataattaggtttactaataaaaggaaattaagattgacttatgcctgcttcgttttccttgggaaaatataagtgtgaagctgttatctgctaggtggatacgaagcctggtgaagtgcatgttagcttatgtataaaactacgtgatgcatagcttccctggctttgagcatgcttgagttaattaattttagtttcactccgc

SEQ ID NO: 17804 - protein, 480 aa, Glycine max
MMKMKLVKTLLLLLCVKLFCYAVIGAPQTCPANNEDKCGDSDEWKGEFFPDIPKIKYEGPSSKNVLSFKWYNAEEEILGKKMKDWLRFSVAFWHTFRGTGADPFGAPTKYWLWEDGTNSLNMAKRRMRANFEFISKLGVDFWCFHDRDIAPDGKTLEESNANLDEVVALAQELQTKAKKRVLWGTAQLFMHPRYMHGAATSSELKVYAYAAAQVKKAIEVTHYLGGENYVFWGGREGYQSLLNTDMERELNHLARFFEAAVAYKKKIGFNGTFLIEPKPQEPTKHQYDWDAATSANFLRKYGLTGEFKLNIECNHATLSGHSCHHELETARINGLLGNIDANTGDPQVGWDTDQFLVDIQEATLIMLSVIRNGGLAPGGFNFDAKLRRESTDVEDLFIAHIVGMDTLARGLRNAAKLIEDGSLAELVRKRYQSFDTEIGAQIEAGKADFELLEKKVKEWGEPKVASAKQELAEMILQSVL

SEQ ID NO: 17805 - protein, 479 aa, Glycine max
MKMKLVKTLLLLLCVKLFCYAVIGAPQTCPANNEDKCGDSDEWKGEFFPDIPKIKYEGPSSKNVLSFKWYNAEEEILGKKMKDWLRFSVAFWHTFRGTGADPFGAPTKYWLWEDGTNSLNMAKRRMRANFEFISKLGVDFWCFHDRDIAPDGKTLEESNANLDEVVALAQELQTKAKKRVLWGTAQLFMHPRYMHGAATSSELKVYAYAAAQVKKAIEVTHYLGGENYVFWGGREGYQSLLNTDMERELNHLARFFEAAVAYKKKIGFNGTFLIEPKPQEPTKHQYDWDAATSANFLRKYGLTGEFKLNIECNHATLSGHSCHHELETARINGLLGNIDANTGDPQVGWDTDQFLVDIQEATLIMLSVIRNGGLAPGGFNFDAKLRRESTDVEDLFIAHIVGMDTLARGLRNAAKLIEDGSLAELVRKRYQSFDTEIGAQIEAGKADFELLEKKVKEWGEPKVASAKQELAEMILQSVL

SEQ ID NO: 17806 - protein, 477 aa, Glycine max
MKLVKTLLLLLCVKLFCYAVIGAPQTCPANNEDKCGDSDEWKGEFFPDIPKIKYEGPSSKNVLSFKWYNAEEEILGKKMKDWLRFSVAFWHTFRGTGADPFGAPTKYWLWEDGTNSLNMAKRRMRANFEFISKLGVDFWCFHDRDIAPDGKTLEESNANLDEVVALAQELQTKAKKRVLWGTAQLFMHPRYMHGAATSSELKVYAYAAAQVKKAIEVTHYLGGENYVFWGGREGYQSLLNTDMERELNHLARFFEAAVAYKKKIGFNGTFLIEPKPQEPTKHQYDWDAATSANFLRKYGLTGEFKLNIECNHATLSGHSCHHELETARINGLLGNIDANTGDPQVGWDTDQFLVDIQEATLIMLSVIRNGGLAPGGFNFDAKLRRESTDVEDLFIAHIVGMDTLARGLRNAAKLIEDGSLAELVRKRYQSFDTEIGAQIEAGKADFELLEKKVKEWGEPKVASAKQELAEMILQSVL

SEQ ID NO: 17807 - DNA, 1449 bp, Glycine max
gaccatgacggtcgccagcaccaagagactcttcaagatcacgctctctctcctccgcctcggcttcaactcctccaaatgcaaaacggcagccaagatggccgtggccaggatcaagctgctgaggaacaagcgagaggtggtcgtgaggcagatgcgtcgcgacattgctcttcttctccagtctggtcaagacgccaccgctcgcatcagggttgagcatgtcatgagagagcaaaatgttttggctgcaaatgagttcattgaactcttctgtgaattagtggtggccaggctcgcaatcatttcaaagcaaaaggaatgtccagcagatttgaaagaaggaattgctagcttgatatttgcagcccctaggtgctctgaaatcccagaacttgtggcacttaagaatatctttgagaagaaatatgggaaagattttgtatctgcagctgttgatctaagacctagctgcggtgtaaatcgccagttgatcgaaaagctctcagtacgaacaccacctggtgaagtaaaattgaaagtgttgaaggaaatagctaaggaacatcatattgattgggatactacagatagcgagaaagaacttctcaagcctccagaagagctaatagtagggccaagtgcttttgtcagtgccagcagcctaccagtgaagccttctacagttatgtcggtggattcaaataaacccgctactagattatcgaggggtggaaaacccgatgccgagcattacaaagattctaagtctgctgccgaagcagcagctgaggcagctaagcaagcaattgctgctgctgaagttgctgcttatatgactatgaaggactataataatgaagctcctcaaccatatgcttacaatgataagttgtataactcaggagtcaactctgggaccttccaatcaaacaatcctgcaaaatgcaccctgaacatgacacctaaatctttaactgaggagaaaatgtacaggtcacagagcttaccaagatctgatcatatgaacaatgaggaggatgcattgcctaaccaatatggtggaaatgattataggaggcacagctaccatccagcttccgcacattcagatattaagtttgatgaatcaagttgtgatgaagaaattgaagcagaagagcctcctccggttactatgccccctaatcggcttccaccaccggtaccctcatctctggctaaacaggaaagccacattcgtgttcatcccaaattgccagattatgatgaacttgctgcccgctttgatgcactaaaattcaagaagtcacaatcctgaacccactttagcaaccaaccgtttatgaatctattaaattaatttatacacaataaatacatataagaatagtatattttgttatatagagatactaagaatgtattggatgctaaactttgctatgc

SEQ ID NO: 17808 - protein, 439 aa, Glycine max
TMTVASTKRLFKITLSLLRLGFNSSKCKTAAKMAVARIKLLRNKREVVVRQMRRDIALLLQSGQDATARIRVEHVMREQNVLAANEFIELFCELVVARLAIISKQKECPADLKEGIASLIFAAPRCSEIPELVALKNIFEKKYGKDFVSAAVDLRPSCGVNRQLIEKLSVRTPPGEVKLKVLKEIAKEHHIDWDTTDSEKELLKPPEELIVGPSAFVSASSLPVKPSTVMSVDSNKPATRLSRGGKPDAEHYKDSKSAAEAAAEAAKQAIAAAEVAAYMTMKDYNNEAPQPYAYNDKLYNSGVNSGTFQSNNPAKCTLNMTPKSLTEEKMYRSQSLPRSDHMNNEEDALPNQYGGNDYRRHSYHPASAHSDIKFDESSCDEEIEAEEPPPVTMPPNRLPPPVPSSLAKQESHIRVHPKLPDYDELAARFDALKFKKSQS

SEQ ID NO: 17809 - protein, 438 aa, Glycine max
MTVASTKRLFKITLSLLRLGFNSSKCKTAAKMAVARIKLLRNKREVVVRQMRRDIALLLQSGQDATARIRVEHVMREQNVLAANEFIELFCELVVARLAIISKQKECPADLKEGIASLIFAAPRCSEIPELVALKNIFEKKYGKDFVSAAVDLRPSCGVNRQLIEKLSVRTPPGEVKLKVLKEIAKEHHIDWDTTDSEKELLKPPEELIVGPSAFVSASSLPVKPSTVMSVDSNKPATRLSRGGKPDAEHYKDSKSAAEAAAEAAKQAIAAAEVAAYMTMKDYNNEAPQPYAYNDKLYNSGVNSGTFQSNNPAKCTLNMTPKSLTEEKMYRSQSLPRSDHMNNEEDALPNQYGGNDYRRHSYHPASAHSDIKFDESSCDEEIEAEEPPPVTMPPNRLPPPVPSSLAKQESHIRVHPKLPDYDELAARFDALKFKKSQS

SEQ ID NO: 17810 - protein, 407 aa, Glycine max
MAVARIKLLRNKREVVVRQMRRDIALLLQSGQDATARIRVEHVMREQNVLAANEFIELFCELVVARLAIISKQKECPADLKEGIASLIFAAPRCSEIPELVALKNIFEKKYGKDFVSAAVDLRPSCGVNRQLIEKLSVRTPPGEVKLKVLKEIAKEHHIDWDTTDSEKELLKPPEELIVGPSAFVSASSLPVKPSTVMSVDSNKPATRLSRGGKPDAEHYKDSKSAAEAAAEAAKQAIAAAEVAAYMTMKDYNNEAPQPYAYNDKLYNSGVNSGTFQSNNPAKCTLNMTPKSLTEEKMYRSQSLPRSDHMNNEEDALPNQYGGNDYRRHSYHPASAHSDIKFDESSCDEEIEAEEPPPVTMPPNRLPPPVPSSLAKQESHIRVHPKLPDYDELAARFDALKFKKSQS

SEQ ID NO: 17811 - DNA, 1446 bp, Glycine max
tttactccgaagctaactgatggagaagatgatcaaagttctctttggctgagcagtcaccaagtgagtcttttgctttcttcaatctgggttcaggcaacatctgtggagaatggccctgcaaattatgaggcaatggcacacacctatagcattgctttattattttctcgttctaaggcgtcaaattacatggctttagcaagatgttttcaacttgcattctccctcaggagcatctctttggatcaagaaggaggtttacaaccatctcacaggaggtccctttttaccttggcttcatacatgcttatcttctctgccagggctggcaatgtccctggtcttattccagaagttaaagcatcactgacagagccaacagtagatccttttcttgaattggttgatgatatccggctgcaggctgtctgtatagaatcagagaagataatttatggatctcaggaagatgaggtcgctgctgcaaagtctctttcagatgtagaattggatgacaagcagttgaaagagactataatatcgtactttatgactaaattttcaaaattgtctgaggatgaattgtctagcataaagaatcaacttctacaaggtttttcccctgatgatgcatatccatcaggacctccattatttatggagacgccaagaccatgttctcctcttgctcagattgagttcccaaattttgatgagataatggttccggatgatttgatggaggaagagactggacctgaacatagtggaagtcagtcagatcacaaaacatcactgtcaaccaactaccccgatgttctaaatgttaatcaactcttggattcggttttggaaactgcacggcaagttgcaagtttctccacttcctcaactcctttaccttatgaccaaatgaagaaccagtgtgaggcacttgtaacagggaaacaacagaagatgtcagtcattcacagtttcaagcatcaacaggagagtaaggccataattctttcaagtgaaaatgaagtaaaagtttcccctctacctgctaaggcactggaatattcaaacggtgatttgaagttagtgactcagcagcaatttgaagtacaggatcaagcacgccaccgttctcatgactctgggcaccaacattctttgagactaccaccttcgagtccctatgataaattcttgaaagctgcgggatgctaatgacactaacctgcaatagatgacattttttcattctttgcaatgctggtaaaatgtttctttagaatttagatggttcctaccataagtacgtgaaatatgtgggagtaattttttttttctttcattttgttgggagaggtggatgtttgtttccagcaaatgtatgattttgtctataaattatagtaatattatttgtcaatatttaaatatactttttggact

SEQ ID NO: 17812 - protein, 405 aa, Glycine max
FTPKLTDGEDDQSSLWLSSHQVSLLLSSIWVQATSVENGPANYEAMAHTYSIALLFSRSKASNYMALARCFQLAFSLRSISLDQEGGLQPSHRRSLFTLASYMLIFSARAGNVPGLIPEVKASLTEPTVDPFLELVDDIRLQAVCIESEKIIYGSQEDEVAAAKSLSDVELDDKQLKETIISYFMTKFSKLSEDELSSIKNQLLQGFSPDDAYPSGPPLFMETPRPCSPLAQIEFPNFDEIMVPDDLMEEETGPEHSGSQSDHKTSLSTNYPDVLNVNQLLDSVLETARQVASFSTSSTPLPYDQMKNQCEALVTGKQQKMSVIHSFKHQQESKAIILSSENEVKVSPLPAKALEYSNGDLKLVTQQQFEVQDQARHRSHDSGHQHSLRLPPSSPYDKFLKAAGC

SEQ ID NO: 17813 - protein, 360 aa, Glycine max
MAHTYSIALLFSRSKASNYMALARCFQLAFSLRSISLDQEGGLQPSHRRSLFTLASYMLIFSARAGNVPGLIPEVKASLTEPTVDPFLELVDDIRLQAVCIESEKIIYGSQEDEVAAAKSLSDVELDDKQLKETIISYFMTKFSKLSEDELSSIKNQLLQGFSPDDAYPSGPPLFMETPRPCSPLAQIEFPNFDEIMVPDDLMEEETGPEHSGSQSDHKTSLSTNYPDVLNVNQLLDSVLETARQVASFSTSSTPLPYDQMKNQCEALVTGKQQKMSVIHSFKHQQESKAIILSSENEVKVSPLPAKALEYSNGDLKLVTQQQFEVQDQARHRSHDSGHQHSLRLPPSSPYDKFLKAAGC

SEQ ID NO: 17814 - protein, 341 aa, Glycine max
MALARCFQLAFSLRSISLDQEGGLQPSHRRSLFTLASYMLIFSARAGNVPGLIPEVKASLTEPTVDPFLELVDDIRLQAVCIESEKIIYGSQEDEVAAAKSLSDVELDDKQLKETIISYFMTKFSKLSEDELSSIKNQLLQGFSPDDAYPSGPPLFMETPRPCSPLAQIEFPNFDEIMVPDDLMEEETGPEHSGSQSDHKTSLSTNYPDVLNVNQLLDSVLETARQVASFSTSSTPLPYDQMKNQCEALVTGKQQKMSVIHSFKHQQESKAIILSSENEVKVSPLPAKALEYSNGDLKLVTQQQFEVQDQARHRSHDSGHQHSLRLPPSSPYDKFLKAAGC

SEQ ID NO: 17815 - DNA, 846 bp, Glycine max
aaaaatctaaaccgaaattcccaattacccttcccaattttcaccaaaacctaatactcccacaccaatcttcgatcatggacgccgattcacaacctcaacaactcgaagagagaacagaggagcaagaactgaagtacctggaattcgtgcaattcgcgaccatacaggctctgatgcgctgcgccatcctctactcatacgccaaggagcgcgcgggtcctctgaagcccggtgtcgacaccgtggaggaggccgtgaagaccgtcgtggctccggtctacgataggttccaccttgtccccggcgaggtcctcaaatacgcggatcggaaggttgccgagttagacagccacgttccctccaacgtgaagaaggtctcctcccaggcctgctccgtcgtctctgaagtccgccgcgatggcgtctccgcctacgccaagaccgtttactccaagtacgagcctacggcggagcagtgcgcagtgtctgcatggcggaagctcaaccagcttccgctcttccctcaggtggccaatgttgtgttgcccaaggctgcctattgcaccgagaagtacaacgaggcggttgtttcctctgctgagaaaggttacagggtttctgcttatcttcctttggtgcctactgagaagatcgccaaagtcttcggtggaaactgatctcgatctattgcggttttgaatttcttattgtttttactttctttacaaagtgttgttgctagttgctactgttagtgtgtgagttggattggatatatgatgatgtgaatgttctgttttgttaattactatataataatatagaataatgttactcaatgct

SEQ ID NO: 17816 - protein, 225 aa, Glycine max
KSKPKFPITLPNFHQNLILPHQSSIMDADSQPQQLEERTEEQELKYLEFVQFATIQALMRCAILYSYAKERAGPLKPGVDTVEEAVKTVVAPVYDRFHLVPGEVLKYADRKVAELDSHVPSNVKKVSSQACSVVSEVRRDGVSAYAKTVYSKYEPTAEQCAVSAWRKLNQLPLFPQVANVVLPKAAYCTEKYNEAVVSSAEKGYRVSAYLPLVPTEKIAKVFGGN

SEQ ID NO: 17817 - protein, 200 aa, Glycine max
MDADSQPQQLEERTEEQELKYLEFVQFATIQALMRCAILYSYAKERAGPLKPGVDTVEEAVKTVVAPVYDRFHLVPGEVLKYADRKVAELDSHVPSNVKKVSSQACSVVSEVRRDGVSAYAKTVYSKYEPTAEQCAVSAWRKLNQLPLFPQVANVVLPKAAYCTEKYNEAVVSSAEKGYRVSAYLPLVPTEKIAKVFGGN

SEQ ID NO: 17818 - protein, 167 aa, Glycine max
MRCAILYSYAKERAGPLKPGVDTVEEAVKTVVAPVYDRFHLVPGEVLKYADRKVAELDSHVPSNVKKVSSQACSVVSEVRRDGVSAYAKTVYSKYEPTAEQCAVSAWRKLNQLPLFPQVANVVLPKAAYCTEKYNEAVVSSAEKGYRVSAYLPLVPTEKIAKVFGGN

SEQ ID NO: 17819 - DNA, 1178 bp, Glycine max
tgattggatttggaaggctcattcttatcttggatttggacccctgagtttttgtttagctgtgaactacttggatcgcttcctatcggtttttgagttacctagaggtgtgagttggactgtgcaattgttggctgtagcttgcttgtcgattgcggccaaaatggaggagatcaaagtgcctcaatccgtagatttacaggttggggaactaaagtttttgtttgaagcgagaaccattcaaaaaatggaactacttgtattaagcacactgagatggaaaatgtgcgctataactccttgttccttcatagactacttccttggcaagatcacttgcgagcagcatccagcgaaatcatccatttcaatatcagtgcacctcattcttggcataattagaggtattgatttcttggaattctggccttctgaaattgctgcagcggtggcagcttctgttttaaaggaatcacaagtgatagaaattgataaagccataaccgatctcttagtagtagagaaggggagagttctaaagtgtgttgaattgataagagatttgtccttgatcaatgttgctgctagtttaggcagcaaggtgccatatgtgccccaaagtccaattggggtgctggatgctgggtgcttaagttataagagtgatgaattaactgttggatcatcatgtccaaactcgtcacataatacttcaaacccaaaccctactaagaggagcaaaccagatgaaccttctaatggaacctccaattcatgaaatgtgaattttcttccttcaccaaagttcatctagtttggttgaatggggagtttggtgtggtcttggaattccttggaaacattctcaatgagagtttgcttcggatgaataagatgggaatttaagtgctttcatgctagaagcatatggacaggatcaggaaggaggtgtcgatagttaagtttttggtttatagtcagattatagaaacagctacaaatacttggacgtgcggttggtgtagaaaactttgatgaaacaatgttgtggaagcacaaacacagcatgtcaaagtatgaatgtaatatttggagagtagagccataattgttgtccatgtgaatgtcctaagtgctcattttagaagaaaatcaatatataaagcattttttttcac

SEQ ID NO: 17820 - protein, 258 aa, Glycine max
DWIWKAHSYLGFGPLSFCLAVNYLDRFLSVFELPRGVSWTVQLLAVACLSIAAKMEEIKVPQSVDLQVGELKFLFEARTIQKMELLVLSTLRWKMCAITPCSFIDYFLGKITCEQHPAKSSISISVHLILGIIRGIDFLEFWPSEIAAAVAASVLKESQVIEIDKAITDLLVVEKGRVLKCVELIRDLSLINVAASLGSKVPYVPQSPIGVLDAGCLSYKSDELTVGSSCPNSSHNTSNPNPTKRSKPDEPSNGTSNS

SEQ ID NO: 17821 - protein, 204 aa, Glycine max
MEEIKVPQSVDLQVGELKFLFEARTIQKMELLVLSTLRWKMCAITPCSFIDYFLGKITCEQHPAKSSISISVHLILGIIRGIDFLEFWPSEIAAAVAASVLKESQVIEIDKAITDLLVVEKGRVLKCVELIRDLSLINVAASLGSKVPYVPQSPIGVLDAGCLSYKSDELTVGSSCPNSSHNTSNPNPTKRSKPDEPSNGTSNS

SEQ ID NO: 17822 - protein, 176 aa, Glycine max
MELLVLSTLRWKMCAITPCSFIDYFLGKITCEQHPAKSSISISVHLILGIIRGIDFLEFWPSEIAAAVAASVLKESQVIEIDKAITDLLVVEKGRVLKCVELIRDLSLINVAASLGSKVPYVPQSPIGVLDAGCLSYKSDELTVGSSCPNSSHNTSNPNPTKRSKPDEPSNGTSNS

SEQ ID NO: 17823 - DNA, 1333 bp, Glycine max
gaagaatcaaacagacacgggttaaaacgcctacaaagcatccttctttcacaaatacttaagaaggaaatcaacttagcaagtgagcaacaaggcacttcgatgataaaaaataagctcaagggaaagaaggttctcttagttctagatgatgttgatgagcacaagcaattacaggcaattgttggaaaatctgtttggtctgagtctgagtttggcaccagattggttctgatcatcaccactcgggacaaacaactcctaacatcttatggggtcaaaagaacacatgaggtgaaagaattgagtaagaaagatgctattcaattgcttaaacggaaagcttttaaaacatatgatgaagttgatcaaagttacaatcaggtcttgaatgatgtagtaacttggacttctggccttccattggctttggaagtgataggttcgaacctgtttggaaaaagtattaaagaatgggaatcagctatcaaacaatatcaaagaattcccaataaggaaatcttgaagatacttaaagtaagctttgatgctttggaggaagaagaaaaaagtgtttttcttgacattacttgttgcttgaaaggctataaatgcagagagattgaagatatacttcacagtctttatgataactgcatgaaataccatattggggtgcttgttgacaagtctctcatacagattagtgacgatagagttacattgcatgacttgattgagaacatgggtaaagaaattgacagacagaaatcacctaaagagacagggaagcggaggagattatggttactaaaagatataattcaagtcttaaaagacaactcggggaccagtgaagttaaaatcatttgtcttgatttccccatatctgacaaacaagaaacaatagaatggaatggaaatgccttcaaggagatgaaaaaccttaaagcacttattatcagaaacggtattttatcccaaggtcccaattatctaccagaaagtttgagaatattggaatggcacagacatccttcccattgtttaccgtctgattttgatacaacgaatcttgccatacgcgacttggaatagttccatcccgtcattggggtgtggtggcatatccaaggcaagtttaaagaatacattttccttgtaaattaataaattcacagcagtattattcattcagttctgtttaaatttttccatcattttctttttgcagaagttgatgtatctaactatctaagggttttggatagctgatgcatctggtctctcaaatttgaaggaattttcatttgaatattgtgagaatttaatt

SEQ ID NO: 17824 - protein, 365 aa, Glycine max
EESNRHGLKRLQSILLSQILKKEINLASEQQGTSMIKNKLKGKKVLLVLDDVDEHKQLQAIVGKSVWSESEFGTRLVLIITTRDKQLLTSYGVKRTHEVKELSKKDAIQLLKRKAFKTYDEVDQSYNQVLNDVVTWTSGLPLALEVIGSNLFGKSIKEWESAIKQYQRIPNKEILKILKVSFDALEEEEKSVFLDITCCLKGYKCREIEDILHSLYDNCMKYHIGVLVDKSLIQISDDRVTLHDLIENMGKEIDRQKSPKETGKRRRLWLLKDIIQVLKDNSGTSEVKIICLDFPISDKQETIEWNGNAFKEMKNLKALIIRNGILSQGPNYLPESLRILEWHRHPSHCLPSDFDTTNLAIRDLE

SEQ ID NO: 17825 - protein, 331 aa, Glycine max
MIKNKLKGKKVLLVLDDVDEHKQLQAIVGKSVWSESEFGTRLVLIITTRDKQLLTSYGVKRTHEVKELSKKDAIQLLKRKAFKTYDEVDQSYNQVLNDVVTWTSGLPLALEVIGSNLFGKSIKEWESAIKQYQRIPNKEILKILKVSFDALEEEEKSVFLDITCCLKGYKCREIEDILHSLYDNCMKYHIGVLVDKSLIQISDDRVTLHDLIENMGKEIDRQKSPKETGKRRRLWLLKDIIQVLKDNSGTSEVKIICLDFPISDKQETIEWNGNAFKEMKNLKALIIRNGILSQGPNYLPESLRILEWHRHPSHCLPSDFDTTNLAIRDLE

SEQ ID NO: 17826 - DNA, 1517 bp, Glycine max
acaacatgtgcaaaactggtatcagacctgatgctataaccttcacagctcttctatctggctgcaagaattcaggtttagttatggatgggtggaagtactttgacagcatgaagacagattacagtattaatccaacaattgagcactactcttgcatggtagatcttcttggaaaagctggttttcttgatgaagctttggatttcatccatgccatgccacaaaaggcagatgctagtatttggggtgctgttcttgcagcctgcagacttcacaaagacattaagatagcagagattgcagcaaggaatcttttcaggttggagccatataattctgctaactatgtgttgatgatgaacatatattccacttttgagagatggggggacgtggagcgccttaaagagtcaatgactgccatgggggtgaaaatcccaaatgtttggagttggatacaagttaggcagactattcatgtgttctccacagaagggaaatcacatccagaagaaggagaaatatattttgacttgtatcaattaatctctgagataaaaaagctggggtatgtacctgatactaattgtgtgcatcagaacattgatgacagtgagaaggagaaggttctgctcagtcacacagagaagttggctatgacgtatggactgatgaaaattaaaggaggaacaccaatcagggtagtgaagaacacaagaatttgtcaagactgtcacacagcagcaaagtacatctccttggctcgaaaccgcgagattttcctcagagatggtggtcgttttcaccatttcatgaatggagaatgctcctgtaatgatcgttggtaacaagatagccaaagcctgaagcattttcctgcaggctattattgtgctctagtcttgtatatcaacagagggagtgtcttcatgaagggaactttgtaataatttaaggaatgactaagttacttggggaatcatagaataccctttttgcaagtggcaatcttcacctgaaatagtttaccttttttgcaagtcacagtatgaaggagttagaatagatacgttacatgggagccagcatcaccaacaacgtggcttagctctcactttaaggtgttgcacgctatctgaagaaaaatatcatgcaagttactaaactgtggtgcaaaatgtgccttgtgctgcttctgcaacaagttcttgtacttccaggttttaccattgacaagagtggcatctgttggcttcaacagcaaatgaaaactgaagtataaaatatatttttcaaagtcacgtagctagcaatccagtttgacaaaaaaaaaatcatttatttcatagaaattttgtctatggctattatagtatttttcttcacatcctttcctcttctccacctttcacataagttcaatgtctgaaacactattttattagcatgcacttgtaaataatatatatgtgaaggcaattttcagggcatgtataagataaaaacttaatatc

SEQ ID NO: 17827 - protein, 282 aa, Glycine max
NMCKTGIRPDAITFTALLSGCKNSGLVMDGWKYFDSMKTDYSINPTIEHYSCMVDLLGKAGFLDEALDFIHAMPQKADASIWGAVLAACRLHKDIKIAEIAARNLFRLEPYNSANYVLMMNIYSTFERWGDVERLKESMTAMGVKIPNVWSWIQVRQTIHVFSTEGKSHPEEGEIYFDLYQLISEIKKLGYVPDTNCVHQNIDDSEKEKVLLSHTEKLAMTYGLMKIKGGTPIRVVKNTRICQDCHTAAKYISLARNREIFLRDGGRFHHFMNGECSCNDRW

SEQ ID NO: 17828 - protein, 281 aa, Glycine max
MCKTGIRPDAITFTALLSGCKNSGLVMDGWKYFDSMKTDYSINPTIEHYSCMVDLLGKAGFLDEALDFIHAMPQKADASIWGAVLAACRLHKDIKIAEIAARNLFRLEPYNSANYVLMMNIYSTFERWGDVERLKESMTAMGVKIPNVWSWIQVRQTIHVFSTEGKSHPEEGEIYFDLYQLISEIKKLGYVPDTNCVHQNIDDSEKEKVLLSHTEKLAMTYGLMKIKGGTPIRVVKNTRICQDCHTAAKYISLARNREIFLRDGGRFHHFMNGECSCNDRW

SEQ ID NO: 17829 - protein, 255 aa, Glycine max
MDGWKYFDSMKTDYSINPTIEHYSCMVDLLGKAGFLDEALDFIHAMPQKADASIWGAVLAACRLHKDIKIAEIAARNLFRLEPYNSANYVLMMNIYSTFERWGDVERLKESMTAMGVKIPNVWSWIQVRQTIHVFSTEGKSHPEEGEIYFDLYQLISEIKKLGYVPDTNCVHQNIDDSEKEKVLLSHTEKLAMTYGLMKIKGGTPIRVVKNTRICQDCHTAAKYISLARNREIFLRDGGRFHHFMNGECSCNDRW

SEQ ID NO: 17830 - DNA, 1160 bp, Glycine max
ttcgtggcctgcaccctcggcgcgtcttgcagcaacgctttccccctcgcgtaccgggttctgattttggtgttcttgtttttggtgattgggatcattgtgtggatcttggtggtgaattggcatcgcgtggagctcacggtgagcataatcggggtcgcttcccacgcactttcgaggaacatggctttgttcggggtgctgccttgtttgtctgttgggctggtgctgtattttgttccaatcgtggttttcatggtgtttgcgaggtttaatgggaagattgttgtgaagaatttgaagagtggatatgactgtgaatggaaggaggattcttgggtgccagcttattatgctttggctgttctcaccatgttgtggtctgcggcagctatggttgaagctcaagtttatgtcatcagtgggactattgctaattggtatttctccaaggaacatcaaactcctaagcggagtattcgaactcctctcagaaatgtttttggtccttcttctggcacgatatgtttgtcaggattgcttgtctgtgttgttcgaatggtgcgttctgcggttgatagtgcaagacaagaggatactcctgggatagtgaaccttgtgttgcggtgctgtgtaaatgcattgctgacagcagttgattttcttaacaagtttaccataaactttgctgcaataactggtgaagcctactgctcttctgcaaggatgacatatgaacttctaagacgcaatcttctctctgctgtttttgtggagaccatctcatctcgcatcctggctggaattgtctttgttttttctgcatcatacacaatagtggcctgtgttatcttaaaagctggtaccaatcttgggtctgactcatattttgtggctgcgatggcatgggtgctactgatggtagtgctgggttacctcgtgcatgtgctagacaacgtaattgacacaatttacgtctgctatgcgatagaccgggatagaggagaggtttgtaaacaagacgtccatgaggtttacattcaactacccattagtagaagtctcagacagtctgttactacaagaactctaggtgtgtaaataattcttgagatacaaatgtttttgaatcctgggattgctattttatggacagtgtg

SEQ ID NO: 17831 - protein, 366 aa, Glycine max
FVACTLGASCSNAFPLAYRVLILVFLFLVIGIIVWILVVNWHRVELTVSIIGVASHALSRNMALFGVLPCLSVGLVLYFVPIVVFMVFARFNGKIVVKNLKSGYDCEWKEDSWVPAYYALAVLTMLWSAAAMVEAQVYVISGTIANWYFSKEHQTPKRSIRTPLRNVFGPSSGTICLSGLLVCVVRMVRSAVDSARQEDTPGIVNLVLRCCVNALLTAVDFLNKFTINFAAITGEAYCSSARMTYELLRRNLLSAVFVETISSRILAGIVFVFSASYTIVACVILKAGTNLGSDSYFVAAMAWVLLMVVLGYLVHVLDNVIDTIYVCYAIDRDRGEVCKQDVHEVYIQLPISRSLRQSVTTRTLGV

SEQ ID NO: 17832 - protein, 305 aa, Glycine max
MALFGVLPCLSVGLVLYFVPIVVFMVFARFNGKIVVKNLKSGYDCEWKEDSWVPAYYALAVLTMLWSAAAMVEAQVYVISGTIANWYFSKEHQTPKRSIRTPLRNVFGPSSGTICLSGLLVCVVRMVRSAVDSARQEDTPGIVNLVLRCCVNALLTAVDFLNKFTINFAAITGEAYCSSARMTYELLRRNLLSAVFVETISSRILAGIVFVFSASYTIVACVILKAGTNLGSDSYFVAAMAWVLLMVVLGYLVHVLDNVIDTIYVCYAIDRDRGEVCKQDVHEVYIQLPISRSLRQSVTTRTLGV

SEQ ID NO: 17833 - protein, 281 aa, Glycine max
MVFARFNGKIVVKNLKSGYDCEWKEDSWVPAYYALAVLTMLWSAAAMVEAQVYVISGTIANWYFSKEHQTPKRSIRTPLRNVFGPSSGTICLSGLLVCVVRMVRSAVDSARQEDTPGIVNLVLRCCVNALLTAVDFLNKFTINFAAITGEAYCSSARMTYELLRRNLLSAVFVETISSRILAGIVFVFSASYTIVACVILKAGTNLGSDSYFVAAMAWVLLMVVLGYLVHVLDNVIDTIYVCYAIDRDRGEVCKQDVHEVYIQLPISRSLRQSVTTRTLGV

SEQ ID NO: 17834 - DNA, 1255 bp, Glycine max
gaatggtcaatctcacactaactcactggatcgggataagctcctcactgggattgacctagagccaccagatttctcatttcatcaaagtgaccaccaccaccaccacacttataccatgtcatataatcatcatcatagtaataacaatgattttcccactacaagcaccatgggaagtagtagcttatcctatgatgaagatgcaagctttgatgagaggcatggcaaaatgctcaagtgtaatagctcaaactccatcaatatttctcaagatgttgccaattcacacataccctcctcctcttcagcaccttccaaatctaccttcattttgtcctttgaaaactcaactgttgaacctgccctccatgatagagtacctaattattataataattcccctaataagcattttgaggccacatgttcttcccttttgagctcagaaataacactcatcagcagtgaccatgtcatcactaaaccaaaagcaaagcaaggggccaagaagtatagaacctcatcagagatcaaagatcacataatggctgagaggaaaaggagacaagacctcactgagaggttcattgcactttctgccaccatacccggattgaagaagacagacaaggcctatatacttcaagaagctatcacatatatgaaacaacttcaggagagagtgaaagtgctagagaatgagaacaagaggaaaacaacatattcaaaaatattcatcaagaaatcacaagtgtgctcaagagaagaagccacatcatcatgtgaaacaaactctaattatagatccacgccaccaccactacctcaagttgaagcaagaatgttggaaaaggaagttctcattggaatccactgccagaaacaaaaggatattgtgctcaaaatcatggccttgcttcaaaatctccatctctctcttgctagtagtagtgtattgccatttgggacttctacagtaaaagttacaatcattgcccagatgggcgacaaatacggtatgacagtgaatgatctagtaaaaagactgaggcaagatctcttgaagtcacatgacattcaagagtcacattccaaagagtgccaaatatgatatgcaattgtttatggagagtgaggtttgcagaaattttagttttgcccttcttaaatttcaataagaaaaaaatgatgaggatttgtttgtaatgaaattgaacctcataatgtattaaaaatatgcacagcacttatc

SEQ ID NO: 17835 - protein, 370 aa, Glycine max
NGQSHTNSLDRDKLLTGIDLEPPDFSFHQSDHHHHHTYTMSYNHHHSNNNDFPTTSTMGSSSLSYDEDASFDERHGKMLKCNSSNSINISQDVANSHIPSSSSAPSKSTFILSFENSTVEPALHDRVPNYYNNSPNKHFEATCSSLLSSEITLISSDHVITKPKAKQGAKKYRTSSEIKDHIMAERKRRQDLTERFIALSATIPGLKKTDKAYILQEAITYMKQLQERVKVLENENKRKTTYSKIFIKKSQVCSREEATSSCETNSNYRSTPPPLPQVEARMLEKEVLIGIHCQKQKDIVLKIMALLQNLHLSLASSSVLPFGTSTVKVTIIAQMGDKYGMTVNDLVKRLRQDLLKSHDIQESHSKECQI

SEQ ID NO: 17836 - protein, 331 aa, Glycine max
MSYNHHHSNNNDFPTTSTMGSSSLSYDEDASFDERHGKMLKCNSSNSINISQDVANSHIPSSSSAPSKSTFILSFENSTVEPALHDRVPNYYNNSPNKHFEATCSSLLSSEITLISSDHVITKPKAKQGAKKYRTSSEIKDHIMAERKRRQDLTERFIALSATIPGLKKTDKAYILQEAITYMKQLQERVKVLENENKRKTTYSKIFIKKSQVCSREEATSSCETNSNYRSTPPPLPQVEARMLEKEVLIGIHCQKQKDIVLKIMALLQNLHLSLASSSVLPFGTSTVKVTIIAQMGDKYGMTVNDLVKRLRQDLLKSHDIQESHSKECQI

SEQ ID NO: 17837 - protein, 313 aa, Glycine max
MGSSSLSYDEDASFDERHGKMLKCNSSNSINISQDVANSHIPSSSSAPSKSTFILSFENSTVEPALHDRVPNYYNNSPNKHFEATCSSLLSSEITLISSDHVITKPKAKQGAKKYRTSSEIKDHIMAERKRRQDLTERFIALSATIPGLKKTDKAYILQEAITYMKQLQERVKVLENENKRKTTYSKIFIKKSQVCSREEATSSCETNSNYRSTPPPLPQVEARMLEKEVLIGIHCQKQKDIVLKIMALLQNLHLSLASSSVLPFGTSTVKVTIIAQMGDKYGMTVNDLVKRLRQDLLKSHDIQESHSKECQI

SEQ ID NO: 17838 - DNA, 2081 bp, Glycine max
gcgctttccctattgtatgtttttaccagactggtttccttggtctttggggaaagaaagtggatgctattgatcatcacatcactgaaattgacaagttgtcaaaagaaattgttgaggagagggaaaatgtcacaaatgatcccaaggccatcatgcccgctgcatttgtttcatttaaaacaagatgggctgctgctgtttgtgcacaaactcagcaaaccagaaatccaacactttggttgaccgaatgggctccagagccacgagatgtatattggcgaaacttgccaattccatatgtttccctcactgtcaggaggttaatcatagcagtgacattcttttttctcactttcttttttatgatccccattgcatttgttcaaactctggcaagtcttgatggaatccagaaagcagcaccatggctgaagccacttgttgacatccctttcattaagtccttcattcaaggttttctgcccggtattgtgttgaagctattcctcatcttcttgccaacaatattgatgatcatgtctaaatttgaaggctttggatctatatcttctctggagagaagatcagcttctagatattatcttttcaattttgtgaatatattccttgggaacatacttactggaacagcatttcaacagctgagctctttcattcaccaaccagccgaccaatatcctgtaacaattggcactgctattcctttaaaagcaagttttttcattacttatataatggttgatggatgggccagtatagctgcagaggttttgatgttgaaaccgctaattgtttatcacttgaagaatttcttcttggtgaaaactgaaaaggacagggaagaggccatggatcctgggagtattggtttcaacactggagaacctcgtatacaattgtactttttgttgggtctagtatatgctgcagtgacacctgctgttcttcctttcataacagttttctttggcctggcctatcttgtgttccgtcatcaggtacagagatgttaaatttatatatgcacgtttacgattctggtgccattaatcattcattaaaaaatgcacacaacacagttaacaccataatggcttatacattaatccctattatacattagcaccgtagtggtttatacatgagatgaagaccctgtaccttctaattgttttccaaatgcagatcattaacgtatataatcaggagtatgagagtggtgcagcattctggcctgatgtccatttccgtatcgtgatggcactgattgtctcacagatagttttgatgggactcctcaccaccaagaaagctgcttcatcaactccttttctcattgtgctcccaatactaaccatatggttccataggtactgcaaaggccgttttgaatctgcatttgttaaatttcccttacaggaagcaatgatgaaagatacattagaacgggcaacagaacctaacctgaacttgaaaggttatcttcagaatgcctatgttcacccagtttttaaggacagcatggatgacgatgatgacgaggaagatagactcagtatagacttggaaactgaaagtgtgaccgtgcgcacaaaacgccaatcacgaaggaatacaccattgccaagcaaaaataatgatgcatcatctccttctctgtctgatggtattggaaatcatccagagccttaaggcaaaatgagataactgtacattcgaatttaggtcagtattttctcaacagactaggatgatgtgcaagtgcaaatatagtaagttgcatcacttgacaaagttgaggaagatgggctatctcttgtagtgacttctgctgaagcaattgttttgaagttttttccaggccgatgtaatcgctacatgtagactatctggaagatatttttgtaatgcttaggattttgttgaatactagtgaatttgcttccttattagatgaacagaagaggttgtcttttaagacctgtacattatattgcaagttacatagattatatacatatacattatattacacttgggaatattgaaagttacct

SEQ ID NO: 17839 - protein, 344 aa, Glycine max
AFPIVCFYQTGFLGLWGKKVDAIDHHITEIDKLSKEIVEERENVTNDPKAIMPAAFVSFKTRWAAAVCAQTQQTRNPTLWLTEWAPEPRDVYWRNLPIPYVSLTVRRLIIAVTFFFLTFFFMIPIAFVQTLASLDGIQKAAPWLKPLVDIPFIKSFIQGFLPGIVLKLFLIFLPTILMIMSKFEGFGSISSLERRSASRYYLFNFVNIFLGNILTGTAFQQLSSFIHQPADQYPVTIGTAIPLKASFFITYIMVDGWASIAAEVLMLKPLIVYHLKNFFLVKTEKDREEAMDPGSIGFNTGEPRIQLYFLLGLVYAAVTPAVLPFITVFFGLAYLVFRHQVQRC

SEQ ID NO: 17840 - protein, 293 aa, Glycine max
MPAAFVSFKTRWAAAVCAQTQQTRNPTLWLTEWAPEPRDVYWRNLPIPYVSLTVRRLIIAVTFFFLTFFFMIPIAFVQTLASLDGIQKAAPWLKPLVDIPFIKSFIQGFLPGIVLKLFLIFLPTILMIMSKFEGFGSISSLERRSASRYYLFNFVNIFLGNILTGTAFQQLSSFIHQPADQYPVTIGTAIPLKASFFITYIMVDGWASIAAEVLMLKPLIVYHLKNFFLVKTEKDREEAMDPGSIGFNTGEPRIQLYFLLGLVYAAVTPAVLPFITVFFGLAYLVFRHQVQRC

SEQ ID NO: 17841 - protein, 223 aa, Glycine max
MIPIAFVQTLASLDGIQKAAPWLKPLVDIPFIKSFIQGFLPGIVLKLFLIFLPTILMIMSKFEGFGSISSLERRSASRYYLFNFVNIFLGNILTGTAFQQLSSFIHQPADQYPVTIGTAIPLKASFFITYIMVDGWASIAAEVLMLKPLIVYHLKNFFLVKTEKDREEAMDPGSIGFNTGEPRIQLYFLLGLVYAAVTPAVLPFITVFFGLAYLVFRHQVQRC

SEQ ID NO: 17842 - DNA, 1774 bp, Glycine max
aaagaacttgctaatattgagcaagataagcttgcaaaacggattcaggaatacagaacacaggcagagctggagaatatacgagcttctagcaattatatagaaaccgttctaggttctgatggcacccatgttgtgggtttgaactcttacagaagttttgaagcaggggtgcaacctgcaacaaccaaaggggaggttcaaacagttaaacagggttatctgttaaaacgatcatcaagctcacgtggagattggaaacggaggttctttgtacttgataaccaagggaatttatattattacagagtgaagggtgtcaaacccatgggctctcagtcatataattatactcgctcgtctgaacaaaacagtggcatgtttggtagattccgtacaagacacaatagggccacatctctaaatgaggatattttaggttcttgtatggttgatctgtgcacatccactataaagatggatgcagatgatacagatttacgtctttgcttccgaataatttctccctcaaaatcatacacactacaggctgaaaatgaagctgataggatggactgggtaaacaaaattactggagctatcacatcgctttttaattctcagtttcttcaacagcctcaatttggtagagtgcattcacagaataaaaactcagcagctggtgcttctttggcaagtcaatcagaggatagtcagaaatcattgagggatggcatatattccaaggaagtggttagtgtgtcaaagattttaaggggaattcctgggaatgataaatgtgctgagtgcagtgctcctgatccagactgggcatctctaaaccttggcatattgctgtgtattgaatgctctggagtgcatcgaaatcttggtgttcatgtctcaaaggtgagatctataacattagatgttagggtttgggaaaataccgttctagagttatttgataacttaggtaatgcttattgtaattctgtctgggagggcttgcttctacttgatcatgaaaggttaggtgaatcaaatgtgcctatgaaaccttgctctacagatgccttccaacacaaggagaagtacatccaagcaaagtatgtagagaaatcactgatcatccgagaagaggatatacctgggaatccttcagtttccataagaatctggcaagcagttcaggctgtaaatgtacgagaagtgtatcgccttattgtcacatcaacatcaaatctgataaacacaaagtattatgatgagtctcaccatgctgctgatgccaaagggcatcagcatgatcctgaagcctgtctgagagttgaagagactactgagacagagaggtgtttccgtggatggtcattattacatctggcatgtcattctggcagtgcactgatggttgagttgttgctccaatttggtgctgatgtaaacatgtgtgactatcatgaaagaactcccttgcaccattgcattacaagtgggaaaaatcaattggcaaagtttctattaagaaggggtgcaaggccgtcagttaaagatgccggaggactcactgtacttgaaagagcaatggagaggggagcaataactgacgaagaactatttatcttgcttgctgaatgccagtgaagatggatctggtatatatatatatattaggaatgttgaagatatgctgttgttcattaagaaaaagaaagttcaatttcttaattttgaatgcctaattcatccaaaggaatttcattaacttttc

SEQ ID NO: 17843 - protein, 548 aa, Glycine max
KELANIEQDKLAKRIQEYRTQAELENIRASSNYIETVLGSDGTHVVGLNSYRSFEAGVQPATTKGEVQTVKQGYLLKRSSSSRGDWKRRFFVLDNQGNLYYYRVKGVKPMGSQSYNYTRSSEQNSGMFGRFRTRHNRATSLNEDILGSCMVDLCTSTIKMDADDTDLRLCFRIISPSKSYTLQAENEADRMDWVNKITGAITSLFNSQFLQQPQFGRVHSQNKNSAAGASLASQSEDSQKSLRDGIYSKEVVSVSKILRGIPGNDKCAECSAPDPDWASLNLGILLCIECSGVHRNLGVHVSKVRSITLDVRVWENTVLELFDNLGNAYCNSVWEGLLLLDHERLGESNVPMKPCSTDAFQHKEKYIQAKYVEKSLIIREEDIPGNPSVSIRIWQAVQAVNVREVYRLIVTSTSNLINTKYYDESHHAADAKGHQHDPEACLRVEETTETERCFRGWSLLHLACHSGSALMVELLLQFGADVNMCDYHERTPLHHCITSGKNQLAKFLLRRGARPSVKDAGGLTVLERAMERGAITDEELFILLAECQ

SEQ ID NO: 17844 - protein, 439 aa, Glycine max
MGSQSYNYTRSSEQNSGMFGRFRTRHNRATSLNEDILGSCMVDLCTSTIKMDADDTDLRLCFRIISPSKSYTLQAENEADRMDWVNKITGAITSLFNSQFLQQPQFGRVHSQNKNSAAGASLASQSEDSQKSLRDGIYSKEVVSVSKILRGIPGNDKCAECSAPDPDWASLNLGILLCIECSGVHRNLGVHVSKVRSITLDVRVWENTVLELFDNLGNAYCNSVWEGLLLLDHERLGESNVPMKPCSTDAFQHKEKYIQAKYVEKSLIIREEDIPGNPSVSIRIWQAVQAVNVREVYRLIVTSTSNLINTKYYDESHHAADAKGHQHDPEACLRVEETTETERCFRGWSLLHLACHSGSALMVELLLQFGADVNMCDYHERTPLHHCITSGKNQLAKFLLRRGARPSVKDAGGLTVLERAMERGAITDEELFILLAECQ

SEQ ID NO: 17845 - protein, 422 aa, Glycine max
MFGRFRTRHNRATSLNEDILGSCMVDLCTSTIKMDADDTDLRLCFRIISPSKSYTLQAENEADRMDWVNKITGAITSLFNSQFLQQPQFGRVHSQNKNSAAGASLASQSEDSQKSLRDGIYSKEVVSVSKILRGIPGNDKCAECSAPDPDWASLNLGILLCIECSGVHRNLGVHVSKVRSITLDVRVWENTVLELFDNLGNAYCNSVWEGLLLLDHERLGESNVPMKPCSTDAFQHKEKYIQAKYVEKSLIIREEDIPGNPSVSIRIWQAVQAVNVREVYRLIVTSTSNLINTKYYDESHHAADAKGHQHDPEACLRVEETTETERCFRGWSLLHLACHSGSALMVELLLQFGADVNMCDYHERTPLHHCITSGKNQLAKFLLRRGARPSVKDAGGLTVLERAMERGAITDEELFILLAECQ

SEQ ID NO: 17846 - DNA, 1748 bp, Glycine max
aataaaaaaacaaagcacacgctccacattggcatcgacttaatgcgtggtttccctcgccggagatcggtggaaaaccggtcatcttcccggcggagaccctccatcttctacggcgccggcaattcggaatctatggacgccgacgacttcgccgacgtctttggtggcccaccgcgaactctccttgcgcacaaattctcgagctctggttctttttacgaggaagttttccgaccaccagagttcacgttcccggcacctaaggatggccggagcttgccggtgttcaggattccggcgaggaatgagggattttacagcgacatattcaggtcggacgatgaccggagatcgagagagcggtcaaggtcactgtcgaaagagaattcgtcgtcggcgatgagttcggaggagttaagccctcgccggccggcgattggagatgacgtggcactttctggttttgcttcaaagctaaggccaatcaatattccatggagatggaatccatccactgtgatgcctgaggctgaggaatacacaagtaaacttggggtgcccctttttgcatgcaaggatcagtcatttgaaattcagcatcaggacaatgaatacaaggagaacttcagaagcccccatttaggatcctcaagaagagcctcatccccagaaaccattagtcttgaatccaattcatatcaaagcaccaaagtgttcactgatgactgggagctcaattccccattttctgtcgtctcttcgctttatcaagaacctgaggcaaaattttctgtgcatgatcgtgtgctttcagaccaaattatagaagatgatgatgacgacgacgacgacgatattatgagctcctatgtcattgaactcaactccaacctcagaagggaagagtgtggagaatcagccattgatgaagcaattgcatgggccaaagagaagtttcaatcgcaaagctctgatgaagaatcaagcataagaaacgatggcaaagagcaaactgttggaataggaggctctgatgcaagtgaataccatgacaatggaattggaatagttcaaactcaggagaagcaacagacagaaacagagaagttagacagagatataagattgtggtcatctggcaaggaaacagatattaggctactactttcaacattacatcatattctaaggcctgagagtggctggtatgctattcctcctaagagtctattagaaagctcacaggtgaagaaggcttatcagaaagcaaggttatgcctgcacccagacaaactgcagcaaagaggagcaacactccttcagaagtatgtagcagagaaggctttctcaattcttcaggatgcatgggctgcattcatttccatagatgtttccttctagccagtggatgactctaatcttgataactcagttttgtcttgagatttgtggacaaacaccaagcttgacattcgaaatgtcgggagtgtttgttgttgacaagcagcatatatagctaaatacatgaaacttgaacacatcagctcttttgtacaaatagtttactgatggatctgctgttctatttatgtttgtatcataacttcataagctgtttgttgcttaggtaggtattgtttctgatgtagttaacagaaggtaatttgattggccttagtatttgatttgtatatgatatgaaatggaaacaagagttagtttgtatgtgattcatatggaaaccc

SEQ ID NO: 17847 - protein, 467 aa, Glycine max
NKKTKHTLHIGIDLMRGFPRRRSVENRSSSRRRPSIFYGAGNSESMDADDFADVFGGPPRTLLAHKFSSSGSFYEEVFRPPEFTFPAPKDGRSLPVFRIPARNEGFYSDIFRSDDDRRSRERSRSLSKENSSSAMSSEELSPRRPAIGDDVALSGFASKLRPINIPWRWNPSTVMPEAEEYTSKLGVPLFACKDQSFEIQHQDNEYKENFRSPHLGSSRRASSPETISLESNSYQSTKVFTDDWELNSPFSVVSSLYQEPEAKFSVHDRVLSDQIIEDDDDDDDDDIMSSYVIELNSNLRREECGESAIDEAIAWAKEKFQSQSSDEESSIRNDGKEQTVGIGGSDASEYHDNGIGIVQTQEKQQTETEKLDRDIRLWSSGKETDIRLLLSTLHHILRPESGWYAIPPKSLLESSQVKKAYQKARLCLHPDKLQQRGATLLQKYVAEKAFSILQDAWAAFISIDVSF

SEQ ID NO: 17848 - protein, 453 aa, Glycine max
MRGFPRRRSVENRSSSRRRPSIFYGAGNSESMDADDFADVFGGPPRTLLAHKFSSSGSFYEEVFRPPEFTFPAPKDGRSLPVFRIPARNEGFYSDIFRSDDDRRSRERSRSLSKENSSSAMSSEELSPRRPAIGDDVALSGFASKLRPINIPWRWNPSTVMPEAEEYTSKLGVPLFACKDQSFEIQHQDNEYKENFRSPHLGSSRRASSPETISLESNSYQSTKVFTDDWELNSPFSVVSSLYQEPEAKFSVHDRVLSDQIIEDDDDDDDDDIMSSYVIELNSNLRREECGESAIDEAIAWAKEKFQSQSSDEESSIRNDGKEQTVGIGGSDASEYHDNGIGIVQTQEKQQTETEKLDRDIRLWSSGKETDIRLLLSTLHHILRPESGWYAIPPKSLLESSQVKKAYQKARLCLHPDKLQQRGATLLQKYVAEKAFSILQDAWAAFISIDVSF

SEQ ID NO: 17849 - protein, 422 aa, Glycine max
MDADDFADVFGGPPRTLLAHKFSSSGSFYEEVFRPPEFTFPAPKDGRSLPVFRIPARNEGFYSDIFRSDDDRRSRERSRSLSKENSSSAMSSEELSPRRPAIGDDVALSGFASKLRPINIPWRWNPSTVMPEAEEYTSKLGVPLFACKDQSFEIQHQDNEYKENFRSPHLGSSRRASSPETISLESNSYQSTKVFTDDWELNSPFSVVSSLYQEPEAKFSVHDRVLSDQIIEDDDDDDDDDIMSSYVIELNSNLRREECGESAIDEAIAWAKEKFQSQSSDEESSIRNDGKEQTVGIGGSDASEYHDNGIGIVQTQEKQQTETEKLDRDIRLWSSGKETDIRLLLSTLHHILRPESGWYAIPPKSLLESSQVKKAYQKARLCLHPDKLQQRGATLLQKYVAEKAFSILQDAWAAFISIDVSF

SEQ ID NO: 17850 - DNA, 1203 bp, Glycine max
atttaacagaggctagcactgaggcaaatgcaaatccagaatcgactgaagacagtgccaaagtaaaaattaaacaggaaaaaagtcaatggaccgaggcagaaagcaggtggatttctctaactgaaaaactgagagctgaacttgaagctagcaggtcactagctgaaaagaggaagcaggaactagatactgagaggaagtgtgctgaggaactgaataaaacaatgcaaatggctatagaaggtcatacacgaactttagaacagtatgctgatttagaagagaaacatatccaattgcttgaaaggcatagaaagatccaggatggaattgatgatgtcaaggaagcagcttccggagccggggttagaggtgcagactctaaattcataaatgaccttgctgcagaaatttctgcattaaaagcagaaacagaaaaagaaaaagaaatgaaaatcctaagagatgaaaatagaggtcttcgagctcaactgaaggatactgctgaagcagtgcaagctgcaggtgaacttcttgtgcgacttaatgaagcagaagaaggtgtcattactgcacagggttgatggtggttaaacatatcaagatgttggaacctcgctcccgaagatttccgagcatggttgtaggcagattggtattgatatcgattggaccatataagagatatgagatcggatgatacacaatcatcgaccctcaaacacaaagtctatggaaactaagttatgttatggggattgaaccgtcatctgactcaaaatgtacacaattctcgtaccttaagcccaatgtgtgtagaaattaagttactaggattgaatggtgatccaaccaagagagtataattattataattaatatttggccattttttttatcaatggaaaacaaaataacaacatagaaagaaaaatggcagcctggtataagaagtacctatggcatcagccataagtaaactatgcatactactaggacaagactgatacaaagaaaaactaaatttaatcatatgtgcaaagtttgttagtgtttgcttatatgataaagctcctttgacaactaattcacatataataattttatcatacttataccaaaaacattatccagtataatgatctgagttcttgttcacacttgtagaaattagaagccaagatcaacctaaaaatatag

SEQ ID NO: 17851 - protein, 194 aa, Glycine max
LTEASTEANANPESTEDSAKVKIKQEKSQWTEAESRWISLTEKLRAELEASRSLAEKRKQELDTERKCAEELNKTMQMAIEGHTRTLEQYADLEEKHIQLLERHRKIQDGIDDVKEAASGAGVRGADSKFINDLAAEISALKAETEKEKEMKILRDENRGLRAQLKDTAEAVQAAGELLVRLNEAEEGVITAQG

SEQ ID NO: 17852 - protein, 119 aa, Glycine max
MQMAIEGHTRTLEQYADLEEKHIQLLERHRKIQDGIDDVKEAASGAGVRGADSKFINDLAAEISALKAETEKEKEMKILRDENRGLRAQLKDTAEAVQAAGELLVRLNEAEEGVITAQG

SEQ ID NO: 17853 - protein, 117 aa, Glycine max
MAIEGHTRTLEQYADLEEKHIQLLERHRKIQDGIDDVKEAASGAGVRGADSKFINDLAAEISALKAETEKEKEMKILRDENRGLRAQLKDTAEAVQAAGELLVRLNEAEEGVITAQG

SEQ ID NO: 17854 - DNA, 1310 bp, Glycine max
attaaaggagggtgatgtgattgtcagctttgatgatgttcgtgttggtagtgaaggaacagtcccattcagatcaaatgagcgaattgccttccacttcctcattagtcaaaaatttgcaggtgatactgcagagcttggtatcatcagagcagggtcattaataaaaactaaagttgttttaaactcacgagttcatttggttccctatcacattgatgaaggtcagccttcctatttaataattgctggtttagtgttcacacccctctcagagccattgattgagtacgttgtatttattatatatttggcagactttacagtgttttgttctttccttcttttttttagttgagtgttgtgagttagtatttaattcattcattatgaaacttttggcagggaagaatgtgaagattctatagggctaaaattattggcaagggcacgttattcattggcaaagtttaaaggggagcaaattgtaattctttcacaggtattggcaaatgaagtcaacataggttatgaagatatgggcaatcagcaggttgtaaaattcaatggaactcgaattaaaaacattcatcaccttgcgcacctcattgattcatgcaaagacaggtatctgcgtttcgaatttgaagatagctatgtagctgttttagagaaagaatctgttaccgctgcttcaccctccgtactgagtgattatggaatcccatctgaaagatcgtctgatcttttgaaaccatatgtggatgcactagaagtagaaggtgaccaaccagcagacgaggaatttggtgatagcccggtttcaaattatgaatttggccctgatggactactctgggcataagaaacttgtgtctgaagttatcagtgtgaaatttctcatagcgtcagcatttgaagcaagtgatcacaattttgggctgcagagaaagtgcagcaacagtatggggcaaccttgatgtgaacacattatgctaccatgggggcatgttagaagccatctatttaaattgaatttagaaatgcgtaggaccataggaaagagagttcatgattattttttccagtaggttttattctttcgtgtcagtcttctacatttaataaacctgaataatctattcaggtttgatgtctaaatttttaacgagcattctgtatttttaaggaaatagtgcacataggagtgacttgcatacgcctttgatgcagtcaatgtaacattttacaatacattgattttaaatttgttctgattgaagttaaatggaatcaatgtaacatttatg

SEQ ID NO: 17855 - protein, 118 aa, Glycine max
LKEGDVIVSFDDVRVGSEGTVPFRSNERIAFHFLISQKFAGDTAELGIIRAGSLIKTKVVLNSRVHLVPYHIDEGQPSYLIIAGLVFTPLSEPLIEYVVFIIYLADFTVFCSFLLFFS

SEQ ID NO: 17856 - protein, 108 aa, Glycine max
MGNQQVVKFNGTRIKNIHHLAHLIDSCKDRYLRFEFEDSYVAVLEKESVTAASPSVLSDYGIPSERSSDLLKPYVDALEVEGDQPADEEFGDSPVSNYEFGPDGLLWA

SEQ ID NO: 17857 - DNA, 2673 bp, Glycine max
acaactcaaactgcttcattgcattattgcagataagatcaaccctactcccttcagattcgggccaagatggcatcacttcatgctaatgtgacatcagttgtttgcaagagtggcaaccatgcttctcaatcgaaattcacaagctcttcattcttgcctgggtttgatgttgttggtcgtgcttcaaatgcttggaagaaagaacttgtcccatcttccatttccttggtgcctagagccacactaacatttgatcccccaactaccaactcagacaaaaccaaacaaaggaagcacactgttgaccctgcttctccagattttcttgcccttccttcatttgaacagtgctttccaaagagcaccaaagaacacagagaagtcactcatgaagaaactggtcatgtgctcaaagttccctttcgtcgagttcacctgtctggagaagaaggacactttgatacctatgacactagcggtccccaaaatgtaaacccaaggactggactcccacagttgcgcaaagagtgggttgataggagggagaaactgggttatccaagatttactcagatgtactatgctaagcaaggaatcatcacggaagagatgctttactgtgccactcgtgagaaccttgacccagagtttgtgaggtcagaagttgctcgtggacgtgctatcattccttccaacaagaaacacttggagttagagcccatgatagttggaagaaactttttggtaaaagtaaatgccaacattggaaattctgcagttgcaagttctatagaagaggaagtttacaaggttcaatgggcaactatgtggggagcagatactgcaatggacctctcaactggtcgccatatccatgaaactcgagagtggatcctacgcaactctgctgtaccagttgggactgtgcctatttatcaagcacttgaaaaagttaatgggatcgctgaggatcttaactgggaggttttcagggacaccctgattgaacaagctgagcagggtgtagattacttcaccatccatgcaggagttcttctgagatatgttccattaacggcaaggcgcatgacaggaatagtatccaggggagggtctattcatgcaaagtggtgcttagcttaccacaaagagaattttgcttatgagcactgggatgagatacttgacatctgcaaccagtatgatgtggctctatccattggtgatgggctaagacctggatccatctatgatgcaaatgacacagcacaatttgctgagctcttgacacaaggagaactgacccgtagagcatgggaaaaggatgttcaggtgataccaatcaaactttctttattgcatgatactaataattttatggctaaatgtaatgatttagtctttaacaatgtttgcatgtctatttattgtattacttttagttgctaattcttcagcatgaacaattaagattttccaaggataattctggtcacatattattaaaattacttactttgataggaataggctaataaataatgataataataataatccatcacatgggaaaggtgtattgaaaagatgctgttgaatttaccgatgaagttcctagttgggccaccttgtacaactaaatataatgcactatgtttctataaagattttgatatatggtgatcctatctaatttcgtatgatattaaactatcatcatctgatgcgatattacctgatatatctctggagacgatgggggcttattgtatactgagttactttacaggtgatgaatgaaggacctggacacatcccaatgcacaagattcctgaaaacatgcagaaacagttagaatggtgtagtgaagcgcctttttacactcttggtcctttaacaactgatattgcccccggctatgatcacatcacctctgcaattggtgctgccaatattggggcacttggtactgctcttctctgttatgtgactccaaaggaacatcttgggttgccaaaccgggatgacgtgaaggctggagttatagcctacaagatagcggctcatgctgctgatttagccaaaggtcatccatatgctcaagcctgggatgatgcattaagcaaggcaagatttgagttccgatggatggaccagtttgctttgtcattggatccgatgacagccatgtccttccatgacgaaaccctgccagcagatggtgcaaaagtggctcatttctgctcaatgtgtggccctaaattctgctctatgaagataacggaggatgtgaggaagtatgctgaggaacatggctatggaactgatgaagctttgcagcgtgggatggatgctatgagtgctgaatttcaagctgccaagaaaactatcagcggggagcaacatggtgaagctggcggagagatttacttgccagaagaatacgttagttccaagaggacttaaatggagcaaatcagttggaagaacttggagctagcttcccaactggcttatcagggtgtggagaagcattattaagccttaggaataggagagtaagtactgtttgtgaatgtctttggtttaagaactccgtcttatgtcaacttgtattctgttatacagttctcagcaataaactgctctggcaatctagtttcatgtac

SEQ ID NO: 17858 - protein, 460 aa, Glycine max
MASLHANVTSVVCKSGNHASQSKFTSSSFLPGFDVVGRASNAWKKELVPSSISLVPRATLTFDPPTTNSDKTKQRKHTVDPASPDFLALPSFEQCFPKSTKEHREVTHEETGHVLKVPFRRVHLSGEEGHFDTYDTSGPQNVNPRTGLPQLRKEWVDRREKLGYPRFTQMYYAKQGIITEEMLYCATRENLDPEFVRSEVARGRAIIPSNKKHLELEPMIVGRNFLVKVNANIGNSAVASSIEEEVYKVQWATMWGADTAMDLSTGRHIHETREWILRNSAVPVGTVPIYQALEKVNGIAEDLNWEVFRDTLIEQAEQGVDYFTIHAGVLLRYVPLTARRMTGIVSRGGSIHAKWCLAYHKENFAYEHWDEILDICNQYDVALSIGDGLRPGSIYDANDTAQFAELLTQGELTRRAWEKDVQVIPIKLSLLHDTNNFMAKCNDLVFNNVCMSIYCITFSC

SEQ ID NO: 17859 - protein, 291 aa, Glycine max
MYYAKQGIITEEMLYCATRENLDPEFVRSEVARGRAIIPSNKKHLELEPMIVGRNFLVKVNANIGNSAVASSIEEEVYKVQWATMWGADTAMDLSTGRHIHETREWILRNSAVPVGTVPIYQALEKVNGIAEDLNWEVFRDTLIEQAEQGVDYFTIHAGVLLRYVPLTARRMTGIVSRGGSIHAKWCLAYHKENFAYEHWDEILDICNQYDVALSIGDGLRPGSIYDANDTAQFAELLTQGELTRRAWEKDVQVIPIKLSLLHDTNNFMAKCNDLVFNNVCMSIYCITFSC

SEQ ID NO: 17860 - protein, 279 aa, Glycine max
MLYCATRENLDPEFVRSEVARGRAIIPSNKKHLELEPMIVGRNFLVKVNANIGNSAVASSIEEEVYKVQWATMWGADTAMDLSTGRHIHETREWILRNSAVPVGTVPIYQALEKVNGIAEDLNWEVFRDTLIEQAEQGVDYFTIHAGVLLRYVPLTARRMTGIVSRGGSIHAKWCLAYHKENFAYEHWDEILDICNQYDVALSIGDGLRPGSIYDANDTAQFAELLTQGELTRRAWEKDVQVIPIKLSLLHDTNNFMAKCNDLVFNNVCMSIYCITFSC

SEQ ID NO: 17861 - DNA, 1351 bp, Glycine max
gtgaaggctttcacttgtgagcttagaaaactgaagatgggtttcacaggggagttggtaagaagtgtcttctccaaaaatcgttctgatgggtctcatgaaaacaaagtgaggcgcaatagtgctaaaaatagaagaatgttatctgtgaggtcattcttgtgtggtgatgaattcaattcagtccttgcagagaatgattcagcttcagttaagagctctgaagtcacggtttcacagtccgtacatgagggcttgttaaacgatgaaggagacactgaaagtgaagaaactgtggagaatgtagcacagaacaggccaagttcaaactccaaaaagtcattgaatgaggaagaagcagctgttcttattcaatcagcatttagaggcttcctgttgaggcgtcaaaatggagaaatcaaatcacaaactggaaaagatgagttcaatttagtaacagaaagtccagacaaaaagtccataggcacatcaattgatgtccaaacctcaaactctacggaagttttctctgtcgaaggagaaataaagggcatttgccaccgtattcagcgcaggaccagaactcaagcaataaagcaaaaggaagattgggatgacagcacagtaagtagctatgtttcaaaaatgaggatgcagaatagaatggaggcttcaaccaggagggaaagagcactggcttatgctttctcacaacagctaagaatctgttcaaagaggaaatctccaaaatttaacagcatggagtcaaatatgagttggagttggcttgagcggtggatggcaacgcgccttccggagacatcatcagttgaaagccatgccatgaagcagtatgacccttctaatggtagtcacaaattcacaatcatgacaagattttttgatgctgctggggaagaaaaggagagctgcgggtcaaatgaagtgccccttcattttgataactattccatcaattcacgagaagaaaaagttagcttcaaaccacatacaccaaagaccaacttcaaagctaggagaactgtttcaaggcggaaaacagtgcctagttatcaattccatgaagagcagccaaaggtaagcaaaagagatggttcaggcgatgctagcaaggatattaagcaaaaacaaaagcaagtgggaagcaggacagaaattgcattaagcacctcgaaagcttctaatgtgtaacttgtaaaaaataaagtcaaagtatgtgtctagtattgagatgtaatggttggattctctagtagattcttgattccataaatcttatgtgtacattgtacataatatcaagtacaagattgagatggttgttctgatg

SEQ ID NO: 17862 - protein, 403 aa, Glycine max
VKAFTCELRKLKMGFTGELVRSVFSKNRSDGSHENKVRRNSAKNRRMLSVRSFLCGDEFNSVLAENDSASVKSSEVTVSQSVHEGLLNDEGDTESEETVENVAQNRPSSNSKKSLNEEEAAVLIQSAFRGFLLRRQNGEIKSQTGKDEFNLVTESPDKKSIGTSIDVQTSNSTEVFSVEGEIKGICHRIQRRTRTQAIKQKEDWDDSTVSSYVSKMRMQNRMEASTRRERALAYAFSQQLRICSKRKSPKFNSMESNMSWSWLERWMATRLPETSSVESHAMKQYDPSNGSHKFTIMTRFFDAAGEEKESCGSNEVPLHFDNYSINSREEKVSFKPHTPKTNFKARRTVSRRKTVPSYQFHEEQPKVSKRDGSGDASKDIKQKQKQVGSRTEIALSTSKASNV

SEQ ID NO: 17863 - protein, 391 aa, Glycine max
MGFTGELVRSVFSKNRSDGSHENKVRRNSAKNRRMLSVRSFLCGDEFNSVLAENDSASVKSSEVTVSQSVHEGLLNDEGDTESEETVENVAQNRPSSNSKKSLNEEEAAVLIQSAFRGFLLRRQNGEIKSQTGKDEFNLVTESPDKKSIGTSIDVQTSNSTEVFSVEGEIKGICHRIQRRTRTQAIKQKEDWDDSTVSSYVSKMRMQNRMEASTRRERALAYAFSQQLRICSKRKSPKFNSMESNMSWSWLERWMATRLPETSSVESHAMKQYDPSNGSHKFTIMTRFFDAAGEEKESCGSNEVPLHFDNYSINSREEKVSFKPHTPKTNFKARRTVSRRKTVPSYQFHEEQPKVSKRDGSGDASKDIKQKQKQVGSRTEIALSTSKASNV

SEQ ID NO: 17864 - protein, 357 aa, Glycine max
MLSVRSFLCGDEFNSVLAENDSASVKSSEVTVSQSVHEGLLNDEGDTESEETVENVAQNRPSSNSKKSLNEEEAAVLIQSAFRGFLLRRQNGEIKSQTGKDEFNLVTESPDKKSIGTSIDVQTSNSTEVFSVEGEIKGICHRIQRRTRTQAIKQKEDWDDSTVSSYVSKMRMQNRMEASTRRERALAYAFSQQLRICSKRKSPKFNSMESNMSWSWLERWMATRLPETSSVESHAMKQYDPSNGSHKFTIMTRFFDAAGEEKESCGSNEVPLHFDNYSINSREEKVSFKPHTPKTNFKARRTVSRRKTVPSYQFHEEQPKVSKRDGSGDASKDIKQKQKQVGSRTEIALSTSKASNV

SEQ ID NO: 17865 - DNA, 1276 bp, Glycine max
acacacactctcttgtttctctctcttcggtcaaaaacatgaatttggatacgcaacccggaacgccgtcgtattggtgctacagctgcactcgtttcgtgcacctctctgtccaagccaccatcgcctgcccccactgtcaaagcggtttcgtcgaagagatccgcgccggcgccgaagcctcgccacgccaccgtctaagtcctttccctgacgatcccctttctttccggcgacagggcttccgccgccgtaggagagaaggtgccggcaaccgctccccgttcaaccccgtcatcgtcctccgcggccccggcgacgactccgccgccgccgaccacgacggtgccagcacgttcgagctcttctacgacgacggcgatggcaccggcctccgccccctccctcccaccatgtcggagttcctcctcggctccggcttcgaccggttactggaacagtttgcgcagatggagatgaacggcttcggccggccggagaatccgccgacgtcgaaggcggcgatcgagtccatgccgacggtcgagatcggcgaaactcacgtcgaaaccgacgcgcactgcgccgtgtgcaaagaagtgtttgagctccacgcggaggcgcgtgagttgccgtgcaagcacatctaccacttccgagtgcatcctcccgtggctctcgatgcggaactcgtgcccggtgtgccgccacgagcttccttccgatttggaaactagagttccgagccagatcgacgaggaagcgataggattaacgatttggaggcttccaggaggcggattcgccgtagggcgattctccggcggccggagaaccggggagagtcatttgccggtggtgtacacggagatggacggtggacttaacacaaatggtggtgctcctaggagaatttctcgttctgttagaagcaatagggttagggaaagtcgagggtttggtagagtttttcgcaatttcttttcattctttggaagaattggttctagaaactcttcttcttcttctgaacatgggtctgtgagtagaagccgtagtcacgtgagttcaatgttcaatagaagctcgcggagacatagcaggacttgggttatggatgattgattaattggtgaatggtgatggcaattttgcaaagaatagtagtactttttttttttttttttaactttgggttatgagattcatttcacactgtaaatagcatgtaactagcaactatattgaaacaagttcagttttccctttgggaatc

SEQ ID NO: 17866 - protein, 244 aa, Glycine max
THSLVSLSSVKNMNLDTQPGTPSYWCYSCTRFVHLSVQATIACPHCQSGFVEEIRAGAEASPRHRLSPFPDDPLSFRRQGFRRRRREGAGNRSPFNPVIVLRGPGDDSAAADHDGASTFELFYDDGDGTGLRPLPPTMSEFLLGSGFDRLLEQFAQMEMNGFGRPENPPTSKAAIESMPTVEIGETHVETDAHCAVCKEVFELHAEARELPCKHIYHFRVHPPVALDAELVPGVPPRASFRFGN

SEQ ID NO: 17867 - protein, 232 aa, Glycine max
MNLDTQPGTPSYWCYSCTRFVHLSVQATIACPHCQSGFVEEIRAGAEASPRHRLSPFPDDPLSFRRQGFRRRRREGAGNRSPFNPVIVLRGPGDDSAAADHDGASTFELFYDDGDGTGLRPLPPTMSEFLLGSGFDRLLEQFAQMEMNGFGRPENPPTSKAAIESMPTVEIGETHVETDAHCAVCKEVFELHAEARELPCKHIYHFRVHPPVALDAELVPGVPPRASFRFGN

SEQ ID NO: 17868 - protein, 147 aa, Glycine max
MRNSCPVCRHELPSDLETRVPSQIDEEAIGLTIWRLPGGGFAVGRFSGGRRTGESHLPVVYTEMDGGLNTNGGAPRRISRSVRSNRVRESRGFGRVFRNFFSFFGRIGSRNSSSSSEHGSVSRSRSHVSSMFNRSSRRHSRTWVMDD

SEQ ID NO: 17869 - DNA, 1099 bp, Glycine max
tttagatctcaatgttgtaaaatatggtaaaaggtcttatctggactctcttgccagatgtaagagttgtcatgatctatactggagagatgagagacactgtaaaatttgccatatgacatttgagcttgattttgatctagaagaaagatatgcaatccacatagccacatgcagggagaaagaagacagcaatacatttcctaatcataaagtgctatcatcacagattcaatcactgaaagctgcagtttatgctattgagtctgttatgcctgaagatgccatggttggtgcttggaggaaatctgctcataagctatgggtaaaacggctcagacgcacctcaactttagtggagcttttgcaggttcttactgattttgttggtgccatcaataaggattggttgtatcaatgcaaatttctggatggggtggttgaagaaatcattgcatcttttgcatctatgccccatacaccatctgcccttgctctgtggttagtgaagttagatgccataattgctccctacctggacagagtccatcttcagaagaaacagggaaccagtcaacatggtgcttggcgataggtgcacttttacgtttgttgaagggcatgcgaattgaaatgaaggaactacctgttccgctccttgatcagagattcatgtgctggcttcacttggttctgaatttctagaacgactacaatttggccgaggctttttttttaatcctcccctccccgatttatacaggcaatcttgttggtcagatgtataggtttacattttttctatataaaaaaatactaggtagctcgagttttttggtgcgtaatgccacttggtttctacaaggtcgcccatttttcttgcttcatgatgtctggtcttctcgttcgagaaatcaattttgtctttgtatcttacagaataataatgtcgtactgattgaaaataatttgtattatgagaggatagagttttaggccgtctataaagttaaactgactggcaatgtacaatttgctttgctttaaataccctaaaaatagagcaagtaaactgcctacctttccgattgtttaaaag

SEQ ID NO: 17870 - protein, 197 aa, Glycine max
LDLNVVKYGKRSYLDSLARCKSCHDLYWRDERHCKICHMTFELDFDLEERYAIHIATCREKEDSNTFPNHKVLSSQIQSLKAAVYAIESVMPEDAMVGAWRKSAHKLWVKRLRRTSTLVELLQVLTDFVGAINKDWLYQCKFLDGVVEEIIASFASMPHTPSALALWLVKLDAIIAPYLDRVHLQKKQGTSQHGAWR

SEQ ID NO: 17871 - protein, 159 aa, Glycine max
MTFELDFDLEERYAIHIATCREKEDSNTFPNHKVLSSQIQSLKAAVYAIESVMPEDAMVGAWRKSAHKLWVKRLRRTSTLVELLQVLTDFVGAINKDWLYQCKFLDGVVEEIIASFASMPHTPSALALWLVKLDAIIAPYLDRVHLQKKQGTSQHGAWR

SEQ ID NO: 17872 - protein, 107 aa, Glycine max
MPEDAMVGAWRKSAHKLWVKRLRRTSTLVELLQVLTDFVGAINKDWLYQCKFLDGVVEEIIASFASMPHTPSALALWLVKLDAIIAPYLDRVHLQKKQGTSQHGAWR

SEQ ID NO: 17873 - DNA, 1461 bp, Glycine max
gcaccctcgtacaggcggcacagcttcgtaccccgttctttttctcactgacaaccctaacctaaagtctccgctgcgcacagctgctccgccgtgactctgtggtcgacggtataaagtatatgccaaactaatgttaatttctcttcctctttactccatcattcatcaatctatcatatgtgaactttcaaaaatggtggatgtggttctgaatgaaaccagattatatgattggcatttatgcaaaagttgaatgatctaatgccgattaaatttccgagctaacccctgtctccgcattttcttcagattgtgttatatgcattgttgcagatgaaggtgaaaaagcagaagaggcacaggaagattttgacgttttacactgcttgcttcggttttcggaagccttacaaggttctatgtgatggcacatttgttcatcaccttcttgtgaatcgaataacccctgctgacacggccattggcaatgtcctcagtgctacgatcaagctctacacaacaagatgtgttctagctgagttgaaacgacttggtagctcgtattctgaggctctcgaggcagctcataaacttatagttgcaagatgtgagcatgaaaaatgtaagagcgcagatgcttgcatcatggaggttgttggagaaaaaaattctgagcatttctttgttgctagtcaggacactgacctgcggaaacagttgcaagaggtacctggtgtgcctctcatatttggtcttagaaatgctcttttccttgaatctccatctgcatttcagcggcaatatgtcaaaacttctgaagaaggacgattacatatgacacagaaggagtaccagatatttaaggatagggtaatgaatagattgactggtgaggaagccaacaattccattactgaaataatggaaattgaagattcagaagatcagaccataaatgtgcaggcagtagagaagggtattacctcaaggaatcgtatggaaatcaaggatgaacctcagttcaagagaaaaagagctaagggtccaaacccactttcatgcaagaagaagaaaagtgaaaaacaaaatattggtcctttgaaggaaacgaatgaagacaacacagtgaagagaagtaggaaaaggaagaggtcacataaacaaaaaatggcaacagaaacaagcagttaggtccatatatatatatatatatatatatatatatatacacagttacaaataggtatttttagaagagctccttgactttactgcttctgttgagtcgagagaaaagcaagttttaaatccatgctgacatggaaggggaagtgtatcgagattagttgcttgttgaattttatactgtgtctattttgctggctatcgtatttttacctacggatagccaaatagccgttgttcacggtggaaatagattctgatatttatgatctt

SEQ ID NO: 17874 - protein, 285 aa, Glycine max
MKVKKQKRHRKILTFYTACFGFRKPYKVLCDGTFVHHLLVNRITPADTAIGNVLSATIKLYTTRCVLAELKRLGSSYSEALEAAHKLIVARCEHEKCKSADACIMEVVGEKNSEHFFVASQDTDLRKQLQEVPGVPLIFGLRNALFLESPSAFQRQYVKTSEEGRLHMTQKEYQIFKDRVMNRLTGEEANNSITEIMEIEDSEDQTINVQAVEKGITSRNRMEIKDEPQFKRKRAKGPNPLSCKKKKSEKQNIGPLKETNEDNTVKRSRKRKRSHKQKMATETSS

SEQ ID NO: 17875 - protein, 181 aa, Glycine max
MEVVGEKNSEHFFVASQDTDLRKQLQEVPGVPLIFGLRNALFLESPSAFQRQYVKTSEEGRLHMTQKEYQIFKDRVMNRLTGEEANNSITEIMEIEDSEDQTINVQAVEKGITSRNRMEIKDEPQFKRKRAKGPNPLSCKKKKSEKQNIGPLKETNEDNTVKRSRKRKRSHKQKMATETSS

SEQ ID NO: 17876 - DNA, 1379 bp, Glycine max
attttttataagtcgcttgctttttttcttcttcttcttcttcttcttttttcattcattcatttgtatttaatctacattacaacttttttttttcattcattcatttgtgttagccttgtatgtttatttataagttttaaccttaagtatatatcatttgttttctgttgatattttatacctattaacctgtgcataataagtgcagtatatctttatagagtgaatagcttctgtacgctttctgcttcaatgaaagactctaactaaatataaactgactggagctggttattgtttagctgtgtaagcagagttgtgtccataaacttagtcctgtatggagagaaacatgcacgttccttgctttctaagttttgtcattgactacatcaggacagtgtccccgattcattagtatgcatgcagatatatgaaggggtataggccttgggaaggaaaagaaggattttgctcctctaaataagggaggaaaaatttgagaaaatcacattccttgttgtttgtttccttcttttggaatttaactatgtaggggctctaagctgattttgagagtgttgttaaatatctgctatagtggtattgcattgcagaattccttggatctgtaattgagactccgtccactactgcaactgctatgggtcttgtggttgtggcatgtgtcatacatcctcttgtcatctttgatcctcacccagacaaagaacccctaagttggagtactcgaatgaagattgctgttggagctgctcgtggccttgaatatctccattgtaaagcagatccacctgttatctacagggacttgaaatctgcgaacatcttgttagataatgaattcaacccaaaactgtcagattttgggcttgctaaacttggacctgttggagacaatacccatgtttcaaccagagtgatgggaacatatggttactgtgcaccagagtatgccatgagcggcaaattaactcttaaatctgatatatatagctttggtgtgcttttgttggagttgatcactggacgtagggcaatagatactaatagaagaccaggagagcaaaacttggtttcatgggtaaatatttagtttgtatagtttatttaaaaagaaattcccctttaagtttagtatgttagtcttagctttgtatgcaagtgattccttttagattttcatcttttcactagcatattgagatttctcatataaaattttatgagaaagtgtggaaaaactagaaattagagcatgtctcatctcattaatcattatgaaaactctagcgtgttataaggcgtttcctgccttcttcataaattataatgaatccttgggattctttgac

SEQ ID NO: 17877 - protein, 150 aa, Glycine max
MGLVVVACVIHPLVIFDPHPDKEPLSWSTRMKIAVGAARGLEYLHCKADPPVIYRDLKSANILLDNEFNPKLSDFGLAKLGPVGDNTHVSTRVMGTYGYCAPEYAMSGKLTLKSDIYSFGVLLLELITGRRAIDTNRRPGEQNLVSWVNI

SEQ ID NO: 17878 - protein, 120 aa, Glycine max
MKIAVGAARGLEYLHCKADPPVIYRDLKSANILLDNEFNPKLSDFGLAKLGPVGDNTHVSTRVMGTYGYCAPEYAMSGKLTLKSDIYSFGVLLLELITGRRAIDTNRRPGEQNLVSWVNI

SEQ ID NO: 17879 - DNA, 1297 bp, Glycine max
agggtcagagagagctctcgctacggatcaaagaacacttagatctcttgagggtgccaatataaaccggtctcttcttgcactaagcagctgtattaattctctggtagaaggcaagaaacacattccataccgaaactcaaaactcactcaacttctcaaggattcactaggaggaacttgtaacactgtcatgattgcaaacataagcccaagtaacctctcatttggtgaaactcagaacacagttcattgggctgatagagccaaggagattcgggcaaaggtaagtgatgcaaatgaggatcaattgccggtgcccgagatagaaactgaccaggccaagctggtacttgagctgcaaaaggagaatcgtgaattaagaatacaactagcacaacatcaacagaaattgttgaccctccaagcacaatccttagcttcccattcctccccaacaccaccaccttcagctggacctctttccactcctctaacttctgctcaaccaatcgaaaaacgaaggactagatcctctttcttggctggaacttgtttcactccagaaaccaagcagaagggagctgaactaaccatcaagacacttcaacggacggtgaaaacactagaggcagagatagagaaaatgaggaaggatcatagcttgcagctaaagcaaaaagatgatcttattcgcgagctttcgcaaaagggcggaaaacaggcattagcaactggagaactggggaagggagtggtgaccaggtctagcatacggccaaaggaaccaaacaatagtgagatgaagagtccaagtcaacgttttagatcaccagccccaactgccaagaaacgaagcttttgggacataaccacaactaatagtccatcagttactacagtaaatggtagaaaaactagaagtcatgtccttgctgaacctgctgcacctcctccatccatgcttcttcagcctggttttgctcgtcaaaaacccaatatttaagttaagtgatttttatgaggcagtggaaaggaagttgccagagcacagtgaagtacagtatttatatagagaaagatcattgcacgctttatatgctctcctcctttgtggccatctttttatttatgctctcctgctttttcattcactaccttcctacccccacaccatatttatcatatatgtacattctttgttttttcaatctagatacacctatattcttgtaagaatttgtctatgggctggtgatgctccttaaattaatttcctgttaggctttgatgtttc

SEQ ID NO: 17880 - protein, 334 aa, Glycine max
GSERALATDQRTLRSLEGANINRSLLALSSCINSLVEGKKHIPYRNSKLTQLLKDSLGGTCNTVMIANISPSNLSFGETQNTVHWADRAKEIRAKVSDANEDQLPVPEIETDQAKLVLELQKENRELRIQLAQHQQKLLTLQAQSLASHSSPTPPPSAGPLSTPLTSAQPIEKRRTRSSFLAGTCFTPETKQKGAELTIKTLQRTVKTLEAEIEKMRKDHSLQLKQKDDLIRELSQKGGKQALATGELGKGVVTRSSIRPKEPNNSEMKSPSQRFRSPAPTAKKRSFWDITTTNSPSVTTVNGRKTRSHVLAEPAAPPPSMLLQPGFARQKPNI

SEQ ID NO: 17881 - protein, 270 aa, Glycine max
MIANISPSNLSFGETQNTVHWADRAKEIRAKVSDANEDQLPVPEIETDQAKLVLELQKENRELRIQLAQHQQKLLTLQAQSLASHSSPTPPPSAGPLSTPLTSAQPIEKRRTRSSFLAGTCFTPETKQKGAELTIKTLQRTVKTLEAEIEKMRKDHSLQLKQKDDLIRELSQKGGKQALATGELGKGVVTRSSIRPKEPNNSEMKSPSQRFRSPAPTAKKRSFWDITTTNSPSVTTVNGRKTRSHVLAEPAAPPPSMLLQPGFARQKPNI

SEQ ID NO: 17882 - DNA, 1556 bp, Glycine max
ttcatgtagctcttcgtgctccaagagatgctgttatacagagtgatggaaacaatgttgtcccagatgtttggaatgttctggacaagatccaggagttctctgagcgggtccgcagtggatcttgggttggagctacaggaaaggaattgaaggatgttgttgccgttggtattggtggcagtttcttaggtccattatttgtgcacacagctcttcaaacagatcctgaagcaattgaatctgcaagagggcgtcagctacgctttcttgcaaatgttgatccaattgatgttgctagaaacatcacaggattaaatcctgaaacaaccctagtggtgattgtttcaaagacttttacgaccgccgaaaccatgttgaatgcccgaacactcagggaatggatttctaatgctctagggcccttagcagttgcaaaacatatggtggcagtcagtaccaatctcacacttgtggaagagtttggcattgatcccaataatgtttttgcattttgggactgggttggtggccgatatagtgtctgcagtgctgttggagtattgcctttatccctacaatatggtttctcagtaattgagaagtttttaaagggagcttccagcattgatcaacatatgtattcagaaccatttgaaagaaatctacctgtgcttttgggaatgttgagtgtatggaatgtctcatttcttggatatcctgcccgggctatcttaccctattctcaagccctggagaaatttgccccacacattcaacaggttagcatggaaagtaatggcaagggtgtttcaattgatggtgttccactaccatttgaggctggtgaaattgatttcggtgaaccaggaacaaatgggcagcacagtttttatcaacttatacaccagggacgcgttattccttgtgattttattggagttgtgaaaagtcagcaacctgtttatttgagtgatgaggttgtgagcaaccatgatgagctaatgtcaaacttttttgcacaaccagatgcccttgcctatgggaagaccgctgaacaattgcaaaaggagaatgttcctccacatcttgtgccacacaagacattctcaggcaaccgaccttctctcagccttctgcttccatcattgaatgcttataatattggacagttgttggcaatctatgaacacagagttgctgtagaaggttttatttggggcatcaattcttttgaccagtggggagtggagcttgggaagtcattagcctctcaagtgagaaagcaacttaatgcatctcgcacaaaaggagaaccggttcaaggctttaacttcagtactactgctatgttgacaagataccttcaggcaagtgcagacgtcccggctgatcttccaactcgcttacctcagatttaactgtcttttttgaggaatgttattttttttatattttaattggatcaaagtcatcttacaaatctcactcatataagctgttaaacagcatccttcaaacttttgtttctgggctacttattgagtaacttctag

SEQ ID NO: 17883 - protein, 472 aa, Glycine max
HVALRAPRDAVIQSDGNNVVPDVWNVLDKIQEFSERVRSGSWVGATGKELKDVVAVGIGGSFLGPLFVHTALQTDPEAIESARGRQLRFLANVDPIDVARNITGLNPETTLVVIVSKTFTTAETMLNARTLREWISNALGPLAVAKHMVAVSTNLTLVEEFGIDPNNVFAFWDWVGGRYSVCSAVGVLPLSLQYGFSVIEKFLKGASSIDQHMYSEPFERNLPVLLGMLSVWNVSFLGYPARAILPYSQALEKFAPHIQQVSMESNGKGVSIDGVPLPFEAGEIDFGEPGTNGQHSFYQLIHQGRVIPCDFIGVVKSQQPVYLSDEVVSNHDELMSNFFAQPDALAYGKTAEQLQKENVPPHLVPHKTFSGNRPSLSLLLPSLNAYNIGQLLAIYEHRVAVEGFIWGINSFDQWGVELGKSLASQVRKQLNASRTKGEPVQGFNFSTTAMLTRYLQASADVPADLPTRLPQI

SEQ ID NO: 17884 - protein, 348 aa, Glycine max
MLNARTLREWISNALGPLAVAKHMVAVSTNLTLVEEFGIDPNNVFAFWDWVGGRYSVCSAVGVLPLSLQYGFSVIEKFLKGASSIDQHMYSEPFERNLPVLLGMLSVWNVSFLGYPARAILPYSQALEKFAPHIQQVSMESNGKGVSIDGVPLPFEAGEIDFGEPGTNGQHSFYQLIHQGRVIPCDFIGVVKSQQPVYLSDEVVSNHDELMSNFFAQPDALAYGKTAEQLQKENVPPHLVPHKTFSGNRPSLSLLLPSLNAYNIGQLLAIYEHRVAVEGFIWGINSFDQWGVELGKSLASQVRKQLNASRTKGEPVQGFNFSTTAMLTRYLQASADVPADLPTRLPQI

SEQ ID NO: 17885 - protein, 325 aa, Glycine max
MVAVSTNLTLVEEFGIDPNNVFAFWDWVGGRYSVCSAVGVLPLSLQYGFSVIEKFLKGASSIDQHMYSEPFERNLPVLLGMLSVWNVSFLGYPARAILPYSQALEKFAPHIQQVSMESNGKGVSIDGVPLPFEAGEIDFGEPGTNGQHSFYQLIHQGRVIPCDFIGVVKSQQPVYLSDEVVSNHDELMSNFFAQPDALAYGKTAEQLQKENVPPHLVPHKTFSGNRPSLSLLLPSLNAYNIGQLLAIYEHRVAVEGFIWGINSFDQWGVELGKSLASQVRKQLNASRTKGEPVQGFNFSTTAMLTRYLQASADVPADLPTRLPQI

SEQ ID NO: 17886 - DNA, 1682 bp, Glycine max
atataagcttgtcagcattacagagaaaaagagagagagagaaagaaaagtaatggcaatggcaacgatggaagagattccacaaagcccagaagcgaagttggggatgcgagtggaggatctttgggacgttcaggaggcacagttgagtcccaccgagaagctcaacgcttgttttgaaagcatccctgtctctgcttttcctttggatccttcaaacacagaaattgagattaaatcagacgccaccctagcagatgctgttaagatattggcaggacacaacgttttcagcgcgcctgtggtggatgttgaggcgcctgaagacgctagttggattgacagatacatcggaattgttgagtttgctggaattgttgtatggattttgcatcagtctgaacctacgtctccgaggactccgtccactccatccagtgcaagggctattgcagctgcagctaatggagcggcttttgctctagaacttgaagccttaggccttggatctgctgcaacaactgcagggaacttttttgaggatctcacttcttctgaactttataagaataccaaggttcaacctagaagagtttttcttttaaatgcttcttgttctagctatttacttagtttgattactcttatttatttatgaatttaataactatgcattgtctttgtaaaaacttagacggtcaaccaattagaaatcaccgttggtatgatgaataagatagttagtcaacaaacttatcatatatggtgatatatatggtggtatgtgactgtgactggatgacagtgtaaagttttcggtgcataacctattttttctttaattatttcactggctaactttctggcaaacaggttcgtgatatttcagggacattccgctgggccccgtttcttgctttagagagatcaaactcatttctaaccatgctcttgctgctttctaagtacaagatgaagagtgttcctgtgttggatttaggctctggtgcaattgataacattattacacaatctgctgtgattcatatgctggcagaatgcgctggacttcagtggttcgaaagttggggaaccaagaaactatctgaagttggtcttcccctggtgacaggaaatcaaatcatcaaggtttatgaggatgaaccagtcctccaagcatttaaagtaatgaggaaaaaaagggtcggaggggttcctgtaatcgaaagagagaccaaaaaagcagttggtaatataagtttgcgagacgttcaattcttgctaactgcaccagaaatctatcatgattatagaggtattacagtaaaagacttcctaactgaggttagaagctacttggagaagaataaaaatgcatccccaatgttaaatgaatatgtcacatgcaaaaaggactgtacaatcaaagagttgattcaactacttgatcaagagaagattcacagggtctatgtggtggacgatgatggggatttgcaaggactaatcacactaagagatatcatctcaaggctagtacacgaaccgcgtggctattttggtgatttctttgatggtgttctaccgctgcctgcaaacagcagagtttaacaggcaaggttacaagggagaataacctgctggtgcagcttttttttttttaaaaaaagaaaaatttaagt

SEQ ID NO: 17887 - protein, 221 aa, Glycine max
MLLLLSKYKMKSVPVLDLGSGAIDNIITQSAVIHMLAECAGLQWFESWGTKKLSEVGLPLVTGNQIIKVYEDEPVLQAFKVMRKKRVGGVPVIERETKKAVGNISLRDVQFLLTAPEIYHDYRGITVKDFLTEVRSYLEKNKNASPMLNEYVTCKKDCTIKELIQLLDQEKIHRVYVVDDDGDLQGLITLRDIISRLVHEPRGYFGDFFDGVLPLPANSRV

SEQ ID NO: 17888 - protein, 218 aa, Glycine max
YKLVSITEKKRERERKVMAMATMEEIPQSPEAKLGMRVEDLWDVQEAQLSPTEKLNACFESIPVSAFPLDPSNTEIEIKSDATLADAVKILAGHNVFSAPVVDVEAPEDASWIDRYIGIVEFAGIVVWILHQSEPTSPRTPSTPSSARAIAAAANGAAFALELEALGLGSAATTAGNFFEDLTSSELYKNTKVQPRRVFLLNASCSSYLLSLITLIYL

SEQ ID NO: 17889 - protein, 212 aa, Glycine max
MKSVPVLDLGSGAIDNIITQSAVIHMLAECAGLQWFESWGTKKLSEVGLPLVTGNQIIKVYEDEPVLQAFKVMRKKRVGGVPVIERETKKAVGNISLRDVQFLLTAPEIYHDYRGITVKDFLTEVRSYLEKNKNASPMLNEYVTCKKDCTIKELIQLLDQEKIHRVYVVDDDGDLQGLITLRDIISRLVHEPRGYFGDFFDGVLPLPANSRV

SEQ ID NO: 17890 - DNA, 1825 bp, Glycine max
ataatgttcagcttttgacaactgttgatgctgatgggggtctccctgcaagcccgcgtattcgcttcaacaaggatggaactcttttagctgtctctgcaaatgagaatggaattaaaattttagccaatggggatggtattcgcttgtcgcgcacactagagaattctttatatgatgcatcaagagcatctgaagccttgacaaagcctataattaatccaatttctgctgctgccgctgctgcaaccagtgctgcactggcagagagggcttcatctgtagtagctattgctggaatgaatggggatacccgaaacttgggtgatgttaaacctagaataagtgaagaatctaatgacaagtcaaagatatggaagctcactgaaatcaacgaacaatctcaatgtagatccttgaagctaccggagaatgtaagagtaaccaagatatcaaggttgatatatacaaattcaggtaatgctattctggcattagcatcaaatgccattcacctactctggaaatggcagcgaaatgagcgtaactcatctggcaaggccactgctaccttgcagcctcagttgtggcaaccatcgagtggcatcctgatgacaaatgacattgctgatagcaatcctgaggatgctgtaccctgctttgcgttgtccaaaaatgactcatatgtaatgtctgcatcaggagggaagatatctctgtttaatatgatgacttttaagactatgacaactttcatgcctccaccacctgcggcaacctttcttgctttccatcctcaggataacaatattattgctataggcatggatgattcctctattcaaatatataatgtccgtgttgatgaggttaaaagtaaactcaaaggccataataaaagaattactggtcttgctttctctcatgtattgaatgtattagtttcatctggagcagatgctcagatttgtgtctggaatactgatggatgggaaaagcagaagtctagattcttgcagcttccttctgggagaacaccaccggcacagtcagatacccgtgtacagtttcatcaagatcaaatacagttcttggttgtacatgaaactcagctcgccatttatgaagcaacaaaactagaaggtctaaagcagtggttcccgcgagactcatctgcaccaatatcctatgcaactttctcatgtgatagccagctggtatatgccagctttttagacgcaacaatctgtgtatttagtgcttcaaacctcagattacgttgtcggatcaatccttcttcatatcttcctgcaagtgtcagttccaacacacaaccacttgtaatcgctgcacaccctcaagaaccaaatcagtttgctgtcggactgtctgatggtggagttcatgtttttgaaccccttgaatctgaaggcaagtggggtgtgcctcccccgattgagaatgggtcagcaagcaatgtggcagctgcttcagttggaccttctccagatcaagctcaaagatgatccatgtcagccgaagacaagtttcttttacatacttggcttgctggccattttaagaactaaatttgtacttaagttaatgcagggcactctccaattcagttgatccagctaagttaaatccatcaatcgtacatgccaaaagtttggagcaacttctttggttgaagaccaaaatcacattgtaatttgccaatagatgtgaaaaattcttttaaagtttaatgctaagatgatgtacaagtccttttgagtactttcaagttgtttttggctatctaattagattggttgatcct

SEQ ID NO: 17891 - protein, 507 aa, Glycine max
NVQLLTTVDADGGLPASPRIRFNKDGTLLAVSANENGIKILANGDGIRLSRTLENSLYDASRASEALTKPIINPISAAAAAATSAALAERASSVVAIAGMNGDTRNLGDVKPRISEESNDKSKIWKLTEINEQSQCRSLKLPENVRVTKISRLIYTNSGNAILALASNAIHLLWKWQRNERNSSGKATATLQPQLWQPSSGILMTNDIADSNPEDAVPCFALSKNDSYVMSASGGKISLFNMMTFKTMTTFMPPPPAATFLAFHPQDNNIIAIGMDDSSIQIYNVRVDEVKSKLKGHNKRITGLAFSHVLNVLVSSGADAQICVWNTDGWEKQKSRFLQLPSGRTPPAQSDTRVQFHQDQIQFLVVHETQLAIYEATKLEGLKQWFPRDSSAPISYATFSCDSQLVYASFLDATICVFSASNLRLRCRINPSSYLPASVSSNTQPLVIAAHPQEPNQFAVGLSDGGVHVFEPLESEGKWGVPPPIENGSASNVAAASVGPSPDQAQR

SEQ ID NO: 17892 - protein, 408 aa, Glycine max
MNGDTRNLGDVKPRISEESNDKSKIWKLTEINEQSQCRSLKLPENVRVTKISRLIYTNSGNAILALASNAIHLLWKWQRNERNSSGKATATLQPQLWQPSSGILMTNDIADSNPEDAVPCFALSKNDSYVMSASGGKISLFNMMTFKTMTTFMPPPPAATFLAFHPQDNNIIAIGMDDSSIQIYNVRVDEVKSKLKGHNKRITGLAFSHVLNVLVSSGADAQICVWNTDGWEKQKSRFLQLPSGRTPPAQSDTRVQFHQDQIQFLVVHETQLAIYEATKLEGLKQWFPRDSSAPISYATFSCDSQLVYASFLDATICVFSASNLRLRCRINPSSYLPASVSSNTQPLVIAAHPQEPNQFAVGLSDGGVHVFEPLESEGKWGVPPPIENGSASNVAAASVGPSPDQAQR

SEQ ID NO: 17893 - protein, 304 aa, Glycine max
MTNDIADSNPEDAVPCFALSKNDSYVMSASGGKISLFNMMTFKTMTTFMPPPPAATFLAFHPQDNNIIAIGMDDSSIQIYNVRVDEVKSKLKGHNKRITGLAFSHVLNVLVSSGADAQICVWNTDGWEKQKSRFLQLPSGRTPPAQSDTRVQFHQDQIQFLVVHETQLAIYEATKLEGLKQWFPRDSSAPISYATFSCDSQLVYASFLDATICVFSASNLRLRCRINPSSYLPASVSSNTQPLVIAAHPQEPNQFAVGLSDGGVHVFEPLESEGKWGVPPPIENGSASNVAAASVGPSPDQAQR

SEQ ID NO: 17894 - DNA, 1119 bp, Glycine max
tgccccaccaggtacgaatacgtaatgtaacctcacccccttttctctccggtaaccgccatagcagaaaacggtttatcagcgttgctaaaattaacaacgcgaaaagtgttcacccgcgccagtatgagttctcgcgcctgaatctggaatacaccgtgatgtccaagcgtaagttgaacctgctggtgaccgacaagcacgttgaaggctgggatgacccgcgtatgccgaccatttccggtctgcgtcgtcgtggttacactgcggcttctattcgtgagttctgcaaacgcatcggcgtgaccaagcaggacaacaccattgagatggcgtcgctggaatcctgcatccgtgaagatctcaacgaaaatgcgccgcgcgcaatggcggttatcgatccggtgaaactggttatcgaaaactatcagggcgaaggcgaaatggttaccatgccgaaccatccgaacaaaccggaaatgggcagccgtcaggtgccgtttagcggtgagatttggattgatcgcgccgatttccgcgaagaagctaacaagcagtacaaacgtctggtgctgggtaaagaagtgcgtctgcgtaatgcttatgtgattaaggcagaacgcgtcgagaaagatgccgaaggtaatatcaccaccatcttctgtacttatgacgccgataccttaagcaaagatccggcagatggtcgtaaagtcaaaggtgttattcactgggtgagcttaccgagtaataaggtttttgttttccgttacacaccctgggcatgaaaacaaaatgcagtttttgcttttcggttctgccgtactcccgatgataaaaggtgatttcgcttttgcgatgatgcccggtcagtttgtattgctccttcagtgcttcaagagcaggctgcagtagtgttactgttcggatcccggcatttgtttttgggggaccgaacatatcaagtatcgtcaggtttcttctgacattcactattcccttttcgagatccacatcctcccacgccagagctgccagttccccgtgacgaagtcctgagtaaacggcaaatttccacaagttctggctctgtcctttttcactttccattaatgcatt

SEQ ID NO: 17895 - protein, 261 aa, Glycine max
PHQVRIRNVTSPPFLSGNRHSRKRFISVAKINNAKSVHPRQYEFSRLNLEYTVMSKRKLNLLVTDKHVEGWDDPRMPTISGLRRRGYTAASIREFCKRIGVTKQDNTIEMASLESCIREDLNENAPRAMAVIDPVKLVIENYQGEGEMVTMPNHPNKPEMGSRQVPFSGEIWIDRADFREEANKQYKRLVLGKEVRLRNAYVIKAERVEKDAEGNITTIFCTYDADTLSKDPADGRKVKGVIHWVSLPSNKVFVFRYTPWA

SEQ ID NO: 17896 - protein, 208 aa, Glycine max
MSKRKLNLLVTDKHVEGWDDPRMPTISGLRRRGYTAASIREFCKRIGVTKQDNTIEMASLESCIREDLNENAPRAMAVIDPVKLVIENYQGEGEMVTMPNHPNKPEMGSRQVPFSGEIWIDRADFREEANKQYKRLVLGKEVRLRNAYVIKAERVEKDAEGNITTIFCTYDADTLSKDPADGRKVKGVIHWVSLPSNKVFVFRYTPWA

SEQ ID NO: 17897 - protein, 186 aa, Glycine max
MPTISGLRRRGYTAASIREFCKRIGVTKQDNTIEMASLESCIREDLNENAPRAMAVIDPVKLVIENYQGEGEMVTMPNHPNKPEMGSRQVPFSGEIWIDRADFREEANKQYKRLVLGKEVRLRNAYVIKAERVEKDAEGNITTIFCTYDADTLSKDPADGRKVKGVIHWVSLPSNKVFVFRYTPWA

SEQ ID NO: 17898 - DNA, 1447 bp, Glycine max
tcttcatctcaaagtttcactctcactcttcttcttcttcttcttcatcctttctgatctgtgctgttttttcagggtacaacaaaattgggtgctttcggttaaactgtgatgtctccgccagtgctgagcataggggaggaggagggtaaaagcaatgtcactttgttggtttcctcatcaaccaccatggaaagtgtgtgtctcaagagcttagaatttaaagagcgcaactacatgggattatctgattgttcttctgtggacagctcggttccgtccttctctgaagagactaaaagtaatctgaacctgaaagccactgaactcaggctcgggcttccaggatcacagtctcctgatagagattctgatctttgcttaagaagctcaactcaatttgatgaaaaaactttgtttccgttgcgtcctttgactgatgatcaccattcttcagccaagactgctgttttgggaaacaaaagagggttctctgatgccatgaacggcttctcctcagaggggaaattcctagttgattcggaggccgccaatccgatactgtctcccaggcctgcttctaacttgggattaaaacctggttctacacttgagaaggttggagttcagcaaaccaaaatgaaagaagtagcaacaacaaaggccaatgaagctagacccactattgatggttctgcaaataataataacagtgcaccagctaccaaggctcaggttgtgggatggcctcctataagatcattccggaaaaattcattggctaccacttcaaagaacaatgaagaagttgatggaaaagtgggggttggtgcactgtttgtcaaggtcagtatggatggtgctccctatttaaggaaagtagacttgaagaattactctacatatccagaattatcttctgctctagaaaagatgttcagctgttttactatgagtaaatgtggatctcatggaattctgggcagggagatgctgaatgaaaccaagctgaaggaccttcttcatggatcagaatatgttcttacatatgaggacagagagggcgattggatgcttgtgggtgatgttccctgggagatgtttattgaaacatgcaagaggctgaggatcatgaagagttctgatgccattggtctagctcccagggctgttgaaaaatgtaagagcagaacctaggcagtaccagtgttcctcttcgaacatggtgtattggaagcgagaactgaaggcatatgggactggatagaatctcatactaagctgccataatccttctattgtttattatgtgtccgttttatgttgtcatggcgtttatgatttagtaagcttcttttcaagattgttgtgataaaacttaacaaaactctaagacttgactgtgggagtagctatattttatgtacccgagttaatgttatggttg

SEQ ID NO: 17899 - protein, 361 aa, Glycine max
MSPPVLSIGEEEGKSNVTLLVSSSTTMESVCLKSLEFKERNYMGLSDCSSVDSSVPSFSEETKSNLNLKATELRLGLPGSQSPDRDSDLCLRSSTQFDEKTLFPLRPLTDDHHSSAKTAVLGNKRGFSDAMNGFSSEGKFLVDSEAANPILSPRPASNLGLKPGSTLEKVGVQQTKMKEVATTKANEARPTIDGSANNNNSAPATKAQVVGWPPIRSFRKNSLATTSKNNEEVDGKVGVGALFVKVSMDGAPYLRKVDLKNYSTYPELSSALEKMFSCFTMSKCGSHGILGREMLNETKLKDLLHGSEYVLTYEDREGDWMLVGDVPWEMFIETCKRLRIMKSSDAIGLAPRAVEKCKSRT

SEQ ID NO: 17900 - protein, 335 aa, Glycine max
MESVCLKSLEFKERNYMGLSDCSSVDSSVPSFSEETKSNLNLKATELRLGLPGSQSPDRDSDLCLRSSTQFDEKTLFPLRPLTDDHHSSAKTAVLGNKRGFSDAMNGFSSEGKFLVDSEAANPILSPRPASNLGLKPGSTLEKVGVQQTKMKEVATTKANEARPTIDGSANNNNSAPATKAQVVGWPPIRSFRKNSLATTSKNNEEVDGKVGVGALFVKVSMDGAPYLRKVDLKNYSTYPELSSALEKMFSCFTMSKCGSHGILGREMLNETKLKDLLHGSEYVLTYEDREGDWMLVGDVPWEMFIETCKRLRIMKSSDAIGLAPRAVEKCKSRT

SEQ ID NO: 17901 - protein, 319 aa, Glycine max
MGLSDCSSVDSSVPSFSEETKSNLNLKATELRLGLPGSQSPDRDSDLCLRSSTQFDEKTLFPLRPLTDDHHSSAKTAVLGNKRGFSDAMNGFSSEGKFLVDSEAANPILSPRPASNLGLKPGSTLEKVGVQQTKMKEVATTKANEARPTIDGSANNNNSAPATKAQVVGWPPIRSFRKNSLATTSKNNEEVDGKVGVGALFVKVSMDGAPYLRKVDLKNYSTYPELSSALEKMFSCFTMSKCGSHGILGREMLNETKLKDLLHGSEYVLTYEDREGDWMLVGDVPWEMFIETCKRLRIMKSSDAIGLAPRAVEKCKSRT

SEQ ID NO: 17902 - DNA, 1262 bp, Glycine max
ggagcaaacaaaagaagcaatgatgatgaatgtcatagggctgagtctgagtctggtgttaacttcactggcagcagcgagcaccatcgtcaaagaagggcacagagttgtcgtggttgaatacgaccaaggtggccatcagaacaccaaaatctcaatatcaccagaacaacctacgcatgctaatcttaaagatcccatttgcgacgcctatggaaaatgcaagcacaaaatcgtggatgcaatggagaagtctcaagaggtcatccatgagaagaaggacgagattgccgccaacaaggaggcagcacgccaagttgctggtaaaaccaaagagagagtgtatgataaagcccgtcatgtccacgaatacgcccaaaacactgtagaaacagccaagaaccatattgcctgtaacgtgtcaaacgccaaagatgcattcaagcgtctaatagcaggatctttggagaggcagagccttaattctttgatgggggtggctaacatgttggggttttccacggcttatgggatgtgtgtgtgggttacgttcatctccagctatgtgcagtccagggctatggcaaggcaacaatttgcagtggtgcagagtaaaatatatcctgtttatttcagggccatgtcttatagcatcggggtcgctttattcgcccatgtcttggcccatagaaacaccttgctctccaacaagtctgacttattgcaagcatataatcttctggcctcccttgtcacacttttcttcaattctctttacttggagcctcgggccaccaagaaattgtggtttattcagttgatgttcgagaggataaagatagaaaaagaggaaggaagaggcagatcagaagatgtgagtagcagaactaaagagccagcttccacgaccgcagaccaggatgcagtcagaacaaggataatcaagctcaatgacaagctcaagaaactcaattcctactcctcattcctcaatatcctcaatctcatgtctcttacttggcatctcgtttatttggctcaacgacttccccatatttgctaaaccaaatactacgttccttttgtcttttctactaatcacttgttttctgtgtttcttttctgtttctatcatgtttgttgatatttgcaaatacttcagtctctagatttttgtatcttttagctttgggaacaatacagtgtttaccactccctgtatttaatttgtgttaagtgtaaaactcttgttactttgcttt

SEQ ID NO: 17903 - protein, 353 aa, Glycine max
EQTKEAMMMNVIGLSLSLVLTSLAAASTIVKEGHRVVVVEYDQGGHQNTKISISPEQPTHANLKDPICDAYGKCKHKIVDAMEKSQEVIHEKKDEIAANKEAARQVAGKTKERVYDKARHVHEYAQNTVETAKNHIACNVSNAKDAFKRLIAGSLERQSLNSLMGVANMLGFSTAYGMCVWVTFISSYVQSRAMARQQFAVVQSKIYPVYFRAMSYSIGVALFAHVLAHRNTLLSNKSDLLQAYNLLASLVTLFFNSLYLEPRATKKLWFIQLMFERIKIEKEEGRGRSEDVSSRTKEPASTTADQDAVRTRIIKLNDKLKKLNSYSSFLNILNLMSLTWHLVYLAQRLPHIC

SEQ ID NO: 17904 - protein, 347 aa, Glycine max
MMMNVIGLSLSLVLTSLAAASTIVKEGHRVVVVEYDQGGHQNTKISISPEQPTHANLKDPICDAYGKCKHKIVDAMEKSQEVIHEKKDEIAANKEAARQVAGKTKERVYDKARHVHEYAQNTVETAKNHIACNVSNAKDAFKRLIAGSLERQSLNSLMGVANMLGFSTAYGMCVWVTFISSYVQSRAMARQQFAVVQSKIYPVYFRAMSYSIGVALFAHVLAHRNTLLSNKSDLLQAYNLLASLVTLFFNSLYLEPRATKKLWFIQLMFERIKIEKEEGRGRSEDVSSRTKEPASTTADQDAVRTRIIKLNDKLKKLNSYSSFLNILNLMSLTWHLVYLAQRLPHIC

SEQ ID NO: 17905 - protein, 346 aa, Glycine max
MMNVIGLSLSLVLTSLAAASTIVKEGHRVVVVEYDQGGHQNTKISISPEQPTHANLKDPICDAYGKCKHKIVDAMEKSQEVIHEKKDEIAANKEAARQVAGKTKERVYDKARHVHEYAQNTVETAKNHIACNVSNAKDAFKRLIAGSLERQSLNSLMGVANMLGFSTAYGMCVWVTFISSYVQSRAMARQQFAVVQSKIYPVYFRAMSYSIGVALFAHVLAHRNTLLSNKSDLLQAYNLLASLVTLFFNSLYLEPRATKKLWFIQLMFERIKIEKEEGRGRSEDVSSRTKEPASTTADQDAVRTRIIKLNDKLKKLNSYSSFLNILNLMSLTWHLVYLAQRLPHIC

SEQ ID NO: 17906 - DNA, 1261 bp, Glycine max
agttctgaacctgctcatgctgagtcacattctgaaaatgaaaataggaaagatgactgcaacgagtatgagtcaaatgttaaagtcttgcatgggaagaaagtttatactgactattctgtaattggaataccaggggatggaagatgcttgttccgctctgttgctcgtggggcctgtttgaggtctggaaagccccctcctaatgaaagcattcagagagagctggcagatgatttacgagccagagttgctgatgagtttatcaaaagaaaggaagagaccgaatggtttgttgaaggtgattttgatacatatgtttcacaaataaggaagcctcatgtgtggggaggtgaacccgaattgttcattgcatcacatgttttgcagatgcctatcacagtatacatgtatgataaagatgctggtggtttgatatcaattgctgagtatggtcaagagtacggcaaagaaaacccaattagagttctctaccatggctttggtcattatgatgcattagagattcctagaaggaagggtcctaagccaagactgtagcatttcatatttaaaatgtggaagagattaaagcttgtattggttcccttcagtaacattcataatgtcatctataggtcaagtttcctgaaaaccttatgccttttatgtcttggaggacgtttggtccaaggcctcagtgaacagtgatattcactttattgctgtgccatgcacacggttgtttatgttggtctgaagaaagagagcctttgacttcaggtggaccttaaagggttcaaactatccactaacttctgtaagccctttctgtgaaaggtagaaaataatggtatacccttctgtctctgagtccaccactatggaggggtgcatggatcttggtactgtactgcttccattgagaaaatatatgtaatggctgacaaagctgaaagttggataattatcgagagttcattaatatcaagtacatggggggtaagttgtgtttagggaattactagtgttttaggttttacttaaccaaacttctttgtttgccctattcactttttcatctcttaaatactttcatctccctcatttgcctcacagggtctcaccatttgaatatgttgtagtcaagtgtctcacatttttctgttagtaacaaggatgggtatcaaagcaaaaatatattgtagctaactgaacttaagctaattaaaacttatcaatttgttaacattggttatgg

SEQ ID NO: 17907 - protein, 186 aa, Glycine max
SSEPAHAESHSENENRKDDCNEYESNVKVLHGKKVYTDYSVIGIPGDGRCLFRSVARGACLRSGKPPPNESIQRELADDLRARVADEFIKRKEETEWFVEGDFDTYVSQIRKPHVWGGEPELFIASHVLQMPITVYMYDKDAGGLISIAEYGQEYGKENPIRVLYHGFGHYDALEIPRRKGPKPRL

SEQ ID NO: 17908 - DNA, 1497 bp, Glycine max
agaaaaagccatgaagacaattaccacattaacctacactatcttcaatcttcttatcttttgtaatgcatggataagtgcaagtgaatgtcctccaatgcactggtataattcatccaacctagaagccatgagggtgaggtttgaaagatggcttaaacaaaatgatcgaattacaaagataaagaagaatgggaggtccgttttggcatttaccaagcaaatcttgagtatatagagtgcaaaaactctcaagaactcctacaatctcactgacaacaaatttgcagatcttactaatgaagagtttgttagtccttatctgggttttggaactaggttccttccacatacaggattcatgtatcatgaacatgaggatcttccagagagcaaggattggaggaaggaaggagcagtatctgacatcaaggatcaaggcaattgtggtaaagtttcttgaaataaaaagtgcatgttttaggggtgccaaagtatgttttctcaatttcacaaattatgcagttcagctatgttactaagcatttttttccctttaataaattctcatttgaatcttcaacatggtcactattgattttggagcctgaacaagtaaattatacactttaaaaaggcaatgaaagttaaaaaagtgtcatttctgattaactcagtttttttaactagaatagcacatggttttctcctgaaatttcacacaacttaaggaacatccttacaaattacaataacttgtttcaagttatgtcttcatgcatgaagttgttgggcattttctgcagtggctgctgtggaaggaatcaacaaaataaaatcagggaagctggtttctctctctgaacaagaattcagagactgtgatgttgaagatggaaaccaaggctgtgaaggtggcttaatggacacagcatttgcattcatataaaaagaatggtggtttaaccacttccagaagactacccttatgaaggggtagatggcacatgcaacaaggaaaaagctttacatcatgcagccaatataagtgggcatgtaaaagtacctgctaatgatgaggctatgctcaaagctaaagctgctgctgctaatcaacgagtcagtggcaattgatgctggaggccatgcatttcagctttatttaaaaggtgttttctctggcatttgtggaaagcaactcaatcatggtgtgactatagtagggtacggcaaaggaacttctgataagtattggattgtgaagaactcatggggtgctgactggggtgaatctggttatattaggatgaaacgtgatgcttttgataaagctggtacttgtggcattgccatgcaagctagttaccctctcaaggattaagtagtccagtgctgtggttgtagaattaaaattgtcacctcaacaaacttgtgtacactgataatttcatgagaagttcaagcatatagacaaaaggaaaaaaagtttagtgctac

SEQ ID NO: 17909 - protein, 102 aa, Glycine max
MMRLCSKLKLLLLINESVAIDAGGHAFQLYLKGVFSGICGKQLNHGVTIVGYGKGTSDKYWIVKNSWGADWGESGYIRMKRDAFDKAGTCGIAMQASYPLKD

SEQ ID NO: 17910 - protein, 101 aa, Glycine max
MRLCSKLKLLLLINESVAIDAGGHAFQLYLKGVFSGICGKQLNHGVTIVGYGKGTSDKYWIVKNSWGADWGESGYIRMKRDAFDKAGTCGIAMQASYPLKD

SEQ ID NO: 17911 - protein, 80 aa, Glycine max
MKSLLVLIWVLELGSFHIQDSCIMNMRIFQRARIGGRKEQYLTSRIKAIVVKFLEIKSACFRGAKVCFLNFTNYAVQLCY

SEQ ID NO: 17912 - DNA, 1263 bp, Glycine max
aaaagagaaagagagagaggctgaaacaaagaagtgaaaataacagcaaaaagtagcagctgctgcagctcccccgaagcttatctcagcagcagatactcaaccctgtttgagtagccgagaataacaccaatgggagaggaggaaaagaaaccagaggaacaacccaaggcagaggagaaaaaaccagaggaagagaagaagaaagaagaagcagcagcagcggaaaaaccaagcgaagagaaaaaaccggaacaagagtcgaaagaggaagttgctgctccgccaccgccaccgccaccggccgagattgtgctcaaagtgttcatgcattgcgagggttgcgctcgcaaggttcgtcgctccctcaaaggattcccaggtgtcgacgatgttgtcaccgattgcaaatctcacaaggtggtcgttaagggagagaaagcggatccgttgaaggttttggagagaatacagaggaagagtcacagacaggtcgagcttctttctccgatcccgaaaccgcaagaggagaagaaggtccaagaggaagaaaagcccaagcccacacccgaagagaagaaagaagaggctcagattgtgatgacggttctgaaagttggcatgcactgcgaagcttgctctcaggaaatcaagagacgcatacagagaatgaagggagtggaatcagcagaacccgatctgcagaactcacaagtgagcgtgaagggggtgtacgatccagcaaagttggttgagtacgtgtacaagagaaccggaaagcacgcagtgataatgaagcaagagccagaaaagaaagagaaagtggaggaagcaaaagaggaagagatgaagagtgatggcgaaggggaagaaaacaaagagaagaaggaaaaagaagaggcaaagggtgaagaagccaaagcagaggaaccaacaacaccaacaattactgaagacaccaacaaggttgttccagaggttaagattaatgaatacttctataacccaccaaggtatggcatggaggtgtatgcatatcctgcacaccctgcacacccagcgtatttccattcctaccctccccagattttcagcgatgagaacccaaatgcctgcactgtcatgtaaaaattgaaggtgtcaggggtgatatgggaattaggggaaattgtgaagtttggtgggggatatgaatatagataccctttcctgtgttacctgtactgtgaaagtacaatgtatgcataagctatagaattttgt

SEQ ID NO: 17913 - protein, 331 aa, Glycine max
MGEEEKKPEEQPKAEEKKPEEEKKKEEAAAAEKPSEEKKPEQESKEEVAAPPPPPPPAEIVLKVFMHCEGCARKVRRSLKGFPGVDDVVTDCKSHKVVVKGEKADPLKVLERIQRKSHRQVELLSPIPKPQEEKKVQEEEKPKPTPEEKKEEAQIVMTVLKVGMHCEACSQEIKRRIQRMKGVESAEPDLQNSQVSVKGVYDPAKLVEYVYKRTGKHAVIMKQEPEKKEKVEEAKEEEMKSDGEGEENKEKKEKEEAKGEEAKAEEPTTPTITEDTNKVVPEVKINEYFYNPPRYGMEVYAYPAHPAHPAYFHSYPPQIFSDENPNACTVM

SEQ ID NO: 17914 - protein, 266 aa, Glycine max
MHCEGCARKVRRSLKGFPGVDDVVTDCKSHKVVVKGEKADPLKVLERIQRKSHRQVELLSPIPKPQEEKKVQEEEKPKPTPEEKKEEAQIVMTVLKVGMHCEACSQEIKRRIQRMKGVESAEPDLQNSQVSVKGVYDPAKLVEYVYKRTGKHAVIMKQEPEKKEKVEEAKEEEMKSDGEGEENKEKKEKEEAKGEEAKAEEPTTPTITEDTNKVVPEVKINEYFYNPPRYGMEVYAYPAHPAHPAYFHSYPPQIFSDENPNACTVM

SEQ ID NO: 17915 - protein, 175 aa, Glycine max
MTVLKVGMHCEACSQEIKRRIQRMKGVESAEPDLQNSQVSVKGVYDPAKLVEYVYKRTGKHAVIMKQEPEKKEKVEEAKEEEMKSDGEGEENKEKKEKEEAKGEEAKAEEPTTPTITEDTNKVVPEVKINEYFYNPPRYGMEVYAYPAHPAHPAYFHSYPPQIFSDENPNACTVM

SEQ ID NO: 17916 - DNA, 1351 bp, Glycine max
acataaccatatgcaagagcaagagtcatctcaatctaggcagacttctcctcggattaatgatccttcagggacacttcttttcagttctagaactaatggtggagaagatggtcagtctgccgttgcatcttccagaagcaatcaaccttcattattgatgaatagaagaatgaagacactagtggagtacttcaaaatatctttagattgcttttttgctgtatggtttgttgttggaaatgtatggatctttgggggacattcatctgccaatgaagctcctaatttgtacaggttatgtatagtgtttcttgcatttagctgcattggttatgctatgcccttcattttctgttcaacaatctgctgttgtctcccttgtataatttctatccttggggttagagaggatatgtcacaaaacagaggggcaacttctgaatctattaatgctttgccgatttacaagttcaagatgaagaaaaataaaagaaatggcaatggcaactcagctgctgccgaaggtggagttgtggctgcaggaactgaaaaagagcatgtgatatctggagaagatgcggtttgctgcatctgcctggcaaagtatgagaataatgatgagctgagagaattgccttgttctcatcttttccacaaagactgcgtcgataaatggttgaagataaatgcattatgccctctttgcaagagtgatgttggtgagaacttaacaggatcggtctctggagaagatgccagccaacaacagggtgagagcagggttgagaatggcctcacgaatacctcagtctagttgagttatatagaaatatacaatttggatcctctcattttccccttagaactggagaatctcctctggcaagttacgacgagagagaaagaaccaatcacctatttagaaaagctggtgaaccctgcacaggtagtggtgggtaaactaatcacatatttatgaaaccggtggatcttgcacaggaaatggtaggttcctatgcaataaactgtatttttctctctcatgacaagaagctcgtcttctcaacgataaggaaataatctgaagccccttttatgcatatgcacactttgtgctgttgtaaaggtttttttcaatgcactacactctttggaaggatgtttgattgaggtcatccatagcatttttgttgatgtgtttttcttttcttgttggaacttaaggtggccgatacaaggcatcaccttctgtagtctggtgatgcagctgtttgttcaagggacgctcatcatggccgtgtaatctgtggtattgacaatgggaattaaagcgtatgatttcatctag

SEQ ID NO: 17917 - protein, 271 aa, Glycine max
HNHMQEQESSQSRQTSPRINDPSGTLLFSSRTNGGEDGQSAVASSRSNQPSLLMNRRMKTLVEYFKISLDCFFAVWFVVGNVWIFGGHSSANEAPNLYRLCIVFLAFSCIGYAMPFIFCSTICCCLPCIISILGVREDMSQNRGATSESINALPIYKFKMKKNKRNGNGNSAAAEGGVVAAGTEKEHVISGEDAVCCICLAKYENNDELRELPCSHLFHKDCVDKWLKINALCPLCKSDVGENLTGSVSGEDASQQQGESRVENGLTNTSV

SEQ ID NO: 17918 - protein, 268 aa, Glycine max
MQEQESSQSRQTSPRINDPSGTLLFSSRTNGGEDGQSAVASSRSNQPSLLMNRRMKTLVEYFKISLDCFFAVWFVVGNVWIFGGHSSANEAPNLYRLCIVFLAFSCIGYAMPFIFCSTICCCLPCIISILGVREDMSQNRGATSESINALPIYKFKMKKNKRNGNGNSAAAEGGVVAAGTEKEHVISGEDAVCCICLAKYENNDELRELPCSHLFHKDCVDKWLKINALCPLCKSDVGENLTGSVSGEDASQQQGESRVENGLTNTSV

SEQ ID NO: 17919 - protein, 218 aa, Glycine max
MNRRMKTLVEYFKISLDCFFAVWFVVGNVWIFGGHSSANEAPNLYRLCIVFLAFSCIGYAMPFIFCSTICCCLPCIISILGVREDMSQNRGATSESINALPIYKFKMKKNKRNGNGNSAAAEGGVVAAGTEKEHVISGEDAVCCICLAKYENNDELRELPCSHLFHKDCVDKWLKINALCPLCKSDVGENLTGSVSGEDASQQQGESRVENGLTNTSV

SEQ ID NO: 17920 - DNA, 1242 bp, Glycine max
actgctatatttgcttttctttatcaacgagcatttttgaaatgaatgcagacagtgagggccggacaccattacactgggctgtggatcgtggccaccttaatgtcacagagttgcttgttggcaagaatgctgatgtgaatgccaaggtattctcattcgtatatgctttagatgtgttaatgtcagggactacttatatttctgtattggcattgccgtaactcttcagagtgagaatagagcagaaccttaattggattttgaacaaggcattattgtttactgcaagaattgcataatctcagagtttagcctaggctttgggagattatttgcttgtttcagttattgacactaatgtctattatttagccactttatgtcgatcctgtgttttcttttttggaaggacaatgatggacaaactcccttgcattacgctgttacatgtgagagggaagccatagctgagtatttagtgaagcataatgcagacatatattcaaaagataatgatgggagttcaccacgtgacatctgtgagtcaaactggccatgcatgcagcatgtgggggaagaagtaaattgattgattgattgtttgcttgttgcagcttctggccaatacaaccttttagccaaatcccaagaggatgttcgtgtctatataacttgattttttttgtccttactcatgatggtgtatacacccttttcagtctagtgtacgcctatgcaccgcttaggtaatggttagttaattaggttgtattctgttctattattgtttcctctgctcagctctttaaatctggctctcatttcttatatatttcatggataaagatatacacggaaactagaaatagtaacagggaaagggaatcttaaacgatattctttcctcggaaaaccttctacccttctattgaaggcgatatagattttacagggttattttaggtcttcaaatggtgttaagattatccgcagtgaaatctttgattgataatgatgtcgtgattatgttgaatctgatgttttaattaataatgtaatttaaatttgtgtcaaatattataaatcatatttttttcatattaatattacaagtatttggtaataccaaattagttgttgaagtagttaaaatgtataaattgacataaaatcatgaattattttaaaaaatgtaaaaaaatgaataaacatattaaaaataaaagtgaaagaaaatat

SEQ ID NO: 17921 - protein, 73 aa, Glycine max
CYICFSLSTSIFEMNADSEGRTPLHWAVDRGHLNVTELLVGKNADVNAKVFSFVYALDVLMSGTTYISVLALP

SEQ ID NO: 17922 - protein, 69 aa, Glycine max
MSILCFLFWKDNDGQTPLHYAVTCEREAIAEYLVKHNADIYSKDNDGSSPRDICESNWPCMQHVGEEVN

SEQ ID NO: 17923 - protein, 60 aa, Glycine max
MNADSEGRTPLHWAVDRGHLNVTELLVGKNADVNAKVFSFVYALDVLMSGTTYISVLALP

SEQ ID NO: 17924 - DNA, 1409 bp, Glycine max
tagcctgtgtggaccacctctgggaagctgtgctaggacctctacactgagttctggtgctgttgctggcattgttattagtctgatgacaggagctgtggttttggcttctttgctgatagggtatatgcagaacaagaagaagaaggggagtggggagagtgaggatgagttgaatgatgaagaggaagatgatgaagagaatggtggtaatgctattggtggagctggtgaggggaagctcatgttatttgctggaggtgagaatttgacattggatgatgtgttgaatgcaactgggcaggttttggagaagacttgttatgggacggcttataaggctaagcttgctgatggaggcaccattgctttgaggctgttgagagaaggtagctgcaaagacaaggcttcttgcttgtctgttataaagcaattggggaaaattcgccacgagaatttgattcctttgagagctttctatcaggggaagagaggggagaagctccttatttatgactacctgcctctcagaacccttcatgatcttttacatgaagctaaagctggaaaaccagtgttgaactgggctaggcgacacaagattgcgctgggcatagcgagaggtctagcttatcttcacacaggacttgaagttcctgtcacccatgcaaacgtaaggtccaagaatgtgcttgtggatgacttctttacagccaggctcaccgattttggtcttgacaagctgatgattccttccatagccgacgaaatggtagcgcttgctaagacggacggctacaaggctcctgagcttcaaagaatgaagaaatgcaactccaggactgatgtttatgcattcggcatactgctgcttgaaatcttgattgggaagaagcctgggaagaatggaagaaatggcgagtatgtggacttgccttcgatggtgaaagtggcggttttggaggagacgacgatggaagtgtttgatgtggagcttttgaaagggataagaagccctatggaagatgggttggtgcaggcgctgaagctggcaatggggtgctgtgcaccagtggcatctgttaggccaagcatggatgaagttgtgaggcagttggaggagaatagaccaaggaacaggtctgcattatacagccctacagaaacaagaagtggaagtgttaccccattttgagccttccctttcaacatgcttaagcaaactagtgatttttacttactacttgtgtttcctttttctcagctgaatctgaatatgaggctagtttttgatgatctagagagaatgttgtaatttttggtttactccataactctttgcatcaggtagtccctattgtttttgaaatcaaatatagtcacacaattatgcaaattcgtgcttctgg

SEQ ID NO: 17925 - protein, 397 aa, Glycine max
SLCGPPLGSCARTSTLSSGAVAGIVISLMTGAVVLASLLIGYMQNKKKKGSGESEDELNDEEEDDEENGGNAIGGAGEGKLMLFAGGENLTLDDVLNATGQVLEKTCYGTAYKAKLADGGTIALRLLREGSCKDKASCLSVIKQLGKIRHENLIPLRAFYQGKRGEKLLIYDYLPLRTLHDLLHEAKAGKPVLNWARRHKIALGIARGLAYLHTGLEVPVTHANVRSKNVLVDDFFTARLTDFGLDKLMIPSIADEMVALAKTDGYKAPELQRMKKCNSRTDVYAFGILLLEILIGKKPGKNGRNGEYVDLPSMVKVAVLEETTMEVFDVELLKGIRSPMEDGLVQALKLAMGCCAPVASVRPSMDEVVRQLEENRPRNRSALYSPTETRSGSVTPF

SEQ ID NO: 17926 - protein, 369 aa, Glycine max
MTGAVVLASLLIGYMQNKKKKGSGESEDELNDEEEDDEENGGNAIGGAGEGKLMLFAGGENLTLDDVLNATGQVLEKTCYGTAYKAKLADGGTIALRLLREGSCKDKASCLSVIKQLGKIRHENLIPLRAFYQGKRGEKLLIYDYLPLRTLHDLLHEAKAGKPVLNWARRHKIALGIARGLAYLHTGLEVPVTHANVRSKNVLVDDFFTARLTDFGLDKLMIPSIADEMVALAKTDGYKAPELQRMKKCNSRTDVYAFGILLLEILIGKKPGKNGRNGEYVDLPSMVKVAVLEETTMEVFDVELLKGIRSPMEDGLVQALKLAMGCCAPVASVRPSMDEVVRQLEENRPRNRSALYSPTETRSGSVTPF

SEQ ID NO: 17927 - protein, 355 aa, Glycine max
MQNKKKKGSGESEDELNDEEEDDEENGGNAIGGAGEGKLMLFAGGENLTLDDVLNATGQVLEKTCYGTAYKAKLADGGTIALRLLREGSCKDKASCLSVIKQLGKIRHENLIPLRAFYQGKRGEKLLIYDYLPLRTLHDLLHEAKAGKPVLNWARRHKIALGIARGLAYLHTGLEVPVTHANVRSKNVLVDDFFTARLTDFGLDKLMIPSIADEMVALAKTDGYKAPELQRMKKCNSRTDVYAFGILLLEILIGKKPGKNGRNGEYVDLPSMVKVAVLEETTMEVFDVELLKGIRSPMEDGLVQALKLAMGCCAPVASVRPSMDEVVRQLEENRPRNRSALYSPTETRSGSVTPF

SEQ ID NO: 17928 - DNA, 1286 bp, Glycine max
tggatgatggacctgtgaacaagtcaaatggtacagagtgcagaaatattaatccactaccaggttcccagaaagacataaaagaagatgaaatcaatattaatatcaaactaaatgaagaatataacaaatctgttgatacttataccgaatcccgtcaagctcaagatgctggactattagtgaaagctacagaagaccttgctagggaatatacatctttaactactgtaccttctgctcagccggacagggaagtgtctaatgctgtgcctgttcaagatcaaactggtaataacttgggtaaacttggttcatccagagttgatgcttcagttgactcaggtagccggtgtgacagtttggaagggaactggggttctgtttcagttctctcaatgcaatccgatgccccagctgttactgatgctgaaactttgccatcaactggcttgctggcatcaacagggaaatcaagcttgaacaactcaaaagctacacctgacagacagcagtctggaaactctgaaatgtttgaaccaccatctttcatgaccttggttgatcctagtcaggttagccccaaagcttctgcttctgaagtccagaaggggcagaacacacaacatacagattccacttcacaggctgcttggtttcccactctcacgcaggttgtcaacgagtctcaagggaggaagaagaatgaagaaataattgccaaggtgacaaactggagcaccagtaaggagcacactcctctgaagagcctcttaggtgaggctgcccatagtagcaagccaagatctccaaaaatggaaaactctgtgaatcagaagagtggtaaagttctggagaagaatggttctggattgacaactgttaactccattctgggtcctgaatcccctgtggctcaagtggttaaaggagaggctgcaaaagaatggaactctccagcaagatatcctgcagacatcaagagagaaaaaaggaaagtcaagagcagaccatactggatacaattggtatgctgcacgtcagtcggtcctcggtgaaggtagaaaattactaggttctgataatgcttccactcagctctccactctgatggattcttgttattgacatgctatttgcagtatttttctgtttttagtttgtctttaggtgcatattttgatcatgtgtcttctgttcattttggtagcctcctaggagtttggttttatatgttgaccatcttcagttattatttcatccttgcaatcatacatttttactat

SEQ ID NO: 17929 - protein, 351 aa, Glycine max
DDGPVNKSNGTECRNINPLPGSQKDIKEDEININIKLNEEYNKSVDTYTESRQAQDAGLLVKATEDLAREYTSLTTVPSAQPDREVSNAVPVQDQTGNNLGKLGSSRVDASVDSGSRCDSLEGNWGSVSVLSMQSDAPAVTDAETLPSTGLLASTGKSSLNNSKATPDRQQSGNSEMFEPPSFMTLVDPSQVSPKASASEVQKGQNTQHTDSTSQAAWFPTLTQVVNESQGRKKNEEIIAKVTNWSTSKEHTPLKSLLGEAAHSSKPRSPKMENSVNQKSGKVLEKNGSGLTTVNSILGPESPVAQVVKGEAAKEWNSPARYPADIKREKRKVKSRPYWIQLVCCTSVGPR

SEQ ID NO: 17930 - protein, 219 aa, Glycine max
MQSDAPAVTDAETLPSTGLLASTGKSSLNNSKATPDRQQSGNSEMFEPPSFMTLVDPSQVSPKASASEVQKGQNTQHTDSTSQAAWFPTLTQVVNESQGRKKNEEIIAKVTNWSTSKEHTPLKSLLGEAAHSSKPRSPKMENSVNQKSGKVLEKNGSGLTTVNSILGPESPVAQVVKGEAAKEWNSPARYPADIKREKRKVKSRPYWIQLVCCTSVGPR

SEQ ID NO: 17931 - protein, 175 aa, Glycine max
MFEPPSFMTLVDPSQVSPKASASEVQKGQNTQHTDSTSQAAWFPTLTQVVNESQGRKKNEEIIAKVTNWSTSKEHTPLKSLLGEAAHSSKPRSPKMENSVNQKSGKVLEKNGSGLTTVNSILGPESPVAQVVKGEAAKEWNSPARYPADIKREKRKVKSRPYWIQLVCCTSVGPR

SEQ ID NO: 17932 - DNA, 729 bp, Glycine max
atatgtaagctttgaagatggaagtattggcattcttactgtccctgcgctcagattaagatgtagaataaatcaatctgcttatctccatcccaacccaagcttgagagtgcatcctcttgtgattgctgcacatccctccgaacccaatcaatttgcattaggactcaccgatggtggagtacatgtacttgaaccactagaggcagaaggaaaatggggtactccacctccgaacgagaatggtgccgggcctagcactgcttcaggtgctgctgtttcagagcaaccccaaagatgatggatggcacattatgtagcacttttctctaaggaactttgagtgtgtgttttgattgcatatgatcccgctccctggtgcctccattcggtttgcaaagggaagctgcggaacgtaggtgtttgtaggttaggacaaatcaaattgaaccaatcacaccttgttattagtggcttcctaaccgtgggattggcacagtatgttattacccacataggattactggcgtaaattcggctggggcgttgcagagtggagggtcattgttattatttttttttctttggtcctacctttatttgtgtagtatttttttaatatatacagaaaactagtcgttatagattattttttttcagctaaagttagctattctgatattcagttttatttttaccatctatgcaaggattttttagagcctcttt

SEQ ID NO: 17933 - protein, 99 aa, Glycine max
YVSFEDGSIGILTVPALRLRCRINQSAYLHPNPSLRVHPLVIAAHPSEPNQFALGLTDGGVHVLEPLEAEGKWGTPPPNENGAGPSTASGAAVSEQPQR

SEQ ID NO: 17934 - DNA, 866 bp, Glycine max
aattaggaacagaatactgtccccagattcaaaacgtaaagtcagtggaaagactcttacaacgaaagcaagatctatatctacaaattctggtgttgctgaacatgtcaacagttccatttctccagatgactcacctgccttggactctttctattcaaaatttcaccacctgaaaaggattttggaagaagactcgtcaagtgataattcatcccttatcagcagcaactccgatgaaggttcttgtagtacagatagcacccgtgattcaactagcacagatgacttctctgaatatctttttggtgattcagggaatggctggagtagtgtgtggaggaattctgattctgacacatcttcatcatcctcatcttctcccttgaatttgcgacattcacccctatctgatatggacaggtatgattcagtttctcctgatgcagaaggctcgcgagggatagatgtttctcgtttgtcttctaacacaactttacagcatagaaagttagatagtaggattagtagcaacagtagtagtagtagggagactgactcttgtctgaaactaggatctaaccattttaatgatatagactatggtgtattatgtagaaagccaaggaaaagaacggatttatattttatcaacagggagttccggagctaataacgagggatgctctaccaatgtactcgttggaggcggcattctttttacaaaggaaaattagacacatcagtttgctaacaactaactagatgtagatatagattgctgtaacttttataaaggttcggtggaatttattctattattttaaatacgattacttgaaataaaggataatatattatttttc

SEQ ID NO: 17935 - protein, 223 aa, Glycine max
IRNRILSPDSKRKVSGKTLTTKARSISTNSGVAEHVNSSISPDDSPALDSFYSKFHHLKRILEEDSSSDNSSLISSNSDEGSCSTDSTRDSTSTDDFSEYLFGDSGNGWSSVWRNSDSDTSSSSSSSPLNLRHSPLSDMDRYDSVSPDAEGSRGIDVSRLSSNTTLQHRKLDSRISSNSSSSRETDSCLKLGSNHFNDIDYGVLCRKPRKRTDLYFINREFRS

SEQ ID NO: 17936 - DNA, 1193 bp, Glycine max
aggcatgggatggctcatctttttgataaagttgtaaatgtcacttttggcgagaaagaagaacggatgatgctctccggattgaaaactgtcgttgacatattctgcgttgcatgtgggtccattcttggatggagatatggggttgttcatgagcagaatcagaagtacaaagaaggaaagtttatccttgaaatgtaaccagccagttattctatgtttaggcacactctacagcatttgttttatctttgtcttttaagtttttaaaagggaaaaacttagatgtagttccttaggtgcttttgatactgtttttcgaatcagaattggagttttaccttgataatttgcataataaaggtttaacactgattctaataagaaaacaacataaaaaaaaaagcacataagaaaatacatccaaattttgccccttttaaaaatggtgtcaatagaaagaattcattatttcacattttgatggaaagtgctttgttattgagtaggtttaaggtgttgggacctgctgacaacctcttcttggcagttcaagaagctcttgcagctggaagtgatgctgatgattgacttactcattccatgttgtagctgaaggtcattttttatgctgtgatgacgagagcgaacgctgggatttcctgtgtcttacgataagggaaaggaagatgtccagtctagtatgggctatcaaagggaacaaatgaggtcatgtttatcaccgaagcatatcaaactcttcacgactggggtccataccctgctgatcaggtcctcaaggaacttcaagacagtcttggatttatgatctatgacaacttttgtaacatttgattctaatggccagattgggttccaactgatatgtaaaccaccattgaaattactaattcttatcaggggggtatgtttcatagtgagcatggtctcatgagctttgaacatccatcaaataagatgaaagcaatgccctagaattgacagtgagggatttatatgcgttgctaacttttgcgaagtaaaaaactggatttgttgcgtcattcaatttcttctccaaagataagacaatcctttatatatcttaatcttttttcccattggttaacaacttgattgtgctggctgttgtgattcagattttgtttttgaggaataggtttttttatatt

SEQ ID NO: 17937 - protein, 66 aa, Glycine max
RHGMAHLFDKVVNVTFGEKEERMMLSGLKTVVDIFCVACGSILGWRYGVVHEQNQKYKEGKFILEM

SEQ ID NO: 17938 - protein, 63 aa, Glycine max
MAHLFDKVVNVTFGEKEERMMLSGLKTVVDIFCVACGSILGWRYGVVHEQNQKYKEGKFILEM

SEQ ID NO: 17939 - protein, 44 aa, Glycine max
MMLSGLKTVVDIFCVACGSILGWRYGVVHEQNQKYKEGKFILEM

SEQ ID NO: 17940 - DNA, 1478 bp, Glycine max
atattttttatgttaaattttattgttggctaaggctagagtatctgtatctatcaaaaacaaatcagcaattgagaagatgtcactgtattttctatattacctatagttgttttctttctttaaaataatatccctggtaaggggaactagtcaacaactggttaattggcctcaaatacatcagtttttctgcaactattgctggtggtgatgcatctctcgatgggagctttgtgatttaaaggttcgattagttgctgacaaagatataaataagcccaggggttatgctttcattgagtatctgcatacaagagacatgaaagctgcttataaacaagctgatggtaggaaaattgatggtagaagggtgcttgtggatgttgagcgtgggaggactgttccaaattggagaccccgtcgcttaggtggtggacttggtaccactagagttggaggtgaagaagttaatcagcgacattctgggagggagcaacaacagtctcgttctgaagaaccgagagtgcgagaggaccgacacgctgatagagacagggaaatatcacgtgaaagaggtagggacaaagacagagaacgggagcgatcacgtgaacattctcatgaaagggtcagggatcgtgatcatagggaggataggcaccacagagaccgggataggaacagggacagagaccgagacagggaaagagatagagatcgtgggcgtgatcgagatagaacacgggaccgtgatcgtgagcgagggagggaccgtgatcgggatcgagaatatgatcgacatcgtgagagggatagagattatgaagttggtgaccctgatcgaggacgctcacgtgatagggagtctgattatgatcgtgttgaatctaaacatggggaaaggaatcatgactatgaacctgaggatgatcgtggtaggcataaccagtatgaacatggacgtaggcatgcagaccctgatcatgaccctgagcggtatgaccactacaatcatggagatgaccatggtgaccattacaatcagtatcgtgaccatgatgggatggaagatgactaccatgctggacgtgcaacatctgaatcgcatgaaaaggagagaagtcatgatgtggaccgtgaatatcaacgctcagagagatcacattcccgggagtatgattattaggacttgggcatagttcttctcaactttgttggtaagattttataatttggtatgtttacttttgaatcttgctcacctgccggtattggtagttgttgaatggattaaggcacagtgtgatcattaaaaagaaaactgtagctgctgctatccatatggcccatatttgaaagctgccttttgtcaacgtggacttggacatctaatattggtatttgtttggcatttgtgttgttttcttctgacattttatgaaattaaacatctaatattggtatttgattttggc

SEQ ID NO: 17941 - protein, 288 aa, Glycine max
MKAAYKQADGRKIDGRRVLVDVERGRTVPNWRPRRLGGGLGTTRVGGEEVNQRHSGREQQQSRSEEPRVREDRHADRDREISRERGRDKDRERERSREHSHERVRDRDHREDRHHRDRDRNRDRDRDRERDRDRGRDRDRTRDRDRERGRDRDRDREYDRHRERDRDYEVGDPDRGRSRDRESDYDRVESKHGERNHDYEPEDDRGRHNQYEHGRRHADPDHDPERYDHYNHGDDHGDHYNQYRDHDGMEDDYHAGRATSESHEKERSHDVDREYQRSERSHSREYDY

SEQ ID NO: 17942 - protein, 192 aa, Glycine max
MKGSGIVIIGRIGTTETGIGTGTETETGKEIEIVGVIEIEHGTVIVSEGGTVIGIENMIDIVRGIEIMKLVTLIEDAHVIGSLIMIVLNLNMGKGIMTMNLRMIVVGITSMNMDVGMQTLIMTLSGMTTTIMEMTMVTITISIVTMMGWKMTTMLDVQHLNRMKRREVMMWTVNINAQRDHIPGSMIIRTWA

SEQ ID NO: 17943 - DNA, 1065 bp, Glycine max
gagaaatgggtctgctttctaacagagtggagagacatgagatcaagcctggcgatcacatctacacatacagagctgttttcacctattctcatcatggcatttttgttgggggaagcaaggttgtacatttcagacctgaaagaaacttaaagtcaatgactgagacatcatcaaactgggatgatccaacatcaaacccatgtccaacctttcctgattgtggattcagacaaccaaacagtggagtagtcctttcttgcttagactgcttccttcgaaatgggtctctttactgttttgagtatgaggtttcaccatctgttttcctcagcagaataaggggtggcacatgcactactgcatcagctgacccaccagagactgttattcatcgagctatgtatcttcttcaaaacggctttggaaattataatgtttttcagaacaattgtgaggattttgccttgtactgcaaaactggtcttttgatacaagacaagcaaggggttggaagaagtggccaagcttcttctgttattggtgctccattggctgcaatgatctcttctcctctcaagttgttaatgccaagtcctgttggtgttgctactgtaactgcaggaatgtactgcatgagcagatatgcaactgatattggtgtcagaagtgatgtgatcaaggtgccagtgggagacttggctgtgaaccttggatggatttgtcaagaggaggaggaggtagctgaacatgaaaatccagacagacagattaccaccagatgatctagcattgctcttcatccttactatgcacatgaaactgttgcatgtgtcactgttagttatacactagttcatagcagatatgtcttcattcatgttatatcttctgtgattggtgtctagttattcaagttgtgtctgggatgaaaatggaacaatattattacttatagtagtaactataatgtgatgtattcctttgagacaaattttcttctagttgcctataataatgcaacattctacccacaatagtgattgaaccatcttgttgtgcatc

SEQ ID NO: 17944 - protein, 260 aa, Glycine max
EMGLLSNRVERHEIKPGDHIYTYRAVFTYSHHGIFVGGSKVVHFRPERNLKSMTETSSNWDDPTSNPCPTFPDCGFRQPNSGVVLSCLDCFLRNGSLYCFEYEVSPSVFLSRIRGGTCTTASADPPETVIHRAMYLLQNGFGNYNVFQNNCEDFALYCKTGLLIQDKQGVGRSGQASSVIGAPLAAMISSPLKLLMPSPVGVATVTAGMYCMSRYATDIGVRSDVIKVPVGDLAVNLGWICQEEEEVAEHENPDRQITTR

SEQ ID NO: 17945 - protein, 259 aa, Glycine max
MGLLSNRVERHEIKPGDHIYTYRAVFTYSHHGIFVGGSKVVHFRPERNLKSMTETSSNWDDPTSNPCPTFPDCGFRQPNSGVVLSCLDCFLRNGSLYCFEYEVSPSVFLSRIRGGTCTTASADPPETVIHRAMYLLQNGFGNYNVFQNNCEDFALYCKTGLLIQDKQGVGRSGQASSVIGAPLAAMISSPLKLLMPSPVGVATVTAGMYCMSRYATDIGVRSDVIKVPVGDLAVNLGWICQEEEEVAEHENPDRQITTR

SEQ ID NO: 17946 - protein, 208 aa, Glycine max
MTETSSNWDDPTSNPCPTFPDCGFRQPNSGVVLSCLDCFLRNGSLYCFEYEVSPSVFLSRIRGGTCTTASADPPETVIHRAMYLLQNGFGNYNVFQNNCEDFALYCKTGLLIQDKQGVGRSGQASSVIGAPLAAMISSPLKLLMPSPVGVATVTAGMYCMSRYATDIGVRSDVIKVPVGDLAVNLGWICQEEEEVAEHENPDRQITTR

SEQ ID NO: 17947 - DNA, 1476 bp, Glycine max
tcttaaagacgacattgactgctaacaacaataaagtggatcaatcattaaaggcttacttcttcttcttcttcttcttcttcttcttctaacaacaataagatcccatctttcccactcatgaagagacttaacagctcagattcttccactgccctcatgacaatttttccatcatcatcaacagaggaacatagtccgaggaacagccaccacatgtatggcagggagttccgatcgatgttggacggactcgacgaggaagggtgtgttgaagaaccggggcatcaatctgagaagaagcgtcgactaagtgtggaacaagtgaaggctttggagaagaactttgaggttgaaaacaagcttgaacctgagaggaaggtcaagcttgcccaagaacttgggttgcaacctagacaagtagccgtttggttccaaaaccgccgagccagatggaaaaccaaacaattggagagagattatggtgtcctcaaagccaattatgatgctcttaagcttaactttggcaccctcaatcaggacaacgaagccttacgaaagcagataaaggaattgaaatcgaggctgctgcaagaagagaacacagcaggaagcggtgtttcggtgaaggaagaagagataacaacgatgcctgcagactcagaagagaaaacgatggaacaaagtaagagtgacccaccttctgaaacctcgaacattaatcctagttcggagtcgtcggaggaggaccacttgaattacgaatgtttcaacaacaacagcgacgactgtgtcgtcggaggatccgccgcagcatcgctcttgcaagtggacttcatgaaagacggttcttccgacagcgacggatcaagcgcgatcttgaacgaagacaccatgtacttgccgtcttcgatgaactgttttcagttccagaaaccgtatcatcacgcgcagtacgtgaagacggaggagcacaatttcttgagcgccgatgaggcctgcaatttcttctccgatgaacaagcaccgaccctgcaatggtactgtccagaacagtggagctgagatagaagaaacatgggaaaattggaaaccgctttcagaaatttttgtttaatatgttgcacggttgtgttgaacacagctcattgaggtaaaagttgtaaaaaaaggttgccacttgccaacagaggctgcttgaaggtagaaaatgaaacactgtgcagaagatagagttacgaaagagagaacagagatcaatggctgcatggcgtggggtcggagatgaaggatgacgattaaggttaattattactctcgatcgtgggtaatatcaataattattcaatcgtaaagcaaaccatgctgtaaaaaacaaatttcaattcaagtatagaataacgatgtagtactttatcaaacagaaaacgaaaaaaaaaattataaatctgttaaacaatatccttttgcctcact

SEQ ID NO: 17948 - protein, 314 aa, Glycine max
MKRLNSSDSSTALMTIFPSSSTEEHSPRNSHHMYGREFRSMLDGLDEEGCVEEPGHQSEKKRRLSVEQVKALEKNFEVENKLEPERKVKLAQELGLQPRQVAVWFQNRRARWKTKQLERDYGVLKANYDALKLNFGTLNQDNEALRKQIKELKSRLLQEENTAGSGVSVKEEEITTMPADSEEKTMEQSKSDPPSETSNINPSSESSEEDHLNYECFNNNSDDCVVGGSAAASLLQVDFMKDGSSDSDGSSAILNEDTMYLPSSMNCFQFQKPYHHAQYVKTEEHNFLSADEACNFFSDEQAPTLQWYCPEQWS

SEQ ID NO: 17949 - protein, 301 aa, Glycine max
MTIFPSSSTEEHSPRNSHHMYGREFRSMLDGLDEEGCVEEPGHQSEKKRRLSVEQVKALEKNFEVENKLEPERKVKLAQELGLQPRQVAVWFQNRRARWKTKQLERDYGVLKANYDALKLNFGTLNQDNEALRKQIKELKSRLLQEENTAGSGVSVKEEEITTMPADSEEKTMEQSKSDPPSETSNINPSSESSEEDHLNYECFNNNSDDCVVGGSAAASLLQVDFMKDGSSDSDGSSAILNEDTMYLPSSMNCFQFQKPYHHAQYVKTEEHNFLSADEACNFFSDEQAPTLQWYCPEQWS

SEQ ID NO: 17950 - protein, 282 aa, Glycine max
MYGREFRSMLDGLDEEGCVEEPGHQSEKKRRLSVEQVKALEKNFEVENKLEPERKVKLAQELGLQPRQVAVWFQNRRARWKTKQLERDYGVLKANYDALKLNFGTLNQDNEALRKQIKELKSRLLQEENTAGSGVSVKEEEITTMPADSEEKTMEQSKSDPPSETSNINPSSESSEEDHLNYECFNNNSDDCVVGGSAAASLLQVDFMKDGSSDSDGSSAILNEDTMYLPSSMNCFQFQKPYHHAQYVKTEEHNFLSADEACNFFSDEQAPTLQWYCPEQWS

SEQ ID NO: 17951 - DNA, 1323 bp, Glycine max
aattcaatccatcagtcccagttaccggaagaaaaaaaaagagtaagatttggaagttttatggacactctgctgccataagtgggaaggaaactagcacaagatccagtcgactgacccaagtaggacctttcaaaggttgtatggcttgggacagttccatattcactgactgccagtcaagtgcaaatggtgttcattatggaacgcagaatctcaaagatattaattcaaaccctcttggtcctggaaaagtagttcatcatactcaatcagtcttcaaacctctttgcaagctatttaatcctccacctgaaacccttggtgctgctgctctagcactgcactatgcaaatgttatcattgtgattgaraagctagcagcttcttcacacttgattggtctggatgcaagagatgacctgtataacatgtaccaagacgtgtgagagcttcccttaaggccaagctaaaaccatataccaagaccctggcatcatcatcatcatcatcaatctatgacccaagtctagcagaagaatggaatgaagcaatgtcaagcatacttgaatggctggcaccacttgctcataacatgataagatggcagtctgagagaagttatgaacagcagagctttatttcccggacaaacgtgctgctagtacagaccctttactttgcaaatcaagaaaagacagaagaagtaattactgagcttcttgtgggtctaaattatgtctggaaatatggtagggagctcaatgcaaaagctctggctgagtgtggcagttttagggtagacaatgaatatcctaatctgaatggatgaataatctgtctcaaggttgtggccatttcctacaggagtccagttccttgctagagatgagaaacacgaaccatcaatcagtcttgttaaatcaacaaatgtgaatcaagtgctagcagaattatgagagaagtacctttgtattcattattgtggaaatgtagtatcagaatgcgtacctggtgaggaattttttttaatcatttatcgttaattatctttgatgagttcctagctgctagaacttggatagctgatctcatctgtgcaatgttggccttctttccttgatgagttcctacttcgtacgtgatgtttagagtgtgcatatttatgagcattattacatattaaattgtatagttctatcacgctatggtgaatgttatttcgcaatatcttctgaattgccagtcaaggaatttgtcatcctatttatagcaagtaccataatctatttttcttgtaagttgtatgctaacattgctcag

SEQ ID NO: 17952 - protein, 148 aa, Glycine max
  misc_feature (124)..(124): Xaa can be any naturally occurring amino acid
FNPSVPVTGRKKKSKIWKFYGHSAAISGKETSTRSSRLTQVGPFKGCMAWDSSIFTDCQSSANGVHYGTQNLKDINSNPLGPGKVVHHTQSVFKPLCKLFNPPPETLGAAALALHYANVIIVIXKLAASSHLIGLDARDDLYNMYQDV

SEQ ID NO: 17953 - protein, 101 aa, Glycine max
  misc_feature (77)..(77): Xaa can be any naturally occurring amino acid
MAWDSSIFTDCQSSANGVHYGTQNLKDINSNPLGPGKVVHHTQSVFKPLCKLFNPPPETLGAAALALHYANVIIVIXKLAASSHLIGLDARDDLYNMYQDV

SEQ ID NO: 17954 - protein, 92 aa, Glycine max
MSSILEWLAPLAHNMIRWQSERSYEQQSFISRTNVLLVQTLYFANQEKTEEVITELLVGLNYVWKYGRELNAKALAECGSFRVDNEYPNLNG

SEQ ID NO: 17955 - DNA, 1968 bp, Glycine max
actcctgatgatattgcttcatcacaagccactgctgctactggggaaggatcttttcccagtttctccagtgaaactagccctttagaagctcaagttcctccttttgatatcttctccaaaaaagagatgtccaaatttttgggaagtaggaagatctcaaaaccctctcatttcagttatcatggtaaaagattggaaggcctgccagattcgaggaatcttgaacctaaaattgtggatccagcaaaaagttccaacgggtcagctcatgtggattgtccatctggagagtcccagaacacagttggtagcaattggaagttagtgaatttgaataattccagctctgttaggacaacagttaatggatttagtgaaggggaaatgtattacaggagtgatgccaatttctctaccactgtgaacaatgatattgataatgtcaatactaactctcaaaggattggagttaataatgataaggctgggctagccttatgtgatgaagacctggggctcattgaaggagacatgtgcgcttcatcaacgggggtggtaagggtgcagtcaagaaagaaagcagagatgttcttagtacgaacggatggattttcttgtgccagagagagggtgagtgaatcctcattggcctttactcatcctagcacccagcaacagatgcttatgtggaaaactacgccaaagacagtattactgttgaaaaagccaggagagcatctcatggaagaagctagagaggttgcttcttttctatattaccaagagaaaatgaatgtttttgtggaacctgatgtgcatgatatatttgctagaattcctgggtttggatttgttcagaccttctatacacaggatacttgtgatctacacgagaaagttgattttgtagcatgtttggggggagatggtgttatactgcatgcttcaaatctgttcagagatgctattccccccattgtgtcatttaaccttggttcccttggttttctgacttctcataacttcgaagacttcaagcaggacttacaacaagttatccatggtaatagtacaagagatggagtgtacatcactctcagaatgcgtctccgatgtgaaatttttcgtaagggtaaagctgtaccagggaaagtatttgatattctcaacgaggttgttgttgatcggggttctaatccgtacctttcaaagatcgaatgttatgaacacggtagacttataaccaaggtacaaggtgatggagtcattgtggccacccctactggaagcactgcctattctacagctgctggaggttccatggtccatccaaacgttccctgcatgctgtttaccccaatctgtccacattcactctcatttagaccagttatacttccagattctgctcaacttgaattaaagattccagaggatgcaagaagcaacacctgggtttcgtttgatggaaagagaagacagcaactttcaagaggagattcagtacgaatatctatgagtcagcatccacttccaacagttaacaagtttgaccaaactggtgattggtttcatagcttgattcgctgcctaaattggaatgaaaggcttgatcaaaaggccttataaagcatatgaaagtgaagaacaaagatgcactattctcctgtactgattatacattaagattgcagaactttgctatagtatattagttataaccaaattctaacattggtttcccaagagaagatagggtttgccaatgtgttttcagtgttattgtggcaagaggctgttgtatatattgacatttaaagctgtaaattgttgatctcagaagcagctattggtgctctcaaagttcaccactcgtactatttggctgcacttgacccatttaaatataaataacacaggcgcaaggtgctagacacttctccgcctccaaatcacattttcttt

SEQ ID NO: 17956 - protein, 543 aa, Glycine max
TPDDIASSQATAATGEGSFPSFSSETSPLEAQVPPFDIFSKKEMSKFLGSRKISKPSHFSYHGKRLEGLPDSRNLEPKIVDPAKSSNGSAHVDCPSGESQNTVGSNWKLVNLNNSSSVRTTVNGFSEGEMYYRSDANFSTTVNNDIDNVNTNSQRIGVNNDKAGLALCDEDLGLIEGDMCASSTGVVRVQSRKKAEMFLVRTDGFSCARERVSESSLAFTHPSTQQQMLMWKTTPKTVLLLKKPGEHLMEEAREVASFLYYQEKMNVFVEPDVHDIFARIPGFGFVQTFYTQDTCDLHEKVDFVACLGGDGVILHASNLFRDAIPPIVSFNLGSLGFLTSHNFEDFKQDLQQVIHGNSTRDGVYITLRMRLRCEIFRKGKAVPGKVFDILNEVVVDRGSNPYLSKIECYEHGRLITKVQGDGVIVATPTGSTAYSTAAGGSMVHPNVPCMLFTPICPHSLSFRPVILPDSAQLELKIPEDARSNTWVSFDGKRRQQLSRGDSVRISMSQHPLPTVNKFDQTGDWFHSLIRCLNWNERLDQKAL

SEQ ID NO: 17957 - protein, 500 aa, Glycine max
MSKFLGSRKISKPSHFSYHGKRLEGLPDSRNLEPKIVDPAKSSNGSAHVDCPSGESQNTVGSNWKLVNLNNSSSVRTTVNGFSEGEMYYRSDANFSTTVNNDIDNVNTNSQRIGVNNDKAGLALCDEDLGLIEGDMCASSTGVVRVQSRKKAEMFLVRTDGFSCARERVSESSLAFTHPSTQQQMLMWKTTPKTVLLLKKPGEHLMEEAREVASFLYYQEKMNVFVEPDVHDIFARIPGFGFVQTFYTQDTCDLHEKVDFVACLGGDGVILHASNLFRDAIPPIVSFNLGSLGFLTSHNFEDFKQDLQQVIHGNSTRDGVYITLRMRLRCEIFRKGKAVPGKVFDILNEVVVDRGSNPYLSKIECYEHGRLITKVQGDGVIVATPTGSTAYSTAAGGSMVHPNVPCMLFTPICPHSLSFRPVILPDSAQLELKIPEDARSNTWVSFDGKRRQQLSRGDSVRISMSQHPLPTVNKFDQTGDWFHSLIRCLNWNERLDQKAL

SEQ ID NO: 17958 - protein, 414 aa, Glycine max
MYYRSDANFSTTVNNDIDNVNTNSQRIGVNNDKAGLALCDEDLGLIEGDMCASSTGVVRVQSRKKAEMFLVRTDGFSCARERVSESSLAFTHPSTQQQMLMWKTTPKTVLLLKKPGEHLMEEAREVASFLYYQEKMNVFVEPDVHDIFARIPGFGFVQTFYTQDTCDLHEKVDFVACLGGDGVILHASNLFRDAIPPIVSFNLGSLGFLTSHNFEDFKQDLQQVIHGNSTRDGVYITLRMRLRCEIFRKGKAVPGKVFDILNEVVVDRGSNPYLSKIECYEHGRLITKVQGDGVIVATPTGSTAYSTAAGGSMVHPNVPCMLFTPICPHSLSFRPVILPDSAQLELKIPEDARSNTWVSFDGKRRQQLSRGDSVRISMSQHPLPTVNKFDQTGDWFHSLIRCLNWNERLDQKAL

SEQ ID NO: 17959 - DNA, 1273 bp, Glycine max
aacaacttctccagtttcgttcgtcagctcaatacttatggattccgcaagattgacacggacaagtgggagtttttcaacgaagctttccagcgagggaagaagcacttgctgaagaacatccaaaggcgcaggtcatctcaatcccagcaggttggtagctatattggaatcgaatgttctactgaggcaggaaggtctgatgttgagattgagatagaaaggcttaggaaagaaaggactatgttgatggaagaggttgttgatttgaaacaagagcagcgaagaatggctcaccgcgcaggagaagtgaatcaaaggctccaatccacagaacaaaggcagaaacaaatggtttctttcctggtcaagttaatccagaaccccgccttttagcccgccttaggcatgaggagcaaaaagaaatagattctccaagagtggtaaggaagtttgtcaagcagcaccaacatgaaactggaacagcagaaactctccaagaagggcagatagtgaggtaccaacatgattggagaaatataggcatgtcttccgaaactccaaaactaagtccagtttccattgaacagtctcctcactacctttcacagggtttggcaggagaagtgagtgtaggcgcagaagatcttactgctcaaatagagaatattgtatcaaatgacttggctgcagtgcacgggatcacagtgtctcaggaaattatgattggagaaggattatctagctttggagctgaagacccccttttcaaagggaaaagtgtcatgagtccaattctagaagttcctccagagtattttgcttccttcccagagggtttgaccaaggggaaagactttcaagatttttctgctcttggaactgaaggcatgataaagctagaagatatatgggactctggccttaatgttagtggtgctgcttcaggtagtgggaatgagctgtggagcaatcatgtcaactatgaagagtttccagaatttggagtcacaagtggtatgtctgactcagacatctgggatattggcttaggaagtttgggaattgataagtggccaactgatgaaccttctcttggtgaaacaaatggtcaagctggtcaaccaaaagaagataggcctaagaattttggtccatagggtttcatttgctcctgcacttgttgccctttggttacttgctatatttatagttcctaggaggcatattattgaatcatttgatttataaatagtattcattcacctgcttt

SEQ ID NO: 17960 - protein, 204 aa, Glycine max
MSSETPKLSPVSIEQSPHYLSQGLAGEVSVGAEDLTAQIENIVSNDLAAVHGITVSQEIMIGEGLSSFGAEDPLFKGKSVMSPILEVPPEYFASFPEGLTKGKDFQDFSALGTEGMIKLEDIWDSGLNVSGAASGSGNELWSNHVNYEEFPEFGVTSGMSDSDIWDIGLGSLGIDKWPTDEPSLGETNGQAGQPKEDRPKNFGP

SEQ ID NO: 17961 - protein, 145 aa, Glycine max
MIGEGLSSFGAEDPLFKGKSVMSPILEVPPEYFASFPEGLTKGKDFQDFSALGTEGMIKLEDIWDSGLNVSGAASGSGNELWSNHVNYEEFPEFGVTSGMSDSDIWDIGLGSLGIDKWPTDEPSLGETNGQAGQPKEDRPKNFGP

SEQ ID NO: 17962 - protein, 131 aa, Glycine max
NNFSSFVRQLNTYGFRKIDTDKWEFFNEAFQRGKKHLLKNIQRRRSSQSQQVGSYIGIECSTEAGRSDVEIEIERLRKERTMLMEEVVDLKQEQRRMAHRAGEVNQRLQSTEQRQKQMVSFLVKLIQNPAF

SEQ ID NO: 17963 - DNA, 1518 bp, Glycine max
aaaactctctctctctctctctacgctaattaaggttcattgggcattggcggattctatttccttttctcaaaacccaatttgcttcttcttcatggaagcactctccttcatcatccccaaagactcttgttctcttctccttcgcactccttcttcatattcctcttcgtctgtcagaactccgccgccgccacttgctttcttcaaaaccacccaacactctcactcgcctcaccttctccgtcttcgcgtttttgccctccctaaccccgacgccgatgaacccaccaacgacttcgctttagcgtctcatcctcaggaaaatttaagccattctgagactgagagttccgaagatgatcaagatgctccaccacaaatggacatgtcgtggtcaacgatcacagccccagctggaagtggatccggtggtggcaccagggctggacttttcagaacacccatttctggtggcgtgcagagtgccacctcagctcacggtttacctagaccggctttagcagtacggaatttgatggagcaggcaagatttgctcatttgtgcactgtaatgtctcgtatgcaccaccgacgagaaggatatccatttggttctctggttgattttgcaccagactcaacgggtcatccaatattttcattttctcctcttgcaattcacacaaggaatttgttggctgacccaagatgcacactggttgtccagatacctggatggagtggcttgtccaatgcaagggtaactctttttggggatgtctatccacttccagaagatcaacaggaatgggctcataagcagtatattgcaaaacatcaacagggtccttctcaacagtggggcaacttctactattttaggatgcagaatataagtgacatatatttcattggaggctttggtactgttgcttgggtggatgtaaaggaatatgaaacccttcaacctgataagattgcagttgatggtggtgaacagtatttaaaggaactcaatgctatcttctcaaaacccctaaagaaacttctatctagtgagactgaggtagatgacgctgcactcatatctatagacagcaaaggaactgatattagggtccgtcaaggtgctcagttcaacattcagaggatatcatttgatgaagggcagagtgtagaaacattggaagaagctaaagctgctcttcggaaattaatacacaaaggaaaagtgtacaatttgcagaaataagatgctggatgggatgtcctcttctccttttggctatagagtagacaatatatggaaccatgcgactttctaatgggacctttttagaatggttaattttatacttttttgcctggttgacatgcaccagaaagtgtattatattcatgcatttgaaagcatattttggtaagagtgggctttattgtgggctataccaccatagtcaaactagaaataatatatcagaactcatgaaataatagtatgattttttcccctcc

SEQ ID NO: 17964 - protein, 417 aa, Glycine max
KLSLSLSTLIKVHWALADSISFSQNPICFFFMEALSFIIPKDSCSLLLRTPSSYSSSSVRTPPPPLAFFKTTQHSHSPHLLRLRVFALPNPDADEPTNDFALASHPQENLSHSETESSEDDQDAPPQMDMSWSTITAPAGSGSGGGTRAGLFRTPISGGVQSATSAHGLPRPALAVRNLMEQARFAHLCTVMSRMHHRREGYPFGSLVDFAPDSTGHPIFSFSPLAIHTRNLLADPRCTLVVQIPGWSGLSNARVTLFGDVYPLPEDQQEWAHKQYIAKHQQGPSQQWGNFYYFRMQNISDIYFIGGFGTVAWVDVKEYETLQPDKIAVDGGEQYLKELNAIFSKPLKKLLSSETEVDDAALISIDSKGTDIRVRQGAQFNIQRISFDEGQSVETLEEAKAALRKLIHKGKVYNLQK

SEQ ID NO: 17965 - protein, 386 aa, Glycine max
MEALSFIIPKDSCSLLLRTPSSYSSSSVRTPPPPLAFFKTTQHSHSPHLLRLRVFALPNPDADEPTNDFALASHPQENLSHSETESSEDDQDAPPQMDMSWSTITAPAGSGSGGGTRAGLFRTPISGGVQSATSAHGLPRPALAVRNLMEQARFAHLCTVMSRMHHRREGYPFGSLVDFAPDSTGHPIFSFSPLAIHTRNLLADPRCTLVVQIPGWSGLSNARVTLFGDVYPLPEDQQEWAHKQYIAKHQQGPSQQWGNFYYFRMQNISDIYFIGGFGTVAWVDVKEYETLQPDKIAVDGGEQYLKELNAIFSKPLKKLLSSETEVDDAALISIDSKGTDIRVRQGAQFNIQRISFDEGQSVETLEEAKAALRKLIHKGKVYNLQK

SEQ ID NO: 17966 - protein, 290 aa, Glycine max
MDMSWSTITAPAGSGSGGGTRAGLFRTPISGGVQSATSAHGLPRPALAVRNLMEQARFAHLCTVMSRMHHRREGYPFGSLVDFAPDSTGHPIFSFSPLAIHTRNLLADPRCTLVVQIPGWSGLSNARVTLFGDVYPLPEDQQEWAHKQYIAKHQQGPSQQWGNFYYFRMQNISDIYFIGGFGTVAWVDVKEYETLQPDKIAVDGGEQYLKELNAIFSKPLKKLLSSETEVDDAALISIDSKGTDIRVRQGAQFNIQRISFDEGQSVETLEEAKAALRKLIHKGKVYNLQK

SEQ ID NO: 17967 - DNA, 2143 bp, Glycine max
gctctgtagggatgaagaagtcaagggtaaattcaaggaaaatattttatttttcaccttctcacaaacgcctaagttgaagaatatcatagaaagactatttgaacattgtggataccacgttcctgagtttataagtgatgaagatgcaattaaacggttggaaattttgctgcgaaaattgagggaagtccacttttgttggtcttggatgatgtttggcctggatcagaagccctcattgagaaatttcaattccagatgtctgattataaaattgtggtgacttctagggttgcatttcctaaatatggcaccccatatgttttaaaaccacttgctcatgaagatgcaatgaccctattccgacatcatgctctcttggaaaaaagcagttcacatattcctgacaaagaaattgtccaaaaggttgtgagatattgcaagggtttaccgcttgccgttaaagtgattggtagatcactcagtcatcggcctattgagatgtggcaaaagatggtggaggaattgtcacaaggtcattctatacttgattctaatattgaattacttacatgcttccaaaagctcttgcatgttttggaagataatcccaacaacaaggagtgcttcatggacttggggttatttcctgaagaccaaagaattcctcttcctgttcttattgatatatgggcagtgttatatggatttgatgatgacggcatagaagcaatggacatcataaataaattagactccatgaatctggttaatgtcttagtagcaaggaaaaattcaagtgactcagacaattactactacaataaccactacgtcatcctccatgatcttctaagagagcttgcaatctatcaaaacaacctggaaccaattgaaaagagaaaaagactgattaatgacataaatgaatccgaggagaagcaacaaggcatgatagcccgcttattgtcaaaattttgcagatgcagtgttaaacagacactccaacaggtccccgcccgcacattgtctatatcagctgatgaaacaaacacttcatatcagtcccacatacaaccatccctagctgaagttctggttttaaatcttcaaactaagaagtattcctttccagagtacatagagaaaatgagtgaactaaaagttcttatcatgacaaattatggttttcatccgtgtgaactagacaatttcaaactactcagctctgtatcaaacctgagaagaatcagactagagcggatttctgttcctcacttaggggcattgaaaaatcttggaaagttatccctctacatgtgtagtaacataagtcaggcttttgaaaatggtaccatcacagttttggattcatttccaaaactatcagatttgaacattgactattgcaaggatatggtgaaattgcctactgggatctgtgatattgtctcactaaagaagctcagtattactaattgtcacaagcttagttctctgccccaagaaattggacagttgttgaatttggaactcctgaacataagttcctgtactgatttggaagagataccagattctattgtaaaactttctaagctaagacttcttgacctctcaaactgcataagcctttcaagtttaccagaggacattggtgatctatgtaatctcaggaatctcaatatgacaagctgtgcaaggtgtgaattgccatactcagtaaccaatcttgagaatttgaaggtggtggtatgtgatgaagagacagctgcttcatgggaagcattcgaagctatgcttccaaatctgaagttagaggttcctcgagtcgaggttaacttaaactggcttcattctattagctcctaagacatgacctggttcatgggaagcatttgaaactatgattccaaatctaaagtttgaggttcctcgagttgatgttaactgaagctggtttcgttcaatttgctcctatgacctctttctataaatgttagaccaatggccgtgactgtttcatgtgtaataatcttgtttaaaatatggataataatgtgtattcaagttgctgtagtagtatttgcatgtttagtgtaaacagtactatgttacttgaaagaagttggcgattttg

SEQ ID NO: 17968 - protein, 537 aa, Glycine max
MSDYKIVVTSRVAFPKYGTPYVLKPLAHEDAMTLFRHHALLEKSSSHIPDKEIVQKVVRYCKGLPLAVKVIGRSLSHRPIEMWQKMVEELSQGHSILDSNIELLTCFQKLLHVLEDNPNNKECFMDLGLFPEDQRIPLPVLIDIWAVLYGFDDDGIEAMDIINKLDSMNLVNVLVARKNSSDSDNYYYNNHYVILHDLLRELAIYQNNLEPIEKRKRLINDINESEEKQQGMIARLLSKFCRCSVKQTLQQVPARTLSISADETNTSYQSHIQPSLAEVLVLNLQTKKYSFPEYIEKMSELKVLIMTNYGFHPCELDNFKLLSSVSNLRRIRLERISVPHLGALKNLGKLSLYMCSNISQAFENGTITVLDSFPKLSDLNIDYCKDMVKLPTGICDIVSLKKLSITNCHKLSSLPQEIGQLLNLELLNISSCTDLEEIPDSIVKLSKLRLLDLSNCISLSSLPEDIGDLCNLRNLNMTSCARCELPYSVTNLENLKVVVCDEETAASWEAFEAMLPNLKLEVPRVEVNLNWLHSISS

SEQ ID NO: 17969 - protein, 506 aa, Glycine max
MTLFRHHALLEKSSSHIPDKEIVQKVVRYCKGLPLAVKVIGRSLSHRPIEMWQKMVEELSQGHSILDSNIELLTCFQKLLHVLEDNPNNKECFMDLGLFPEDQRIPLPVLIDIWAVLYGFDDDGIEAMDIINKLDSMNLVNVLVARKNSSDSDNYYYNNHYVILHDLLRELAIYQNNLEPIEKRKRLINDINESEEKQQGMIARLLSKFCRCSVKQTLQQVPARTLSISADETNTSYQSHIQPSLAEVLVLNLQTKKYSFPEYIEKMSELKVLIMTNYGFHPCELDNFKLLSSVSNLRRIRLERISVPHLGALKNLGKLSLYMCSNISQAFENGTITVLDSFPKLSDLNIDYCKDMVKLPTGICDIVSLKKLSITNCHKLSSLPQEIGQLLNLELLNISSCTDLEEIPDSIVKLSKLRLLDLSNCISLSSLPEDIGDLCNLRNLNMTSCARCELPYSVTNLENLKVVVCDEETAASWEAFEAMLPNLKLEVPRVEVNLNWLHSISS

SEQ ID NO: 17970 - protein, 456 aa, Glycine max
MWQKMVEELSQGHSILDSNIELLTCFQKLLHVLEDNPNNKECFMDLGLFPEDQRIPLPVLIDIWAVLYGFDDDGIEAMDIINKLDSMNLVNVLVARKNSSDSDNYYYNNHYVILHDLLRELAIYQNNLEPIEKRKRLINDINESEEKQQGMIARLLSKFCRCSVKQTLQQVPARTLSISADETNTSYQSHIQPSLAEVLVLNLQTKKYSFPEYIEKMSELKVLIMTNYGFHPCELDNFKLLSSVSNLRRIRLERISVPHLGALKNLGKLSLYMCSNISQAFENGTITVLDSFPKLSDLNIDYCKDMVKLPTGICDIVSLKKLSITNCHKLSSLPQEIGQLLNLELLNISSCTDLEEIPDSIVKLSKLRLLDLSNCISLSSLPEDIGDLCNLRNLNMTSCARCELPYSVTNLENLKVVVCDEETAASWEAFEAMLPNLKLEVPRVEVNLNWLHSISS

SEQ ID NO: 17971 - DNA, 1289 bp, Glycine max
aactctgctacaaaagctgaaaagcgtattttagataacagactacaaaaagaggaagcattaaaggttcgagtgactaaagatggtgaggctagtgaaaaggagaaggaactggttactgagatatctgaactgcaatgcaaaaaagaagatctcgaagctgaattgaaaaaggttagcactactttggctgctgctcaagcacgactatggaatgtgagggaagagagagaccagtttgaggaagcaaacaatcagatagttgaacacctgaaaataaaggaagatgaactttcaaaatcaatcagctcatgtagggttgaagcagatgttatcaaaacctggattaattttctggaagatacttgggttcttcagtggtcaaatgcagaaattaatgacaagcaggtcaatgatgaattggagagacatgaggactactttgtgaacttggccattcaacttcttactacttaccagaaagagttagagccttgcattaaccatatcaaaacatttgtcgtgaacctcaagaatttaagtcagaggttagagatgacacccagtgcagatactgatgagtcagaagtattaagtccaaggagaaatcttgaggaggaatatttgacctatgaagccaagattattactaccttcagtgtagtggataacatgaaacaacagttttatgctcaacacgggaaaatttccaggaaagatgaggagagagttatagagctgtttgatgccattgaaaagttgcgaactcaatttgagtctattgagagaccaattcttgaaatagagatccctgcaaaagctgaaacgccacctttggagaaaaagtctgatgctactccttcagtttctgttccagctcaaggtgctgcagctcaaggtatcgagctttcaaagccagaaacagatgagcaaccaaaatcaccttcagttaagacagaccagatattggatcatgaagcggaattagctaagctggaatctgagtttgggaaggttagtaaggattattcagcagaggaaattggtgattgggaatttgatgagcttgaaagagaattaagcaagtagttaggttatttatgagtaattaatgcttgctgttgcattttgatgatgaagtgcaagtaccataaatttgtaagccataggtcggctgttaatgaagcttcaatctggatcggattcctttgaatttgtaaacattacatagcataatttctttattcttctgtaaattaacgggtttgcaacttgcagcccagtcacct

SEQ ID NO: 17972 - protein, 362 aa, Glycine max
NSATKAEKRILDNRLQKEEALKVRVTKDGEASEKEKELVTEISELQCKKEDLEAELKKVSTTLAAAQARLWNVREERDQFEEANNQIVEHLKIKEDELSKSISSCRVEADVIKTWINFLEDTWVLQWSNAEINDKQVNDELERHEDYFVNLAIQLLTTYQKELEPCINHIKTFVVNLKNLSQRLEMTPSADTDESEVLSPRRNLEEEYLTYEAKIITTFSVVDNMKQQFYAQHGKISRKDEERVIELFDAIEKLRTQFESIERPILEIEIPAKAETPPLEKKSDATPSVSVPAQGAAAQGIELSKPETDEQPKSPSVKTDQILDHEAELAKLESEFGKVSKDYSAEEIGDWEFDELERELSK

SEQ ID NO: 17973 - DNA, 1112 bp, Glycine max
tttattgattattgccgaggatgtggaaagtgatgcacttgcaactcttattctaaataagcttcgggctggaattaaggtatgtgctattaaagcccctggttttggcgaaaataggaaagccaatcttcaagatcttgcagttctcacaggaggagcacttattactgaagagcttggcttgaagcttgaaaaagtggatttggatatgcttggcacctgtaaaaaaataacagtttctaaggatgacactgtcattcttgacggagcaggtgacaagaaagcacttgaggaaagatgcgagcagattaggtctgcaattgaaaacagcacctcagattatgacaaggaaaagttacaggaaagattagccaagctttctggtggtgttgccgtgcttaagattggaggagccagtgaagctgaagttggtgagaagaaggatagagtgacagatgccttaaatgcaactaaggctgctgtagaggaaggcattgtatcaggtggtggtgttgctcttctatatgcgtcaaaagagttggataaacttcaaactgctaactttgatcagaagattggtgtccagattatccaaaatgctttaaagacacctgtgctcacaattgcatcaaatgcgggtgttgagggtgcagttgttgttggcaaactattggaacaggagaatcatgatctaggatatgatgcagccaaaggtgaatatgttgatatggttaaagctggaatcatagaccctttgaaggtgattaggacagccttggttgatgcagccagtgtatcatctttgatgacaacaactgaagctgttgtgtctgaacttccaaacgatgataaagatactccagctatggctggtggcatgggtggcatgggttattaaccagcttctattgatttggttgcacctgaaaacaaggattagtgctgaatccacacttactgtctttttttttttggggttaaattatttgttgtgtgaggcatcactgtaatcatagtgagagatcaagatgtaggtaaggaaatgtaactgcaataaataagatatttggagcaattttcacctcccaaatcaaggccattgttgttccctg

SEQ ID NO: 17974 - protein, 298 aa, Glycine max
LLIIAEDVESDALATLILNKLRAGIKVCAIKAPGFGENRKANLQDLAVLTGGALITEELGLKLEKVDLDMLGTCKKITVSKDDTVILDGAGDKKALEERCEQIRSAIENSTSDYDKEKLQERLAKLSGGVAVLKIGGASEAEVGEKKDRVTDALNATKAAVEEGIVSGGGVALLYASKELDKLQTANFDQKIGVQIIQNALKTPVLTIASNAGVEGAVVVGKLLEQENHDLGYDAAKGEYVDMVKAGIIDPLKVIRTALVDAASVSSLMTTTEAVVSELPNDDKDTPAMAGGMGGMGY

SEQ ID NO: 17975 - protein, 229 aa, Glycine max
MLGTCKKITVSKDDTVILDGAGDKKALEERCEQIRSAIENSTSDYDKEKLQERLAKLSGGVAVLKIGGASEAEVGEKKDRVTDALNATKAAVEEGIVSGGGVALLYASKELDKLQTANFDQKIGVQIIQNALKTPVLTIASNAGVEGAVVVGKLLEQENHDLGYDAAKGEYVDMVKAGIIDPLKVIRTALVDAASVSSLMTTTEAVVSELPNDDKDTPAMAGGMGGMGY

SEQ ID NO: 17976 - DNA, 1097 bp, Glycine max
gattcctcttcattcttcaataactccaatgtattccttagctcaacacaagtatacaccaaacttccaccaccaagtttgcaagaaccatccaccccgtcacccgtctcgagtacattgttctaccacaaccactaccaccaccacctctaggtctaagtccaatgctaagtcattggtcattgagacccggctcgtgccggtgccgccaatgccaacggtcgttaccactgagatccaccgtccaatgaacaatgacccaagtttgcaatcaacatggtctcatagagcttgggtggcagctggatgctcaactttggtcatttccttgggagagtccataaagggtgctattgatttgaacatgtgggttgagcccattgtggcaggttgggttggatacatcttagctgatcttggatcaggggtttaccattgggccatcgacaattatggcgatggctcaaccccaatagttggggctcaaattgaagcctttcaaggccaccacaagtggccttggaccatcactaggcgtcaatttgctaacaatttacatgcattggcacgtgcagtgaccttggcagtgcttcctgtagtccttctttgccatgaccctattgttgaaggatttgttgtggtgtgctcaggttgcatcatgtttagccaacagtttcatgcatggtcacatggcactaagagccggcttccgccactcgtggtggcattacaagaggccggcgtgctcgtgtcacggtggcaacatgccgcacaccaccgggcaccatataacaataactattgtatagtgagtggagtgtggaatgagtttttggataagcataaggtctttgaagccatggaaatggtattgtattttaaaacaggagttaggccaaggtcatggagtgaacctgcccctgagtgggttgaggagattgagactccttctcaaatccaaatccaaacccaatgaatgatgtttattctcttctccatttatttttaaaccatttataacacacatgtgtcaatgtagcttttgggtaatgtaaattacattatatttaaattataaagcttgaaaggttaaatac

SEQ ID NO: 17977 - protein, 324 aa, Glycine max
IPLHSSITPMYSLAQHKYTPNFHHQVCKNHPPRHPSRVHCSTTTTTTTTSRSKSNAKSLVIETRLVPVPPMPTVVTTEIHRPMNNDPSLQSTWSHRAWVAAGCSTLVISLGESIKGAIDLNMWVEPIVAGWVGYILADLGSGVYHWAIDNYGDGSTPIVGAQIEAFQGHHKWPWTITRRQFANNLHALARAVTLAVLPVVLLCHDPIVEGFVVVCSGCIMFSQQFHAWSHGTKSRLPPLVVALQEAGVLVSRWQHAAHHRAPYNNNYCIVSGVWNEFLDKHKVFEAMEMVLYFKTGVRPRSWSEPAPEWVEEIETPSQIQIQTQ

SEQ ID NO: 17978 - protein, 315 aa, Glycine max
MYSLAQHKYTPNFHHQVCKNHPPRHPSRVHCSTTTTTTTTSRSKSNAKSLVIETRLVPVPPMPTVVTTEIHRPMNNDPSLQSTWSHRAWVAAGCSTLVISLGESIKGAIDLNMWVEPIVAGWVGYILADLGSGVYHWAIDNYGDGSTPIVGAQIEAFQGHHKWPWTITRRQFANNLHALARAVTLAVLPVVLLCHDPIVEGFVVVCSGCIMFSQQFHAWSHGTKSRLPPLVVALQEAGVLVSRWQHAAHHRAPYNNNYCIVSGVWNEFLDKHKVFEAMEMVLYFKTGVRPRSWSEPAPEWVEEIETPSQIQIQTQ

SEQ ID NO: 17979 - protein, 254 aa, Glycine max
MPTVVTTEIHRPMNNDPSLQSTWSHRAWVAAGCSTLVISLGESIKGAIDLNMWVEPIVAGWVGYILADLGSGVYHWAIDNYGDGSTPIVGAQIEAFQGHHKWPWTITRRQFANNLHALARAVTLAVLPVVLLCHDPIVEGFVVVCSGCIMFSQQFHAWSHGTKSRLPPLVVALQEAGVLVSRWQHAAHHRAPYNNNYCIVSGVWNEFLDKHKVFEAMEMVLYFKTGVRPRSWSEPAPEWVEEIETPSQIQIQTQ

SEQ ID NO: 17980 - DNA, 1120 bp, Glycine max
aaaaaaaaaaatatatgctctcaataaacacacacgcaccggcagcacccgccgccggtggaacccattaacaaacaccacaagaaacttatcattcccttgttcttctccttcctcctcatcttctcttacccattttccatctaataaaaattcgaatacccaattggaaaaagcaatcaactttgcaaacactcggtggaaaaaacgcattccacctccaatcttcattcgcattgagctctgtttcttttccacatgaaacggcgatgaagtagctgtcgtttttcgattcagaacgccgccgcagaatgctgtgcaggaagagctccaaaaacgacgtcggctcgggatcggtgccggtgcacctcaacgtctacgatttgacacccatcaacggttacgcttattggttcggcctcggagtgtatcattccggcgtgcaagttcacggcgttgagttcgcgttcggggctcacgagtactcgttgacggggatattcgaaggagaaccgaagaggtgcgaaggtttcgcgttcaggaaaacgattctgatcggaaaaaccgatatgagacccggtgaggttaaggcggtgatggaagaacttgctgctaagtacagaggtaatgcttacaatctcatcacaaagaattgcaaccatttctgtaacgatgcttgtcttagactcaccggaaatcctattccaagttgggtcaatcgtcttgctcgaattggatttatgtgcaattgtgttcttccggtgacattgaactcaacaaaagttaggcatcacaagatggaagaaaagcaatgtgaaggagagaaacaagcattagcgactaaggcaaagaaacttagtgcttcaaattcatcatcatcttcccctgagggactgcgcaggggaaggagtagaaaccgacgtgcccttcctccatcttcacctttgattattggatcttcttcatcttgatgcccaaactcttaatttttatttatttttttatctttaatatggccaattacagaagttgctctaaggaagaaaggcaacagattggattttcaatttaaaattgttttttttcattcttttcatccaatgaccatataaagttatgg

SEQ ID NO: 17981 - protein, 219 aa, Glycine max
MLCRKSSKNDVGSGSVPVHLNVYDLTPINGYAYWFGLGVYHSGVQVHGVEFAFGAHEYSLTGIFEGEPKRCEGFAFRKTILIGKTDMRPGEVKAVMEELAAKYRGNAYNLITKNCNHFCNDACLRLTGNPIPSWVNRLARIGFMCNCVLPVTLNSTKVRHHKMEEKQCEGEKQALATKAKKLSASNSSSSSPEGLRRGRSRNRRALPPSSPLIIGSSSS

SEQ ID NO: 17982 - protein, 133 aa, Glycine max
MRPGEVKAVMEELAAKYRGNAYNLITKNCNHFCNDACLRLTGNPIPSWVNRLARIGFMCNCVLPVTLNSTKVRHHKMEEKQCEGEKQALATKAKKLSASNSSSSSPEGLRRGRSRNRRALPPSSPLIIGSSSS

SEQ ID NO: 17983 - protein, 124 aa, Glycine max
MEELAAKYRGNAYNLITKNCNHFCNDACLRLTGNPIPSWVNRLARIGFMCNCVLPVTLNSTKVRHHKMEEKQCEGEKQALATKAKKLSASNSSSSSPEGLRRGRSRNRRALPPSSPLIIGSSSS

SEQ ID NO: 17984 - DNA, 1054 bp, Glycine max
aaaaaaagcttctttgtctctcgtgccgattctccaccacaattcccttcaccccaatcacactttccggtagttgttgctattagtgtagaagatgagtacgctggatgcaacaagggctgaacttggtcttcttgttttatatttgggcaaggctgaagcaagggacaaaatatgcagggcaatacaatatggttccaaatttttgagtaatggggaacctggtactgctcagaatgtagacaaaacaaccagcttggcacgaaaagtcttccgtctctttaagtttgtcaatgacctacatgctttgataagtccaacaccacaggggacacccctccccctagctctgttggacttatcaaagcatgtagtcactgagcaaaccaaggaggaaagtactgaggccccacgacctgcagcttcagaagacaagccctcggttgaagttcagactaaagaggtggcagaggaagttgtgtctgagaccgtcacacaagagccaacagttgagaaacaagaagctgctgagggaacaaaagaaaatgccgatcctgctgagattaagacaccagaagctgcagaagatgttaatgttaaggaagagaaagaagctgaggctgaagctaggagggaagaggccccggcagagaaaagtgaggagaaggttgagacagaagggtcagctgaaaagaaagaggaggaagtgattgcagaagctgaagctgagaagaaggaggaggtcacagtcacagacacagaggctccaacagagtaaaagaatgtgaagaggggaaatgtgcagtttaagtgagtgtttgagagggtatttttttcttagttgcatcgtgtcttgttgctccatgcatgtcttttctttgtttagtggtctaataaaaagtctagctagggaagggatgagtgatgcgaatgccaaccactcagtacaagaaccacatggcatgtagtctttcaatctgatctatggggtgtgcatggctagctctccatccaatgaattatgttatggtcctttgtgtgattcaaaaaaaat

SEQ ID NO: 17985 - protein, 227 aa, Glycine max
MSTLDATRAELGLLVLYLGKAEARDKICRAIQYGSKFLSNGEPGTAQNVDKTTSLARKVFRLFKFVNDLHALISPTPQGTPLPLALLDLSKHVVTEQTKEESTEAPRPAASEDKPSVEVQTKEVAEEVVSETVTQEPTVEKQEAAEGTKENADPAEIKTPEAAEDVNVKEEKEAEAEARREEAPAEKSEEKVETEGSAEKKEEEVIAEAEAEKKEEVTVTDTEAPTE

SEQ ID NO: 17986 - DNA, 1188 bp, Glycine max
gtgagaagagtggtgtgatggcgcagagagctcaaccagtattggccacagatgttttccaaatgggaaacatccaatggaagcaattcaatgttgatacatccagtgcttccttctcacctccaaaaccattgctaatttttacaccaactgttcctggcgcataccctgtaatattgttcgtccatggctttttcattcgcaatttctactactcaaagctcctagcccacatagtctcacatggattcataatcgttgctcctcaactgttttccaatgggcttcctatgtatggacccactgaagtggaatatgcaggaaaagttgcggattggatagctgaggagcttcaacatttgcttccagagaacgttgaagccaatttggacaaactggttctatcaggtcacagtaggggtgggaaaactgtatttgctgtggctcttggtcatgcaaaaactaatctcaagttttcagcacttgtaggcatagaccctgtggctggcacatctaaatattgtagaacacgtcctcatattctcactggcaagccacggtcctttgatttgaaaatgccagttgaagtaattggcactggattgggcccagagaagcttaattgttgtactccaccgtgtgctcctgatggggtgaactataaggagttcttcaacgagtgcaaacccccttgtgctaaatttgttgtagcaaagtatggtcacatggacatgttgaatgatgacacaccagggctaattgggacattggtgtcaaagtgtatgtgtaagaatgggacgacgggtcctagggacttgatgagaaggaccactggagggttggttgtgtccttcttgagggcacaattgaatgacctatggaaggattttgatgctattttaaaggaccctaatcttgctcccactgaagtcgatggtgtagactacataccagcatgaattgatcaacactcaacgttcttttgcgcttttatttccctgaaaggcctataaatgtctttcgaaataatcgtctatggttatttatgtattctcgctatcctgtcatagtataagaaaaaaaaaattaaaatattatcgttttaattttttaatgtaattaatttttttcacttatatttatatctattaataataagaattatctcatatacatttttatttgacc

SEQ ID NO: 17987 - protein, 318 aa, Glycine max
EKSGVMAQRAQPVLATDVFQMGNIQWKQFNVDTSSASFSPPKPLLIFTPTVPGAYPVILFVHGFFIRNFYYSKLLAHIVSHGFIIVAPQLFSNGLPMYGPTEVEYAGKVADWIAEELQHLLPENVEANLDKLVLSGHSRGGKTVFAVALGHAKTNLKFSALVGIDPVAGTSKYCRTRPHILTGKPRSFDLKMPVEVIGTGLGPEKLNCCTPPCAPDGVNYKEFFNECKPPCAKFVVAKYGHMDMLNDDTPGLIGTLVSKCMCKNGTTGPRDLMRRTTGGLVVSFLRAQLNDLWKDFDAILKDPNLAPTEVDGVDYIPA

SEQ ID NO: 17988 - protein, 313 aa, Glycine max
MAQRAQPVLATDVFQMGNIQWKQFNVDTSSASFSPPKPLLIFTPTVPGAYPVILFVHGFFIRNFYYSKLLAHIVSHGFIIVAPQLFSNGLPMYGPTEVEYAGKVADWIAEELQHLLPENVEANLDKLVLSGHSRGGKTVFAVALGHAKTNLKFSALVGIDPVAGTSKYCRTRPHILTGKPRSFDLKMPVEVIGTGLGPEKLNCCTPPCAPDGVNYKEFFNECKPPCAKFVVAKYGHMDMLNDDTPGLIGTLVSKCMCKNGTTGPRDLMRRTTGGLVVSFLRAQLNDLWKDFDAILKDPNLAPTEVDGVDYIPA

SEQ ID NO: 17989 - protein, 298 aa, Glycine max
MGNIQWKQFNVDTSSASFSPPKPLLIFTPTVPGAYPVILFVHGFFIRNFYYSKLLAHIVSHGFIIVAPQLFSNGLPMYGPTEVEYAGKVADWIAEELQHLLPENVEANLDKLVLSGHSRGGKTVFAVALGHAKTNLKFSALVGIDPVAGTSKYCRTRPHILTGKPRSFDLKMPVEVIGTGLGPEKLNCCTPPCAPDGVNYKEFFNECKPPCAKFVVAKYGHMDMLNDDTPGLIGTLVSKCMCKNGTTGPRDLMRRTTGGLVVSFLRAQLNDLWKDFDAILKDPNLAPTEVDGVDYIPA

SEQ ID NO: 17990 - DNA, 1214 bp, Glycine max
aaaaaaaggtttgttcttagcaattcctctgtgttctcaaaggccgttttttttagtgtgtgtgtttcacttttatttccttttcggttccaatctatgtttgagtcgtattgtaatcatgttgagtcttggtcgatgccttgtataatgtgtatggtgggttgtatcttccttggattttattgaacatgcctgcctgcccgccacctgtttgatgaaatgcttgaacttttcagaaatgaactagtgtgtgatatattggcgcttgaatttgtgatgctacacctgttggctttcttgtttgcatctgaattacaaaagaagtgactgtgaatccgaatccaaatctgaatgggttatcttcaatttggcagacatggtgttaggcaggtccttagatttagagatgctagttgtgataatgttgtggtaaacccactcttatatgcttcccaaggacttcgttacaagaggaagctccaagtcatccttacaactgacatagataagctgggaaaggcaggtgacactgtcaaagttgcccctggatattttcgcaaccacctaatgcccaagctccttgctttccctaacattgataagtttgcttatctcctcaatgagcagcgcaagatctatcaaccaactgaagaagaaaaacaagaagatgtcactctagttaaagagtccaaggaagatatgatgaaagagtatgaaaaggcagcattacgtcttgataaagctcagctggttttgcggaggttaattaatgttcaaaaagccaagtcacgtgaatcaaaagaagaccccttggagttacgttatcctgtgacaaaagatactcttgtggctgaggtggcaagacaactttgtgtgaacgttgcacctgataacctgcatcttccatcacctctatccacattaggagaatatgaggtgccactgcgtataccaaggtccatcccgttgccagagggcaaggttaactggagtttgaaagttaaagtcaggagtaaataaatcactcatcttgttgaattcaagttcacaagggatggaatagtggttttatgctaataaatcattaaattgaatccgaggattataagattttgacattgcttttatttatagaaacagaaacgccactcatttaacaatgtctcttgaatagtctgtttttattgagtggagtctcatgtgttattgacaag

SEQ ID NO: 17991 - protein, 222 aa, Glycine max
MGYLQFGRHGVRQVLRFRDASCDNVVVNPLLYASQGLRYKRKLQVILTTDIDKLGKAGDTVKVAPGYFRNHLMPKLLAFPNIDKFAYLLNEQRKIYQPTEEEKQEDVTLVKESKEDMMKEYEKAALRLDKAQLVLRRLINVQKAKSRESKEDPLELRYPVTKDTLVAEVARQLCVNVAPDNLHLPSPLSTLGEYEVPLRIPRSIPLPEGKVNWSLKVKVRSK

SEQ ID NO: 17992 - protein, 150 aa, Glycine max
MPKLLAFPNIDKFAYLLNEQRKIYQPTEEEKQEDVTLVKESKEDMMKEYEKAALRLDKAQLVLRRLINVQKAKSRESKEDPLELRYPVTKDTLVAEVARQLCVNVAPDNLHLPSPLSTLGEYEVPLRIPRSIPLPEGKVNWSLKVKVRSK

SEQ ID NO: 17993 - DNA, 1124 bp, Glycine max
atagtagcagcctcacattacattctgtgttactctgtgttaacatgacaacagatgataagaaggaagtttaaaatgattgtatgtatgggcgctaagttgtatatatatatatatataaagatctaagtaaaaataagttctaaactaaaattaagtttgtggcaatacagaattctcagttgtgctgaattgtgttttcaggtggaatcagatccatgatcatggtacaagtcatttaagtataatagatcctgagagaaatgccatttccatgactagcactgtgaatgcatattttggttcaaagatcctttcaccaagtacaggaatagtactgaacaatgaaatggatgatttttccatgcctagaaatgttaccaaggatgttccaccaccagctcctgccaatttcatcatgccaggaaagcggccactatcatccatgtcacccactattgcccttaaggatgggaagctaaaagctgtagtaggtgcaagtggaggtgctttcatcattggtggaactgcagaagttcttttgaatcacttcgttaaaggaatggatcctttttcttctgtaacagctccaagggtctatcatcagctactacctaacgtggttaattatgagaattggaccactttaggtgaacactttgaacttcctgctgatatcagggaagcccttaaaagtaagggtcatgtcctaaagggccttgccggtgggactatttgccaatttattgttctagacaattctgtgccgtccagacaaaataaagggattggaaatggaaagcttgtggcagtgagtgacccaagaaagggtggttttcctgcaggcttttgagataattcattgatgttgtgatatcttcatctcatctatgcaagttttctcctttgcatgattcttatactgcttgctgtattttattaatggggataaaaaatctacacaatttggcttctggttatctcaagtatctacaagtacaactactaccctgcttgttctcgtctattcaagttttcctttacatgattctcgtactgctaaatgctaattgtattgaaattaaataatgggaatgaaaaatctacacaattttcttctggtt

SEQ ID NO: 17994 - protein, 192 aa, Glycine max
MTSTVNAYFGSKILSPSTGIVLNNEMDDFSMPRNVTKDVPPPAPANFIMPGKRPLSSMSPTIALKDGKLKAVVGASGGAFIIGGTAEVLLNHFVKGMDPFSSVTAPRVYHQLLPNVVNYENWTTLGEHFELPADIREALKSKGHVLKGLAGGTICQFIVLDNSVPSRQNKGIGNGKLVAVSDPRKGGFPAGF

SEQ ID NO: 17995 - protein, 167 aa, Glycine max
MDDFSMPRNVTKDVPPPAPANFIMPGKRPLSSMSPTIALKDGKLKAVVGASGGAFIIGGTAEVLLNHFVKGMDPFSSVTAPRVYHQLLPNVVNYENWTTLGEHFELPADIREALKSKGHVLKGLAGGTICQFIVLDNSVPSRQNKGIGNGKLVAVSDPRKGGFPAGF

SEQ ID NO: 17996 - protein, 162 aa, Glycine max
MPRNVTKDVPPPAPANFIMPGKRPLSSMSPTIALKDGKLKAVVGASGGAFIIGGTAEVLLNHFVKGMDPFSSVTAPRVYHQLLPNVVNYENWTTLGEHFELPADIREALKSKGHVLKGLAGGTICQFIVLDNSVPSRQNKGIGNGKLVAVSDPRKGGFPAGF

SEQ ID NO: 17997 - DNA, 994 bp, Glycine max
tgtgaggcatgctcagaggtttgttcttcagcagcctaaatgggtgagatacctaaagttgaatcttcaaagtcactatggttctgaattttattgcacactaagcgtagttgaagtttatggtgtggatgctgttgagaggatgctggaggatttgatacatactcaagataatctattggcacctggagacggtaatgctgataaaatgacagtatcaccccatcctaatcctcctgagagtgaagatgctcatcaaaatacttttggagggatcaattcttatcctgcttcagatatctcttctgcaaatcatgagaaactaaatagtaacgttcctgatccagtggaagaaatccgtcaacaagttggcaggatgcctggggatactgttctcaagattctgatgcagaaagttcgtactctagacttaaatttgtttgttttggagcggtatatggaggacttaaatactagatatgtcaatattttcaaagagtacagcaaagacattggaggaaaagatatacttatacagaatatcaaagaagacattaggaatctcgttgaccagcaagatgctataacaaaagatggaagtgatctcaaatcttggaagtcccatatttccatgcagtttggtcatctactcagggacaatgctgttttgaggtccgaggttaatgaagtccgcaggaagcaagcatctttagaaaacaagggtgtgttagtgttcttagtgtgttgtattttttcaatgctagttatattacggctatctctagatatggctacgagtgtctatagagtattacaaagtgttaatagaacagattgctccaggaaattttgtgccgttagctcttcatggtttctcctattattgaattgtatcattattatttttatattaactctgtgatagtccattttttaaatatgttgttaacttgtgtgagatgcttggtttcaatatagatatagaaactgtctt

SEQ ID NO: 17998 - protein, 306 aa, Glycine max
VRHAQRFVLQQPKWVRYLKLNLQSHYGSEFYCTLSVVEVYGVDAVERMLEDLIHTQDNLLAPGDGNADKMTVSPHPNPPESEDAHQNTFGGINSYPASDISSANHEKLNSNVPDPVEEIRQQVGRMPGDTVLKILMQKVRTLDLNLFVLERYMEDLNTRYVNIFKEYSKDIGGKDILIQNIKEDIRNLVDQQDAITKDGSDLKSWKSHISMQFGHLLRDNAVLRSEVNEVRRKQASLENKGVLVFLVCCIFSMLVILRLSLDMATSVYRVLQSVNRTDCSRKFCAVSSSWFLLLLNCIIIIFILTL

SEQ ID NO: 17999 - protein, 259 aa, Glycine max
MLEDLIHTQDNLLAPGDGNADKMTVSPHPNPPESEDAHQNTFGGINSYPASDISSANHEKLNSNVPDPVEEIRQQVGRMPGDTVLKILMQKVRTLDLNLFVLERYMEDLNTRYVNIFKEYSKDIGGKDILIQNIKEDIRNLVDQQDAITKDGSDLKSWKSHISMQFGHLLRDNAVLRSEVNEVRRKQASLENKGVLVFLVCCIFSMLVILRLSLDMATSVYRVLQSVNRTDCSRKFCAVSSSWFLLLLNCIIIIFILTL

SEQ ID NO: 18000 - protein, 237 aa, Glycine max
MTVSPHPNPPESEDAHQNTFGGINSYPASDISSANHEKLNSNVPDPVEEIRQQVGRMPGDTVLKILMQKVRTLDLNLFVLERYMEDLNTRYVNIFKEYSKDIGGKDILIQNIKEDIRNLVDQQDAITKDGSDLKSWKSHISMQFGHLLRDNAVLRSEVNEVRRKQASLENKGVLVFLVCCIFSMLVILRLSLDMATSVYRVLQSVNRTDCSRKFCAVSSSWFLLLLNCIIIIFILTL

SEQ ID NO: 18001 - DNA, 744 bp, Glycine max
tgctcacaagattgaggaacaccgtcggaagtatgaaaggctgcacaaagaaagagaggataaaaaaaaggagcgtgagaggcagcggcgccgtgctgaagctcaggctgcctatgagaaggccaagaagcaagagcaatcatcttccagtagaaatcctggaggtatgcctggtgggtttcctggtggcatgcctgggggcttcccaggggccgggggcatgcctgggggcttcccaggggccgggggtatgccgggaggcttcccaggggccgggggtatgcctgggggaggcttcccaggagctggtggcatgcctggaggggtgcctggaaacattgattttagcaaaatcttgagtgaccctgaactgatggcggcatttagtgatccggaggttatggctgctcttcaagatgttatgaagaaccctgctaattttgccaagcaccaatcaaatccaaaggtaggtcctgtaattgcgaaaatgatgaccaaacttggaggtggtcccaagtgaatacttttagatgcttataagttatatgagacttcaacattccagccctctggcatcgggtatttaatgtttattgcatttttaattttaacgaaattatttaactttttaccatttgttagtcctgtttcttaggtgccctattatagctcgtgctggtagccatgtttatttgtgaacaatgtaatgttattttcccgagtgaatttgaatgtttaaagttg

SEQ ID NO: 18002 - protein, 172 aa, Glycine max
AHKIEEHRRKYERLHKEREDKKKERERQRRRAEAQAAYEKAKKQEQSSSSRNPGGMPGGFPGGMPGGFPGAGGMPGGFPGAGGMPGGFPGAGGMPGGGFPGAGGMPGGVPGNIDFSKILSDPELMAAFSDPEVMAALQDVMKNPANFAKHQSNPKVGPVIAKMMTKLGGGPK

SEQ ID NO: 18003 - protein, 118 aa, Glycine max
LTRLRNTVGSMKGCTKKERIKKRSVRGSGAVLKLRLPMRRPRSKSNHLPVEILEVCLVGFLVACLGASQGPGACLGASQGPGVCREASQGPGVCLGEASQELVACLEGCLETLILAKS

SEQ ID NO: 18004 - protein, 117 aa, Glycine max
MPGGFPGGMPGGFPGAGGMPGGFPGAGGMPGGFPGAGGMPGGGFPGAGGMPGGVPGNIDFSKILSDPELMAAFSDPEVMAALQDVMKNPANFAKHQSNPKVGPVIAKMMTKLGGGPK

SEQ ID NO: 18005 - DNA, 389 bp, Glycine max
ggaccatttattggagcagccattgcagccttctaccaccaattcatcttgagagcaggtgctgctaaggctcttggatcattcaggagcaaccccgctatttgagtcaatttaatttcttcttcatgatgagttcaaaatgaagaggaaattataagaataataaaaatattgtcaataatggcaattgcttgtgcttttattgcaaccttttctttgatcctattatgtagattaaaggttcttttcaagacaagagccattggtaaataccctttagtattttcaagcactttcctttctttcagtgtgtgatattttcttttaggtaatttaatctcttgtactcaacgtggaaaaaaatatatataaatccatgcttttacttg

SEQ ID NO: 18006 - protein, 44 aa, Glycine max
MAIACAFIATFSLILLCRLKVLFKTRAIGKYPLVFSSTFLSFSV

SEQ ID NO: 18007 - protein, 34 aa, Glycine max
GPFIGAAIAAFYHQFILRAGAAKALGSFRSNPAI

SEQ ID NO: 18008 - DNA, 1125 bp, Glycine max
cttcttcggttaaacctttttcaccttccccctttgtttctcaacatcattctcctcattcccctacctacccccaattttcccttctgtatttctctttttcaattctcgatttcccttctcccttttgtgtcttcataatccagatcctctcttcgatctagggtttctggcttaattaacaatcaaatgtttaaggaagaatttctatgacgattcgcaaccccatgcgacgaatccgtctcctccactccttctccgtcgtcttcctctactggttctacgtcttctcatgaactaactccctctcaatcccctaccctaattcctccaatttccccattttttttctaattaatcagatttgcaaaatcctaatttctctatcctaacaaaacccccaaattcaaacaaatccaatggcttcgattccgcgtccggcgagttcgggatcttcggagggaggaggagatccggctgcgatggacgagagaamgaggaagcggatggagtcgaaccgcgagtccgcacggcgatcgcggatgaagaagcagaagctgctcgaagacctatccgacgtagcgagtcgccttcaaggcgagaacgtgcgcttagcgcagagcataaaggcgaaggaggaagcgtacgttgagatcgaagccgcgaacgacatcctcagagcacagaccatggaactcgccgaccggttaaggtttctgaactccattctcgagatcgccgatgaggtcggcggcggtggtgaatccttcgagattccgcagattccagaccctctcttcatgccctggcagatcccccaccctatgatggcgtcacctgacatgctcctccatggaaatcaaggcctgtttgcttgatagtacttcaattaggctaggtttattgttgatgttccctagtgttttggtgaataaagaaagggaatggtgttagatgtttatgagttatatcgtgtgttggtgtgctgttttttttttttaagatctgtgtttatgttttgtgtgtgcactatcgtcgttatatagttgaattgaatgtatctgctttgtcgtagtgactggcattgtgtatcgatataaaattatgtttctgtttaaaattaat

SEQ ID NO: 18009 - protein, 152 aa, Glycine max
  misc_feature (26)..(26): Xaa can be any naturally occurring amino acid
MASIPRPASSGSSEGGGDPAAMDERXRKRMESNRESARRSRMKKQKLLEDLSDVASRLQGENVRLAQSIKAKEEAYVEIEAANDILRAQTMELADRLRFLNSILEIADEVGGGGESFEIPQIPDPLFMPWQIPHPMMASPDMLLHGNQGLFA

SEQ ID NO: 18010 - protein, 131 aa, Glycine max
  misc_feature (5)..(5): Xaa can be any naturally occurring amino acid
MDERXRKRMESNRESARRSRMKKQKLLEDLSDVASRLQGENVRLAQSIKAKEEAYVEIEAANDILRAQTMELADRLRFLNSILEIADEVGGGGESFEIPQIPDPLFMPWQIPHPMMASPDMLLHGNQGLFA

SEQ ID NO: 18011 - protein, 123 aa, Glycine max
MESNRESARRSRMKKQKLLEDLSDVASRLQGENVRLAQSIKAKEEAYVEIEAANDILRAQTMELADRLRFLNSILEIADEVGGGGESFEIPQIPDPLFMPWQIPHPMMASPDMLLHGNQGLFA

SEQ ID NO: 18012 - DNA, 901 bp, Glycine max
agttttatgatgatcagctacttgccttcatggtcttgattcttgtctggttgtgtgaactttttactctcatcagtgtccgaacaccaatatcaatgaagttctttcctcgcttctttttgctgtatttcctggtcttccacatatatttcttctcttatgcttacggtttttcgtatttggctctttctacaaccgcggcttttatgcaacaccttatcctgtacttttggaatcggtttgaggtaccggcactgcaaaggtacatgcaaaatcgacggtcacaacttcagcaacacccagacttccacattacctcttccaccattcttgcatcaacgttacacatcacaagattgaacacaagaaaccagggattaaataacgttgacttggctactggagcagggttgagacctggttttgatcaatcaatgccccaaaatggaccaggagttgccgatcctcaagatcggtcagaaaataatcgagacagggttgcgaaccctgcccagattcctgggcaagctgacattcaacaagcagaaaggggtccgaaccctggatccatgaattcattcagttctttgttattatggatcttaggaggtgcttcgtctgagggcctaaactcgtttttttcaatgttcagagacgtgagagagcaaggacaagtttttaatgaaacacctggggctggggctggggctggtgatgaaagccgtgagaatcaggataatattgacagatagcggtgaagaggtggagagcttgttaatataggaaggaacaacgtacgtatgtcatataggggactgctttctgctcggtccaaattaaaaaagctcaacaaaatgtttgtacaataatattctttatagcttttgctttataaatgctg

SEQ ID NO: 18013 - protein, 249 aa, Glycine max
FYDDQLLAFMVLILVWLCELFTLISVRTPISMKFFPRFFLLYFLVFHIYFFSYAYGFSYLALSTTAAFMQHLILYFWNRFEVPALQRYMQNRRSQLQQHPDFHITSSTILASTLHITRLNTRNQGLNNVDLATGAGLRPGFDQSMPQNGPGVADPQDRSENNRDRVANPAQIPGQADIQQAERGPNPGSMNSFSSLLLWILGGASSEGLNSFFSMFRDVREQGQVFNETPGAGAGAGDESRENQDNIDR

SEQ ID NO: 18014 - protein, 240 aa, Glycine max
MVLILVWLCELFTLISVRTPISMKFFPRFFLLYFLVFHIYFFSYAYGFSYLALSTTAAFMQHLILYFWNRFEVPALQRYMQNRRSQLQQHPDFHITSSTILASTLHITRLNTRNQGLNNVDLATGAGLRPGFDQSMPQNGPGVADPQDRSENNRDRVANPAQIPGQADIQQAERGPNPGSMNSFSSLLLWILGGASSEGLNSFFSMFRDVREQGQVFNETPGAGAGAGDESRENQDNIDR

SEQ ID NO: 18015 - protein, 218 aa, Glycine max
MKFFPRFFLLYFLVFHIYFFSYAYGFSYLALSTTAAFMQHLILYFWNRFEVPALQRYMQNRRSQLQQHPDFHITSSTILASTLHITRLNTRNQGLNNVDLATGAGLRPGFDQSMPQNGPGVADPQDRSENNRDRVANPAQIPGQADIQQAERGPNPGSMNSFSSLLLWILGGASSEGLNSFFSMFRDVREQGQVFNETPGAGAGAGDESRENQDNIDR

SEQ ID NO: 18016 - DNA, 1043 bp, Glycine max
tacgccaggtatcccgcgcttcaaggcggcaggcccttcgccggcgaagagcacccatcagattcccgagttgtttatcccagttatcttgcacccgagggctccgtagcatcttattatgcttcaagacctgttctacctgttggatcagatgttcttagaaacgatgtaatttctcaaccaagaacgcatggttatgatggtccagcaagagtgaccaatcctgctttggctggcctgactggactacctgctggagttacggcacgggggcctagtgctctggaagacccgtctttggctggtctgagtggattagctccagtccgggcaacaggcggagctacggcacgagggtctggtgctttggaagacccgtctttggctggtctgagtggactagctccagccagggcactgggacctagagctttgaaagaagaactggatgtagttgggagaagttcttcagtaggcagaggtgctagcattccagatgttgagcaccacagctcaattccaaaactttgatggaccctcagaaaatgaatccaacattctttttgttgattgtcttcctactgattgcacaaggagagaagtagctcatttgtttcgttgttttcctggcttcaaggacatcagagtagtgcacaaggaacccagacgtagtggtgacaaggcctatgtcctgtgctttgtggagtttgagaacgcgaaattcgcacgcactcccatgcaagctttacaagggtaccgcttcgatgaccggaagcctgacgaccggtgtctcgagatccatttcgcaaggttcccgttcgctctgcctggcgccggcgccggcgccgcccgggaccacaggaagcggtagctggtagcagcgtggcctgcgcagtgggcactgcagtagatggcctgcgatcaacatgtatcgtatctgtatgcgactgttttgttgggcagttagatgaagtcgcctactatcagtagtagtctcctgtgacaccaacacgtggaatgataagactgcctccttttttttc

SEQ ID NO: 18017 - protein, 176 aa, Glycine max
YARYPALQGGRPFAGEEHPSDSRVVYPSYLAPEGSVASYYASRPVLPVGSDVLRNDVISQPRTHGYDGPARVTNPALAGLTGLPAGVTARGPSALEDPSLAGLSGLAPVRATGGATARGSGALEDPSLAGLSGLAPARALGPRALKEELDVVGRSSSVGRGASIPDVEHHSSIPKL

SEQ ID NO: 18018 - protein, 124 aa, Glycine max
MLSTTAQFQNFDGPSENESNILFVDCLPTDCTRREVAHLFRCFPGFKDIRVVHKEPRRSGDKAYVLCFVEFENAKFARTPMQALQGYRFDDRKPDDRCLEIHFARFPFALPGAGAGAARDHRKR

SEQ ID NO: 18019 - DNA, 1081 bp, Glycine max
aggttgttgatgcattatgcaacgttgtatcagcctcaccaacaaaagcagctacagcagttgtacttcaggcggagcgggaattgcagccctggattgccaaggatgatgattcaggtcagaagatgtggagaatcaatcagcggattgtaaaattgattgtggaacttatgaggaatcatgagactgcagaatcattggtaattgtggcaagttcatcagatttactactgcgagccacagatgggatgctggttgatggagaagcttgcactttaccacagctggagctattggaagcaacagctagagcagttcagccagtgctcgagtttggagaatctggattggctgtggcagatggcctttcaaaccttttaaagtgtcgcctctcagctacaattagatgtctttctcatccaagtgcacatgtccgagctctgagtatatcagttcttcgtgacattttgcatactggttcaatcagatgtagtcctaaacctcggagattaaatggcacccacaacccttcttatcaatacttcaatttggatgccgttgactggcaagctgacatagaaaaatgcttgacttgggaagctcacagccgactttcaaacggattgtctattaactttcttgatatcgctgccaaagagttaggctgtactatttccatgtgaaatgaaatcatccatcttagtctgtgacaattttttgctagacttatagaaaaagaaaaagaaaacagaagttattgatatgcttatggaactaacgggtttgcaaataagcataattctgctagtcctgttaaaaagagctgcaatcataattctagtatgtttatagaaagctcattttgtatcatgcatgtactctagctaaactaagtttcaccttgaacttgcttgtgactctgctctggatagaacagacttgtacagtaacgaaaaacgactgtaaccaggtccttttctccatcattgtctcattttgtgttatgcttatgttgatttagcttgtatggaagtcagttccaattgtttggattaatgtatgttcaggcaggatttccttt

SEQ ID NO: 18020 - protein, 226 aa, Glycine max
VVDALCNVVSASPTKAATAVVLQAERELQPWIAKDDDSGQKMWRINQRIVKLIVELMRNHETAESLVIVASSSDLLLRATDGMLVDGEACTLPQLELLEATARAVQPVLEFGESGLAVADGLSNLLKCRLSATIRCLSHPSAHVRALSISVLRDILHTGSIRCSPKPRRLNGTHNPSYQYFNLDAVDWQADIEKCLTWEAHSRLSNGLSINFLDIAAKELGCTISM

SEQ ID NO: 18021 - protein, 185 aa, Glycine max
MWRINQRIVKLIVELMRNHETAESLVIVASSSDLLLRATDGMLVDGEACTLPQLELLEATARAVQPVLEFGESGLAVADGLSNLLKCRLSATIRCLSHPSAHVRALSISVLRDILHTGSIRCSPKPRRLNGTHNPSYQYFNLDAVDWQADIEKCLTWEAHSRLSNGLSINFLDIAAKELGCTISM

SEQ ID NO: 18022 - protein, 170 aa, Glycine max
MRNHETAESLVIVASSSDLLLRATDGMLVDGEACTLPQLELLEATARAVQPVLEFGESGLAVADGLSNLLKCRLSATIRCLSHPSAHVRALSISVLRDILHTGSIRCSPKPRRLNGTHNPSYQYFNLDAVDWQADIEKCLTWEAHSRLSNGLSINFLDIAAKELGCTISM

SEQ ID NO: 18023 - DNA, 1045 bp, Glycine max
agtctctgaatctgaaattgcaatgcttcacccggcggcactgatagcatcgtgtccttatccttatccttatcctgggcggcatgagttaccctcagcctcagcgtcagcgacagccagagtcgctgttccaatgccaaatctgagaggcaaagcggttgttggtgttggttccagaatgataaggtgcatggctaaccccagaagagttcaaatggtggccaagcaaattaggagagagctttctcatatgcttctcaccgataaagtcttgcagtatgctgttcttcccgaagcctccttaggagccgaccgttacctctcttctctcaccaccatcaccgacgtccaagtctccgccgacttgcaggttgttaaggtgtatgtttctgtttttggagatgaaagaggtaaagaagtcgccattgccggcttgaaatctaaggctaaatatgttcgcagcgagttgggcaagcgtatcaagttgcgcttaactcctgagatacgctttcttgaggatgattcttttgagagaggaagcagggtcattgcaatactagataaaataaagaatgacaaaagccaatacaaggcggagttggattcgtcaccaaatgaggatcacgacgatgattgggatggtgaagatcctgaagaaggcatcatttatgtggaatagatgtctccctatgtaactctatcactactgtgcatctttcatatggacaaacctttcactgttgatagtgatcggaaacacttcactaaaatgcttgctggacagacgctgttctagatttgtagttgtgacaagtcacaattgacaacattatctcaacacaaagaccttcttgcgttgtctatccccaagtgatgtgatgtagaccaattttggggttttctctccttttatatgccttaacccaggatcttactatacaagagggtttgctgtataaagttcttttcctgctttacttattcctgtaagtggaatttataatgtttactattgctatgctattcgaattcggctgtcttcaac

SEQ ID NO: 18024 - protein, 225 aa, Glycine max
VSESEIAMLHPAALIASCPYPYPYPGRHELPSASASATARVAVPMPNLRGKAVVGVGSRMIRCMANPRRVQMVAKQIRRELSHMLLTDKVLQYAVLPEASLGADRYLSSLTTITDVQVSADLQVVKVYVSVFGDERGKEVAIAGLKSKAKYVRSELGKRIKLRLTPEIRFLEDDSFERGSRVIAILDKIKNDKSQYKAELDSSPNEDHDDDWDGEDPEEGIIYVE

SEQ ID NO: 18025 - protein, 218 aa, Glycine max
MLHPAALIASCPYPYPYPGRHELPSASASATARVAVPMPNLRGKAVVGVGSRMIRCMANPRRVQMVAKQIRRELSHMLLTDKVLQYAVLPEASLGADRYLSSLTTITDVQVSADLQVVKVYVSVFGDERGKEVAIAGLKSKAKYVRSELGKRIKLRLTPEIRFLEDDSFERGSRVIAILDKIKNDKSQYKAELDSSPNEDHDDDWDGEDPEEGIIYVE

SEQ ID NO: 18026 - protein, 181 aa, Glycine max
MPNLRGKAVVGVGSRMIRCMANPRRVQMVAKQIRRELSHMLLTDKVLQYAVLPEASLGADRYLSSLTTITDVQVSADLQVVKVYVSVFGDERGKEVAIAGLKSKAKYVRSELGKRIKLRLTPEIRFLEDDSFERGSRVIAILDKIKNDKSQYKAELDSSPNEDHDDDWDGEDPEEGIIYVE

SEQ ID NO: 18027 - DNA, 1146 bp, Glycine max
gggctacccgcaacaaaccatcttcgacagcctccacgacgccggccacgacttcggcatctactaccagaacatcccggccaccctcttctaccgcaacctcagaaaactaaagtacgtgctcaagttccacatctacgacgtgtcgttcaagcaacacgccaaagaagggaagctcccaagctacactgtggtggagcagcggtacatggacactaagctgctccccgcgaacgacgaccacccatcgcatgatgtttacgaggggcaggtgttcgtgaaggaggtgtacgagacgctgagggcgagcccgcagtggaacgaaaccctgtttttgatcacgtacgatgagcatggagggttttatgaccacgtgcccacgcccgcgcgtggggttccgagccctgatgggattgtgggccccgagccttttaacttcacgtttaataggttgggagtgagggttcccactattgctatctctccttggattgaaaagggtacagttgttcatgggccaaatgggtcaccatctcctacatcagaatatgaacactcatccattccagctacagtgaaaaagctcttcaatttgccttcatttctgaccaatagagatgcttgggcaggaaccttcgagggcattgttcagaccaggacagaacccaggactgattgcccggagaaacttccaactcctgaaaagattaggaagggagagcctaatgaagatgccaagctcagtgaatttcagcaggagttgatccaactcgcagcggtgattaaaggagataatatcctcactagtttcccaggtacaatagggaaggacatgactgttaagcaagggaaatattacatggatgatgcagttagaagtttctttgaagcaggtcgttatgcaaggaaaatgggagtgaatgaagaacatatagttcagatgaagccttctttgactacgagatcatccaaatctccaaacacaaacccttagaaaaataataaaccatgtagcatgaaatagagaatgtaatggaaacaataattctaatgcaaatacaaacatctatacatagctggaaaagagctacatatgttttctatagaaatgttggcaacttatatggtatcctagggatttcattt

SEQ ID NO: 18028 - protein, 330 aa, Glycine max
GYPQQTIFDSLHDAGHDFGIYYQNIPATLFYRNLRKLKYVLKFHIYDVSFKQHAKEGKLPSYTVVEQRYMDTKLLPANDDHPSHDVYEGQVFVKEVYETLRASPQWNETLFLITYDEHGGFYDHVPTPARGVPSPDGIVGPEPFNFTFNRLGVRVPTIAISPWIEKGTVVHGPNGSPSPTSEYEHSSIPATVKKLFNLPSFLTNRDAWAGTFEGIVQTRTEPRTDCPEKLPTPEKIRKGEPNEDAKLSEFQQELIQLAAVIKGDNILTSFPGTIGKDMTVKQGKYYMDDAVRSFFEAGRYARKMGVNEEHIVQMKPSLTTRSSKSPNTNP

SEQ ID NO: 18029 - protein, 261 aa, Glycine max
MDTKLLPANDDHPSHDVYEGQVFVKEVYETLRASPQWNETLFLITYDEHGGFYDHVPTPARGVPSPDGIVGPEPFNFTFNRLGVRVPTIAISPWIEKGTVVHGPNGSPSPTSEYEHSSIPATVKKLFNLPSFLTNRDAWAGTFEGIVQTRTEPRTDCPEKLPTPEKIRKGEPNEDAKLSEFQQELIQLAAVIKGDNILTSFPGTIGKDMTVKQGKYYMDDAVRSFFEAGRYARKMGVNEEHIVQMKPSLTTRSSKSPNTNP

SEQ ID NO: 18030 - DNA, 558 bp, Glycine max
ttaacagcattggttatggaagcaactgtggaagtagcagcaatgttgatcaagttaacactgtctgggcagcttcagagggaaagcatgaagacctcacaaataatgcaaactctcatcgatctatccaaagagaagcagctctaaacaaatttcgcttgaaaaggaaagagagatgctatgagaagaaggttcgatacgagagcagaaaaaaactagcagagcagcgtcccagagttaaaggacaatttgttcgtcaagtgcatcctgatcctcttgttgcagaaaaagatggcaaagaatatgatcattcagatttctgactcactggagaggagagcatgaattccttagagtatatagttgcttcaaaattttgttttcctgaatccttaaataccagaagcacttaatctgtatatgctttctaaaaccgtttttcttatttgcccttactgtagatcgtgatatataatatacctgatgtattatatcattgtaattttacagtcttatagggatcttcgtgcatcattatttatttatttatttatttat

SEQ ID NO: 18031 - protein, 106 aa, Glycine max
NSIGYGSNCGSSSNVDQVNTVWAASEGKHEDLTNNANSHRSIQREAALNKFRLKRKERCYEKKVRYESRKKLAEQRPRVKGQFVRQVHPDPLVAEKDGKEYDHSDF

SEQ ID NO: 18032 - DNA, 812 bp, Glycine max
aatcattccggtcaaagtgcatctgctagtttcctgccaaggatgaggtttatgcagcatcgtcggactactacagcaccctcctttacaattaagaggatggctgctgatggagcctggatgcctgctgttggcaatgttgccacagtattgtgctttgccatatgtctagtcctgacatgttaaccttactggtggctcaaaccgctctatatttttcctggctcctattctgctgctgcttaatcaagattcggattttgttactggttttggggacaaacatagatattttcctgttactgttgtcatctcggcctacttcgttataactgccctctacagaacatgggaagatgtttggcaaggaaatagtggatggggtcttcaaatcggtgggccagactggatttatgtggtgaagaatttggccctcctcattcttaccttccccagtcatatacttttcaacaggtacgtgtggagccatacgaagcagagtgactcatccccgtggataactttgcctcttaatctgcttcctattgcttgtacagatgtactcaagattaagatcttgggtatattaggagttatatattccctggcccagtatctaattactaggcaacaatatatctctggtttaaagtacatctaaaccatcatatatactgtacgatatgtttgtcaatttaggtattcatgcacgtgcttgtcttcctaaatttgtatgaggaatatgtgaatgcatttttgttattacctataacccattcggataaatttaaatcaatctttcttgatgagtt

SEQ ID NO: 18033 - protein, 61 aa, Glycine max
NHSGQSASASFLPRMRFMQHRRTTTAPSFTIKRMAADGAWMPAVGNVATVLCFAICLVLTC

SEQ ID NO: 18034 - protein, 55 aa, Glycine max
MSSPDMLTLLVAQTALYFSWLLFCCCLIKIRILLLVLGTNIDIFLLLLSSRPTSL

SEQ ID NO: 18035 - protein, 50 aa, Glycine max
MLTLLVAQTALYFSWLLFCCCLIKIRILLLVLGTNIDIFLLLLSSRPTSL

SEQ ID NO: 18036 - DNA, 670 bp, Glycine max
gaagaaacaggatccctaaaggctgaagtgaccattaaagtgcgagctgaattcaactcaagtatcaatgctaatactgttcttgtgcagatgcctctgccatcatttacatctcgtgttacttttgagttagaacctggagcagttggacacaccactgattttaaggaagcaaataaaagactggaatggggtctgaaaaaggttgttggtggatctgaacatactttacgagcaaagctgacattttcacaggagttacatggaaatatcatgaaagaagcagggcctgtcagcatgactttcaccgtacctatgtacaatgcttcaaggcttcaggtgaagtatttgcaaatagcaaagaaatcaaaagcacataatccttatcgctgggttagatatgtaacccaagcaaactcatacgtagcacggttataattggaatctctgcaagtccaaattccgagttaaatttggggggatggcagcatatcaggtgaaaaaatggcgggctctctgcctctacaagtgaagataattttctctagataatgaatggctaaatggaactagagttcttaaaatttttcattttaaatgaaaatgaagatgtacacgacaaatcttaaaattgtgtaatgtggagggcagacatctaaatcttaaaatt

SEQ ID NO: 18037 - protein, 145 aa, Glycine max
EETGSLKAEVTIKVRAEFNSSINANTVLVQMPLPSFTSRVTFELEPGAVGHTTDFKEANKRLEWGLKKVVGGSEHTLRAKLTFSQELHGNIMKEAGPVSMTFTVPMYNASRLQVKYLQIAKKSKAHNPYRWVRYVTQANSYVARL

SEQ ID NO: 18038 - protein, 115 aa, Glycine max
MPLPSFTSRVTFELEPGAVGHTTDFKEANKRLEWGLKKVVGGSEHTLRAKLTFSQELHGNIMKEAGPVSMTFTVPMYNASRLQVKYLQIAKKSKAHNPYRWVRYVTQANSYVARL

SEQ ID NO: 18039 - DNA, 1017 bp, Glycine max
ttacaattttgcacaaaacaagaaatccttgcttggaaagattatgagacttgatgtagacaacatcccaagtgcagcagatattagtaaactcagcctttggggtaactactccattccaaaggacaatccttttagtgaagataaagatctgcagcctgaaatatgggcattgggactaaggaatccttggcgctgcagttttgatgcagaaagaccttcctactttttgtgtgcagatgttggacaggatgtttatgaggaggtggatctcatcacgaagggtggaaactatggctggcgtgtttacgagggcccctatccattccagccgacacaatcacctggaggaaatacttcggtaaattccataaatccaattttcccaataatgggttacaaccattctgaattaaacaagaacgaaggatcagcatccatcaccggaggatatgtctatcgatctaccactgatccttgcatgtatggaagatacttgtatggagatctatacgcgggtgcaatatgggcagccaccgaggacccgcaaaacagtggaaatttcagcaccagcagaattcccttcagctgtgcgcgtgattctcctatacagtgtgactctgcacctggaaaccttcttgcgttaggctatatcttctcatttggcgaagacaacaacaaaggggtttacatccttgcaagcaccggtgtttatcgagttgttcgtccaagtcgctgcagttatgcttgctctcaggaaaaggcaactactactacaacttcagctccctctccttctccttctcatgctacacgttggagtgtcctttctggatatttgtttttgcagtgttcatttttgttgctgcttttgttgggttctatgtagagtgatatgatctttgtacattatgtagaagagatcgtaagaggagaatgcttaccctttcttctgggttttctacattttggtttccttatgcttgattaataaaagatgagttgtgttgctgaatc

SEQ ID NO: 18040 - protein, 295 aa, Glycine max
YNFAQNKKSLLGKIMRLDVDNIPSAADISKLSLWGNYSIPKDNPFSEDKDLQPEIWALGLRNPWRCSFDAERPSYFLCADVGQDVYEEVDLITKGGNYGWRVYEGPYPFQPTQSPGGNTSVNSINPIFPIMGYNHSELNKNEGSASITGGYVYRSTTDPCMYGRYLYGDLYAGAIWAATEDPQNSGNFSTSRIPFSCARDSPIQCDSAPGNLLALGYIFSFGEDNNKGVYILASTGVYRVVRPSRCSYACSQEKATTTTTSAPSPSPSHATRWSVLSGYLFLQCSFLLLLLLGSM

SEQ ID NO: 18041 - protein, 281 aa, Glycine max
MRLDVDNIPSAADISKLSLWGNYSIPKDNPFSEDKDLQPEIWALGLRNPWRCSFDAERPSYFLCADVGQDVYEEVDLITKGGNYGWRVYEGPYPFQPTQSPGGNTSVNSINPIFPIMGYNHSELNKNEGSASITGGYVYRSTTDPCMYGRYLYGDLYAGAIWAATEDPQNSGNFSTSRIPFSCARDSPIQCDSAPGNLLALGYIFSFGEDNNKGVYILASTGVYRVVRPSRCSYACSQEKATTTTTSAPSPSPSHATRWSVLSGYLFLQCSFLLLLLLGSM

SEQ ID NO: 18042 - protein, 165 aa, Glycine max
MGYNHSELNKNEGSASITGGYVYRSTTDPCMYGRYLYGDLYAGAIWAATEDPQNSGNFSTSRIPFSCARDSPIQCDSAPGNLLALGYIFSFGEDNNKGVYILASTGVYRVVRPSRCSYACSQEKATTTTTSAPSPSPSHATRWSVLSGYLFLQCSFLLLLLLGSM

SEQ ID NO: 18043 - DNA, 1019 bp, Glycine max
tttaacagccagagctttattggacaacaagggaatgcagccccctatagctcaccaattaccaatcaatcatttgcttctaatgcttcacaatccaattctttagtttctcaaccatccaaggacaagtttgagactaaatcaacagtttgggcagatacactaagcaggggattggttaatttgaatatatctggacctaaaacaaatccattagcagatattggggttgactttgaagccattaataggaaggaaaagagaatggagaagcccactaccacagctgtaacatcaactgtaactatgggtaaagctatgggatcgggttcaggtatgggtcggtctggtgctggttctctaagtcctcctcaaaacccaatgatgggttctggcatgggcaatggtcctggtgttggtatgggtatgggaggctatggaggaggcatgaatgcatcaatgggtatgggaatgggggggatggggggaatgggtatgggacaaggataccagatgcaacccccaactggattgcctcccggctccaacatgccaggtaattataataactccatgatgggttcaggtagttatggtcagcagccatatggtagttatggtcagcaaccatatggcggctaccgatgagatagaacattatgcctagatagcaaggtgaagtacattactgattgttttgctacaagttgagaaagagaaatgccaatacagtgctactagtagtagtctgtattttgaatttatagcggtgtatcattaaagctgcagtttgctgtaaagtgacccagtgtgatgtatgtgtatttcttgttataaatatgctgttaccattctttttgggtcaccctttctgtaggtgctttgagcatcaatgttgtgtaccagtgactggatataataaccttgcttgggttattgctttctttgcttgttcctcatttttttaacaccaacaggtggtttgatattaatataatttttccattgtatttttaaag

SEQ ID NO: 18044 - protein, 215 aa, Glycine max
FNSQSFIGQQGNAAPYSSPITNQSFASNASQSNSLVSQPSKDKFETKSTVWADTLSRGLVNLNISGPKTNPLADIGVDFEAINRKEKRMEKPTTTAVTSTVTMGKAMGSGSGMGRSGAGSLSPPQNPMMGSGMGNGPGVGMGMGGYGGGMNASMGMGMGGMGGMGMGQGYQMQPPTGLPPGSNMPGNYNNSMMGSGSYGQQPYGSYGQQPYGGYR

SEQ ID NO: 18045 - protein, 127 aa, Glycine max
MEKPTTTAVTSTVTMGKAMGSGSGMGRSGAGSLSPPQNPMMGSGMGNGPGVGMGMGGYGGGMNASMGMGMGGMGGMGMGQGYQMQPPTGLPPGSNMPGNYNNSMMGSGSYGQQPYGSYGQQPYGGYR

SEQ ID NO: 18046 - protein, 113 aa, Glycine max
MGKAMGSGSGMGRSGAGSLSPPQNPMMGSGMGNGPGVGMGMGGYGGGMNASMGMGMGGMGGMGMGQGYQMQPPTGLPPGSNMPGNYNNSMMGSGSYGQQPYGSYGQQPYGGYR

SEQ ID NO: 18047 - DNA, 1099 bp, Glycine max
ttgctgctggagatgcttttgacatagttaatgaagagcttgcatgctttgagtcagaatctatggatgaaaatgctgttgcttctcatagtgccttagtagctcaagttgagaaggatatcaatgcaagtttggaacagaagctttccatagagagagaaaagatcaatgctgttgaaagaatggctgaagaggcaagatgcgagttagaaaggttgagggctgagagagaagaggagagaatttccttgatagaggaacgagctgctattgaatcagaaaggaatgttttttctaggttaaagcatgaggtggaagatcaactacaaaaccttattagtgacaaggtagaaatagcttatgaaaaagacaggattagtaagcttcgggagctagcagaagttcaaaacaaggaaattacacaattacagtatgagctagaggttgaacgaaaagccttgtcaatggccagggcatgggcagaggatgaggccaaacgagtaagcgaacatacattggccttggagagggctagagatagttgggagaggaatgaaagcaaagcggcagttgatgacttccatgaggaccttgctggagttacattgctcaatactgaggagcagttatcggttcaagacacggttgacagggctgaaaacctactggacaagctaaaaaaaatggcagtagaggtgggaggaagagccagagatatgattgacaagattatccacataatttcccaatttgtatcaagattgagagaatgggcatgcaaaactggaaaacaagctgaagaattgaaacaatctgccatctcaaaggcaggcaagtcagctcatgaggtgcagcaaagtgctcttgaatttggatttactatcaaagaagaggcaaagcgagttgcaggtgattgtagagaaggagttgagaagctcactcaaaagttcaagccctgatctccatttttttgtgcgttgccttgttcagcgaattttggaatgtatgatgtaaatcaaatcaatttttgtataatttgtggaggtggactaacaaccagttgtaatttaacttcaatctttatgggtcgatcaaaaag

SEQ ID NO: 18048 - protein, 318 aa, Glycine max
AAGDAFDIVNEELACFESESMDENAVASHSALVAQVEKDINASLEQKLSIEREKINAVERMAEEARCELERLRAEREEERISLIEERAAIESERNVFSRLKHEVEDQLQNLISDKVEIAYEKDRISKLRELAEVQNKEITQLQYELEVERKALSMARAWAEDEAKRVSEHTLALERARDSWERNESKAAVDDFHEDLAGVTLLNTEEQLSVQDTVDRAENLLDKLKKMAVEVGGRARDMIDKIIHIISQFVSRLREWACKTGKQAEELKQSAISKAGKSAHEVQQSALEFGFTIKEEAKRVAGDCREGVEKLTQKFKP

SEQ ID NO: 18049 - protein, 298 aa, Glycine max
MDENAVASHSALVAQVEKDINASLEQKLSIEREKINAVERMAEEARCELERLRAEREEERISLIEERAAIESERNVFSRLKHEVEDQLQNLISDKVEIAYEKDRISKLRELAEVQNKEITQLQYELEVERKALSMARAWAEDEAKRVSEHTLALERARDSWERNESKAAVDDFHEDLAGVTLLNTEEQLSVQDTVDRAENLLDKLKKMAVEVGGRARDMIDKIIHIISQFVSRLREWACKTGKQAEELKQSAISKAGKSAHEVQQSALEFGFTIKEEAKRVAGDCREGVEKLTQKFKP

SEQ ID NO: 18050 - protein, 258 aa, Glycine max
MAEEARCELERLRAEREEERISLIEERAAIESERNVFSRLKHEVEDQLQNLISDKVEIAYEKDRISKLRELAEVQNKEITQLQYELEVERKALSMARAWAEDEAKRVSEHTLALERARDSWERNESKAAVDDFHEDLAGVTLLNTEEQLSVQDTVDRAENLLDKLKKMAVEVGGRARDMIDKIIHIISQFVSRLREWACKTGKQAEELKQSAISKAGKSAHEVQQSALEFGFTIKEEAKRVAGDCREGVEKLTQKFKP

SEQ ID NO: 18051 - DNA, 869 bp, Glycine max
ttcttttatctgtgagtttgcaggggttgttttgaccagggagcaagctcaactcttaacaatgaatggtgattcattgatatatcctaatcggttttcggaaaggtgggcagaatggggggatttgtctcagatatacccggattatgtgcgtccattgtatccgtcaattcctcctctagatttttctctggatgtgtcaacaatgaggaatgttgcttgctatatgagccatagttcaactccaaatgtcttggttcagtttgttctgcatgatcacaacaatttgatgttcccacaccttatgctatttgccatggaaaacatccctcccatgagagagctcagccttgattatggtgtagctgatgagtggacaggcaaactctctatatgtaactgaatggtccatgcacttcttgagttttaggcatggttttgtgagacttaaaccgtgatttctgaaggtttcaacctcaccaaatttcttggaactgcggaagtgcttactatatgaactttttttgtcaaggtagtgaaaatagtgtaatagctgttgtattttcctgcttttgtctaactcttttaggcaaagtgcatagcattttgatctgtggcgatgaagatcaggaagtggagttctacaagtgcttaatcttgaacacttctgtaattgttctctaatttgctgatgttgggctctttttttggcaaagtatctcaccaccttttctctaagcaagtagctcggatttattaaattttctgttgtcattgtatataatatagaattcaagtcaaaagcttgtacagggattatgttagtggctagcaacgatgaatagaatgtagctttttagttggtttac

SEQ ID NO: 18052 - protein, 133 aa, Glycine max
SFICEFAGVVLTREQAQLLTMNGDSLIYPNRFSERWAEWGDLSQIYPDYVRPLYPSIPPLDFSLDVSTMRNVACYMSHSSTPNVLVQFVLHDHNNLMFPHLMLFAMENIPPMRELSLDYGVADEWTGKLSICN

SEQ ID NO: 18053 - protein, 113 aa, Glycine max
MNGDSLIYPNRFSERWAEWGDLSQIYPDYVRPLYPSIPPLDFSLDVSTMRNVACYMSHSSTPNVLVQFVLHDHNNLMFPHLMLFAMENIPPMRELSLDYGVADEWTGKLSICN

SEQ ID NO: 18054 - DNA, 434 bp, Glycine max
atatcttaggagaattggaaccaatgttctgtcttatgtcaatatggtctgtgcaagtctgcgtcattcaattcccaagtcaattgtctattgtcaagtgagggaagccaaacgaggcctacttgatcagtttttcaccgagctaggcaaaattgagcccaagcgtctgtcctcatttctgaatgaggatcctgcaatcatggaaagacgaagtgccctatcaaagagacttgagttataccggagtgcacaagctgagatcgatgcagttgcatggtctaagtagatatgatatagatgtgtatgctacatcgcgttattgttaatattgatcaagaaatctctctctctctctctctcctatttttgttaggcttttgctttgtaaaacgcatattgtaattgtcatctttaatagaaaggtttttggtgag

SEQ ID NO: 18055 - protein, 94 aa, Glycine max
YLRRIGTNVLSYVNMVCASLRHSIPKSIVYCQVREAKRGLLDQFFTELGKIEPKRLSSFLNEDPAIMERRSALSKRLELYRSAQAEIDAVAWSK

SEQ ID NO: 18056 - protein, 80 aa, Glycine max
MVCASLRHSIPKSIVYCQVREAKRGLLDQFFTELGKIEPKRLSSFLNEDPAIMERRSALSKRLELYRSAQAEIDAVAWSK

SEQ ID NO: 18057 - protein, 47 aa, Glycine max
MRILQSWKDEVPYQRDLSYTGVHKLRSMQLHGLSRYDIDVYATSRYC

SEQ ID NO: 18058 - DNA, 969 bp, Glycine max
gtggaaacaagcagcaaacaaagcagatgttcatcccacggaattcctcactgctgcaaagtacaaaacagaaagaagcagcagagcttcaagagaaagaagacatcaagaggcttgtcttggagtataatgacagagaagaagaggagcttaatggattagggacccaggcaacaaactggatgcagagtgtaggttacaagggtggtggccgtggcagcagtttggaaggaaacagtggcaggggtagtggatcaagacatcggcatcataattattctggcagtggaatctattacagtagaagaaagtgaatggtacttgagtgaatactgaaggcagatatttgttgccttctgcttcccctcagcaaggcagatatttgtttgccacactaccacactaccacactttgctgttcaaaaaattcatggcaaaggcaagtctaatagcttatcttgttggtaagtggtggtttcgaacatagagtgttggagatgctggcaggggttatagagtggtgtacacaccactttggtttcctgatcttaagctgacatgcaggatgtaagattgtgggttgcctgcatacatgtagcaaatgtagtcctgtaatttatatcacggcttcggagcttcctgtatagctatctgtatggagctaaaatcacaatgtttggttttggtggtgtcaagttagccaaaggttggattatataacgtgaagaaagaataggcaaaaaaatgtcttgatgctttgttaacatatcaaaaaccctgtcaaacatcagtgtaagaatcgatctctattgtttacaagtttgtattgccaatcatcatcattacattctagttcaatgagtaattcttgtatgggcattggtttgatcccagactgctcaattggagatctagctgaagattgtaccatagtttgccattgggaatgtgttaagctttttcttgtag

SEQ ID NO: 18059 - protein, 103 aa, Glycine max
GNKQQTKQMFIPRNSSLLQSTKQKEAAELQEKEDIKRLVLEYNDREEEELNGLGTQATNWMQSVGYKGGGRGSSLEGNSGRGSGSRHRHHNYSGSGIYYSRRK

SEQ ID NO: 18060 - protein, 95 aa, Glycine max
MFIPRNSSLLQSTKQKEAAELQEKEDIKRLVLEYNDREEEELNGLGTQATNWMQSVGYKGGGRGSSLEGNSGRGSGSRHRHHNYSGSGIYYSRRK

SEQ ID NO: 18061 - protein, 53 aa, Glycine max
VETSSKQSRCSSHGIPHCCKVQNRKKQQSFKRKKTSRGLSWSIMTEKKRSLMD

SEQ ID NO: 18062 - DNA, 929 bp, Glycine max
acaacacaacacacacaatactcaaattttttctagagcgagaaagtgagaggagagagaaagtagcagatcctccatggcctccaccaaggaacgtgaaaacttcgtctacgtcgccaagctcgccgaacaagccgaacgctatgaagaaatggtggaagcaatgaagaatgtggcgaagctaaacgtggaattgacggtagaggagcggaaccttctgtcggttgggtacaagaacgtggtgggtgctcgtagggcttcgtggaggattctttcctcgattgaacagaaagaagaagctaaagggaacgatgtgagcgtgaagaggataaaggagtataggctgaaggtggagtctgagttgtccaatatctgcagtgatatcatgactgttattgatgaataccttattccctctagctcatctggtgaacctagtgtctttttctacaaaatgaagggggactattaccggtacctcgcagagttcaagtccggtgatgagagaaaagaggctgctgatcattccatgaaagcgtatcagttggcttccactactgccgaggctgagttagcatccacacatcccatccgtttgggcctggctttgaacttctctgtcttttattatgaaattttgaactctcctgaaagggcctgtcaccttgctaagcaggcatttgatgaagcaatctctgagttggatactctgagcgaggagtcttacaaagacagcaccctaattatgcagcttctgagggacaatctcaccctgtggacttctgacatccctgaagatggagcagaggaacaaaaggtggattctgcccgagctgctggaggtgacgatgcatagcaggtattggccaaggaatttgtggagtgcatacgagaaggctagtctctctcttgatagtttaccattagga

SEQ ID NO: 18063 - protein, 259 aa, Glycine max
MASTKERENFVYVAKLAEQAERYEEMVEAMKNVAKLNVELTVEERNLLSVGYKNVVGARRASWRILSSIEQKEEAKGNDVSVKRIKEYRLKVESELSNICSDIMTVIDEYLIPSSSSGEPSVFFYKMKGDYYRYLAEFKSGDERKEAADHSMKAYQLASTTAEAELASTHPIRLGLALNFSVFYYEILNSPERACHLAKQAFDEAISELDTLSEESYKDSTLIMQLLRDNLTLWTSDIPEDGAEEQKVDSARAAGGDDA

SEQ ID NO: 18064 - protein, 234 aa, Glycine max
MVEAMKNVAKLNVELTVEERNLLSVGYKNVVGARRASWRILSSIEQKEEAKGNDVSVKRIKEYRLKVESELSNICSDIMTVIDEYLIPSSSSGEPSVFFYKMKGDYYRYLAEFKSGDERKEAADHSMKAYQLASTTAEAELASTHPIRLGLALNFSVFYYEILNSPERACHLAKQAFDEAISELDTLSEESYKDSTLIMQLLRDNLTLWTSDIPEDGAEEQKVDSARAAGGDDA

SEQ ID NO: 18065 - protein, 230 aa, Glycine max
MKNVAKLNVELTVEERNLLSVGYKNVVGARRASWRILSSIEQKEEAKGNDVSVKRIKEYRLKVESELSNICSDIMTVIDEYLIPSSSSGEPSVFFYKMKGDYYRYLAEFKSGDERKEAADHSMKAYQLASTTAEAELASTHPIRLGLALNFSVFYYEILNSPERACHLAKQAFDEAISELDTLSEESYKDSTLIMQLLRDNLTLWTSDIPEDGAEEQKVDSARAAGGDDA

SEQ ID NO: 18066 - DNA, 1056 bp, Glycine max
gaacttgctcaatgatactaatcaggatttaaagaaggaacttcagtctctgatatttgaccttgaagagaagttgaaggaacaacagaaaattgaaggctccctgagatccgaggtcgaaactctcaaaattgagattgctgagaaatctgcattgcgaagtcagctgcaggaaattgaagggaaactgacaaaagctgaatctagactaaacgaagaggttggaagtgttcaagctgctgcttctcaaagagaggcagaattaagttcaaagttggaagactatgcacaaaaattcaatgatagaaatgtgttgaatgataaggttgcagcacttgagaaagagttgcaacttgcacgggatggtaatgtgaaccaggaaggagcagagtctcagaagttggaacttgaggcagccttgaaaaattctcttgaagaacttgaaactaagaaaaatgatatctctcttttacagaaacaagtgacagatctagagcagaaattgcgagttgctggtgataaatcctcagttaagggtgatgagagtgttgatcagaaagaagggttggaagtaaaatccagggacattggttcaagcctctcgattcatcaaaaagaaagagcaagaaaaagtcagaagtacaagtggtcagacatcatctcatccgagactcatgttcaaactggccatgattctcctgtcataaatttcaagttcatcttgggtgtagctcttgtgtccattgtctttggcataattcttggaaagcgttactagtatcagcagtctatgtcttttgattttgttattcttcatgttttttcattttttatgttttttttttctctcttctttcccgttgattaagattaaatacagattgaaagctttctttgcatgctttcaaactcaagtcttcagcttggtcagggaacttgttttaattcctatcccttgcctgcgtgtaagaaacgggttttggttaatgttttattttattattctaagtttggaattttaataattttgagtgcaatttgtttttgctatggagc

SEQ ID NO: 18067 - protein, 258 aa, Glycine max
NLLNDTNQDLKKELQSLIFDLEEKLKEQQKIEGSLRSEVETLKIEIAEKSALRSQLQEIEGKLTKAESRLNEEVGSVQAAASQREAELSSKLEDYAQKFNDRNVLNDKVAALEKELQLARDGNVNQEGAESQKLELEAALKNSLEELETKKNDISLLQKQVTDLEQKLRVAGDKSSVKGDESVDQKEGLEVKSRDIGSSLSIHQKERARKSQKYKWSDIISSETHVQTGHDSPVINFKFILGVALVSIVFGIILGKRY

SEQ ID NO: 18068 - DNA, 1075 bp, Glycine max
ccgattagttgttttttcaatttgcttggggaaacaaacgagggacaaatagaaagaaggaaaaaagccttcaccatttgttgttctgcttcctgagactgtgttccatggcatgctctccttctacaactcttgtgtcaaattctcttcaccttaacaaaacgactagtcagtgtcggcttcatgttcatcccaccctttcacttaatcaaaaccttccaatatattctaataacctactcaaactctcaacaattcaataccatgcaacaaccacaccctttgttgctgcttctgcaggagttgagtctccggtgttgggtgaggataccacgagttcactggattcggtgaaagtgtttgatttgaatggaaacgggattccaatttctgacttgtggaaagataggaaagccgttgtggcatttgcacgccactttgggtgcgtgttgtgccgcaaaagggctgattatctttcatccaagaaggatataatggatgcatctggtgtggcacttgtattgattggacctgggagcattgatcaggccaaatcctttgctgagaagtcaaaatttgaaggagaaatctatgcagaccccactcactcatcatatgaggccttaaattttgtttctggagttttaaccacatttacccccaatgcaggtcttaagataatacagctatatatggaagggtatcgacaagattggaagctttcatttgaaaaggataccgttagcagaggaggctggaaacaaggaggaattatagttgcaggcccgggtaaaaacaacatctcataccttcacagagacaaggaggcaggggatgacccagaaattgaagatatcttgaaagcatgttgctcgtgaagaaagaagagagggagcccagctttctcagctttatttagcctgctactgaaatggaactcgcattatacggcattgtacatcatatttaagctgcttcttacgctgaacagtcgcttttcttcgagtttcagttaaaagaaataacgttattacccgccatttatccaatgacaactcacaatttggaacctatt

SEQ ID NO: 18069 - protein, 256 aa, Glycine max
MACSPSTTLVSNSLHLNKTTSQCRLHVHPTLSLNQNLPIYSNNLLKLSTIQYHATTTPFVAASAGVESPVLGEDTTSSLDSVKVFDLNGNGIPISDLWKDRKAVVAFARHFGCVLCRKRADYLSSKKDIMDASGVALVLIGPGSIDQAKSFAEKSKFEGEIYADPTHSSYEALNFVSGVLTTFTPNAGLKIIQLYMEGYRQDWKLSFEKDTVSRGGWKQGGIIVAGPGKNNISYLHRDKEAGDDPEIEDILKACCS

SEQ ID NO: 18070 - DNA, 925 bp, Glycine max
tccctttgcccgaaaatttcagcctaatcagcaaaatagatagagcattgcagcgaccctctcctatgcttcatccttctgtctctcatcccatgtgaaggttcaatggtcactaagctagttcagccaccaatgacagattcccatgtgagtcctctcatttatagaaccatgaatgtcatgaagctccaaaattttgtcccagctagaaatcatccaagaataaacacctcaagatttggtgagagaccattatggtttagacccattacaatcattaaagttgcagaacacaattctggctcaggcttagttgagcttgaagcacttgctcagaagaaaagagagctttaccaggcggtggaaggaatcaataggggaattttcggaatcccatctaccaagaaatctgaaattgaaagtttggtgaagcagctagaatctctgaatcctactccattcccaactctagaactggagaaggtggctgggtgctggaggcttgtttacagtacaatctccattttgggatcaaagaggaccaagttaggcctcagagattttatctcattggatgatttttttcagtcgattgatatatccaagagcaaagcagttaatgtgataaagttcagtgcaaggggattgagtttgttgtctggacaacttagtattgaggcctctttcaggatttcttcctcaacaagggttgacattaatttcgaaaactcaacgatcactcctgaccggttgatgaatgtatttcggaaaaattatgatcttttgttgggcgtcttcaatccagagggatggctggaaatcacatatgttgatgaaactatgagaataggaagggacgacaaaagcaatatctttgtactggaaagatttgatgataataataacatgtagccactttccttcc

SEQ ID NO: 18071 - protein, 268 aa, Glycine max
MVTKLVQPPMTDSHVSPLIYRTMNVMKLQNFVPARNHPRINTSRFGERPLWFRPITIIKVAEHNSGSGLVELEALAQKKRELYQAVEGINRGIFGIPSTKKSEIESLVKQLESLNPTPFPTLELEKVAGCWRLVYSTISILGSKRTKLGLRDFISLDDFFQSIDISKSKAVNVIKFSARGLSLLSGQLSIEASFRISSSTRVDINFENSTITPDRLMNVFRKNYDLLLGVFNPEGWLEITYVDETMRIGRDDKSNIFVLERFDDNNNM

SEQ ID NO: 18072 - protein, 259 aa, Glycine max
MTDSHVSPLIYRTMNVMKLQNFVPARNHPRINTSRFGERPLWFRPITIIKVAEHNSGSGLVELEALAQKKRELYQAVEGINRGIFGIPSTKKSEIESLVKQLESLNPTPFPTLELEKVAGCWRLVYSTISILGSKRTKLGLRDFISLDDFFQSIDISKSKAVNVIKFSARGLSLLSGQLSIEASFRISSSTRVDINFENSTITPDRLMNVFRKNYDLLLGVFNPEGWLEITYVDETMRIGRDDKSNIFVLERFDDNNNM

SEQ ID NO: 18073 - protein, 246 aa, Glycine max
MNVMKLQNFVPARNHPRINTSRFGERPLWFRPITIIKVAEHNSGSGLVELEALAQKKRELYQAVEGINRGIFGIPSTKKSEIESLVKQLESLNPTPFPTLELEKVAGCWRLVYSTISILGSKRTKLGLRDFISLDDFFQSIDISKSKAVNVIKFSARGLSLLSGQLSIEASFRISSSTRVDINFENSTITPDRLMNVFRKNYDLLLGVFNPEGWLEITYVDETMRIGRDDKSNIFVLERFDDNNNM

SEQ ID NO: 18074 - DNA, 648 bp, Glycine max
tccacagaaaaaaaaccctaaagagaccttctccatttccaaaccggcggcgaaaatgaagtacaacccaagagtcacctcctcccgcaggaagaaccgcaaggctcacttcacagcctcctcaagcgagaggcgcgtcatcatgagctcccctctctccaccgaccttcgcgccaagtacaacgtcagatccatgcccatccgcaaggacgacgaggtccagatcgtccgcgggacctacaagggacgcgaaggaaaggtcgtgcaggtgtaccgtcgcaagtgggtgattcacatcgagaggatcacgagggagaaggtgaacggcaccaccgtgaacgtcggcgtgcagccgtcgaaggttgtgataacgaagctgaggttggataaggacaggaagtcgcttttggagaggaaggccaagggccgtgccgcggcggataaggacaaggggaccaagttcactgctgaggatgttatgcagaacgttgattaaacacaaggtttattatctttttagttttttattatcagcgagtactctcttggctttgagttttgttttgtcggatgttatatttatgtttcggacatgagaaggatcgtttcaatttcgattatgagtttgaagatttagccattttcttc

SEQ ID NO: 18075 - protein, 164 aa, Glycine max
PQKKNPKETFSISKPAAKMKYNPRVTSSRRKNRKAHFTASSSERRVIMSSPLSTDLRAKYNVRSMPIRKDDEVQIVRGTYKGREGKVVQVYRRKWVIHIERITREKVNGTTVNVGVQPSKVVITKLRLDKDRKSLLERKAKGRAAADKDKGTKFTAEDVMQNVD

SEQ ID NO: 18076 - protein, 146 aa, Glycine max
MKYNPRVTSSRRKNRKAHFTASSSERRVIMSSPLSTDLRAKYNVRSMPIRKDDEVQIVRGTYKGREGKVVQVYRRKWVIHIERITREKVNGTTVNVGVQPSKVVITKLRLDKDRKSLLERKAKGRAAADKDKGTKFTAEDVMQNVD

SEQ ID NO: 18077 - protein, 117 aa, Glycine max
MSSPLSTDLRAKYNVRSMPIRKDDEVQIVRGTYKGREGKVVQVYRRKWVIHIERITREKVNGTTVNVGVQPSKVVITKLRLDKDRKSLLERKAKGRAAADKDKGTKFTAEDVMQNVD

SEQ ID NO: 18078 - DNA, 1216 bp, Glycine max
gacctttcttgcagggatgctacaacagtgggcctgataaaagtgcgtgacacttatcctttcggagtggatcctgtatggcatggcacacgaagtgaactaccattcctaaactcattgaaaatgaaaatgtcaattcttcttggagttgctcaaatgaaccttggaattgtgatgagctatttcaatgccatattctttagaaacagcgtaaatgtgtggttccagttcattccccagatgatatttcttaacagtctatttggctatctatcccttcttattattgtcaagtgggccactggttctcaagctgatttgtaccatattttgatctacatgttcctgagcccaacagatgatttgggtgagaaccaactctttgctggtcagaaaaatctgcagcttgtgcttttgcttctggctgttatctctgtgccctggatgctattgccaaaaccttttattttgaagaagcaacatgaagctaggcacggggttgaatcctatgcaccacttcaaagtacagatgagagcttgcaagtggagtcaaaccatgattcacatggtcatgaggaatttgagttcagcgaagtctttgtacatcaactcatacataccatagaatttgtacttggagcagtctctaatacagcttcttacctccgtctatgggcccttagtcttgctcattcagagttatcaagtgtattctatgagaaggttctgatgatggcatgggggtacaataatgttattatcctgatagtgggtctcattgtcttcatttttgctaccgtcggagtgttacttgtcatggaaactctcagtgcctttttgcatgcgttacgtcttcactgggtggagtttcaaaacaagttttatgagggcgatgggtacaagttccaccctttctcgttctcgtggctggatgatgaggaatgatatgctctaaaatcacattaataagaacgaggagttatatagctttggacctgtattgattctttcatttgatgtaactagtcagtgatcggtatatgtgggcattgtatgtggtggaatcctgggagctttttcatcaaacgtggtgccgttttgtttatttatccattgaggaaataaatattctcaattaggggagtaactttgtatgagctaggcaaccgtgtctgcgtgtaataattataacttccaagataaacttaatattcac

SEQ ID NO: 18079 - protein, 314 aa, Glycine max
DLSCRDATTVGLIKVRDTYPFGVDPVWHGTRSELPFLNSLKMKMSILLGVAQMNLGIVMSYFNAIFFRNSVNVWFQFIPQMIFLNSLFGYLSLLIIVKWATGSQADLYHILIYMFLSPTDDLGENQLFAGQKNLQLVLLLLAVISVPWMLLPKPFILKKQHEARHGVESYAPLQSTDESLQVESNHDSHGHEEFEFSEVFVHQLIHTIEFVLGAVSNTASYLRLWALSLAHSELSSVFYEKVLMMAWGYNNVIILIVGLIVFIFATVGVLLVMETLSAFLHALRLHWVEFQNKFYEGDGYKFHPFSFSWLDDEE

SEQ ID NO: 18080 - protein, 273 aa, Glycine max
MKMSILLGVAQMNLGIVMSYFNAIFFRNSVNVWFQFIPQMIFLNSLFGYLSLLIIVKWATGSQADLYHILIYMFLSPTDDLGENQLFAGQKNLQLVLLLLAVISVPWMLLPKPFILKKQHEARHGVESYAPLQSTDESLQVESNHDSHGHEEFEFSEVFVHQLIHTIEFVLGAVSNTASYLRLWALSLAHSELSSVFYEKVLMMAWGYNNVIILIVGLIVFIFATVGVLLVMETLSAFLHALRLHWVEFQNKFYEGDGYKFHPFSFSWLDDEE

SEQ ID NO: 18081 - protein, 271 aa, Glycine max
MSILLGVAQMNLGIVMSYFNAIFFRNSVNVWFQFIPQMIFLNSLFGYLSLLIIVKWATGSQADLYHILIYMFLSPTDDLGENQLFAGQKNLQLVLLLLAVISVPWMLLPKPFILKKQHEARHGVESYAPLQSTDESLQVESNHDSHGHEEFEFSEVFVHQLIHTIEFVLGAVSNTASYLRLWALSLAHSELSSVFYEKVLMMAWGYNNVIILIVGLIVFIFATVGVLLVMETLSAFLHALRLHWVEFQNKFYEGDGYKFHPFSFSWLDDEE

SEQ ID NO: 18082 - DNA, 1179 bp, Glycine max
gtttacaaatcattagtcaaagtaactaatgaagttttttttaacatttgacgatgagaaggttaatattgaagcagcaccagcatcccagaatgcctctgaagcagtcattgaccaatcccttgcaacggtttcacatgtaagcaaaaagtctttgatggaaaatggtaaaggacttaaaccatgtaggaaccccctttcacttgaagaggcacatcaatctaaaggtttcatcacattctccttaacaaatggccctgagtatcatatctcacagatagctgatgcagtggtggtagctagaatcttgggagccactcttgtgcttccagacatcaggagtagcaaattgggatatagcatgagccttggagatatttatgatgttcagaaaattattaataggctggatgggttggtgggagtaactaagacactgcctgtaaccaatggaaatccaccaatagtgaaggtacctaacagggtttcacaagactacattgtaaggatagtgaaaccaatatacaaagcaaaggggattgtaaagattgaatcatacttttcctcggttaatccaacaatagcaggaaataagaagaaccttgactcatttgcatgccaagcaatgtttggaattcttcagttgcaagcagagatgcttgaagttgtggactctatgatccaaaaactacaaagttggagccagaactcaaatgggaagttcattgcagtggacttgagaactgagatggtgggaagggagtgtcacaaaaaagatgtctcaggaagaaaactttgttaccagccacatgagataggtgaattcctcaagaagattggattcagtccagagactactgttgtttatgtgactcaaaccaaatggaattctgatcttgatgcactaaaagatatcttcccaaaaacttataccaaggaaactgtgatggcagaagacaagaagggaaagtttctcagatcaaaaagctctgaatttgagaaggtcattgatttctacatatgttccaaaagtgaagtcttcgtgccctctattcctggcctcttctatgctaatgttgctgggatgagaattttatcagggaaaaaccagatacttgttcctgctgaaatagctggtccatcagcttcagcctctgactcatttcttcctatgagtcc

SEQ ID NO: 18083 - protein, 383 aa, Glycine max
MKFFLTFDDEKVNIEAAPASQNASEAVIDQSLATVSHVSKKSLMENGKGLKPCRNPLSLEEAHQSKGFITFSLTNGPEYHISQIADAVVVARILGATLVLPDIRSSKLGYSMSLGDIYDVQKIINRLDGLVGVTKTLPVTNGNPPIVKVPNRVSQDYIVRIVKPIYKAKGIVKIESYFSSVNPTIAGNKKNLDSFACQAMFGILQLQAEMLEVVDSMIQKLQSWSQNSNGKFIAVDLRTEMVGRECHKKDVSGRKLCYQPHEIGEFLKKIGFSPETTVVYVTQTKWNSDLDALKDIFPKTYTKETVMAEDKKGKFLRSKSSEFEKVIDFYICSKSEVFVPSIPGLFYANVAGMRILSGKNQILVPAEIAGPSASASDSFLPMS

SEQ ID NO: 18084 - protein, 340 aa, Glycine max
MENGKGLKPCRNPLSLEEAHQSKGFITFSLTNGPEYHISQIADAVVVARILGATLVLPDIRSSKLGYSMSLGDIYDVQKIINRLDGLVGVTKTLPVTNGNPPIVKVPNRVSQDYIVRIVKPIYKAKGIVKIESYFSSVNPTIAGNKKNLDSFACQAMFGILQLQAEMLEVVDSMIQKLQSWSQNSNGKFIAVDLRTEMVGRECHKKDVSGRKLCYQPHEIGEFLKKIGFSPETTVVYVTQTKWNSDLDALKDIFPKTYTKETVMAEDKKGKFLRSKSSEFEKVIDFYICSKSEVFVPSIPGLFYANVAGMRILSGKNQILVPAEIAGPSASASDSFLPMS

SEQ ID NO: 18085 - protein, 272 aa, Glycine max
MSLGDIYDVQKIINRLDGLVGVTKTLPVTNGNPPIVKVPNRVSQDYIVRIVKPIYKAKGIVKIESYFSSVNPTIAGNKKNLDSFACQAMFGILQLQAEMLEVVDSMIQKLQSWSQNSNGKFIAVDLRTEMVGRECHKKDVSGRKLCYQPHEIGEFLKKIGFSPETTVVYVTQTKWNSDLDALKDIFPKTYTKETVMAEDKKGKFLRSKSSEFEKVIDFYICSKSEVFVPSIPGLFYANVAGMRILSGKNQILVPAEIAGPSASASDSFLPMS

SEQ ID NO: 18086 - DNA, 1142 bp, Glycine max
attactcttcttcatttcaataacacatatccattcacaacaacacaagacagaaccaaaaaagaaaaaagaaataacttttccgattcaaatatcggaaaccctgagaatctccctcgcaagtgatcagaagagtaaaactagtaaaaaatttgctgctgaagctgggctccctgtgctgacaaatgtattacttccgaaaacaaaggggcttcatgcttgcttggaagctctgcgaggctcattggatgcaggtttctattataatttctgctccttttttataatatactatagtcaattcataatgactctgtggtggctatttatgaaattatgcaatttgtattaccaaatgttttttttatcggcaaatgttagtttagtatttagcattttcttcatcttgtgactattgagctttgtgtgtcttcattatgttcatgttccatatctctaatgctatttcactgatccaagctggcttgtaccatatgttcaaagattttgtgacatgacaattgcggtctatttgcacaattttgtaactatgtgtgatattttctattcaattcttctcggctaaagtctgttgaacattgtcattcaattacatgcagtatacgatgtgacaattgcatacaagaatcagtgtccttcctttctggacaatgtttttggtgttgacccttcagaagtgcacctgcatgtgcggcgtattccggtggaggagattccagcttctgaaaccaaagctgcttcttggttaatcgacacattccagatcaaggaccaattgctttcggatttcaagattcaaggccatttccctaaccaactaaatgaaaatgaaatttctagatttaagagcctactctcttttatggtgatagtttcttttactgccatgtttatttattttacatttttttctgtcatttggttcaaactgtatgtaggtctatcttgtgcatatcttactcttgcaacccgcttcaattttcaattgatgcctttaagtagctatgtccatgcactccataacagcaagaatcaaaagagtgaatagtgttctcaatgtatgatcttggtcttgaacttgatattgaagtgtgaattatttgttgctgtttttaccccat

SEQ ID NO: 18087 - protein, 136 aa, Glycine max
LLFFISITHIHSQQHKTEPKKKKEITFPIQISETLRISLASDQKSKTSKKFAAEAGLPVLTNVLLPKTKGLHACLEALRGSLDAGFYYNFCSFFIIYYSQFIMTLWWLFMKLCNLYYQMFFLSANVSLVFSIFFIL

SEQ ID NO: 18088 - DNA, 1130 bp, Glycine max
aaaaaagcctcctcctctttctcttgttcaaccttcccacaaacactgcatgcgtctttgaccacaactgcttcttcaatttccaatctttttggacaccctctattgctattcctcccttggtgttgtttgtgttaaagggtatctctctacttaatataaagttccattgtctcttgaggcaattttcaaccttagttgtgtgtttcggagagtttttttgtgttgttttgttgaggttgggtttgtgagtgagagaatggtgggtgctctatctgttgtgggttcatcagtgatggactctcacactggcccttgtttgtgtgttgatgctctcccaacaactagtgttaatctcaagagtggtggagatgttttgtgcaagaatttgatgggaaggaagcataatttggtgaagcatggtggtgggaccatgaagttgagcagttcatttgttgatcctggaagagagtggaggctctttgttaacaaaagttgcaagaggcagcgcaaggataggagagtgaccattgttaatgaacttggaggacaatatgaggacacttttgaagatgttaaagcgcaaatgctcaactatttcacatacaaggctgtgaggactgttcttcatcagttgtatgagatgaatccacctaaatacacgtggttctataattttgttgcttcaaacaaaccagcagatgggaaacgttttattcgatcacttgggaaggagcaacaagagcttgctgaaagagtgatggtaactcggcttcacctttatggaaaatgggtcaagaaatgtaatcatgctgagatatatcaagaaatctctgatgaaaacttggagttaatgagggaacggctcatggagacagtaatatggccctcagatgacacaaacacggaaaagattggctgataattcatctcaaatttttactttctgtcttcaacctcttcctagtctaggtatattttttgtttcaatatcaatctgttttgtttccaaaattgtcatttgtgtcattttcctttgataggattctcagttttacgttatgtaaattatgtatatatttgtaccttgttaaatacacaatccattatatatcgctagtttcagatgt

SEQ ID NO: 18089 - protein, 220 aa, Glycine max
MVGALSVVGSSVMDSHTGPCLCVDALPTTSVNLKSGGDVLCKNLMGRKHNLVKHGGGTMKLSSSFVDPGREWRLFVNKSCKRQRKDRRVTIVNELGGQYEDTFEDVKAQMLNYFTYKAVRTVLHQLYEMNPPKYTWFYNFVASNKPADGKRFIRSLGKEQQELAERVMVTRLHLYGKWVKKCNHAEIYQEISDENLELMRERLMETVIWPSDDTNTEKIG

SEQ ID NO: 18090 - protein, 208 aa, Glycine max
MDSHTGPCLCVDALPTTSVNLKSGGDVLCKNLMGRKHNLVKHGGGTMKLSSSFVDPGREWRLFVNKSCKRQRKDRRVTIVNELGGQYEDTFEDVKAQMLNYFTYKAVRTVLHQLYEMNPPKYTWFYNFVASNKPADGKRFIRSLGKEQQELAERVMVTRLHLYGKWVKKCNHAEIYQEISDENLELMRERLMETVIWPSDDTNTEKIG

SEQ ID NO: 18091 - protein, 176 aa, Glycine max
MGRKHNLVKHGGGTMKLSSSFVDPGREWRLFVNKSCKRQRKDRRVTIVNELGGQYEDTFEDVKAQMLNYFTYKAVRTVLHQLYEMNPPKYTWFYNFVASNKPADGKRFIRSLGKEQQELAERVMVTRLHLYGKWVKKCNHAEIYQEISDENLELMRERLMETVIWPSDDTNTEKIG

SEQ ID NO: 18092 - DNA, 490 bp, Glycine max
agttagagtgagtcacagctgggtgaagacgtggatataataaccttagtatcactctctatccacacaggagggaggtgagggactgatgactgagatagcggtgattcaattgcatcatcacaatcacaacattgcttattgacattcatatcctctcattctctctctttttctttctcttcaattccaaacctatggcggatcagagccccaaaccagagaccttcgaactcaacaatggcagcatgcaagtcctcctcagcaatctcggctgcaccatcatctccttatccgtacccggaaaagatggattgttatccgacatcgttcttggcctagaatctgttgaatcctatcagaaaggtctcgctccttattttggttgcattgtgggcagggttgcaaaccgaattaaggatggcaagtttacacttgacgggattcaatactctttgccaatcaacaaacccccaaacagtctccatgg

SEQ ID NO: 18093 - protein, 97 aa, Glycine max
MADQSPKPETFELNNGSMQVLLSNLGCTIISLSVPGKDGLLSDIVLGLESVESYQKGLAPYFGCIVGRVANRIKDGKFTLDGIQYSLPINKPPNSLH

SEQ ID NO: 18094 - protein, 80 aa, Glycine max
MQVLLSNLGCTIISLSVPGKDGLLSDIVLGLESVESYQKGLAPYFGCIVGRVANRIKDGKFTLDGIQYSLPINKPPNSLH

SEQ ID NO: 18095 - DNA, 1127 bp, Glycine max
acaacgcgcgctttacgagagcagggaaccagaggggaactcgtgcttagctttcctgtagcttcgtttgcaccatccatggccgatccagccgaggagaccgtcgccgcgcccccgccgaccccggcagctcccgccgagggcgccccgccgctgtcggcggagccgccggctagcaccgacgcctcgccggagaaggcggccccgcctgcgcctgcgccggacacgacggtgaggtcccgggggttcaggctgctcggcgaggacacctccgtgcacaaggtgctcggtggcggtaaaactgctgatgtactgttatggaaggacaagaaaacaactgctgtagtgatcggtggcacaactgtcatatgggttttatttgaagtgcttgattaccatctcttaactctgctatcccatgtgatgattggtgtcctggccatcttgttcgtgtggtcgaaagctatgaccttcatcaagaagagtccgccagatattcctgtagtcgagatacctgaagacctcgctgtgaatgtatcacgggcactacgcagcgatgtcaacagatcacttcacttgttgcgcgagattgcaatggggcatgatctgaagaaattccttggtgtgattgctggtctctgggttctgtcagaagttggaagctgctgtgatttcctcaccttgatatatattgctgtcctgatgatccacacggtgccgatcttgtacgacaagtaccaggacaaggtggatcacttcgccggaaaggcccataccgaggcgtgcaagcactacgaggtgctggaccagaaggttctgagcaagataccccgaggaccggcgaaaaccaagaagacctagaatgctgggtgtctcgtgagtgcatgctgggtcgcttgtggttccgtgatcatatgcgtaatgcgacgagacgtcactcgtcttacggtcttgccttctgctcagcattgtattagctatttgtatatgcaactctgaaaacttcgaactgctacctttctactatcgcagtcgcttgtagatacctgtcctgttacttgtgtgtacgtgcggcagatgtgttctcgtgtggatgttcttagtgaaaacctgaatggatgttcttg

SEQ ID NO: 18096 - protein, 286 aa, Glycine max
TTRALREQGTRGELVLSFPVASFAPSMADPAEETVAAPPPTPAAPAEGAPPLSAEPPASTDASPEKAAPPAPAPDTTVRSRGFRLLGEDTSVHKVLGGGKTADVLLWKDKKTTAVVIGGTTVIWVLFEVLDYHLLTLLSHVMIGVLAILFVWSKAMTFIKKSPPDIPVVEIPEDLAVNVSRALRSDVNRSLHLLREIAMGHDLKKFLGVIAGLWVLSEVGSCCDFLTLIYIAVLMIHTVPILYDKYQDKVDHFAGKAHTEACKHYEVLDQKVLSKIPRGPAKTKKT

SEQ ID NO: 18097 - protein, 260 aa, Glycine max
MADPAEETVAAPPPTPAAPAEGAPPLSAEPPASTDASPEKAAPPAPAPDTTVRSRGFRLLGEDTSVHKVLGGGKTADVLLWKDKKTTAVVIGGTTVIWVLFEVLDYHLLTLLSHVMIGVLAILFVWSKAMTFIKKSPPDIPVVEIPEDLAVNVSRALRSDVNRSLHLLREIAMGHDLKKFLGVIAGLWVLSEVGSCCDFLTLIYIAVLMIHTVPILYDKYQDKVDHFAGKAHTEACKHYEVLDQKVLSKIPRGPAKTKKT

SEQ ID NO: 18098 - protein, 145 aa, Glycine max
MIGVLAILFVWSKAMTFIKKSPPDIPVVEIPEDLAVNVSRALRSDVNRSLHLLREIAMGHDLKKFLGVIAGLWVLSEVGSCCDFLTLIYIAVLMIHTVPILYDKYQDKVDHFAGKAHTEACKHYEVLDQKVLSKIPRGPAKTKKT

SEQ ID NO: 18099 - DNA, 478 bp, Glycine max
caagtttcagctctaagcttcatctatctccgtctttcaggcaaactaaaaagtttataatctagttttctgtcctcctctatctagaatggcgcttgtcaaaagtattgtttcaacagtaagacccaacttaatgacatttctgaagtttgcaaaagttgaattaactccacctactcctggtgacattccagcaatttcccgtgggtttggagacatcgttagtgcagccaagactggtcggtggaagcaactgactgttaaagaagcatggctgaatgttttggtgttcactgaagtaacatgctggttttggattggagaagtaattggcaagaggaacatgattggatatgacgttcaagtataagtcatgccatcaaaaaaagtttagaaatgtatctttcaatttagcaggcattgtttaacactcatattgagatttggtaatgtaaatgttaaaataaaacttgtttct

SEQ ID NO: 18100 - protein, 93 aa, Glycine max
MALVKSIVSTVRPNLMTFLKFAKVELTPPTPGDIPAISRGFGDIVSAAKTGRWKQLTVKEAWLNVLVFTEVTCWFWIGEVIGKRNMIGYDVQV

SEQ ID NO: 18101 - protein, 78 aa, Glycine max
MTFLKFAKVELTPPTPGDIPAISRGFGDIVSAAKTGRWKQLTVKEAWLNVLVFTEVTCWFWIGEVIGKRNMIGYDVQV

SEQ ID NO: 18102 - DNA, 1054 bp, Glycine max
gtttactggatttattctgggatttacgttgttctggggttgtttgctgagaattatcggttacattcgaagcaggaagaggatgaaaaaaatttggtgtcaaagggtgctgtggttaaaggtgttctcctccaacagctagttcaggctgtggttgcaaccctcttgtttgcgctgacaggaagtgacaaccaaaatactacaagccagaatacttctctacttgttttagcaaggcaatttgttactgctatgcttgtaatggatgcatggcaatactttatgcacagatacatgcatcacaacaagttcctttacaaacatatccactctctacatcacagactcattgtaccctattcatatggagctctgtacaatcaccccgtcgaggggcttctgaatgacactgttggtggggctttatctttcctactctccgggatgagtcctcgagcctccatcttcttcttctcctttgccaccattaaaacagtggatgatcactgcgggttattgctccctgggaaccttttccacatctttttcaaaaacaactcagcctaccacgatgtacaccaccagctctatggcaacaagtacaacttctcgcagccattcttcgttatgtgggacaaaatcttaggtacctacatgccttacacgttggaggagagggaaggtggtggttttgaaactagaccttgcaaagattacaaggatgattaacttttttgcttgacgagcattctttatctgtactagtattgttttccctttttatgagcagcttctcctttctcatgtgatgcctgtatatatacatatgatgtgtcctgttctatatttttctttcccttatgtccatactagatagacataataaaggaaattgaggtgctacctattaccatttgattttcacccttgtattgcttgctgctacacaatagtcataccttgtatccctctgtgatgtcttgccttctttaactttcacgcatgcaatctttgatatcctaatgactaatacttcatatgttttgccgacttg

SEQ ID NO: 18103 - protein, 242 aa, Glycine max
VYWIYSGIYVVLGLFAENYRLHSKQEEDEKNLVSKGAVVKGVLLQQLVQAVVATLLFALTGSDNQNTTSQNTSLLVLARQFVTAMLVMDAWQYFMHRYMHHNKFLYKHIHSLHHRLIVPYSYGALYNHPVEGLLNDTVGGALSFLLSGMSPRASIFFFSFATIKTVDDHCGLLLPGNLFHIFFKNNSAYHDVHHQLYGNKYNFSQPFFVMWDKILGTYMPYTLEEREGGGFETRPCKDYKDD

SEQ ID NO: 18104 - protein, 158 aa, Glycine max
MLVMDAWQYFMHRYMHHNKFLYKHIHSLHHRLIVPYSYGALYNHPVEGLLNDTVGGALSFLLSGMSPRASIFFFSFATIKTVDDHCGLLLPGNLFHIFFKNNSAYHDVHHQLYGNKYNFSQPFFVMWDKILGTYMPYTLEEREGGGFETRPCKDYKDD

SEQ ID NO: 18105 - protein, 155 aa, Glycine max
MDAWQYFMHRYMHHNKFLYKHIHSLHHRLIVPYSYGALYNHPVEGLLNDTVGGALSFLLSGMSPRASIFFFSFATIKTVDDHCGLLLPGNLFHIFFKNNSAYHDVHHQLYGNKYNFSQPFFVMWDKILGTYMPYTLEEREGGGFETRPCKDYKDD

SEQ ID NO: 18106 - DNA, 947 bp, Glycine max
  misc_feature (938)..(938): n is a, c, g, or t
ttacctaatccagttccagttgttaagccaattccaaagccaacaccaatggtgaaaaagcctctacctattcccgtaacaaagcctataccaaaaccaattcccattgttaagcccattcctattccagtgttcaagcccatccccaaaccaattccaatagtgaaaaagcctctacctattccagtaactaagcctatacccaagccagtcccaattattaagccaattcccattccagtattcaagcctgtcccaattattaagccaattcccattccagtattcaagcctatcccaaagccatttccaatagtgaaaaagcctctacctattccagcaattaagcctataccaaagccaattccttcactaaaaaaacctctacctactccaacaattaagcctgtacccgagccagttccaaccgttaaaccaattccgatcccaacattcaagccttttccaaagccatttccatttgtgaaaaggcctttacctattcctccaatgatgaaacctataccaaagccatttacatctgttaaaaagcctccacctattccaatttccaaacctattccatagccattttccatttttatgatcaggcctataccaaaacaaatttcatttgttaaagcctatataagcctttcttcaaaaacttattgttccctgaataccacttctttattgcatatattttcttatgcttatgaagttatccactccaatttgaaaggagatatccagtacaatatttacagggcgacgcctgtgtctcgagatcaatgctgtacgggtttgcatgtatcctattgtatttatcttggaagttgaattggaatgtaaaagtttttttgcctctatgaaactgccaaatgttgccgctattgtaactcgattgatgatctactaatcaaggaatgatgtgntagtatctg

SEQ ID NO: 18107 - protein, 195 aa, Glycine max
LPNPVPVVKPIPKPTPMVKKPLPIPVTKPIPKPIPIVKPIPIPVFKPIPKPIPIVKKPLPIPVTKPIPKPVPIIKPIPIPVFKPVPIIKPIPIPVFKPIPKPFPIVKKPLPIPAIKPIPKPIPSLKKPLPTPTIKPVPEPVPTVKPIPIPTFKPFPKPFPFVKRPLPIPPMMKPIPKPFTSVKKPPPIPISKPIP

SEQ ID NO: 18108 - protein, 179 aa, Glycine max
MVKKPLPIPVTKPIPKPIPIVKPIPIPVFKPIPKPIPIVKKPLPIPVTKPIPKPVPIIKPIPIPVFKPVPIIKPIPIPVFKPIPKPFPIVKKPLPIPAIKPIPKPIPSLKKPLPTPTIKPVPEPVPTVKPIPIPTFKPFPKPFPFVKRPLPIPPMMKPIPKPFTSVKKPPPIPISKPIP

SEQ ID NO: 18109 - DNA, 1043 bp, Glycine max
atccaacgtcgaccacaaaaacaaaaacaccaacatttttatcgtttcacttgcgaactagattaccttctttttctctttctttctttaaattatttttacttcaatttagttatcagttttcgtacgctctctgtttcctcgaaaagcatgattttttcaaggattgcacgctccgtttcgagttcgtctcgcgctagaaatttattacacggtgatgggagattgggaacccatgtcggatcgccacggacgaatgcgtgttctgaaggagcccaaggggtattagggtttgttaggggctacgtgtcttctgccagagctctcagtaatggcttcgtttccaatttgcctgattttaaatctgttgcagcaaaccctacgattcgccgattgttttgcagcaaagctccaaagaaggagatttatcaaaaggggtaccactaacaacttttgatgactggattctccttttaacttcagataactcgaatgcaaacacagaggatagtggaaattttcaggaagctttcatgaagcaagttaaatatctagtcaccccattattgttgatggggctatttcttacatccttttcgtttggtcctcctgaacagaaccagattagctttcaggagtttaaaaacaagcttttggaaccaggattagtagaccatattgttgtctcaaataaatcagttgccaaagtatatgtaaggaacactcccctcaaccaaacagataatgaagtagcccaagggacccaacctgcaattggatctggaggccagtataaatattatttcaatattggaagtgttgagtcttttgaggagaagctagaggaagcgcaagaagctctgggcatttgctctcatgattttgtgcctgtcacatattcttttgaactggggtaccgggaatggattgcgttggcttcaatactgttgtttttgggatttgtcacatatataagcttttaaatttagacacatgatatcttttttcactaatctattgtaaagtaaatagttttatttggt

SEQ ID NO: 18110 - protein, 149 aa, Glycine max
MKQVKYLVTPLLLMGLFLTSFSFGPPEQNQISFQEFKNKLLEPGLVDHIVVSNKSVAKVYVRNTPLNQTDNEVAQGTQPAIGSGGQYKYYFNIGSVESFEEKLEEAQEALGICSHDFVPVTYSFELGYREWIALASILLFLGFVTYISF

SEQ ID NO: 18111 - protein, 148 aa, Glycine max
IQRRPQKQKHQHFYRFTCELDYLLFLFLSLNYFYFNLVISFRTLSVSSKSMIFSRIARSVSSSSRARNLLHGDGRLGTHVGSPRTNACSEGAQGVLGFVRGYVSSARALSNGFVSNLPDFKSVAANPTIRRLFCSKAPKKEIYQKGYH

SEQ ID NO: 18112 - protein, 136 aa, Glycine max
MGLFLTSFSFGPPEQNQISFQEFKNKLLEPGLVDHIVVSNKSVAKVYVRNTPLNQTDNEVAQGTQPAIGSGGQYKYYFNIGSVESFEEKLEEAQEALGICSHDFVPVTYSFELGYREWIALASILLFLGFVTYISF

SEQ ID NO: 18113 - DNA, 1120 bp, Glycine max
attgaaccaccgactcccctacctgacaagatggcagcccgtgtcgccgcagctctcgccctggccctgctcgtccaggtggcctcagccgctccccaatacacctgcagctgttccgccacccctgcctccggccccgtctacattggaggtggtgtcggcccagtcgtctaccctagcggcggtgtgaccattgacacccctgctcccggccccgtgtactgcggtggtgtcggacctaccgtctacggaggtggtgttgccatcgactcttccgctgatgcctacgctgctgccaccgctgacgcttcctactacggtggtgatgtctccactgacgccaacactgtatacctcggatcctcttctggtgccgtcagtgtgaccgacaactccatctacgccactcccaccgtttctccctccgtccctgtcggctctcctcagatcgtgtccacctctgccggtcccgcctcctcctacatcactccccctgtctgcaagaccgccacttatgagatccccgttaagtcttccacagcgccgttgccggacctgtttcccagtcctcctccgtccaggaaggatactgctcctcctcctgcgccgctacccgtgccaagtgcgccggtaccaccaagaacgtttccttcaagacccccaccatcatcaacaagggttcttccacctccagctccgtgtccgctatcggtaacccagtcaccagccgcgccaccaaggccggtacccctgaggtcagcacccaggtcatccctgccgtgagccccgctggatccgtctacccctccggacccgtctacgcctctggccccgctgtctacgcgtccggccctgccacatactctatcccatccggtcctgcctactacgacggttcctacgccgccgcttctgcctccgctggagcttactccaccggccctgttgtcatcaacgagcccgccgtcgtcctccccggccccggccccgccctctgcccttgcgcttaaacgatgtcttccaagaagttgaaacactcacaaaattttgtacattaacaaacagatctatgaagtgaatattttatttttgagaaataaaatttaaaatttactgtccg

SEQ ID NO: 18114 - protein, 260 aa, Glycine max
IEPPTPLPDKMAARVAAALALALLVQVASAAPQYTCSCSATPASGPVYIGGGVGPVVYPSGGVTIDTPAPGPVYCGGVGPTVYGGGVAIDSSADAYAAATADASYYGGDVSTDANTVYLGSSSGAVSVTDNSIYATPTVSPSVPVGSPQIVSTSAGPASSYITPPVCKTATYEIPVKSSTAPLPDLFPSPPPSRKDTAPPPAPLPVPSAPVPPRTFPSRPPPSSTRVLPPPAPCPLSVTQSPAAPPRPVPLRSAPRSSLP

SEQ ID NO: 18115 - protein, 250 aa, Glycine max
MAARVAAALALALLVQVASAAPQYTCSCSATPASGPVYIGGGVGPVVYPSGGVTIDTPAPGPVYCGGVGPTVYGGGVAIDSSADAYAAATADASYYGGDVSTDANTVYLGSSSGAVSVTDNSIYATPTVSPSVPVGSPQIVSTSAGPASSYITPPVCKTATYEIPVKSSTAPLPDLFPSPPPSRKDTAPPPAPLPVPSAPVPPRTFPSRPPPSSTRVLPPPAPCPLSVTQSPAAPPRPVPLRSAPRSSLP

SEQ ID NO: 18116 - DNA, 1131 bp, Glycine max
ggttcatagttactgtgaagaggttgaaagatgcaaggtaccctggcttggaagagttcagtgctcacattcaagtccttgggaggctcacccaccctaacctcgtccctctcagggcttatttccaggctaaggaggaacgcctcctcgtttatgattactttcctaatggcagcctcttctcccttattcacggatcgaaaacatctggtgggggaaagcctcttcattggacatcctgccttaaaattgctgaggatctagcaacaggcatgctctatatccaccagaaccctggcttgacacatggaaacctgaaatcttctaatgtattgttgggttctgactttgagtcatgtcttactgattatggtctcactgtgttccttaatcctgacacaatggatgagcctagtgcaacttctttgttctatagagcacctgaatgccgcaactttcaaaggtcacaaactcaaccagctgatgtatacagtttcggggtcctttcttctgagcttttaactggcaaaacacccttccaagaccttgttcagacatatggttcagacatacctaggtgggttcggtcagtgcgcgaagaggagacggagtctggggatgatcctgcttcaggcaatgaagcatctgaagagaagcttcaggctcttttgaacattgcaatggcatgtgtttcactagtgccggagaacaggcctacaatgagagaagttttaaagatgataagagatgcaagaggggaggctcatgtctcatctaacagtagtgatcactcccctggtagatggtcagatactgttcaaagctttccaagggaagaacaccagagcatatgattggtaactttttgacagcttattagttgaaactatgcattctgatttttcctgaattggttattgatacgattcatgcataaactaggtgatacgtgaggacctacatttttaatctctagctgtgtgagtaaatgcattttaaagggtaattaaggattcttttatagagtcatcacaggttgcaaagagtgggagatcatcagttcctgctttgtcttgtattttctttttaaaataaaacacacattccaaataaaaacatggggttcagatt

SEQ ID NO: 18117 - protein, 283 aa, Glycine max
FIVTVKRLKDARYPGLEEFSAHIQVLGRLTHPNLVPLRAYFQAKEERLLVYDYFPNGSLFSLIHGSKTSGGGKPLHWTSCLKIAEDLATGMLYIHQNPGLTHGNLKSSNVLLGSDFESCLTDYGLTVFLNPDTMDEPSATSLFYRAPECRNFQRSQTQPADVYSFGVLSSELLTGKTPFQDLVQTYGSDIPRWVRSVREEETESGDDPASGNEASEEKLQALLNIAMACVSLVPENRPTMREVLKMIRDARGEAHVSSNSSDHSPGRWSDTVQSFPREEHQSI

SEQ ID NO: 18118 - protein, 193 aa, Glycine max
MLYIHQNPGLTHGNLKSSNVLLGSDFESCLTDYGLTVFLNPDTMDEPSATSLFYRAPECRNFQRSQTQPADVYSFGVLSSELLTGKTPFQDLVQTYGSDIPRWVRSVREEETESGDDPASGNEASEEKLQALLNIAMACVSLVPENRPTMREVLKMIRDARGEAHVSSNSSDHSPGRWSDTVQSFPREEHQSI

SEQ ID NO: 18119 - protein, 150 aa, Glycine max
MDEPSATSLFYRAPECRNFQRSQTQPADVYSFGVLSSELLTGKTPFQDLVQTYGSDIPRWVRSVREEETESGDDPASGNEASEEKLQALLNIAMACVSLVPENRPTMREVLKMIRDARGEAHVSSNSSDHSPGRWSDTVQSFPREEHQSI

SEQ ID NO: 18120 - DNA, 582 bp, Glycine max
gttctagtgtatgtgattgttgtgactcgttcttcttcgtcgttatcttcttcttttgttgtttgtgtgtttgttttttctctcacctgaaaatgtcttgctgcggtggtaactgtggttgcggaagcgcctgcaagtgcggcaacggctgcggaggctgcaagatgtacccagacttgagctacaccgagtcaaccaccaccgagaccttggtcatgggagtggcaccagttaaggctcaattcgagagtgctgaaatgggtgttcccgctgagaacgatggctgcaaatgtggagctaactgcacctgcaacccctgcacttgcaagtgaggtgttggagagctaaagcttcaagcagagatggcccttagaaataatgataaaaactatatgtagtttcaaaacttcaaaattatgtagtatgtattatgttgcactctggtgttttgtgtctaaacaaacacccttagaataaagtggtcatttcttgcccttgagcaagttcaagtgttttggacttgtgatgggtgtgttaaggtcatggttgccttttatatatatatatatataaatgtttggt

SEQ ID NO: 18121 - protein, 109 aa, Glycine max
SSVCDCCDSFFFVVIFFFCCLCVCFFSHLKMSCCGGNCGCGSACKCGNGCGGCKMYPDLSYTESTTTETLVMGVAPVKAQFESAEMGVPAENDGCKCGANCTCNPCTCK

SEQ ID NO: 18122 - protein, 79 aa, Glycine max
MSCCGGNCGCGSACKCGNGCGGCKMYPDLSYTESTTTETLVMGVAPVKAQFESAEMGVPAENDGCKCGANCTCNPCTCK

SEQ ID NO: 18123 - protein, 55 aa, Glycine max
MYPDLSYTESTTTETLVMGVAPVKAQFESAEMGVPAENDGCKCGANCTCNPCTCK

SEQ ID NO: 18124 - DNA, 720 bp, Glycine max
ccccccattactcacttttcatccttcgatcatacacttagttgcttccaattaagatggttctgctagagaagctctgggatgatgttgtggctggccctcaacctgagcgtggccttggcaagctcagaaaactcaccaccctcaaaactattgatgaaggagaaagtagcaagctgcagaagacgttgtcgatgccgtcgacaccaacaaccccgatgactccgacgactccaacgacaccgggatcggcccgtaaagctgacaacgtttggaggagcgtcttccatcctgggagcaactccgccacaaagaccatcggtgctcagatgtttgacaaaccacttcccaacactcccactgtctatgactggctgtacagtggggagaccagaagcaggcaccgctgaagctgaagtctttagctaagatgaccgtgggttgcatgtaaatattgtcgtttttcgttaagcatctgccacgtttgcagctactattactattatgtgtcgggaatttattgctccgttgctgactcaaacataatattactagcgtgtttggtttttttgagcaagtgaatgtaaaaatgctaaataattcgttagtatgctaagttttgttaagccagatctgccttgaactttggcgattggttaatctttttctccctttgttaaatgattagtattaaaataaataaatttttgttaaaatcct

SEQ ID NO: 18125 - protein, 117 aa, Glycine max
MVLLEKLWDDVVAGPQPERGLGKLRKLTTLKTIDEGESSKLQKTLSMPSTPTTPMTPTTPTTPGSARKADNVWRSVFHPGSNSATKTIGAQMFDKPLPNTPTVYDWLYSGETRSRHR

SEQ ID NO: 18126 - protein, 71 aa, Glycine max
MPSTPTTPMTPTTPTTPGSARKADNVWRSVFHPGSNSATKTIGAQMFDKPLPNTPTVYDWLYSGETRSRHR

SEQ ID NO: 18127 - protein, 63 aa, Glycine max
MTPTTPTTPGSARKADNVWRSVFHPGSNSATKTIGAQMFDKPLPNTPTVYDWLYSGETRSRHR

SEQ ID NO: 18128 - DNA, 949 bp, Glycine max
cttcaatttcccttccgatcatcccgaatcctcgagatttctttcgattgaactcatttctctcttcttcgccacgcactcttgtctctgtaagcggtgattttggttctggacaatgtctcgtgtttatgttgggaatttagaccctcgagtcagtgagagggacctcgaagatgaatttcgtatatatggtgttcttaggagtgtctgggttgctcgaagaccaccgggatatgcatttattgagtttgatgataggagggatgcacttgatgcaattcaggccttggatggaaaaaatggttggcgtgtagagctttctcataattccaagggtggtggccgaggagggcgtgggcgtggaggtgaagacacaaaatgctatgaatgtggtgaacctggacactttgctcgggagtgccgattgcgcattggatcacgtggccttggaagtggaaggaggcgaagtccaagtccttatcggcgtcgtagaagtccgagttatggttatgatcgcagtagttatagccctcgtgggagaagatctccaagacgacgtagcatttcacctccctggggtcgcaactacagcaggtcccctccatatcgtcctcgccgtgattcaccttatgccaatgcagattaaaatcagaatgtgaacggagcaagtgctgaatagttgttaggatgttctctctgctatagtgtagttcctctaggattggttgagcataccacagacatgttagttatgttaatgtcatgacaatgggtattgttaagaacttggcttttgatggaactacatagggttgtagctggcaaaagggtgcgttggacactgttttgcattggctgtctctcttcagcttactgaaacctgaaggttgcttcagtcttccctactttatatagcatgttatgttaattgtttgtttttagtcttact

SEQ ID NO: 18129 - protein, 176 aa, Glycine max
MSRVYVGNLDPRVSERDLEDEFRIYGVLRSVWVARRPPGYAFIEFDDRRDALDAIQALDGKNGWRVELSHNSKGGGRGGRGRGGEDTKCYECGEPGHFARECRLRIGSRGLGSGRRRSPSPYRRRRSPSYGYDRSSYSPRGRRSPRRRSISPPWGRNYSRSPPYRPRRDSPYANAD

SEQ ID NO: 18130 - protein, 91 aa, Glycine max
MNVVNLDTLLGSADCALDHVALEVEGGEVQVLIGVVEVRVMVMIAVVIALVGEDLQDDVAFHLPGVATTAGPLHIVLAVIHLMPMQIKIRM

SEQ ID NO: 18131 - DNA, 796 bp, Glycine max
gctttctgattgtgttgtctctcgtgggtaaggttggagggttcattgcttcaattcctgaagtcatggttgctggtctcctatgctttatgtgggctatgcttgcagcattgggcttgtccaatctacgttatagtgaggctggaagctctcgcaacatcatcataattgggttatcattgtttttctctctttccatacctgcctactttcaacaatatggcatctctccaaattccaacttgtcagttccaagttatttccaaccctacattgtggcttctcatgggccattccacagcaaatatggagggttaaactatttcctgaacacaatcttttcactacacatggtggtagcttttcttgtggccgttatcttggacaatactgtgcctggcagcaagcaggaacgtggagtctacgtttggtcagaacctgaggttgctagaagggagcctgctgttgctaatgactatgagttgcccttgagagttggtaagattttcagatgggtgaagtgggttggtctgtgaatgacaaaagggttttgttggttgaatgaacattttcagtttattgaatgttatcaaccgcccaagataccgttctaagtctggattcacatcttcttgggctcaatcatgagtagtatatagttggtcatgttacagagatcatttgtgtaaattgaaaatccggaggggtctatttgtgttataatttattagattagcaatgtatttagttttgattaattcaaaatctccacatggaggtttttcttccttgcttt

SEQ ID NO: 18132 - protein, 177 aa, Glycine max
FLIVLSLVGKVGGFIASIPEVMVAGLLCFMWAMLAALGLSNLRYSEAGSSRNIIIIGLSLFFSLSIPAYFQQYGISPNSNLSVPSYFQPYIVASHGPFHSKYGGLNYFLNTIFSLHMVVAFLVAVILDNTVPGSKQERGVYVWSEPEVARREPAVANDYELPLRVGKIFRWVKWVGL

SEQ ID NO: 18133 - protein, 156 aa, Glycine max
MVAGLLCFMWAMLAALGLSNLRYSEAGSSRNIIIIGLSLFFSLSIPAYFQQYGISPNSNLSVPSYFQPYIVASHGPFHSKYGGLNYFLNTIFSLHMVVAFLVAVILDNTVPGSKQERGVYVWSEPEVARREPAVANDYELPLRVGKIFRWVKWVGL

SEQ ID NO: 18134 - protein, 148 aa, Glycine max
MWAMLAALGLSNLRYSEAGSSRNIIIIGLSLFFSLSIPAYFQQYGISPNSNLSVPSYFQPYIVASHGPFHSKYGGLNYFLNTIFSLHMVVAFLVAVILDNTVPGSKQERGVYVWSEPEVARREPAVANDYELPLRVGKIFRWVKWVGL

SEQ ID NO: 18135 - DNA, 1160 bp, Glycine max
atcaaagtctctcaatcttatcaaccagccaaccaaccaaccaaccaaccaacgatggattccgagatcgccttcgactactctccattgctcaaaatctacaagagtggccgcatcgagcgcctcatgggagaaacggccgtcccaccgtctttaaccccacaaaacggcgtcatttcaaaggacgtcgtttattcacccgacgacaacctctccgtccgcgtttacctcccagagaaagctgccgacaccgatgagaaactccctctcctcgtctacttccacggaggaggcttcatcatcgaaacagctttctcaccgacttaccacaatttcctcacggcggccgtctctgcgtccgactgcatagcggtgtcggtggattaccggcgtgcaccggagcatccgcttccgatctctttcgatgactcgtggacgtctctcaaatgggtattcacccatatcgccggatctggaccggagagctggttaaacaaacacgccgacttcagcaaagtgttcctcgccggagacagcgccggcgcgaacatcgctcatcacatggcgatgagagctgcgaaagagaagctcagtcccgagttaagcgactcaggaatcttcgggatcatcttggttcatccttacttctggtcgaaagcacctgtcgacgacaaggagacaacggatgctgcggtgcggtccaagatcgaagcgatatggatgatggctagtcctgacaacaaagacggagtggatgatccgtggctcaacgtggttcagtcagactcggtggatatctccgggttgggctgcgggaaggttttggtgttggtggctgagaaagatgcgcttgtgagacaaggttggggttacaaggcgaagcttgagaagaacggttggaaagggaaagtggagttggttgagagtgaaggtgaagatcatgtgtttcatttgacgagacctgattgtgagaatgctcttgaagccatgaagaagttcgcagggtttattaagggagagatgtaataggcgctctttcgtctggatgaaagattacgatatgtaatggaataattatctgtctatcagtctctgtaatgtttttaagtgatttatcatattagcacgaaaggcatcaataatattctatgggttcagtt

SEQ ID NO: 18136 - protein, 341 aa, Glycine max
IKVSQSYQPANQPTNQPTMDSEIAFDYSPLLKIYKSGRIERLMGETAVPPSLTPQNGVISKDVVYSPDDNLSVRVYLPEKAADTDEKLPLLVYFHGGGFIIETAFSPTYHNFLTAAVSASDCIAVSVDYRRAPEHPLPISFDDSWTSLKWVFTHIAGSGPESWLNKHADFSKVFLAGDSAGANIAHHMAMRAAKEKLSPELSDSGIFGIILVHPYFWSKAPVDDKETTDAAVRSKIEAIWMMASPDNKDGVDDPWLNVVQSDSVDISGLGCGKVLVLVAEKDALVRQGWGYKAKLEKNGWKGKVELVESEGEDHVFHLTRPDCENALEAMKKFAGFIKGEM

SEQ ID NO: 18137 - protein, 323 aa, Glycine max
MDSEIAFDYSPLLKIYKSGRIERLMGETAVPPSLTPQNGVISKDVVYSPDDNLSVRVYLPEKAADTDEKLPLLVYFHGGGFIIETAFSPTYHNFLTAAVSASDCIAVSVDYRRAPEHPLPISFDDSWTSLKWVFTHIAGSGPESWLNKHADFSKVFLAGDSAGANIAHHMAMRAAKEKLSPELSDSGIFGIILVHPYFWSKAPVDDKETTDAAVRSKIEAIWMMASPDNKDGVDDPWLNVVQSDSVDISGLGCGKVLVLVAEKDALVRQGWGYKAKLEKNGWKGKVELVESEGEDHVFHLTRPDCENALEAMKKFAGFIKGEM

SEQ ID NO: 18138 - protein, 299 aa, Glycine max
MGETAVPPSLTPQNGVISKDVVYSPDDNLSVRVYLPEKAADTDEKLPLLVYFHGGGFIIETAFSPTYHNFLTAAVSASDCIAVSVDYRRAPEHPLPISFDDSWTSLKWVFTHIAGSGPESWLNKHADFSKVFLAGDSAGANIAHHMAMRAAKEKLSPELSDSGIFGIILVHPYFWSKAPVDDKETTDAAVRSKIEAIWMMASPDNKDGVDDPWLNVVQSDSVDISGLGCGKVLVLVAEKDALVRQGWGYKAKLEKNGWKGKVELVESEGEDHVFHLTRPDCENALEAMKKFAGFIKGEM

SEQ ID NO: 18139 - DNA, 641 bp, Glycine max
acaagttacaactcatcaattcggcagataaaggtagtagtagtgttacgttcgaattcgaattgttccatttgcttcgcaaaagttgcaactacttccacagaaagaaaaaaagtttctaagttaaggaaatccagagtgaaaaaaaaaaaaatggccggtgacggtgcagctacatgcatagacatccttcttgccattattctccctcctcttggtgtctttctcaaatatggttgccaggtggagttctggatttgtttggtgctgaccctttttggttatatacctggaattatctatgctgtctattctatcaccaagtgatcgtcaccctttaacttttgtggacaataaacaaatgtcatgggcgtttctgtctttcaactcagatattactgtttcttcaatctatcgttgtcaatgttgccattttcttttgttctgtttttaaaaacccttctgtttttagcttaagcgagagtggagtgtgtagcttgctagcttgtgcatgtagtctctagatttggtaatcgatttgaaatacacaattttatttgtatcaacggtcttgttcatgtatcttatgtaaattgtactattcattactttcaaattaataaatcggatttattcttcct

SEQ ID NO: 18140 - protein, 108 aa, Glycine max; identical to SEQ ID NO: 13125

SEQ ID NO: 18141 - protein, 57 aa, Glycine max; identical to SEQ ID NO: 13126

SEQ ID NO: 18142 - protein, 54 aa, Glycine max; identical to SEQ ID NO: 13127

SEQ ID NO: 18143 - DNA, 416 bp, Glycine max
aaacattgttaccgtgatcatatcaattcatcatcatccgcatcattctcacccatggctgcctcatccacaatcaacaacttcttctctttcttcttacccacaaaaccaccaccaccctctccaccgcagttcaaccccaccaccaccaccaccactcctatgaacccttcttctcagacccacaaaccctcctcgcagcccctaattgcccaatacaaccctcctcctccttccccttcttcctgttcttcttcttctgaattgtcctctgttatatgcccctccatggcgtactccaacacgctcttcttccagtcgccgtacaacgtgcaggtggtggtggccgaggacgaaaccgaggagaagctcctgggaaggttccgcagagaggtgaccaaggccggcgtcgttca

SEQ ID NO: 18144 - protein, 138 aa, Glycine max
KHCYRDHINSSSSASFSPMAASSTINNFFSFFLPTKPPPPSPPQFNPTTTTTTPMNPSSQTHKPSSQPLIAQYNPPPPSPSSCSSSSELSSVICPSMAYSNTLFFQSPYNVQVVVAEDETEEKLLGRFRREVTKAGVV

SEQ ID NO: 18145 - protein, 120 aa, Glycine max
MAASSTINNFFSFFLPTKPPPPSPPQFNPTTTTTTPMNPSSQTHKPSSQPLIAQYNPPPPSPSSCSSSSELSSVICPSMAYSNTLFFQSPYNVQVVVAEDETEEKLLGRFRREVTKAGVV

SEQ ID NO: 18146 - protein, 84 aa, Glycine max
MNPSSQTHKPSSQPLIAQYNPPPPSPSSCSSSSELSSVICPSMAYSNTLFFQSPYNVQVVVAEDETEEKLLGRFRREVTKAGVV

SEQ ID NO: 18147 - DNA, 1068 bp, Glycine max
acattaaagtccacgcacatagatttgctttcacatccatcacctacaccaccaaaaccaaatcaagccgtgaagacgtgaaagaaaaaacaaatttatcttactctacaattattttaaacaaatttaattctctaatcttatcttagggaacatattcattgtgcttcaaattggctaagaaaataaaattaaaaataattaataaagtattaaattctgccctctttcgtatcctacactatccgcaaagggcgagaatccgcgacgtcgttttcaaacacggcttccatagtgaaggactgattcaataattgacgagtggtttgtttggtttgataggcatagacgacaaccaagtacagagaagtaaagagagttttgctttttgaaatggcagcgtcgtcgtcgtcggagaagcaagtggtgctgataggcatagacgacagcgagcagagcacgtacgcgctgaattgggctttggatcacttcttcccgagcccaatcttcaagctcgttctcatccactcaaggcccaccgccacctccgccgtgggcttcgccggccctggagccgctgagatcttgcctattgtagattccgatttgagaaagattgccgccagagtcctcgaaaccgccaaacaactttgcttcaacaaatccgtgaatgatgtgacagcggaagtggtggaaggtgatcctagaaatgttctttgtgatgctgtggataagtaccgtgctgcaatattggttgtgggcagccatggttatggggctataaaaagggcggttttaggtagtgtcagtgactactgtgctcatcatgctcactgcactgtgatgatcgtgaaaaagccaaaaatcaaacactgatctgtaatggctgcgtctatatagtacaacaataaacataaccggccctttcagccaaagaaaaaaaataatgttcacagaaattcgtaactatgcttgttgtatggatactacatattgtccttatggtttgatacgttgaggtacagcttatttttaaagatggaagtatggaaccatcaaaaagttatt

SEQ ID NO: 18148 - protein, 160 aa, Glycine max
MAASSSSEKQVVLIGIDDSEQSTYALNWALDHFFPSPIFKLVLIHSRPTATSAVGFAGPGAAEILPIVDSDLRKIAARVLETAKQLCFNKSVNDVTAEVVEGDPRNVLCDAVDKYRAAILVVGSHGYGAIKRAVLGSVSDYCAHHAHCTVMIVKKPKIKH

SEQ ID NO: 18149 - DNA, 918 bp, Glycine max
caaaattaattcaataggattacttttagaaaaacatctggaagtgggacagcttatacttgattaaattaagagctattagaaaatcattttgaatcaaaacaggagaaccactttcatcgaagctggtagctaagaagcatgcttgctattctgttagtgtttgaattatctgtttagatggatgagactatctatataatgcttaggaattctttttgtgtttgattcttatgcctttttctattatgtgtatgttttttctgaaattttaagcctcattataggtagggaccccaaagacacaccggcgatacctggctcgtgacgagggaacttatggtccgatgccgcgcagaatcccaaaagggttattgggaatgccattcaataccacaggcatagatggtctttactgtgttggtgatagctgcttccctggacaaggtgttattgctgtagctttctcaggagttatgtgtgctcatcgagtagctgcagatattgggctggagaagaagtcacctgtgttggattccatgctgcttcggttgcttggttggttaaggacaatggcatgagatatataggagcatttgttggatgcagtatcatcatcccttttgcataagaagctcaactttcattacagcattggttcactgcagatttcttccacaattttcaagagtcaccaaattgtcacagtatatagatgctgttagttgcaatttgatccatgcagtggcagagcttggaaaaaataattgaaggggccaaagtttgaagtgtataaatttaatgcaataattttgataatatcatgtcttataggtgttttctttccccttgctgaaggatatcatgtcttacaggtgatttaagtaattgatggtaatatttaaatattaaatattc

SEQ ID NO: 18150 - protein, 77 aa, Glycine max
MPRRIPKGLLGMPFNTTGIDGLYCVGDSCFPGQGVIAVAFSGVMCAHRVAADIGLEKKSPVLDSMLLRLLGWLRTMA

SEQ ID NO: 18151 - protein, 66 aa, Glycine max
MPFNTTGIDGLYCVGDSCFPGQGVIAVAFSGVMCAHRVAADIGLEKKSPVLDSMLLRLLGWLRTMA

SEQ ID NO: 18152 - protein, 55 aa, Glycine max
MQYHHPFCIRSSTFITALVHCRFLPQFSRVTKLSQYIDAVSCNLIHAVAELGKNN

SEQ ID NO: 18153 - DNA, 657 bp, Glycine max
agatcacaccaacgttcactgagtgacattcctccgttttaaactttccaaccgcattcccaatggatcctcaagctccggcgacggccaccaccgctcgaagcgccgccgcggaaccctcgcaatctcaacccccaaaaccatcccctcctctccctctccctccaccttccacatcatcaacccctcccatctcagctcctccacagcctcccccaaacactaaccctagccctaaccctaaccccagccctgcccctggcccgggcccaattcaagccccgagccccaaaccccccactcccactcccactaccactcccacgcctccccagcccttcaaccgcgctttgtcgccgccatcgcaaccgcagttcccgcactactcctccccttctccgccttcctccgctcccggcgccgccccgccgccgcggggcggcatggcgatcggtgtgcccgcgcaccaccagagcccctcccctccgttttcgtcctccttcggtcaacattttggggggttgggtcgaaccggagtcaacgtcgctgaatctacctccaattcaagcacctctcaagtgaggacgccggtgcaaggaacggggatgttagggtctcaaatgcggccaagtggaatcggtgcacatcaacagagac

SEQ ID NO: 18154 - protein, 198 aa, Glycine max
MDPQAPATATTARSAAAEPSQSQPPKPSPPLPLPPPSTSSTPPISAPPQPPPNTNPSPNPNPSPAPGPGPIQAPSPKPPTPTPTTTPTPPQPFNRALSPPSQPQFPHYSSPSPPSSAPGAAPPPRGGMAIGVPAHHQSPSPPFSSSFGQHFGGLGRTGVNVAESTSNSSTSQVRTPVQGTGMLGSQMRPSGIGAHQQR

SEQ ID NO: 18155 - DNA, 800 bp, Glycine max
ttacccaaaatctatggcacaggatacagcaaaattggcaactaaatcttcagccatagctcatcttacttctagttttgaactaacatcagcacgagaaaatttgattcctcggtcacaaaaagcgagttcagttacccccaaatcaaaccctgagacaagtgatgaggagggttctttgagcagcaggatagaatctcttaccatacaggaggatgcgaaagagggtgaagctgaagacgatgaaggtctcccagtttacccgcatgaacgcgttaacacagcttctacagatcctgtagaagatattgacgtgactaaacgagaggcttatctgtcatctgcagagtttcaagagaaatttgggatggcgaagaatgaattttacaagttgccaaaatggaaacagaacaaactcaaaatggcagttcagttgttctgagttaaatcagtaagaaactgaatatatggaagtgaaaggggacagcatgagcgttttttttttccttcttttaacatagctgcttctactccgaagaagctccttttgaggaagaaaataaataaagattcttccttggagtggtttgatatttataggttctttctttgttgagagctgcttggtgttaattttataggccaagggttgatggagtgcttgtcttaatttgtttttcttgttgatcattttttcattcaaaattgttttggggaagcaattacttaggttgttttgatagtcagagtatgaagtttgtacattatcatttaatatttaaaagaaatattattgagat

SEQ ID NO: 18156 - protein, 146 aa, Glycine max
YPKSMAQDTAKLATKSSAIAHLTSSFELTSARENLIPRSQKASSVTPKSNPETSDEEGSLSSRIESLTIQEDAKEGEAEDDEGLPVYPHERVNTASTDPVEDIDVTKREAYLSSAEFQEKFGMAKNEFYKLPKWKQNKLKMAVQLF

SEQ ID NO: 18157 - protein, 142 aa, Glycine max
MAQDTAKLATKSSAIAHLTSSFELTSARENLIPRSQKASSVTPKSNPETSDEEGSLSSRIESLTIQEDAKEGEAEDDEGLPVYPHERVNTASTDPVEDIDVTKREAYLSSAEFQEKFGMAKNEFYKLPKWKQNKLKMAVQLF

SEQ ID NO: 18158 - DNA, 527 bp, Glycine max
atttgcaggtcctcctcatatacagtacaaacttcagctggtagatagtgcttccaaatggagaagaaaaggaagactttactattgctgctgctcatggctgcaactctcttctgcatgccaattgtgtcgtatgctgtttctagtgtcaacattcaaggtcatctcacccattctgagctggtaaaaggtcccaatagaaggcttttgccatttgtggattgtggagcgaggtgcagggtgaggtgcagtttgcactcaaggccaaaaatttgctcaagagcttgcgggacatgctgtttcaggtgcaggtgtgttcctccaggcacttacgggaacagagagatgtgtggcaagtgttacactgacatgatcactcatggcaacaaacctaagtgcccctaaacctgtgcatgcatgcccatgtgtgtctacaccttatgatgtttatcactagttaacacaaatttgaattcccatttttttgttttttctaccttaatttcttaatgcattgtgtttctcat

SEQ ID NO: 18159 - protein, 115 aa, Glycine max
MEKKRKTLLLLLLMAATLFCMPIVSYAVSSVNIQGHLTHSELVKGPNRRLLPFVDCGARCRVRCSLHSRPKICSRACGTCCFRCRCVPPGTYGNREMCGKCYTDMITHGNKPKCP

SEQ ID NO: 18160 - protein, 102 aa, Glycine max
MAATLFCMPIVSYAVSSVNIQGHLTHSELVKGPNRRLLPFVDCGARCRVRCSLHSRPKICSRACGTCCFRCRCVPPGTYGNREMCGKCYTDMITHGNKPKCP

SEQ ID NO: 18161 - protein, 95 aa, Glycine max
MPIVSYAVSSVNIQGHLTHSELVKGPNRRLLPFVDCGARCRVRCSLHSRPKICSRACGTCCFRCRCVPPGTYGNREMCGKCYTDMITHGNKPKCP

SEQ ID NO: 18162 - DNA, 920 bp, Glycine max
attattctttctcccttcttattcttctattcaattctcttcttcctcttccttcacaccccatcttttctctctctctctctctctctcttgtattgtggtttctgcaatggcaacccttgtagacattggggtctcagctgccatcaacattctctcagcctttgccttcttgctggcttttgctcttctgagaatccaacccatcaatgatagaatctactttccaaagtggtatctcagtggagggagaagcagtccaaagaggtctggtgagaattttgtgggaaaatttgtgaacctcaatttcaggacttacctcacttttctgaactggatgccacaggctctcagaatgagtgagtctgagattattagccatgctggccttgactctgctgttttccttagaatctatattcttggcttcaaggtttttgctccaatcacacttgtggcactcttcattcttataccagtcaacgtatcaagtgggacattatctttccttaaaaaggaattggtagtgagtgatattgataaactctcaatatcaaatgttccacctaagtctataagattttttgttcacatagcattggaatacctgttcacaatatggatttgtattctgctgtacaaagaatatgataaaatagcaacgatgagattgcatttcttggcctcacagtggaggcgtgtggaccaattcacagtagttgtcaggaatatccctcatatgtctggtcatacagtatcagatactgtggatagcttctttcaaacaaaccacccagaacattatattggacaccaggctgtctacaatgcaaacaaatttgctaaatttgcaaaaagaagagagagactccaaaattggctggactattaccagcttaagtttgagagacatcctgacc

SEQ ID NO: 18163 - protein, 306 aa, Glycine max
LFFLPSYSSIQFSSSSSFTPHLFSLSLSLSCIVVSAMATLVDIGVSAAINILSAFAFLLAFALLRIQPINDRIYFPKWYLSGGRSSPKRSGENFVGKFVNLNFRTYLTFLNWMPQALRMSESEIISHAGLDSAVFLRIYILGFKVFAPITLVALFILIPVNVSSGTLSFLKKELVVSDIDKLSISNVPPKSIRFFVHIALEYLFTIWICILLYKEYDKIATMRLHFLASQWRRVDQFTVVVRNIPHMSGHTVSDTVDSFFQTNHPEHYIGHQAVYNANKFAKFAKRRERLQNWLDYYQLKFERHPD

SEQ ID NO: 18164 - protein, 270 aa, Glycine max
MATLVDIGVSAAINILSAFAFLLAFALLRIQPINDRIYFPKWYLSGGRSSPKRSGENFVGKFVNLNFRTYLTFLNWMPQALRMSESEIISHAGLDSAVFLRIYILGFKVFAPITLVALFILIPVNVSSGTLSFLKKELVVSDIDKLSISNVPPKSIRFFVHIALEYLFTIWICILLYKEYDKIATMRLHFLASQWRRVDQFTVVVRNIPHMSGHTVSDTVDSFFQTNHPEHYIGHQAVYNANKFAKFAKRRERLQNWLDYYQLKFERHPD

SEQ ID NO: 18165 - protein, 194 aa, Glycine max
MPQALRMSESEIISHAGLDSAVFLRIYILGFKVFAPITLVALFILIPVNVSSGTLSFLKKELVVSDIDKLSISNVPPKSIRFFVHIALEYLFTIWICILLYKEYDKIATMRLHFLASQWRRVDQFTVVVRNIPHMSGHTVSDTVDSFFQTNHPEHYIGHQAVYNANKFAKFAKRRERLQNWLDYYQLKFERHPD

SEQ ID NO: 18166 - DNA, 581 bp, Glycine max
attcactcccactcattacaatgtggaagctgtggacgttactggcggccatcgctgtggcttcagggcagtacgcaccccctgtggcgacctatgcacctccaccacctccggcggtagagtatgggccgcccccaccccctcctgtagtttatggtccaccaccacctccaccacccgtagagtacggacctccaccgccgccaccgccgccgccgccgccaccaccaccaccaccagtagtctatggcccccctccaccacccccagtggtatatggtcctccaccaccaccaccaccagtagtctatggtccaccgcctccacctccggtggtctatggcccccctccaccacccccagtggtatatggtcctccaccaccagtagtatatgcacccccaccaccaccaccacctccacctgtagagtacggcccaccaccagttgtctacggcccacctcctccagaaccccccaaaacgtacggcctgcccactgtctaggctgattggtcagtggacatgtcgaccattgtagataagtcattgttgtacatatgttaaatatagtcagttacc

SEQ ID NO: 18167 - protein, 169 aa, Glycine max
FTPTHYNVEAVDVTGGHRCGFRAVRTPCGDLCTSTTSGGRVWAAPTPSCSLWSTTTSTTRRVRTSTAATAAAAATTTTTSSLWPPSTTPSGIWSSTTTTTSSLWSTASTSGGLWPPSTTPSGIWSSTTSSICTPTTTTTSTCRVRPTTSCLRPTSSRTPQNVRPAHCLG

SEQ ID NO: 18168 - protein, 167 aa, Glycine max
SLPLITMWKLWTLLAAIAVASGQYAPPVATYAPPPPPAVEYGPPPPPPVVYGPPPPPPPVEYGPPPPPPPPPPPPPPPPVVYGPPPPPPVVYGPPPPPPPVVYGPPPPPPVVYGPPPPPPVVYGPPPPVVYAPPPPPPPPPVEYGPPPVVYGPPPPEPPKTYGLPTV

SEQ ID NO: 18169 - protein, 161 aa, Glycine max
MWKLWTLLAAIAVASGQYAPPVATYAPPPPPAVEYGPPPPPPVVYGPPPPPPPVEYGPPPPPPPPPPPPPPPPVVYGPPPPPPVVYGPPPPPPPVVYGPPPPPPVVYGPPPPPPVVYGPPPPVVYAPPPPPPPPPVEYGPPPVVYGPPPPEPPKTYGLPTV

SEQ ID NO: 18170 - DNA, 557 bp, Glycine max
aagaaataaaaagcgcttcattttcttgtcttctggtgcttatataatgacgtactagctagcctcatttttcttcatccttattatttctctctctttctttccctatattcattttctgtgctttgaaagatgactggggttcctcaagaagcacccgtttctcttgatcagctcaagcagatactggatgagtttgcaaaggagagggattgggagcagtatcatagcccaaggaacctccttttggctttggtgggtgaagtgggagaattgtctgagatatttcagtggaaaggggaggttccaaagggtcttccagattggaaagaagaggaaaaggttcatcttggtgaagagctttcagatgtgttgctttaccttgtgaggctctcagacatttgtggtgttgatcttggcaaagctgctctaagaaaggtccaactcaatgccataaaatacccaaaaaaggttaatgatgatgcaattactcaagatgctaattgatgataatccattggtgcctatggttgttgtagttgctattttagggggga

SEQ ID NO: 18171 - protein, 124 aa, Glycine max
MTGVPQEAPVSLDQLKQILDEFAKERDWEQYHSPRNLLLALVGEVGELSEIFQWKGEVPKGLPDWKEEEKVHLGEELSDVLLYLVRLSDICGVDLGKAALRKVQLNAIKYPKKVNDDAITQDAN

SEQ ID NO: 18172 - protein, 65 aa, Glycine max
MSLQRRGIGSSIIAQGTSFWLWWVKWENCLRYFSGKGRFQRVFQIGKKRKRFILVKSFQMCCFTL

SEQ ID NO: 18173 - DNA, 894 bp, Glycine max
aaaaaacacacttctataatggatcggaaaagcctcctctccctcgcaatcatcgccattgtcgtcgccgccgtcggaggacagtctccagcggcgtcgcccaccacttctcctccggctgccaccaccactccctttgcatccccagccacagccccttctaagccaaaatcaccggcgccagttgcttctcccacgtcatcatctccaccagcttcgtcccccaatgctgcaaccgcaaccccacccgcttcatctcccacagtagcatctcctccgtctaaagctgccgctccagctccggtggctacacctcccgcagccactcctcctgcggctacaccaccggcagccacacctcctgccgtgactccagtgagttcgccgccagcgccagttccggtgagttctccacctgctcctgttccggtgagctctccacctgcactcgcaccgacaactcccgcacccgtggtagcacccagcgctgaggttccggcacccgctcccaagtcaaagaagaagacaaagaagagtaagaagcacactgcaccagcaccgtcgccgtcattgcttggccctcccgctcctccggtaggagctccgggatcaagccaggattccatgtctcctggtccagctgtatctgaggacgagagtggagctgaaaccatcaggtgcttgaagaaggtcattggatgcttagccttgagctgggctacccttgttttgttcttctagagaagaggctgaggcttcattgctgctgttacatagtattattgtatcatttattgtcttttttggaccctgtcggggggctaaaattaaatttattaccattgttttcttcaatctcttattactttataattgatgatgtttgttgacact

SEQ ID NO: 18174 - protein, 246 aa, Glycine max
KKHTSIMDRKSLLSLAIIAIVVAAVGGQSPAASPTTSPPAATTTPFASPATAPSKPKSPAPVASPTSSSPPASSPNAATATPPASSPTVASPPSKAAAPAPVATPPAATPPAATPPAATPPAVTPVSSPPAPVPVSSPPAPVPVSSPPALAPTTPAPVVAPSAEVPAPAPKSKKKTKKSKKHTAPAPSPSLLGPPAPPVGAPGSSQDSMSPGPAVSEDESGAETIRCLKKVIGCLALSWATLVLFF

SEQ ID NO: 18175 - protein, 240 aa, Glycine max
MDRKSLLSLAIIAIVVAAVGGQSPAASPTTSPPAATTTPFASPATAPSKPKSPAPVASPTSSSPPASSPNAATATPPASSPTVASPPSKAAAPAPVATPPAATPPAATPPAATPPAVTPVSSPPAPVPVSSPPAPVPVSSPPALAPTTPAPVVAPSAEVPAPAPKSKKKTKKSKKHTAPAPSPSLLGPPAPPVGAPGSSQDSMSPGPAVSEDESGAETIRCLKKVIGCLALSWATLVLFF

SEQ ID NO: 18176 - DNA, 1018 bp, Glycine max
aaaagcgccgaaagaaagaaacctaacaacgccatagcgtttcctaacccatcgtgcgaggtccctcgacctccgcacaaccccaactccaaggggctgtgcctgtcgccgtcgtcttccacgctcatgtcggaacccgacatccacgcgccgccgttcctgctccagcgcccgccgctcctgcagtcggcctcgccactcttcaagcagcgatcgtggtcgccggacgccttccgcgatgaggcgtggctccggcgcaaggggaactgcaagaaccgccgcagcaagagcgtcaccgatgaggacgtggacgagctcaaagcctgcatcgagttgggcttcggattcgattcctcccccgagaacgagctcgatcaacgcctctccgatactttgcccgctctcggcctctactacgccgtcaacaagcgctacaacaactccctcgtcaccaaaaccacgccgtcctcctcctccgccgcctccgattgcgacagcagtccttccccccacggcagtccccactccgccatcttcaccaccggtgataaccctcagacggtgaagacgaggctgaggcagtgggctcaggtagttgcttgtgcggtgcgtcaaagttcagatgtgtgattgggaagcaaatgaagaagcagggttgtcaaacgtaaaccataaaatagaagcaatgtgtgattggtattattataaatgacaacgattccccatcgaaccggaccaaaccgagagcggaccctagttaaccacccaattgtgacggaaccaaactagttagttaattagctatattacattacatgcggggctgtcggcagcgccttgttttgtactgtacttgtccaatgtgatgactaagccaaggtagatctgttctattatagtattatctgtcacatatatgatatatgctagacttacgtacaatttagttttatttgtgtgccgggtgtgtgaaaggaaaaaaaaacaagtcaaaaggtgttctgctgcacttgaatcc

SEQ ID NO: 18177 - protein, 209 aa, Glycine max
KSAERKKPNNAIAFPNPSCEVPRPPHNPNSKGLCLSPSSSTLMSEPDIHAPPFLLQRPPLLQSASPLFKQRSWSPDAFRDEAWLRRKGNCKNRRSKSVTDEDVDELKACIELGFGFDSSPENELDQRLSDTLPALGLYYAVNKRYNNSLVTKTTPSSSSAASDCDSSPSPHGSPHSAIFTTGDNPQTVKTRLRQWAQVVACAVRQSSDV

SEQ ID NO: 18178 - protein, 167 aa, Glycine max
MSEPDIHAPPFLLQRPPLLQSASPLFKQRSWSPDAFRDEAWLRRKGNCKNRRSKSVTDEDVDELKACIELGFGFDSSPENELDQRLSDTLPALGLYYAVNKRYNNSLVTKTTPSSSSAASDCDSSPSPHGSPHSAIFTTGDNPQTVKTRLRQWAQVVACAVRQSSDV

SEQ ID NO: 18179 - protein, 108 aa, Glycine max
MRRGSGARGTARTAAARASPMRTWTSSKPASSWASDSIPPPRTSSINASPILCPLSASTTPSTSATTTPSSPKPRRPPPPPPPIATAVLPPTAVPTPPSSPPVITLRR

SEQ ID NO: 18180 - DNA, 977 bp, Glycine max
actcaaaattaaccacaagcataagcacaagcacaagcacaagcacttctctaattccctttcacactctattacagatttcacaagtgcttacacttcaaatggctttggaagctcttcaatcacccaccacagccactccatcgtttagtccctttgaagaaaccagtctcagttacttagagacaccgtggacgaaaggaaagcgttctaagcgtagccgcacggagcaacaactgcaacacccttcatgcaccgaggaagagtacctcgctctttgtctcatcatgctcgctcgcggcggcgccggcagtgtctccaccgccaaacccgctgtctccgacaacaattctgcgccgctatccgccgccaaactgagctacaaatgttcggtttgcaacaaagccttctcctcttaccaagcactcggaggacacaaggccagccaccggaagctcgccggagaaaaccacccgacctcctccgccgtgacgacgagttcggcgtcgaacggtggtggtaggacccacgagtgctccatctgccacaagacgttttcgacaggacaggccttgggaggacacaaacgttgtcactacgaaggcggtaacagcgccgtaaccgcctctgagggagtggggtccactcacacaggaagccaccgcgatttcgatctcaacctcccggcttttccggacttctcagcaaggttcttcgtcgatgacgaggttaccagtcctcatccatccaagaagtcccgtttcaatttgaccatacccaagattgaaatccctcaatactgatccatagatccaaaaaaattattcagtgtttttttatatatttttttaagttatttgggattaatttgttcttgtacatatatagtacttgggccttattcgctagttttagcttttagattgtagtatacttttgacagtggtgattcaattcaattcatttatttttatttt

SEQ ID NO: 18181 - protein, 266 aa, Glycine max
SKLTTSISTSTSTSTSLIPFHTLLQISQVLTLQMALEALQSPTTATPSFSPFEETSLSYLETPWTKGKRSKRSRTEQQLQHPSCTEEEYLALCLIMLARGGAGSVSTAKPAVSDNNSAPLSAAKLSYKCSVCNKAFSSYQALGGHKASHRKLAGENHPTSSAVTTSSASNGGGRTHECSICHKTFSTGQALGGHKRCHYEGGNSAVTASEGVGSTHTGSHRDFDLNLPAFPDFSARFFVDDEVTSPHPSKKSRFNLTIPKIEIPQY

SEQ ID NO: 18182 - protein, 233 aa, Glycine max
MALEALQSPTTATPSFSPFEETSLSYLETPWTKGKRSKRSRTEQQLQHPSCTEEEYLALCLIMLARGGAGSVSTAKPAVSDNNSAPLSAAKLSYKCSVCNKAFSSYQALGGHKASHRKLAGENHPTSSAVTTSSASNGGGRTHECSICHKTFSTGQALGGHKRCHYEGGNSAVTASEGVGSTHTGSHRDFDLNLPAFPDFSARFFVDDEVTSPHPSKKSRFNLTIPKIEIPQY

SEQ ID NO: 18183 - protein, 171 aa, Glycine max
MLARGGAGSVSTAKPAVSDNNSAPLSAAKLSYKCSVCNKAFSSYQALGGHKASHRKLAGENHPTSSAVTTSSASNGGGRTHECSICHKTFSTGQALGGHKRCHYEGGNSAVTASEGVGSTHTGSHRDFDLNLPAFPDFSARFFVDDEVTSPHPSKKSRFNLTIPKIEIPQY

SEQ ID NO: 18184 - DNA, 843 bp, Glycine max
aattggatttgaaattgaagttgaccaagccacttgaggatagctttgcatacttttggtgtttgaagagctcttccatctgccaaaatgaagggacgtgtaagatggaatgaagataatattggagaaattgaagcaaacaagcccatgaggcaaaaaatcactgaacctaagactccatatcatcctatgcttgatgatgacagttctccatcccccgtgctaggagattttgacggatataatggtgataaaaatctctcaccaaatgctgaacaaactggttataataatggggcatattgtagcagcaaaggaactagacaatctgacggctggacatcatctgaggatgaggcagaagaaactgaagaggatgaggaagatagaagtttgagtttcagagagcacagaaaggcccactataatgaattccgcaaagtcaaagagctgcaacaaaaggcttctctggaggatggaagtgatgaggataatcatgctgaggttgccaacggggagaagaaaaatgactcatcttctccaacgaatggtacgtgaaggagaccaacactgagaagaaaaaatgtctcttccaatcaatgcttcctacacgatcaacaaataaaacccactccagtttcatcaacctttgtgtatggcggggatagaaacaacagaaggatttactgtatttattgtgtcttttgtgtgtaaaatatcttttctttttccacctggtatgtacatctgaacttgcatgattcgtgaagtctcttgtaatatgccaaattagattttttttggcaagcaacaaacattccggttataagagtgatgatttcg

SEQ ID NO: 18185 - protein, 156 aa, Glycine max
MKGRVRWNEDNIGEIEANKPMRQKITEPKTPYHPMLDDDSSPSPVLGDFDGYNGDKNLSPNAEQTGYNNGAYCSSKGTRQSDGWTSSEDEAEETEEDEEDRSLSFREHRKAHYNEFRKVKELQQKASLEDGSDEDNHAEVANGEKKNDSSSPTNGT

SEQ ID NO: 18186 - protein, 136 aa, Glycine max
MRQKITEPKTPYHPMLDDDSSPSPVLGDFDGYNGDKNLSPNAEQTGYNNGAYCSSKGTRQSDGWTSSEDEAEETEEDEEDRSLSFREHRKAHYNEFRKVKELQQKASLEDGSDEDNHAEVANGEKKNDSSSPTNGT

SEQ ID NO: 18187 - protein, 122 aa, Glycine max
MLDDDSSPSPVLGDFDGYNGDKNLSPNAEQTGYNNGAYCSSKGTRQSDGWTSSEDEAEETEEDEEDRSLSFREHRKAHYNEFRKVKELQQKASLEDGSDEDNHAEVANGEKKNDSSSPTNGT

SEQ ID NO: 18188 - DNA, 1061 bp, Glycine max
aacattctatgttctgtgccattcctccctctcacttcaccccaccactcaaacaaaggaacccatctcttcaccgtcttccttctcctagaaagcccaaagcctccaccctaagaatttcctctcttggcgctggtttcttcgatgacatcgtccaaattgctcataacaaggttctgattgcagctggtgtctctgtggcgattggtcagctttctaagccattcacttctgtttttctgtatggcaaagggtttgatatcagagcagttgttcaagctggagggttcccttcatcacactcttctgcaacagtggctagtgcaacattatttggccttgagagaggcttctccgatcctatttttggtcttgcagttgtgtatgccggtctcattatgtatgatgctcagggtgtaagaagagaagtagggattcatgccaagacattgaacaaaatactgctccaaatgcaagccaactctttacattccaaagatagagataatttgattaactctcaaccaggactatcaaaacctctaaaagttggtcttgataagtcccttttgtcccaagaagccacttctttggaaccacaagaaacaaatagaggtctattggttaaatcaggaagcaaaataaggcaaacagatgcagatgaaatctcatcaaagttggccattgatggtataccccaactaaaagaatctattggtcatacagagattgaagtcatagctggtgctttactaggctttttggtggctttggctgtgtataatttcaagtaaaatcttgctttttgatgaataatttcatagcatatcttacaacaagtagattattaaattgaaaatcaagctgagttggaaattaaaaggccaagttgacaacaggtttaggttatcatttagcaaaacatttaaggtttgtatatgacctaacagaacaggacattagttaaagatgaaaacccatccaaacagggggttacacacgtacttctcttttcctatgtattgcggtgccttatataaaatttatcaattattgatttt

SEQ ID NO: 18189 - protein, 263 aa, Glycine max
HSMFCAIPPSHFTPPLKQRNPSLHRLPSPRKPKASTLRISSLGAGFFDDIVQIAHNKVLIAAGVSVAIGQLSKPFTSVFLYGKGFDIRAVVQAGGFPSSHSSATVASATLFGLERGFSDPIFGLAVVYAGLIMYDAQGVRREVGIHAKTLNKILLQMQANSLHSKDRDNLINSQPGLSKPLKVGLDKSLLSQEATSLEPQETNRGLLVKSGSKIRQTDADEISSKLAIDGIPQLKESIGHTEIEVIAGALLGFLVALAVYNFK

SEQ ID NO: 18190 - protein, 261 aa, Glycine max
MFCAIPPSHFTPPLKQRNPSLHRLPSPRKPKASTLRISSLGAGFFDDIVQIAHNKVLIAAGVSVAIGQLSKPFTSVFLYGKGFDIRAVVQAGGFPSSHSSATVASATLFGLERGFSDPIFGLAVVYAGLIMYDAQGVRREVGIHAKTLNKILLQMQANSLHSKDRDNLINSQPGLSKPLKVGLDKSLLSQEATSLEPQETNRGLLVKSGSKIRQTDADEISSKLAIDGIPQLKESIGHTEIEVIAGALLGFLVALAVYNFK

SEQ ID NO: 18191 - protein, 131 aa, Glycine max
MYDAQGVRREVGIHAKTLNKILLQMQANSLHSKDRDNLINSQPGLSKPLKVGLDKSLLSQEATSLEPQETNRGLLVKSGSKIRQTDADEISSKLAIDGIPQLKESIGHTEIEVIAGALLGFLVALAVYNFK

SEQ ID NO: 18192 - DNA, 513 bp, Glycine max
aacagatagaacccatacaagagaaaaaacactcgtagacgaatgacttcttcagtaaccactttagccctaacactagttctgattgtccacctcacgccggaaatagccgaagctcgccatctcaatgatcagaagcctaccgatgaaatgaaatacctcttcccaccggggttacccttcacaggcgttcctccgttaccgtcactttttcctccgttccccggaaacgttccccgttttccgtttccgttaccgtcacagtcatcacctccggcaccacttggtccacttcccagtttccctggcgttaactttcctcccctgccattgctcacgccgccacctgagtgattctataggttaacgctgccgctattatgataattatcccgttggaataaactatgtacgtgtagcgtacacatggtactatggatcataatcatgtgtactcgatgatataaaatattagtgttttatgaaagtttaataaagatgttagtgtaacac

SEQ ID NO: 18193 - protein, 103 aa, Glycine max
MTSSVTTLALTLVLIVHLTPEIAEARHLNDQKPTDEMKYLFPPGLPFTGVPPLPSLFPPFPGNVPRFPFPLPSQSSPPAPLGPLPSFPGVNFPPLPLLTPPPE

SEQ ID NO: 18194 - protein, 67 aa, Glycine max
MKYLFPPGLPFTGVPPLPSLFPPFPGNVPRFPFPLPSQSSPPAPLGPLPSFPGVNFPPLPLLTPPPE

SEQ ID NO: 18195 - DNA, 1072 bp, Glycine max
gaaacggaataattcgatacccctctcgtctcgtaactaaccatggcagcgttccgatggaagagcttcgaggagaatgaggatcgcccagccaagcctcgtcattttggcgtcaccgagattcaaagcccccactgcactctcttctcccacaaccttcttcaggatatttttgaatctatgggagactatgtagatgggttaaagttttctggaggttctcacagcatgatgccaaaggctactatcaagcaaatcattgacatggcccatcagcatgacgtgtatgttagcacgggtgattgggctgagcacatgattagcaaaagtccatcaggtttcaaggaatatgtagaggaatgcaagcagttggggtttgacacaattgagctcaatgtgggatcgcttgagattcctgaagaaacctttttgagatttgtccgcttggtcaaaagtggtggtctcaaagctaagcctcattttcaagtgaagtttaatgagtctgatattcccaaaggtggtgacagggcttatggggcttatattccccctgtacctagatcatttgaattggtagaagatgtgaatctcttgatcagaagggctgagagatgtctggaagcaggtgcagacatgataatgattgatgctgatgatgtcagcaaacatgctgataacatgcgtgcagacatcattgccaaaatcatagggcgccttggtattgagaagactatgtttgaagcatcaaatcagagaatatcggagtggttcatcaaacaatatggtccaaaggtgaacctctttattgatcattcgaacgtggtggatgtggagtgcctcagggggcgcaacttgggtagaaatcttgcttctttccttggtgcttcagatttcctgttctgaagtgagggaattttcgtatagcaccaagtggggttgatttgtttgtgcataatgcaaagacttgaggtttgccatgtgtgttacagttagtgtgttacatatttcctttagtgattgaagattggaaaattttaaatggagagactgaaataaatgaaacatatttcat

SEQ ID NO: 18196 - protein, 286 aa, Glycine max
MAAFRWKSFEENEDRPAKPRHFGVTEIQSPHCTLFSHNLLQDIFESMGDYVDGLKFSGGSHSMMPKATIKQIIDMAHQHDVYVSTGDWAEHMISKSPSGFKEYVEECKQLGFDTIELNVGSLEIPEETFLRFVRLVKSGGLKAKPHFQVKFNESDIPKGGDRAYGAYIPPVPRSFELVEDVNLLIRRAERCLEAGADMIMIDADDVSKHADNMRADIIAKIIGRLGIEKTMFEASNQRISEWFIKQYGPKVNLFIDHSNVVDVECLRGRNLGRNLASFLGASDFLF

SEQ ID NO: 18197 - protein, 240 aa, Glycine max
MGDYVDGLKFSGGSHSMMPKATIKQIIDMAHQHDVYVSTGDWAEHMISKSPSGFKEYVEECKQLGFDTIELNVGSLEIPEETFLRFVRLVKSGGLKAKPHFQVKFNESDIPKGGDRAYGAYIPPVPRSFELVEDVNLLIRRAERCLEAGADMIMIDADDVSKHADNMRADIIAKIIGRLGIEKTMFEASNQRISEWFIKQYGPKVNLFIDHSNVVDVECLRGRNLGRNLASFLGASDFLF

SEQ ID NO: 18198 - protein, 224 aa, Glycine max
MMPKATIKQIIDMAHQHDVYVSTGDWAEHMISKSPSGFKEYVEECKQLGFDTIELNVGSLEIPEETFLRFVRLVKSGGLKAKPHFQVKFNESDIPKGGDRAYGAYIPPVPRSFELVEDVNLLIRRAERCLEAGADMIMIDADDVSKHADNMRADIIAKIIGRLGIEKTMFEASNQRISEWFIKQYGPKVNLFIDHSNVVDVECLRGRNLGRNLASFLGASDFLF

SEQ ID NO: 18199 - DNA, 1020 bp, Glycine max
caaactcaatcaactcgatcaactcaacacaaaccaaaactcaagctaaaattctcactctctctctcatctcgagatcatagtatcatattcaatatcatttcataccaaacacatggctttggaagctctcaactcaccaacaacaaccgctccatcttttccctttgacgacccaactattccatgggcgaaacgaaaacgttcaaagcgttctcgcgaccatccttctgaagaagagtacctcgccctctgcctcatcatgctcgctcgcggcggcaccaccaccgtcaacaaccgccacgtcagccctccaccgccacagccacagccacagccgacaccagatccttccaccaagctcagttacaaatgctccgtttgcgacaagagcttcccctcttaccaagcgctcggtggacacaaggccagtcaccggaaactcgccgccgccgccgaagaccaaccccccagcaccaccacttcctccgccgccgccaccagctccgcctccggaggtaaggcccatgagtgctccatttgccacaaatccttccccaccggacaggcccttggcggacacaaacgttgtcactacgaaggtaacggtaacggaaataacaacaacagtaacagcgttgtcaccgtcgcctcggaaggcgtggggtccacccacactgtcagtcacggccaccaccgcgacttcgatctcaacatcccggcctttccggatttttcgaccaaggtcggagaagacgaggttgagagccctcaccctgtcatgaagaagcctcgcctcttcgtcattcccaagatcgaaatcccccaatttcaatgaactcattgaatttttagtttatttttcgactatatattttggagaattttgagagttactataatttgattttgtacatagtacttggaagttttgttggaccgtaccggacccagttctctggttgaggttgtactttcacaacagtggcagatttgcaattcaattcaatttatttgttt

SEQ ID NO: 18200 - protein, 240 aa, Glycine max
MALEALNSPTTTAPSFPFDDPTIPWAKRKRSKRSRDHPSEEEYLALCLIMLARGGTTTVNNRHVSPPPPQPQPQPTPDPSTKLSYKCSVCDKSFPSYQALGGHKASHRKLAAAAEDQPPSTTTSSAAATSSASGGKAHECSICHKSFPTGQALGGHKRCHYEGNGNGNNNNSNSVVTVASEGVGSTHTVSHGHHRDFDLNIPAFPDFSTKVGEDEVESPHPVMKKPRLFVIPKIEIPQFQ

SEQ ID NO: 18201 - protein, 191 aa, Glycine max
MLARGGTTTVNNRHVSPPPPQPQPQPTPDPSTKLSYKCSVCDKSFPSYQALGGHKASHRKLAAAAEDQPPSTTTSSAAATSSASGGKAHECSICHKSFPTGQALGGHKRCHYEGNGNGNNNNSNSVVTVASEGVGSTHTVSHGHHRDFDLNIPAFPDFSTKVGEDEVESPHPVMKKPRLFVIPKIEIPQFQ

SEQ ID NO: 18202 - DNA, 856 bp, Glycine max
caacccaattaatctttgttttcaattccttatttcaataattctctttctccttcttctataactctcctctgtttactctgtttttttcacaaaacaacatggctgcatacagagaacccatgaacatgaacatgagcgacagagccccggtttctccgcagcaaccacactcgccgtggcattctccggttccgtaccttttcggtggtttagcagcgatgttgggtctcatagccttcgctctgttgatccttgcatgttcctattggaagctctccgggtacctcgaagggaacggggaaacagaacgggacctggaagctggcgaaacggaacaggaccagaaacctgcgaaaccgtacgaggagaagatcttggtgatcatggccgggcaagagaagccaacattcttggcaactccgagcgtgtcttcgagttgcagcactagcaggacctcttcgttcggcgacaacactagcacatgcacctgcgaggagaaccgaaaatcgcttgaaatggccgtcaaagagggaagcgctgccgggactgggaccaccgaaaccgcacacacctcatcagatcagaacctttgaaacatagtcacatgttgggggttttgttttgtagttaggttgctttcgtgaaaaagcaaagctcgtgacacctgggtgtctctctaggttgcatgttcaacaattggtgctgatatggggattctcttctcttctcttctctttttattttttcttttttctttttccttcttcttctctttcgattctcgtctatacattatttcgggaatgtaaattctttgaggtggaattgagacatttgctgtttcacaaatcac

SEQ ID NO: 18203 - protein, 164 aa, Glycine max
MAAYREPMNMNMSDRAPVSPQQPHSPWHSPVPYLFGGLAAMLGLIAFALLILACSYWKLSGYLEGNGETERDLEAGETEQDQKPAKPYEEKILVIMAGQEKPTFLATPSVSSSCSTSRTSSFGDNTSTCTCEENRKSLEMAVKEGSAAGTGTTETAHTSSDQNL

SEQ ID NO: 18204 - protein, 157 aa, Glycine max
MNMNMSDRAPVSPQQPHSPWHSPVPYLFGGLAAMLGLIAFALLILACSYWKLSGYLEGNGETERDLEAGETEQDQKPAKPYEEKILVIMAGQEKPTFLATPSVSSSCSTSRTSSFGDNTSTCTCEENRKSLEMAVKEGSAAGTGTTETAHTSSDQNL

SEQ ID NO: 18205 - protein, 155 aa, Glycine max
MNMSDRAPVSPQQPHSPWHSPVPYLFGGLAAMLGLIAFALLILACSYWKLSGYLEGNGETERDLEAGETEQDQKPAKPYEEKILVIMAGQEKPTFLATPSVSSSCSTSRTSSFGDNTSTCTCEENRKSLEMAVKEGSAAGTGTTETAHTSSDQNL

SEQ ID NO: 18206 - DNA, 949 bp, Glycine max
ctttgcgtgcccatcaccttctccactcttcactaccctcaaaacccttttcctcttaccacttctcatgtggccaccgtggctcaactcaccgagcgggttccgcaacactccaccgccctcaccctctccgtcgtcatcgccatcgcattctcgaactcgctccttcagcttctcctgctcctccttcaaagatatccagagcctcttccaagacaaccccgaatccgaacccgccgctcccaaatctccgtctctcttccgccgcgtccggatctccaccgccgtgctccgcgcctggggggcctcacgcgccaccgttcccgccgcactcccgcccggcctcgaccaaggcgtcgtcgtctactttacctccctccgtgttgttcgccgcacattcgacgactgccgcgccgtccgatccatcctgcgcggcctccgcgtcgccgtcgacgagcgcgacgtctccatcgacgaccgcttccgcgacgagctccacgccgtcctcggctgccgcagcaacctcgccctgccgcgcgtattcgtcggtggcatctacgttggcggagctgacgacgtccgccagctccacgagagcggcgagctccaccggctcatcgaacgcctcccgcgctccaaccagaacaacgcctgcgattcttgcggaggcttcagattcgtagtgtgcgatgagtgcaacggaagccacaaagtcttcacagagaaaaacggatttagaagctgttcttcttgcaatgccaacggcttgattcgttgccctgcatgcttcttcgtgctcccgcgccacaccagatagctaccctacccctcagttagttacagctcacagacaactcaatgatgaaatttaatcaatcatatttatgttgataaataaacacttcctcactttcatttcgtttaggttactacattacatatattaatt

SEQ ID NO: 18207 - protein, 271 aa, Glycine max
FACPSPSPLFTTLKTLFLLPLLMWPPWLNSPSGFRNTPPPSPSPSSSPSHSRTRSFSFSCSSFKDIQSLFQDNPESEPAAPKSPSLFRRVRISTAVLRAWGASRATVPAALPPGLDQGVVVYFTSLRVVRRTFDDCRAVRSILRGLRVAVDERDVSIDDRFRDELHAVLGCRSNLALPRVFVGGIYVGGADDVRQLHESGELHRLIERLPRSNQNNACDSCGGFRFVVCDECNGSHKVFTEKNGFRSCSSCNANGLIRCPACFFVLPRHTR

SEQ ID NO: 18208 - protein, 249 aa, Glycine max
MWPPWLNSPSGFRNTPPPSPSPSSSPSHSRTRSFSFSCSSFKDIQSLFQDNPESEPAAPKSPSLFRRVRISTAVLRAWGASRATVPAALPPGLDQGVVVYFTSLRVVRRTFDDCRAVRSILRGLRVAVDERDVSIDDRFRDELHAVLGCRSNLALPRVFVGGIYVGGADDVRQLHESGELHRLIERLPRSNQNNACDSCGGFRFVVCDECNGSHKVFTEKNGFRSCSSCNANGLIRCPACFFVLPRHTR

SEQ ID NO: 18209 - protein, 226 aa, Glycine max
LRAHHLLHSSLPSKPFSSYHFSCGHRGSTHRAGSATLHRPHPLRRHRHRILELAPSASPAPPSKISRASSKTTPNPNPPLPNLRLSSAASGSPPPCSAPGGPHAPPFPPHSRPASTKASSSTLPPSVLFAAHSTTAAPSDPSCAASASPSTSATSPSTTASATSSTPSSAAAATSPCRAYSSVASTLAELTTSASSTRAASSTGSSNASRAPTRTTPAILAEASDS

SEQ ID NO: 18210 - DNA, 903 bp, Glycine max
agcattagcagcaacgccaccaccaacactcacatcaagaaaacctagggtttgggtttgcggcatgagtcgccgtggcatggacgacgacgatgaggaggagtacgaggaggaggacgagcaggtcgccgacttcgacgaggaggaggaggaggacaaccaccgaggacgcgggggtggtggcggcaggaagaggagaagatctggattcattgacgacgacgccgaagaggtcgatgaggacgaggacgaggaggacgacgatgacgaggatttcgatggacggggtggtggtggcggtcggaggcgccagtacaagaaggtttccgcttctaatttcttcgacgaagaggccgtggtggatagtgatgaggaagaggaagaagaggagggagaagacggcaattgcgggtgatgtggctgcaattgcagtcgtgatgggattgcggagtgtcgaaataccttgacgctgcagatcgcaatttaacaccatgggcaagaggatcctggaattgaaatttgtgggatgctcttttgttttattgtcatggctcttgtgggagtgggatttgacattgacagccatactgggatttaaagttacagttgcagtacatgttgctggctactgtaatctgtaccctttgtaatattgttgtgacatttttctgcaattaaggtgttgtggtctgctattcgatccttggtttggatcatgttcatgcttaactgactagcataaaagttggatgatggatcccatcaacactgtttaaaaatttgaaaggaactggcaagaaattgtgtcaagtgaatgttattgtgaccgggaaggactactttgttatttgaggtgatgtgtcactagcaataattatgaatataatgtcatgtcttctagtc

SEQ ID NO: 18211 - protein, 137 aa, Glycine max
ALAATPPPTLTSRKPRVWVCGMSRRGMDDDDEEEYEEEDEQVADFDEEEEEDNHRGRGGGGGRKRRRSGFIDDDAEEVDEDEDEEDDDDEDFDGRGGGGGRRRQYKKVSASNFFDEEAVVDSDEEEEEEEGEDGNCG

SEQ ID NO: 18212 - protein, 124 aa, Glycine max
MRRSTRRRTSRSPTSTRRRRRTTTEDAGVVAAGRGEDLDSLTTTPKRSMRTRTRRTTMTRISMDGVVVAVGGASTRRFPLLISSTKRPWWIVMRKRKKRREKTAIAGDVAAIAVVMGLRSVEIP

SEQ ID NO: 18213 - protein, 116 aa, Glycine max
MSRRGMDDDDEEEYEEEDEQVADFDEEEEEDNHRGRGGGGGRKRRRSGFIDDDAEEVDEDEDEEDDDDEDFDGRGGGGGRRRQYKKVSASNFFDEEAVVDSDEEEEEEEGEDGNCG

SEQ ID NO: 18214 - DNA, 862 bp, Glycine max
tgaaatttctcaaggtcgcataccaaatgatgttgacgaggttaagactgaagttgacgaactaggtgataaagttttgtctacttggagtgtactagatattgggactggcaatggtttacttctccaagaattagctaaacaagggttctctgatttaactgggactgattatagtgaaagggccatcaaccttgctcaaagccttgctaatcgtgatggattttccaatgtcaaatttttggttgatgatgtccttgagacaaagttggaacaagagtttcgacttgtcatggataaagggacgctagatgctattggattgcatcctgatggtcctgtcaagagaatgatgtattgggattctgtttcgaagttggttgctcctggtggaatacttgtggtcacatcatgtaacagtacaaaggatgagttggtacaagaagtggaaagtttcaaccaacgaaaaattgctactgcacaggaacttgaggcactgaagggtgaggagccatgcagagagcccccatttcagtatgtaagtcatgtccgcacatatccaacattcatgtttggtggatccgtaggctcccgtgttgctaccgtggcattcattcggaaatgaaaatgtctgtcatttgctgttatgatttaggtctctggtccaatgggtttgaagttgtgtgtgcgtataggtagatgcatgttcccaactgttgtgtcgaaccgtaaatatttttttgcgatggtttatgtgaagtgttccattaacattttcctttctttcgggtgaacagttgttctcattcggaacttataatttatagatagtaaggtaaaaacacatttagttcagcgtagc

SEQ ID NO: 18215 - protein, 207 aa, Glycine max
EISQGRIPNDVDEVKTEVDELGDKVLSTWSVLDIGTGNGLLLQELAKQGFSDLTGTDYSERAINLAQSLANRDGFSNVKFLVDDVLETKLEQEFRLVMDKGTLDAIGLHPDGPVKRMMYWDSVSKLVAPGGILVVTSCNSTKDELVQEVESFNQRKIATAQELEALKGEEPCREPPFQYVSHVRTYPTFMFGGSVGSRVATVAFIRK

SEQ ID NO: 18216 - protein, 110 aa, Glycine max
MDKGTLDAIGLHPDGPVKRMMYWDSVSKLVAPGGILVVTSCNSTKDELVQEVESFNQRKIATAQELEALKGEEPCREPPFQYVSHVRTYPTFMFGGSVGSRVATVAFIRK

SEQ ID NO: 18217 - DNA, 453 bp, Glycine max
cttttaaacccttgtttcactttccgtttcatctttcttttttgttgctcagcaatccctcccattttttttccttcaatctgcttcaatggaaggtttggcttccctcaaggctccctttccggccaccccatttctctcttccagacccagaacctctattcttccatcccaagccagttttcgtaaaagaagctcctttttatccttttctgttcatgcccaggtggagtctgatgatggttcagctgtagtagccacatctggtgaatctgtgacagaggttctgaaaattaaggagtgggaggtgggaatgttccaaaatgaggttgcagctagccagggtataagaataaggagaaggcctccatctggaccccctttgcattatgtaggaccatttcaattcaggttgcagaatgagggcaatacgccccggaacattttggaaga

SEQ ID NO: 18218 - protein, 121 aa, Glycine max
MEGLASLKAPFPATPFLSSRPRTSILPSQASFRKRSSFLSFSVHAQVESDDGSAVVATSGESVTEVLKIKEWEVGMFQNEVAASQGIRIRRRPPSGPPLHYVGPFQFRLQNEGNTPRNILE

SEQ ID NO: 18219 - protein, 83 aa, Glycine max
FKPLFHFPFHLSFLLLSNPSHFFSFNLLQWKVWLPSRLPFRPPHFSLPDPEPLFFHPKPVFVKEAPFYPFLFMPRWSLMMVQL

SEQ ID NO: 18220 - protein, 62 aa, Glycine max
LLNPCFTFRFIFLFCCSAIPPIFFPSICFNGRFGFPQGSLSGHPISLFQTQNLYSSIPSQFS

SEQ ID NO: 18221 - DNA, 659 bp, Glycine max
acggagccaaacacgccaaccagacttgttccgacaccaacagaagagcaaatctaacaccctctccggctaaatgctcccttcccgggagcctaacggcaacaacgatggcgcaaaacgtgaatcgtgatcgtcatcactcttttttgctacactctcattttttaatcactcagaatggcggtgtggcgacgaacgctggtgcggcggtggtgaagagggtgctgaagcgctttgaagagcttctgatggtttgaaacaaagcgatagagggaaaagacgcatggtactgaacgcatctagaacctttgttggttcacaacatcgaaatgggactccccgaagcagtaaaggaatttcttggcgatttggtctacgagccttgtgtcgctgcttctttcttgagtttggagcatccaaagcttcgaacttttctcgcacaggtttgtttgccggcgatcttttcgacggagattatggggacgaggttcgaggagtttccgaaggagttctggctttttttttgcaatattagaagttacaatgttttccataacttttacaaattcttgaaagcagtgtgaaattaattattataaatcttgttggcgggttgggttgatttagaaatatatgaagggtatggtattgctattggc

SEQ ID NO: 18222 - protein, 84 aa, Glycine max
GAKHANQTCSDTNRRANLTPSPAKCSLPGSLTATTMAQNVNRDRHHSFLLHSHFLITQNGGVATNAGAAVVKRVLKRFEELLMV

SEQ ID NO: 18223 - protein, 84 aa, Glycine max
MGLPEAVKEFLGDLVYEPCVAASFLSLEHPKLRTFLAQVCLPAIFSTEIMGTRFEEFPKEFWLFFCNIRSYNVFHNFYKFLKAV

SEQ ID NO: 18224 - protein, 83 aa, Glycine max
MVLNASRTFVGSQHRNGTPRSSKGISWRFGLRALCRCFFLEFGASKASNFSRTGLFAGDLFDGDYGDEVRGVSEGVLAFFLQY

SEQ ID NO: 18225 - DNA, 972 bp, Glycine max
actcaccacttcaaaacactcataacacaaagcacaaagcaaagctcatccttgagttaaaaaatggcagcagcttcttccatggctctctcatccccatccttggctggcaaggccgtgaagctgggcccatcagccccagaagtgggaagggtgagcatgaggaagaccgtcaccaagcaggtctcctcaggaagcccatggtacggcccagaccgagtcaagtacttgggcccattctctggcgagcccccgtcctacctaaccggtgagttcccaggcgactacggctgggacactgctgggctttccgcagacccagaaaccttcgccaagaaccgtgaactcgaagtgatccactccaggtgggccatgctcggagccttgggctgcgtcttcccggagttgctgtcccgcaacggggtgaagttcggagaagccgtgtggttcaaggccgggtcccagatcttcagcgagggtgggctcgactacttgggcaacccaagcctgatccacgcccagagcatcctcgccatctgggccacacaagttatcctaatgggtgccgttgaaggttaccgtattgctggtggccccctcggtgaggtcactgacccaatctacccaggtggcagcttcgacccattgggccttgctgatgacccagaggcttttgctgagcttaaggtgaaggaactcaagaacggacgattggccatgttctctatgtttggcttctttgttcaggccattgtcaccggaaagggtccattggagaacctcgccgatcaccttgctgaccctgtcaacaacaacgcctgggcctatgccaccaacttcgtccccggaaagtgagcgtcaaagaacgaaatgacttttgagagtttttagatttgtgtttggtgaagtacttcagataatgtgaattatcttgtgtatccgaatccaacttaatgttacttgctttttact

SEQ ID NO: 18226 - protein, 263 aa, Glycine max
MAAASSMALSSPSLAGKAVKLGPSAPEVGRVSMRKTVTKQVSSGSPWYGPDRVKYLGPFSGEPPSYLTGEFPGDYGWDTAGLSADPETFAKNRELEVIHSRWAMLGALGCVFPELLSRNGVKFGEAVWFKAGSQIFSEGGLDYLGNPSLIHAQSILAIWATQVILMGAVEGYRIAGGPLGEVTDPIYPGGSFDPLGLADDPEAFAELKVKELKNGRLAMFSMFGFFVQAIVTGKGPLENLADHLADPVNNNAWAYATNFVPGK

SEQ ID NO: 18227 - protein, 257 aa, Glycine max
MALSSPSLAGKAVKLGPSAPEVGRVSMRKTVTKQVSSGSPWYGPDRVKYLGPFSGEPPSYLTGEFPGDYGWDTAGLSADPETFAKNRELEVIHSRWAMLGALGCVFPELLSRNGVKFGEAVWFKAGSQIFSEGGLDYLGNPSLIHAQSILAIWATQVILMGAVEGYRIAGGPLGEVTDPIYPGGSFDPLGLADDPEAFAELKVKELKNGRLAMFSMFGFFVQAIVTGKGPLENLADHLADPVNNNAWAYATNFVPGK

SEQ ID NO: 18228 - protein, 231 aa, Glycine max
MRKTVTKQVSSGSPWYGPDRVKYLGPFSGEPPSYLTGEFPGDYGWDTAGLSADPETFAKNRELEVIHSRWAMLGALGCVFPELLSRNGVKFGEAVWFKAGSQIFSEGGLDYLGNPSLIHAQSILAIWATQVILMGAVEGYRIAGGPLGEVTDPIYPGGSFDPLGLADDPEAFAELKVKELKNGRLAMFSMFGFFVQAIVTGKGPLENLADHLADPVNNNAWAYATNFVPGK

SEQ ID NO: 18229 - DNA, 694 bp, Glycine max
attcacaattcacaacaacacacaacatattattaagacacaccccaaaccaaaccacttcacacagaacacatatccattggtgaaggagtatcatgggtgaacaattagggctactaaaagtcatggttgtgcaagggaaaaggttggtgatccgggatttcaagaccagtgatccttatgtagtactcaaactagggaatcagactgcaaagaccaaggtaattaatagctgcttgaatcctgtttggaatgaagagctgaatttcactctgacagaaccattgggagttctgaatttggaagtgtttgataaagatcttttgaaggctgatgacaagatgggaaatgctttcttgaaccttcaaccaatagtctctgcagccagattaagagacatcttaagagtgtcctctggtgagacaacattaaggaaggtcatacctgatggtgaaaactgtcttgtccgtgaaagcagtatcaactgtgtcaatggtgaggtggtgcagaatgtttggttaaggcttcgtggagttgagtctggggaactagaattgactatcaagttggccacacctgttgctcctgcaatatagtgcaacaattgcatgtgtcataagtgtagatgtctaactattgcatgagtcacttttgccttttattttcaaatttaaatttctttctttttagttcc

SEQ ID NO: 18230 - protein, 166 aa, Glycine max
MGEQLGLLKVMVVQGKRLVIRDFKTSDPYVVLKLGNQTAKTKVINSCLNPVWNEELNFTLTEPLGVLNLEVFDKDLLKADDKMGNAFLNLQPIVSAARLRDILRVSSGETTLRKVIPDGENCLVRESSINCVNGEVVQNVWLRLRGVESGELELTIKLATPVAPAI

SEQ ID NO: 18231 - protein, 156 aa, Glycine max
MVVQGKRLVIRDFKTSDPYVVLKLGNQTAKTKVINSCLNPVWNEELNFTLTEPLGVLNLEVFDKDLLKADDKMGNAFLNLQPIVSAARLRDILRVSSGETTLRKVIPDGENCLVRESSINCVNGEVVQNVWLRLRGVESGELELTIKLATPVAPAI

SEQ ID NO: 18232 - protein, 84 aa, Glycine max
MGNAFLNLQPIVSAARLRDILRVSSGETTLRKVIPDGENCLVRESSINCVNGEVVQNVWLRLRGVESGELELTIKLATPVAPAI

SEQ ID NO: 18233 - DNA, 1058 bp, Glycine max
atatccttctttgcttggaatggaacaagctgggaagcaaggaattatggtggcgtctcagagtcaaaaccccattgagcaaatccaagcgcgcttcaaggacttggaaactggattccgcctctggctctccaagcagtccctccccgtcgaggccgccgtcgtcaccaccaccagcgccgcccagggcgccgccatcggcgccttcatgggcaccctcaccgccgacgcctcctccaccttccccacccctcctcccaacgcctctctcaatccccaagccatggcgtctcttaaacaagcgcaggctctagctggaggtcctttaattcaggcgcgaaactttgctgtgatgacgggagtgaacgctgggatttcctgtgtcttgaaaaggataaggggaaaggaagatgtccagtctagcatggcggcagcttttggttcaggggccttgttttcattagtaagtggcatgggtggaccaaatcaagcaacaaatgcactcacttctggacttttctttgcacttgttcaaggtggacttttccagataggacaaaagttttctcaaccacctgctgaagatactcactatgctaaaacaagacacatgttgaacaatcttggccttcagagttacgaaaagaatttcaagaaaggcttgttaacagacaacactctgcctttactcacagacagtgctctcagagatgtgaggattcctcctggacctaggcttttgattcttgaccacatccagagggacgcggatttgaaagataagcgaggaagccgaaagtgactgatatgaatagtttgctggcttggaactttgaaagccattgaaaaatggatagtagaaagtttgtgttgcaaatgaattttgtcttttttgtttgttagctctgttccattgttgttgcagtgtacttgataaaatttggttaactaatcagttattttagttgtgccatgacacgtaaatggcttgaaagtaaattagggagcacgaatttgttaactctaaaataagaaaagttattgcttccttgtgtagg

SEQ ID NO: 18234 - protein, 266 aa, Glycine max
YPSLLGMEQAGKQGIMVASQSQNPIEQIQARFKDLETGFRLWLSKQSLPVEAAVVTTTSAAQGAAIGAFMGTLTADASSTFPTPPPNASLNPQAMASLKQAQALAGGPLIQARNFAVMTGVNAGISCVLKRIRGKEDVQSSMAAAFGSGALFSLVSGMGGPNQATNALTSGLFFALVQGGLFQIGQKFSQPPAEDTHYAKTRHMLNNLGLQSYEKNFKKGLLTDNTLPLLTDSALRDVRIPPGPRLLILDHIQRDADLKDKRGSRK

SEQ ID NO: 18235 - protein, 260 aa, Glycine max; identical to SEQ ID NO: 14387

SEQ ID NO: 18236 - protein, 251 aa, Glycine max; identical to SEQ ID NO: 14388

SEQ ID NO: 18237 - DNA, 937 bp, Glycine max
ctctttgctccttctgtcctcccctcagcggcatcgttgtattgttcttacacatctttctctctctcactttcggtttctaaaccaaaaccctaatcgagatcacaatcggatcgtaaacaaacagagaccagccatggacggtgattcctcttggagtgctcgactctcttccgcttccaggcgctaccaatccgctcttcaatctcgatcagacatgttcatgggttttgatgaaaatgatggggacgatgatataagagaggagtttctctgcccattttgttctgagtattttgatatcgttggattatgctgccacattgatgaagagcatccaatggaggcaaaaaatggggtatgtccagtttgtgcattgagggtgggggttgatatggtagcacatataaccctacaacatgggagtatatttaagatgcagcgcaaaaggaaatcacggaaaggtggatcgtattcaacactatctttattgaggaaggaactacgagaaggaaatttgcaatccctttttggcggatcttcatgtatagtgtcctcatctaatgcagatccactgttgtcatcatttatattgcctttagctaatgaacatgccagttctcagcctcacttacacactgagacaagatcatctaaaaaatgcttagatgagactgtgtcaacaagaaatgtggagacatcaaccttgtcagttaaggataaggaggagaaggaaaaaagatgcgagtttgttcaagggctgttgctgtccaccatacttgatgacaatttataaaggaaattcatggaggtggctgcttcagtagtgggcgaattcatatgcggtacctgctatgtatggtttgcctgatgaaattgtctatgtatttgatcagagtggaataataagtagtagaaaatgaatgtaatttatgtt

SEQ ID NO: 18238 - protein, 264 aa, Glycine max
SLLLLSSPQRHRCIVLTHLSLSHFRFLNQNPNRDHNRIVNKQRPAMDGDSSWSARLSSASRRYQSALQSRSDMFMGFDENDGDDDIREEFLCPFCSEYFDIVGLCCHIDEEHPMEAKNGVCPVCALRVGVDMVAHITLQHGSIFKMQRKRKSRKGGSYSTLSLLRKELREGNLQSLFGGSSCIVSSSNADPLLSSFILPLANEHASSQPHLHTETRSSKKCLDETVSTRNVETSTLSVKDKEEKEKRCEFVQGLLLSTILDDNL

SEQ ID NO: 18239 - protein, 219 aa, Glycine max
MDGDSSWSARLSSASRRYQSALQSRSDMFMGFDENDGDDDIREEFLCPFCSEYFDIVGLCCHIDEEHPMEAKNGVCPVCALRVGVDMVAHITLQHGSIFKMQRKRKSRKGGSYSTLSLLRKELREGNLQSLFGGSSCIVSSSNADPLLSSFILPLANEHASSQPHLHTETRSSKKCLDETVSTRNVETSTLSVKDKEEKEKRCEFVQGLLLSTILDDNL

SEQ ID NO: 18240 - protein, 192 aa, Glycine max
MFMGFDENDGDDDIREEFLCPFCSEYFDIVGLCCHIDEEHPMEAKNGVCPVCALRVGVDMVAHITLQHGSIFKMQRKRKSRKGGSYSTLSLLRKELREGNLQSLFGGSSCIVSSSNADPLLSSFILPLANEHASSQPHLHTETRSSKKCLDETVSTRNVETSTLSVKDKEEKEKRCEFVQGLLLSTILDDNL

SEQ ID NO: 18241 - DNA, 788 bp, Glycine max
atcgttgttcccttttctctctcgttttttctcaaaaagttgcaagagttaaagcaaaaaccaaagtgagagagaaaatgatgaagccatcgatgctcagatctcttcactctgccgccacccgcggcgcctcccacctctcccgccgtggctacgcctccgagccggtgccggagcgcaaggtggccgttctaggtgccgccggcgggatcgggcaacccctctcccttctcatgaagctcaaccccctcgtttccagcctctccctctacgatatcgccggaactcccggtgtcgccgccgatgtcagccacatcaacaccggatctgaggtagtggggtaccaaggtgacgaagagctcggaaaagctttggagggtgcagatgttgttataattcctgctggtgtgcccagaaagcctggaatgactcgtgatgatctttttaacatcaatgctggcattgttaagacactgtgtactgctattgctaagtactgccctcatgcccttgttaacatgataagcaatcctgtgaactccactgttcctattgctgctgaagttttcaagaaggcaggaacgtatgatgagaagagattgtttggtgttaccacccttgatgttgttagggcaaaaactttctatgctgggaaagccaatgttccagttgctggtgttaatgtacctgttgtgggtggccatgcaggcattactattctgccattattttctcaagccacaccaaaagccaatcttgatgatgatgtcattaaggctcttacaaag

SEQ ID NO: 18242 - protein, 262 aa, Glycine max
RCSLFSLVFSQKVARVKAKTKVREKMMKPSMLRSLHSAATRGASHLSRRGYASEPVPERKVAVLGAAGGIGQPLSLLMKLNPLVSSLSLYDIAGTPGVAADVSHINTGSEVVGYQGDEELGKALEGADVVIIPAGVPRKPGMTRDDLFNINAGIVKTLCTAIAKYCPHALVNMISNPVNSTVPIAAEVFKKAGTYDEKRLFGVTTLDVVRAKTFYAGKANVPVAGVNVPVVGGHAGITILPLFSQATPKANLDDDVIKALTK

SEQ ID NO: 18243 - protein, 237 aa, Glycine max
MMKPSMLRSLHSAATRGASHLSRRGYASEPVPERKVAVLGAAGGIGQPLSLLMKLNPLVSSLSLYDIAGTPGVAADVSHINTGSEVVGYQGDEELGKALEGADVVIIPAGVPRKPGMTRDDLFNINAGIVKTLCTAIAKYCPHALVNMISNPVNSTVPIAAEVFKKAGTYDEKRLFGVTTLDVVRAKTFYAGKANVPVAGVNVPVVGGHAGITILPLFSQATPKANLDDDVIKALTK

SEQ ID NO: 18244 - protein, 236 aa, Glycine max
MKPSMLRSLHSAATRGASHLSRRGYASEPVPERKVAVLGAAGGIGQPLSLLMKLNPLVSSLSLYDIAGTPGVAADVSHINTGSEVVGYQGDEELGKALEGADVVIIPAGVPRKPGMTRDDLFNINAGIVKTLCTAIAKYCPHALVNMISNPVNSTVPIAAEVFKKAGTYDEKRLFGVTTLDVVRAKTFYAGKANVPVAGVNVPVVGGHAGITILPLFSQATPKANLDDDVIKALTK

SEQ ID NO: 18245 - DNA, 757 bp, Glycine max
aagaaaactaggcattggtttctctctctagcttggacgagtgaattagattcatcatcaagatgtcgtctctgatagcagaagatgtgaagagcagatcagaggtgtaccacggggacgaaatgtgccaagtgaagtccaaggagcttctcaaggaaatcgccctccccaacggccttcttcccctcaaggacatggaggagtgcggctacgacagacaaaccggcttcgtctggctcaaacaaaagaagagttacacccacaagttcgacaagatcggaaagcttgtctcctacgcgcccgaggtaactgctcatgtccaacaaggtaaaattaccaaactcaccggggttaagaccaaggagctcctctggatcacgctcagtgatatctatgttgatgaccctcccactggcaaaatcaccttcaagacccctgccggcctatttaggtcttttcctgtctccgctttcgagattcaggaggagcctgaggctaaggacactactaagcgcgtgccggataccgctgagcctgtgcaagtcaaggaactctgattttattctcaaacaaggtcgccgtggtggttagcgtgcaaaatatatttatatatatatatatgtttattaataagtttatttatgttaccttttatgttaagctttcagatattgtgcggctttattgctaattaaccatcatctccttgttctggctttgaaaagaaaatggattacgatattgttatttctttcat

SEQ ID NO: 18246 - protein, 164 aa, Glycine max
MSSLIAEDVKSRSEVYHGDEMCQVKSKELLKEIALPNGLLPLKDMEECGYDRQTGFVWLKQKKSYTHKFDKIGKLVSYAPEVTAHVQQGKITKLTGVKTKELLWITLSDIYVDDPPTGKITFKTPAGLFRSFPVSAFEIQEEPEAKDTTKRVPDTAEPVQVKEL

SEQ ID NO: 18247 - protein, 144 aa, Glycine max
MCQVKSKELLKEIALPNGLLPLKDMEECGYDRQTGFVWLKQKKSYTHKFDKIGKLVSYAPEVTAHVQQGKITKLTGVKTKELLWITLSDIYVDDPPTGKITFKTPAGLFRSFPVSAFEIQEEPEAKDTTKRVPDTAEPVQVKEL

SEQ ID NO: 18248 - protein, 120 aa, Glycine max
MEECGYDRQTGFVWLKQKKSYTHKFDKIGKLVSYAPEVTAHVQQGKITKLTGVKTKELLWITLSDIYVDDPPTGKITFKTPAGLFRSFPVSAFEIQEEPEAKDTTKRVPDTAEPVQVKEL

SEQ ID NO: 18249 - DNA, 956 bp, Glycine max
gccgttcacatcatcgtcgacgttcagttgctcacactctcaacaggtgagaagagagatgagaggaaggagctatagtccatcgcctcctccacgccacagcagaagaggaggaggagggaggagtcccagccccaggggccgctatcctccccgtcccagacaacaagatctccctaccagccttcttgtccgtaaccttcgtcatgactgtaggcctgaggatctacgccgaccttttggtcaatttggtcctctcaaggacatttaccttcctaaggattactacactggagaaccccgtggctttggttttgtccaatatgtggatcctgcggatgctgctgatgctaaatatcatatggatggtcaagttcttcttggtcgggagctcactgttgtctttgctgaggagaatagaaagaagccaactgagatgaggacacgagagagaaggggtcgcttttatgatcgaaggaggtctcctcctcgttactctcggtcaccccgctactctcgatctccaccaccacgccatagatctcgttctcgcagtcgtgattattattctcctcctgccaaacgaagggagtattcaagatctgtctcccctgaggatagaaggtacagtcgagaaagatcattttcacagcatagtagagagaggtcatactcacgatctcctccttataatgggggctcaaggagtcgtagtcagagtccagcaaagggcccaggtcagagcaggagtccaagtccgaaccgagatggaagggaaccagcccggggtaggtcccctagtcagtgagcatggggaaagacttgccttggatatcatatgcaggattttgtcttaatattaggcaaattacttctgtttattgttgtctgaactctgatacaatggaattggattttgatttgttgttttatatacccagttatgtttgttgctt

SEQ ID NO: 18250 - protein, 268 aa, Glycine max
PFTSSSTFSCSHSQQVRREMRGRSYSPSPPPRHSRRGGGGRSPSPRGRYPPRPRQQDLPTSLLVRNLRHDCRPEDLRRPFGQFGPLKDIYLPKDYYTGEPRGFGFVQYVDPADAADAKYHMDGQVLLGRELTVVFAEENRKKPTEMRTRERRGRFYDRRRSPPRYSRSPRYSRSPPPRHRSRSRSRDYYSPPAKRREYSRSVSPEDRRYSRERSFSQHSRERSYSRSPPYNGGSRSRSQSPAKGPGQSRSPSPNRDGREPARGRSPSQ

SEQ ID NO: 18251 - protein, 249 aa, Glycine max
MRGRSYSPSPPPRHSRRGGGGRSPSPRGRYPPRPRQQDLPTSLLVRNLRHDCRPEDLRRPFGQFGPLKDIYLPKDYYTGEPRGFGFVQYVDPADAADAKYHMDGQVLLGRELTVVFAEENRKKPTEMRTRERRGRFYDRRRSPPRYSRSPRYSRSPPPRHRSRSRSRDYYSPPAKRREYSRSVSPEDRRYSRERSFSQHSRERSYSRSPPYNGGSRSRSQSPAKGPGQSRSPSPNRDGREPARGRSPSQ

SEQ ID NO: 18252 - protein, 148 aa, Glycine max
MDGQVLLGRELTVVFAEENRKKPTEMRTRERRGRFYDRRRSPPRYSRSPRYSRSPPPRHRSRSRSRDYYSPPAKRREYSRSVSPEDRRYSRERSFSQHSRERSYSRSPPYNGGSRSRSQSPAKGPGQSRSPSPNRDGREPARGRSPSQ

SEQ ID NO: 18253 - DNA, 830 bp, Glycine max
atatatctcttataccccttttgtttccatttgaactttgcttttagtagttttaaatcatatcaatagctatgacgactgtggacaggcgtgtgaatgtcgaccgtactgacaaaggacttcaacttaagccgcagtacgaagatcgtgtcggttatggcgctggttatgattatggttatggtgctgattacaagagtcgcggcccatccactaatcaagtcgtggcacttatagcaggagttccaattggtggctcattactagccctagctggactcactctagccggttcggtgataggtttgattctctccattccgctcttcctcctcttcagtcccgtgattgtcccagccgctctcaccatagggctcgctgtgaccggaattttggcgtctgggttatttggtctgacgggtctgagctcggtctcatgggtcctaaactacatccgtgggacgagtgatacggtgccggagcaactggactatgctaagcggcgtatggctgatgcagtaggctacgctggtcagaagggaaaagagatgggacagtatgtgcaggataaggcccatgaagcccacgatactagtctgaccactgagaccagagagccggttcaggcaaagaggactttagcgtaaggcaaggaggaaccttctataaagttgtgggtttatgttggaaaaggcaattatgtaattttacttttgtgtcccagtttcttcgttttttttttgaatatttgtgaattatgtgtaagttcgttttgttatgtccaaataaaatattttgtgagtgaaataaagtgggataaaaggaaatac

SEQ ID NO: 18254 - protein, 191 aa, Glycine max
MTTVDRRVNVDRTDKGLQLKPQYEDRVGYGAGYDYGYGADYKSRGPSTNQVVALIAGVPIGGSLLALAGLTLAGSVIGLILSIPLFLLFSPVIVPAALTIGLAVTGILASGLFGLTGLSSVSWVLNYIRGTSDTVPEQLDYAKRRMADAVGYAGQKGKEMGQYVQDKAHEAHDTSLTTETREPVQAKRTLA

SEQ ID NO: 18255 - DNA, 951 bp, Glycine max
agtgaaggaaaactctctctctctcaaaaagagaatcttcaaaatgtcaatcacaacaggaatatgtcaagtagttgctgtttcattgcttttgggattactgagtgtgtattccttggaatgtgatgatgatcgctgcaaaactgggctgtgcaacaacactggtgcctgcatttgcaacctccctgatccttccaccatcttgaatggtgatagaactttcttcggggggaagttttgtgacgaagaaatgaccatgtgtgatgggacaaactccttctggtgtgaacatggggcaacttgtgaggagattgttcaaggagagaagtactcttgcaaatgtcccctaggatttgctggggagcattgtgagcattctggagcaccctgtggtcatactttttgtttccataatgctgaatgcttggctgaaacaggtgatgtttgccagtgcccttctgaatggaaaggcagtgctgattgctctcttccaaccacaccaacagatttttactcaatttcaactgacacaaaatcatctaaagtcagcagcagcagtgactccaataaggcactggctgtcttggcagtttcttcagtgggaggagctgctgctggtgccatttatggcaagaaactattcaacaagaaaaaaagagaggcaaggttccagcaattatctgaaatgcagactcaagggatattggatgatgatggtgatgaggaggatgaaaaccacaatatggtaccccaaagggtccatggtgatatttcacacaattagtgggcacttccttttccagcatcagaacattttagcactcttagctcaagtagttttttttgtcagttttcataattggcagtagcattttatttggtaagcttgagtagtactaatatttatatgattgtgcttaataaaaagatggcatgcaagcacatttttct

SEQ ID NO: 18256 - protein, 260 aa, Glycine max
VKENSLSLKKRIFKMSITTGICQVVAVSLLLGLLSVYSLECDDDRCKTGLCNNTGACICNLPDPSTILNGDRTFFGGKFCDEEMTMCDGTNSFWCEHGATCEEIVQGEKYSCKCPLGFAGEHCEHSGAPCGHTFCFHNAECLAETGDVCQCPSEWKGSADCSLPTTPTDFYSISTDTKSSKVSSSSDSNKALAVLAVSSVGGAAAGAIYGKKLFNKKKREARFQQLSEMQTQGILDDDGDEEDENHNMVPQRVHGDISHN

SEQ ID NO: 18257 - protein, 246 aa, Glycine max
MSITTGICQVVAVSLLLGLLSVYSLECDDDRCKTGLCNNTGACICNLPDPSTILNGDRTFFGGKFCDEEMTMCDGTNSFWCEHGATCEEIVQGEKYSCKCPLGFAGEHCEHSGAPCGHTFCFHNAECLAETGDVCQCPSEWKGSADCSLPTTPTDFYSISTDTKSSKVSSSSDSNKALAVLAVSSVGGAAAGAIYGKKLFNKKKREARFQQLSEMQTQGILDDDGDEEDENHNMVPQRVHGDISHN

SEQ ID NO: 18258 - protein, 177 aa, Glycine max
MTMCDGTNSFWCEHGATCEEIVQGEKYSCKCPLGFAGEHCEHSGAPCGHTFCFHNAECLAETGDVCQCPSEWKGSADCSLPTTPTDFYSISTDTKSSKVSSSSDSNKALAVLAVSSVGGAAAGAIYGKKLFNKKKREARFQQLSEMQTQGILDDDGDEEDENHNMVPQRVHGDISHN

SEQ ID NO: 18259 - DNA, 847 bp, Glycine max
ctctttccgttcccttgatgtaatggctttatgccgattcgcttactcttattctcctgcttctgcttccaccatttttcgtttcccgaaatacccttcgaaacacactaaattctccttgctaccactctcattctcaacgatggaagctcctccagaaggttatcgtaggaacgttggtatctgtctcatgaacaatcacaaaaagattttcgcggcttcgaggctcgacattcccaatgcttggcaaatgcctcagggtggtattgatgaaggtgaggatccaagaaatgcagctatcagggagttacgagaagagacaggagttaattcagtagaagtgatcgctgaggtaccatattggttaacttatgacttcccaccaaaagtgagggagaaattaaatattcagtggggatctgattggaagggtcaggcgcagaaatggtttctttttaagttcactgggcaagatcaagaaattaatcttttgggtgatggtactgagaaagctgagtttggggaatggtcatggatatcacctgaacaagtaattgagcttgcagtggatttcaagaaacctgtctacaaggaagtcttagcagtgtttgctccacatttccaataaatcttatctttggctgaaattgttactgatgccttgggtgattatgagggctgctttaaaaagaatgtattccaattaactaacgagaccattattctcttttttctcctcttggccataataacccatagggcgggagaagagggctgtttattttgtctgaatgaaatatgtattgtcatgaaaattgttgtgcaatgtattgcatttgcatctgcc

SEQ ID NO: 18260 - protein, 208 aa, Glycine max
SFRSLDVMALCRFAYSYSPASASTIFRFPKYPSKHTKFSLLPLSFSTMEAPPEGYRRNVGICLMNNHKKIFAASRLDIPNAWQMPQGGIDEGEDPRNAAIRELREETGVNSVEVIAEVPYWLTYDFPPKVREKLNIQWGSDWKGQAQKWFLFKFTGQDQEINLLGDGTEKAEFGEWSWISPEQVIELAVDFKKPVYKEVLAVFAPHFQ

SEQ ID NO: 18261 - protein, 201 aa, Glycine max
MALCRFAYSYSPASASTIFRFPKYPSKHTKFSLLPLSFSTMEAPPEGYRRNVGICLMNNHKKIFAASRLDIPNAWQMPQGGIDEGEDPRNAAIRELREETGVNSVEVIAEVPYWLTYDFPPKVREKLNIQWGSDWKGQAQKWFLFKFTGQDQEINLLGDGTEKAEFGEWSWISPEQVIELAVDFKKPVYKEVLAVFAPHFQ

SEQ ID NO: 18262 - protein, 161 aa, Glycine max
MEAPPEGYRRNVGICLMNNHKKIFAASRLDIPNAWQMPQGGIDEGEDPRNAAIRELREETGVNSVEVIAEVPYWLTYDFPPKVREKLNIQWGSDWKGQAQKWFLFKFTGQDQEINLLGDGTEKAEFGEWSWISPEQVIELAVDFKKPVYKEVLAVFAPHFQ

SEQ ID NO: 18263 - DNA, 785 bp, Glycine max
gaaacaaaaggaaaggatgaagcaatcaaaggatccgttcgaagcagcgttcgaggaatcgccgccagaatccccaacggctacggagacagaggcagagacgcaaaaccctactcctcctcctcctcctcctcctcctccttcttctttttctggtgttgctgtagtagcactgaatccacaacagcctcagaatcagaaagtgaagaacaaagacaatgaggaagaggaggaggaggaggacaacatggacgtggagctcgccaagctcccttccaccggcgaccctcacaaaatggccaagatgcaggccattttgtcgcaattcaccgaagagcagatgagtcgatacgagtccttccggagggctggctttcagaaagccaacatgaaaaggttattggctagcatcactgggacccagaaaatttctgtgcccatgacgattgttgtatcgggcattgcaaaaatgtttgttggtgaagttgttgaaacagctagaatagttatgaaagagaggaaggaatctggaccaatccggccttgtcatctgagagaagcatatagacgactaaagcttgaaggaaaagtctttaagagatcatcctcgaggctcttccggtagatggaccaaatatgaatattgtgtgcatcagcatcactagtttgctatagtggcttgcgggtagattaaattttgtagtctgcaccttcttgttttcaacatcttgatgttcatttaactggagctagtgaatgtgaatcaatattagaagtaaattggg

SEQ ID NO: 18264 - protein, 207 aa, Glycine max
KQKERMKQSKDPFEAAFEESPPESPTATETEAETQNPTPPPPPPPPPSSFSGVAVVALNPQQPQNQKVKNKDNEEEEEEEDNMDVELAKLPSTGDPHKMAKMQAILSQFTEEQMSRYESFRRAGFQKANMKRLLASITGTQKISVPMTIVVSGIAKMFVGEVVETARIVMKERKESGPIRPCHLREAYRRLKLEGKVFKRSSSRLFR

SEQ ID NO: 18265 - protein, 202 aa, Glycine max
MKQSKDPFEAAFEESPPESPTATETEAETQNPTPPPPPPPPPSSFSGVAVVALNPQQPQNQKVKNKDNEEEEEEEDNMDVELAKLPSTGDPHKMAKMQAILSQFTEEQMSRYESFRRAGFQKANMKRLLASITGTQKISVPMTIVVSGIAKMFVGEVVETARIVMKERKESGPIRPCHLREAYRRLKLEGKVFKRSSSRLFR

SEQ ID NO: 18266 - protein, 125 aa, Glycine max
MDVELAKLPSTGDPHKMAKMQAILSQFTEEQMSRYESFRRAGFQKANMKRLLASITGTQKISVPMTIVVSGIAKMFVGEVVETARIVMKERKESGPIRPCHLREAYRRLKLEGKVFKRSSSRLFR

SEQ ID NO: 18267 - DNA, 553 bp, Glycine max
ctccaaacacacaaacatcataacataaataaatccttgtgttgtggtcatagtcctcaattcaacttttcagctatatctcttgaaagaagaagaagaagaagaagaagaaggagaaatgggatccaacggaacatcttgggctgaccagtgggataacgggcctgacccagtgactgtctccaacgaatcgaagaaaaagaataacgccctcggcaagaccaaggcagtggcttccactggcgtcaagaagttgaaggagggtacctccgttggcttccaatggatcaagaccaagtaccacaaaactacccagaaacattaaactaacctatctttggttccttcttgtacatatttataatatctatagtctccccttttgattattatgtgtgttttttcaattcatttattgttcaggtgttatataggtttactttgtactattgagtattgatggatatagtcttttttaatgttttatgttcgatggattaggttgtatacatttttatgcatagagaataatggatcttaattttattctttt

SEQ ID NO: 18268 - protein, 68 aa, Glycine max
MGSNGTSWADQWDNGPDPVTVSNESKKKNNALGKTKAVASTGVKKLKEGTSVGFQWIKTKYHKTTQKH

SEQ ID NO: 18269 - protein, 48 aa, Glycine max
LQTHKHHNINKSLCCGHSPQFNFSAISLERRRRRRRRRRNGIQRNILG

SEQ ID NO: 18270 - DNA, 831 bp, Glycine max
ccatttgatgtgaacaagcttcctatagaaactcaaaatcttctagctgtgtgcaagagggaaagcatggctgagtatccatcacctgaaaaggatgataataattgtaagcacatggatgactacccttcacctcaaacagataatccaaagcctttctctcaaatatacaaacgaaggcgtcataacttgaactccaacaactctaatgtttctggagattcagtccgaaccagccaggatccgtgctcctctacaataactaccgctgcaactgcactcccaaccgcaactgttgctggcacagccaccaacactgcaccgaaaaaacattttctgtctgcactggtggagttttccctgctagaatcccttgaatcaaaggacaaccttgcttcaattaaggcaccggattttgacactgaaaatctcgagtcatccatgcctccaagttgcgcaaagttcatcaagcaaatgcagagtgagatgcagaagctttcagttgaaaaggagacgataaggtttgagatgatgagcgcacaagcgatgattaacattctccagtctcgcatcgacgttctcagcaaagaaaatgaggatttgaagaggatggtggcccaaaatccataggaattggcaatgtcatgcccttgtatcagtgtaagttagttacaactgagtaatgaagctcagtcttccggatattttcttatttttctgagtaagaattgtagttcgtttctttggctaaacttattttaaacttgtcatcgtgtatcatatgactttcagtttcccattgttgtgaaaatatggccatgttagcatctc

SEQ ID NO: 18271 - protein, 209 aa, Glycine max
PFDVNKLPIETQNLLAVCKRESMAEYPSPEKDDNNCKHMDDYPSPQTDNPKPFSQIYKRRRHNLNSNNSNVSGDSVRTSQDPCSSTITTAATALPTATVAGTATNTAPKKHFLSALVEFSLLESLESKDNLASIKAPDFDTENLESSMPPSCAKFIKQMQSEMQKLSVEKETIRFEMMSAQAMINILQSRIDVLSKENEDLKRMVAQNP

SEQ ID NO: 18272 - protein, 187 aa, Glycine max
MAEYPSPEKDDNNCKHMDDYPSPQTDNPKPFSQIYKRRRHNLNSNNSNVSGDSVRTSQDPCSSTITTAATALPTATVAGTATNTAPKKHFLSALVEFSLLESLESKDNLASIKAPDFDTENLESSMPPSCAKFIKQMQSEMQKLSVEKETIRFEMMSAQAMINILQSRIDVLSKENEDLKRMVAQNP

SEQ ID NO: 18273 - protein, 171 aa, Glycine max
MDDYPSPQTDNPKPFSQIYKRRRHNLNSNNSNVSGDSVRTSQDPCSSTITTAATALPTATVAGTATNTAPKKHFLSALVEFSLLESLESKDNLASIKAPDFDTENLESSMPPSCAKFIKQMQSEMQKLSVEKETIRFEMMSAQAMINILQSRIDVLSKENEDLKRMVAQNP

SEQ ID NO: 18274 - DNA, 1170 bp, Glycine max
attactttccgcatctaccttcattccttggcgggtgttagcggttgcggtttcggtttcgttgcgccgaatcttaaccgtccttttggggcccacaaatcgccgatactgtgttcactttcattgccggtggcggcgaagccaccgtaccaaccaccgacgccgtccaatccttttcagcctttcaaattgcgatgacgtatttcgaagaggatgccattaacggcgacggtgatcgaacgagggacgtcaatcgcaatcacgacggcggaggagaattatacgtcaatttgaggtgggacccacaaccggaggccccgaacactaaccggagaggatcgtcgcgtctctggtattgggttaagttggttctctgtttcttatgtctgggcctcttggctctcgttgctttcaaatgggttgtcccactcttcacagaaaaggtgattattcctataataaattgggagacgaacacgttcagttctccagtgttagctgttctggtgtttgcttctatagcgctattccctaccctaattctgccatcctcgccttctatgtgggtggctgggttgacatttggttatggctttggattcttgctaatcatttctgcagcagcagtgggagtatcacttcctttcttgatcggttcaatcttctatagtaaaattgaagggtggttagaaaagtatccaaagagagcttctgttctaagatctgctggtgggggaaattggtttcatcaatttcaggcagttgctttaatcagggtttctccattcccatacataatctacaactattgtgccgtcgcaacaaatgttgagtattggccttacctgctcggttccatggtaggaatggtgccagaaatatttgtttcaatttacacgggaattttgatagaaacattggctaatgcttcacatcaaaatcacactctatccactccacaaattgccctcaatgtagttggtttctgcataagtggagctacaataatctttttcacagcctatgcaaagaggcagctcaaggagttacaacagaaagaggatggtttgctcttgcaataatccagtaggtttagtctgggtttatttgctggcagcatgaggcagttatcactatcttgaacgtcacatgttaaggcttaccacagaa

SEQ ID NO: 18275 - protein, 295 aa, Glycine max
MTYFEEDAINGDGDRTRDVNRNHDGGGELYVNLRWDPQPEAPNTNRRGSSRLWYWVKLVLCFLCLGLLALVAFKWVVPLFTEKVIIPIINWETNTFSSPVLAVLVFASIALFPTLILPSSPSMWVAGLTFGYGFGFLLIISAAAVGVSLPFLIGSIFYSKIEGWLEKYPKRASVLRSAGGGNWFHQFQAVALIRVSPFPYIIYNYCAVATNVEYWPYLLGSMVGMVPEIFVSIYTGILIETLANASHQNHTLSTPQIALNVVGFCISGATIIFFTAYAKRQLKELQQKEDGLLLQ

SEQ ID NO: 18276 - protein, 173 aa, Glycine max
MWVAGLTFGYGFGFLLIISAAAVGVSLPFLIGSIFYSKIEGWLEKYPKRASVLRSAGGGNWFHQFQAVALIRVSPFPYIIYNYCAVATNVEYWPYLLGSMVGMVPEIFVSIYTGILIETLANASHQNHTLSTPQIALNVVGFCISGATIIFFTAYAKRQLKELQQKEDGLLLQ

SEQ ID NO: 18277 - DNA, 1129 bp, Glycine max
tccactccctcttcttctcttcttcccccaacaaactaaaccaaaccataccattaagaaacaacacatctatctcagtccccaaaccaagaaaccctaaattaaattcatgtgctcctccaggtctaccagtgctgcaccaacaagaccttgttacttggaacaaggccacggcttggcttccttaaaacacatggatgcgtgtcataatcgtgccaacaactttgtctctaggtccatgaccatgggttacggcacttcctaccacagaactagtttaaggaacaacaacaacaacaacaacaacaacgtttctgtttcttcaccaagatctgcgagattctacgacgccagattcgaagatcaacaccacccccacttcctctccgcttgtttcctctgcaaaaaatctctcggggacaatagagacatcttcatgtatagaggggacacaccgttttgtagcgaagagtgcaggcaagagcagattgagatagacgaagccaaagagaagaataggaacctttcttcatcgatgaaagctttaaggaacaaggagcagagaaataataataataaatccacgtcgccaaacaaggcgcaacaagactactcgttccgtacgggggcagttgcggcggcgtagggtacaagtacaacgtaggattcctcgagagaggaaccaacaaatgaacgaacggaactgagggcagtgttcccggaaaaggaaagaaaacatttttagaaaagaagaaaaaaaaagtgtgactgaaaaggaaagtaaacaaagggaagttaagttgcgagctttggtttacttctcttcctttttttctttctttctttccacgaacaaagggtctcaaagagaaaggggaattttgtgagctgtgaatggtatacgtgtggcaaagtgtgtgtgcttacaacagtgggagattctctctgccaaatgactcaaaattttcgggtttgctttttttttttttctttttcttttattttttatggggatcaaatttggttttgtttccttttgtatatcaccctacctcgttgagttatagtggttgtgctaatagtttcagttttcaaaaaacggaaactgaatacaatggaaattttctcc

SEQ ID NO: 18278 - protein, 178 aa, Glycine max
MCSSRSTSAAPTRPCYLEQGHGLASLKHMDACHNRANNFVSRSMTMGYGTSYHRTSLRNNNNNNNNNVSVSSPRSARFYDARFEDQHHPHFLSACFLCKKSLGDNRDIFMYRGDTPFCSEECRQEQIEIDEAKEKNRNLSSSMKALRNKEQRNNNNKSTSPNKAQQDYSFRTGAVAAA

SEQ ID NO: 18279 - protein, 150 aa, Glycine max
MDACHNRANNFVSRSMTMGYGTSYHRTSLRNNNNNNNNNVSVSSPRSARFYDARFEDQHHPHFLSACFLCKKSLGDNRDIFMYRGDTPFCSEECRQEQIEIDEAKEKNRNLSSSMKALRNKEQRNNNNKSTSPNKAQQDYSFRTGAVAAA

SEQ ID NO: 18280 - protein, 135 aa, Glycine max
MTMGYGTSYHRTSLRNNNNNNNNNVSVSSPRSARFYDARFEDQHHPHFLSACFLCKKSLGDNRDIFMYRGDTPFCSEECRQEQIEIDEAKEKNRNLSSSMKALRNKEQRNNNNKSTSPNKAQQDYSFRTGAVAAA

SEQ ID NO: 18281 - DNA, 1103 bp, Glycine max
attcccacaacacaacacaacgcacaaacacacaaaaaatttctagagcgagaaagtgagaggagagagaaagtagctgatcctccatggcctccaccaaggaacgcgaaaactttgtctacaccgccaagctcgccgaacaagccgaacgctatgaagaaatggtggaagcaatgaagaatgtggcgaagctgaacgtggaattgacggtcgaggagcggaaccttctgtcggtagggtacaagaacgtggtgggtgctcgtagggcttcgtggaggattctatcgtcgattgaacagaaagaagaagctaaagggaacgatgtgagtgtgaagaggataaaggagtataggcagaaggtggagtctgagttgtccaatatctgcagtgatatcatgactgttattgatgaacaccttattccctctagctctgctggtgaacctagtgtctttttctacaaaatgaagggggactattaccggtacctcgcggagttcaagtccggtgatgagagaaaagaggctgctgatcattccatgaaggcgtatcagtcggcttccactactgcagaggctgagttaccacccacacatcccatccgtttgggcctggctttgaacttctctgtcttttattatgaaattttgaactctcctgaaagggcctgtcaccttgctaagcaggcatttgatgaagccatctctgagttggatactctgagcgaggagtcttacaaagacagcaccctaattatgcagcttctgagggacaatctcaccctgtggacttctgacatccctgaagaaggagctgaggaacaaaaggtggattctgccagagctgctggaggtgacaatgcatagtgaagcaggtattggctaggaatttgtggtgtcatacgagaaggctagtctttctcttgataatttaccattaggatgtagtaatagaacatggagttggtctctagaaaatcaccatagggctttgtgagccttttattctatgcgtgtgctttctgttactggatggagactggagttgagatttgtatgttgtttgcctgtgattcagtgaatttcttcattttgacttctttc

SEQ ID NO: 18282 - protein, 259 aa, Glycine max
MASTKERENFVYTAKLAEQAERYEEMVEAMKNVAKLNVELTVEERNLLSVGYKNVVGARRASWRILSSIEQKEEAKGNDVSVKRIKEYRQKVESELSNICSDIMTVIDEHLIPSSSAGEPSVFFYKMKGDYYRYLAEFKSGDERKEAADHSMKAYQSASTTAEAELPPTHPIRLGLALNFSVFYYEILNSPERACHLAKQAFDEAISELDTLSEESYKDSTLIMQLLRDNLTLWTSDIPEEGAEEQKVDSARAAGGDNA

SEQ ID NO: 18283 - protein, 234 aa, Glycine max
MVEAMKNVAKLNVELTVEERNLLSVGYKNVVGARRASWRILSSIEQKEEAKGNDVSVKRIKEYRQKVESELSNICSDIMTVIDEHLIPSSSAGEPSVFFYKMKGDYYRYLAEFKSGDERKEAADHSMKAYQSASTTAEAELPPTHPIRLGLALNFSVFYYEILNSPERACHLAKQAFDEAISELDTLSEESYKDSTLIMQLLRDNLTLWTSDIPEEGAEEQKVDSARAAGGDNA

SEQ ID NO: 18284 - protein, 230 aa, Glycine max
MKNVAKLNVELTVEERNLLSVGYKNVVGARRASWRILSSIEQKEEAKGNDVSVKRIKEYRQKVESELSNICSDIMTVIDEHLIPSSSAGEPSVFFYKMKGDYYRYLAEFKSGDERKEAADHSMKAYQSASTTAEAELPPTHPIRLGLALNFSVFYYEILNSPERACHLAKQAFDEAISELDTLSEESYKDSTLIMQLLRDNLTLWTSDIPEEGAEEQKVDSARAAGGDNA

SEQ ID NO: 18285 - DNA, 615 bp, Glycine max
gatcctctttgttatttttttctttcaatcaaaccctagttcctcccgatcatcggtactaatcgaatcaccatggctaagaactccttcaagctctctaatcctcttgagataagaatggctgaatctactcgcatcagagagaaataccaagacagagttcccgtgattgtggagaaagctgaacagagcgatgttcctgacattgacaagaagaagtatcttgtaccagctgatctaaccgttggacaattcgtctacgttgtgaggaaaagaatcaagcttggagccgagaaagcaatctttgtctttgtcaagaacacgctacctccaactgcggcattgatgtctgcaatctatgaagaacacaaagacgaagatgggtttctctacatgacatacagtggagagaacacatttggatcagcatgctaatattatctctgctttggcagtttgatcttgataatgattgtacattcctttccccccctctagcttttgctgtgtttcgtcgacttcaataatgtctttttactttctgggatttatatttttagctcttttttatctggatttaaaaacagagatatatgtcctcagtttgatttgatt

SEQ ID NO: 18286 - protein, 120 aa, Glycine max
MAKNSFKLSNPLEIRMAESTRIREKYQDRVPVIVEKAEQSDVPDIDKKKYLVPADLTVGQFVYVVRKRIKLGAEKAIFVFVKNTLPPTAALMSAIYEEHKDEDGFLYMTYSGENTFGSAC

SEQ ID NO: 18287 - protein, 105 aa, Glycine max
MAESTRIREKYQDRVPVIVEKAEQSDVPDIDKKKYLVPADLTVGQFVYVVRKRIKLGAEKAIFVFVKNTLPPTAALMSAIYEEHKDEDGFLYMTYSGENTFGSAC

SEQ ID NO: 18288 - DNA, 410 bp, Glycine max
tattgttccatggttggtgcagcataactcctgccccgtttgccgccaagaactgccgccacaaggattgagtagtagtaacggtggcgccaatggtagaagtagaagtgcaagggtaagtagtagtggtagggagagccatggaaggagaaatccattttcctttttgtggccttttcgttcttctcattctagcagtaatgatgaagcaacaggaagcagcacaccaacaccaactatccctgagaatagccatcatcatcatgctgggtattctgggtggccatttgaatgacttggtgtgagtataacattttcttttgtttattaatatgctcatgttgatttaaaaatcttatgtactgatgctgcttgcttggggtgaaaacggtttgagatctgagcctacc

SEQ ID NO: 18289 - protein, 97 aa, Glycine max
IVPWLVQHNSCPVCRQELPPQGLSSSNGGANGRSRSARVSSSGRESHGRRNPFSFLWPFRSSHSSSNDEATGSSTPTPTIPENSHHHHAGYSGWPFE

SEQ ID NO: 18290 - protein, 54 aa, Glycine max
MEGEIHFPFCGLFVLLILAVMMKQQEAAHQHQLSLRIAIIIMLGILGGHLNDLV

SEQ ID NO: 18291 - DNA, 874 bp, Glycine max
aaattccatggcttacaatcacaatgcatcttatctttctctcccaccaccgcttttcatagtatatgatccaatctcatatatgctacgcttctagctccattctgcacaattctctcttatcatctttgttattacctctttccaaagtccaaattttctagttccaccaaaccaaaccaaaccaaaatggcagcagcctcagcctcatccatgatatcaacaccagccttatctccaaccatccaaaagcaccatcatttgaagccatccaacgtgtgcttccaaggtcttagacccctcgcaaggttcaccaaagcctcatcaaccaaagtgagcaccaccaccaaaagggttattccaaagggtggtgttagagctgaactcaactcagcccttgtgataagcctcagcactggcctctccctcttcttgggaaggtttgtgttcttcaacttccaaagggagaacgtggcaaagcaagtgcctgagcagaacggcctcacacactttgaggctggtgatacacgtgccaaggagtatgtcagcctcctcaaatccaatgaccctgttggattcaacattgttgatgtcttggcttggggctccattggccatgttgttgcttactacatcttggccaccactagcaatggctatgaccctgcattctttggctgatttaatttcatcatcatgttgttccaactgtgtttcttgcttactttttagtatgtaatgtaatcaatgtcatgatgtataggttctctctaaagatccaacaagttcagcatatgctaatttgatcactattttcggctgcaatttggtttgctattatgattaatggaaaatgggacttctctacgtattg

SEQ ID NO: 18292 - protein, 163 aa, Glycine max
MAAASASSMISTPALSPTIQKHHHLKPSNVCFQGLRPLARFTKASSTKVSTTTKRVIPKGGVRAELNSALVISLSTGLSLFLGRFVFFNFQRENVAKQVPEQNGLTHFEAGDTRAKEYVSLLKSNDPVGFNIVDVLAWGSIGHVVAYYILATTSNGYDPAFFG

SEQ ID NO: 18293 - protein, 155 aa, Glycine max
MISTPALSPTIQKHHHLKPSNVCFQGLRPLARFTKASSTKVSTTTKRVIPKGGVRAELNSALVISLSTGLSLFLGRFVFFNFQRENVAKQVPEQNGLTHFEAGDTRAKEYVSLLKSNDPVGFNIVDVLAWGSIGHVVAYYILATTSNGYDPAFFG

SEQ ID NO: 18294 - DNA, 1043 bp, Glycine max
tctctgttagcactctcctctcgacgattccctgtgatctctctctctctttctctctctttctctctcagtcttctctcgctgtggttcagatttcagagcaggatccaaaagccttgcttggtcaagactcattcatgtctgttcctaatgaggaaaacttgtcgtcacattcccagctttcttctcattttttcttggatctccttgattccatcatagttgatgtagcatcagagtgtcacagagtagcaaggctggggcttgattctaatttggaagaagaagatgaagaattgaagctatcggcacaagccagggttagggtggctgatcctagtaacagtaatgaagcaaatggcaagtatgtggttgacatatttggacaaacccatcctcctgtggcaaatgaaatatttgattgcatgaattgtggtcgatccatcatgactgggaggtttgctccacatttggagaagtgcatgggaaagggtaggaaggcacgtctgaaagtgacaagaagcagcacagccgcgcagaaccggtattcacgaggcagtcctagtcctggttctacatattctccatattcaaattactctaccaatagcatgaatcggttggcaaatggaacctccacttttgcaggtgaggagcactcaaatgggacactggagtcatgaactagttcatgtgtaatggctggaatacaggatttctgtcataccttgaacttgtttcttcgccgggagatgtggctgaatttaattgtgtttgaaaataatatttcaaacattttggacctaaacataacaaccatcgttgcctacatcctcgaattgttgtctaccttaaaaaaaaaaaactttgctttttacagtgagttccattgtaattttattatgttttactcctagttccgttgtaattttattataattttactatctgttaacatatgtatattgtgtgcaactatgaactagtattgttcatggatgaaaagatgctcagggttgagatgaataatacacagacatttg

SEQ ID NO: 18295 - protein, 226 aa, Glycine max
SVSTLLSTIPCDLSLSFSLFLSQSSLAVVQISEQDPKALLGQDSFMSVPNEENLSSHSQLSSHFFLDLLDSIIVDVASECHRVARLGLDSNLEEEDEELKLSAQARVRVADPSNSNEANGKYVVDIFGQTHPPVANEIFDCMNCGRSIMTGRFAPHLEKCMGKGRKARLKVTRSSTAAQNRYSRGSPSPGSTYSPYSNYSTNSMNRLANGTSTFAGEEHSNGTLES

SEQ ID NO: 18296 - protein, 181 aa, Glycine max
MSVPNEENLSSHSQLSSHFFLDLLDSIIVDVASECHRVARLGLDSNLEEEDEELKLSAQARVRVADPSNSNEANGKYVVDIFGQTHPPVANEIFDCMNCGRSIMTGRFAPHLEKCMGKGRKARLKVTRSSTAAQNRYSRGSPSPGSTYSPYSNYSTNSMNRLANGTSTFAGEEHSNGTLES

SEQ ID NO: 18297 - DNA, 770 bp, Glycine max
gatttcattgccactctgcaatcacaaggcgagtctaaatggagaacattctgggtctcatcaaacttcgtatcaaaagaggcactaatctcaaagcttgtgatactcgtaccagtgacccatatgtcttcgtcaccatggccgaacagaaactgaaaactggtgttgtgaaagataacattaatcctgagtggaatgaagaattgacactttatgtaagcgatgttaacattcccgtacatctgacagtttcagacaaagacactttcaccgtagacgacagcatgggcgacgcagaaatagacctaaagccgtatcttcagtgtgtaaagatgaacttgagcgatcttccagatggccatgtaatcaagagggttcaaccagataggactaactgtcttgctgaagagagcaactgcatatggaagaatggaaaagtcacccaagagatgagtttaagattgagaaacgtcaagtctggggaaataactgtggaaattgagtgggttaatcttccagattcaaagggcttatctgaaattgagttttaggtgtgtgtacacgccttaactttatgctgtactacttgagctgatatacataacatatcataagttgatgttattatgtaacttttggagtgaaaactagaacttagtgagttgcagaaatatccaatctaatctttagtttatgttacgctgacatgatctgtgctagtaaccaagtattttagtatttcttatgaattgctgccggagatacctcac

SEQ ID NO: 18298 - protein, 170 aa, Glycine max
MENILGLIKLRIKRGTNLKACDTRTSDPYVFVTMAEQKLKTGVVKDNINPEWNEELTLYVSDVNIPVHLTVSDKDTFTVDDSMGDAEIDLKPYLQCVKMNLSDLPDGHVIKRVQPDRTNCLAEESNCIWKNGKVTQEMSLRLRNVKSGEITVEIEWVNLPDSKGLSEIEF

SEQ ID NO: 18299 - protein, 137 aa, Glycine max
MAEQKLKTGVVKDNINPEWNEELTLYVSDVNIPVHLTVSDKDTFTVDDSMGDAEIDLKPYLQCVKMNLSDLPDGHVIKRVQPDRTNCLAEESNCIWKNGKVTQEMSLRLRNVKSGEITVEIEWVNLPDSKGLSEIEF

SEQ ID NO: 18300 - protein, 88 aa, Glycine max
MGDAEIDLKPYLQCVKMNLSDLPDGHVIKRVQPDRTNCLAEESNCIWKNGKVTQEMSLRLRNVKSGEITVEIEWVNLPDSKGLSEIEF

SEQ ID NO: 18301 - DNA, 557 bp, Glycine max
acttctctatttcctgtggttccacgcactttctctatctacgttttcaaatttgaagtcaaacacgttcaatcgtcgccctttgtgattaattcccatatcgtttccacggcagctttttctagcagataggatttaggttgaagtcaggacaaatatggccgatttggagaatttgcttttggaggctgcggggagaactggtacagctggtagaaatcgtcattctcttccaccttcaaggagacgacatgatggcgcctattcagatggtgggagtgattctagggatgacgattcagatgacgaactcaattatgcaagcagaaagccctctggatcacaagttcctctgaagaaaagactagatccaacagaaagagatgatgatttaggcagtcaggaagaagcagatgatgatggtcgcagcgatcatgatggtgatagcagtgatgaatcaaatattggcgatgatctctacaaggatgaggatgacaggcgaaagctttctgagatgactgaacttcaaagagagatgatcttatcggacagggcta

SEQ ID NO: 18302 - protein, 133 aa, Glycine max
MADLENLLLEAAGRTGTAGRNRHSLPPSRRRHDGAYSDGGSDSRDDDSDDELNYASRKPSGSQVPLKKRLDPTERDDDLGSQEEADDDGRSDHDGDSSDESNIGDDLYKDEDDRRKLSEMTELQREMILSDRA

SEQ ID NO: 18303 - DNA, 587 bp, Glycine max
attagttacctaataaaaacaatgaagctaagcgagggaagaggcaaagaagagaagcacgggagacaacatttcaagcacgacctaaaaaacatgatctcgtctttaacccacatgggagcagagaagggaggaccgagccaatatgaagaaagggaggaggatgaaggcgtcagagttatcacgctctctggatccaacataggagccaccatgaagacagagctcgacaacaatcatggagaagacaaacatgagcttgatttccttactaccttcgttaacagcaactttcaagctgtgaacaactcgctaatgatgggggccaagtacgagactcatgatcccggcgttcatcttgacatctcgggcgatgtggagaagcctttgatgaaggcatctgcgagggagacaaaggataagaaggggaagactcctgctcgaagttgaacgttgagaaactgaaaaaatacagaatggtatcttcatgtatacaacttctgcttcttcagtattaattctcttttatcacttgtccatttaaataatcagagagaagttgtgcatgctaaaccactttaatttct

SEQ ID NO: 18304 - protein, 149 aa, Glycine max
ISYLIKTMKLSEGRGKEEKHGRQHFKHDLKNMISSLTHMGAEKGGPSQYEEREEDEGVRVITLSGSNIGATMKTELDNNHGEDKHELDFLTTFVNSNFQAVNNSLMMGAKYETHDPGVHLDISGDVEKPLMKASARETKDKKGKTPARS

SEQ ID NO: 18305 - protein, 142 aa, Glycine max
MKLSEGRGKEEKHGRQHFKHDLKNMISSLTHMGAEKGGPSQYEEREEDEGVRVITLSGSNIGATMKTELDNNHGEDKHELDFLTTFVNSNFQAVNNSLMMGAKYETHDPGVHLDISGDVEKPLMKASARETKDKKGKTPARS

SEQ ID NO: 18306 - protein, 118 aa, Glycine max
MISSLTHMGAEKGGPSQYEEREEDEGVRVITLSGSNIGATMKTELDNNHGEDKHELDFLTTFVNSNFQAVNNSLMMGAKYETHDPGVHLDISGDVEKPLMKASARETKDKKGKTPARS

SEQ ID NO: 18307 - DNA, 480 bp, Glycine max
aatactcttcgcgacaacaaaaaccaagaacgaagtgcactattattacgtgttttcaatctctcacccatttccttcttcagagtctctctctgtttccaacttggtgtgaaaagtgaaagagggaacaagaagttgacggtagcagaatggtggtctccagtacaaatccccacaataaggagatagctatcaggaggaggattgctagcatatttaataaacgtgaagatgatttcccatctttgagagaatacaatgattacttggaggaagtagaggacatgacatttaacttgattgaaggaatagatgtttcagatattgaagcaaaaattgccaaataccaggaagaaaatgcagaacaaataatgattaatcgagctcggaaggctgaagaattagctgcagctatggcagcaagtaagggacaacctgcacaaactgatgatgattcagccacaaaccaaaactcccaag

SEQ ID NO: 18308 - protein, 110 aa, Glycine max
MVVSSTNPHNKEIAIRRRIASIFNKREDDFPSLREYNDYLEEVEDMTFNLIEGIDVSDIEAKIAKYQEENAEQIMINRARKAEELAAAMAASKGQPAQTDDDSATNQNSQ

SEQ ID NO: 18309 - protein, 65 aa, Glycine max
MTFNLIEGIDVSDIEAKIAKYQEENAEQIMINRARKAEELAAAMAASKGQPAQTDDDSATNQNSQ

SEQ ID NO: 18310 - protein, 62 aa, Glycine max
NTLRDNKNQERSALLLRVFNLSPISFFRVSLCFQLGVKSERGNKKLTVAEWWSPVQIPTIRR

SEQ ID NO: 18311 - DNA, 952 bp, Glycine max
attgctcctcgcgcttaaacactttcgggcgagtgtgtgtgtagcagtttctggttctgtttttggtttcgtttcagcaaaacctctcttcttcttctgattgattccacctcgcgatttttcgattttcgtttgttttcttctttttcggtttctgatctgaactcgattcgattcgctattgccggaaaatgagtcctccggcaagtgtccggtgatgatcgctccctcgagaggttgttgaggttatcgttgttgttcttcgaagtcatggtttcgatctgaggttttggcgctctcgagttcgttttgtactgttttacgtgtgacatgtgaattggaatgcttattccagcttatacaaaacagagacggatctcttcctattgttctcgctttgtttcttttgcagtagcatcatcatcatcaccataccttgttcagattctgctcactttcaccacaacggctttactatttaccgcgtttcgttttcgtgtcaccgcaaataatgaaaggaggtgttccctgtatccactcctcgtcagggaagatctgaagcagtgctagctgctcacgtcctgtaatggacgcatactcctccggcgaagaagtggttgttaagactagaaaaccatatacaatcactaagcaaagggaacgatggacagaggaggagcataataggtttctagaagctttgaaactacacgggcgagcatggcagcgcatagaagagcatataggaacaaagactgccgtgcaaataaggagtcatgcacagaagttctttacaaaggtcaatgggtaccttctcaccttggtttatatgtttaaaatttccttccttttgtttttaacttatgctttaaaagacttgctgtcgatttatgtatcagttccgtatctcttttgattcactttgatgaataaaaatcccttctaactgccc

SEQ ID NO: 18312 - protein, 109 aa, Glycine max
MDAYSSGEEVVVKTRKPYTITKQRERWTEEEHNRFLEALKLHGRAWQRIEEHIGTKTAVQIRSHAQKFFTKVNGYLLTLVYMFKISFLLFLTYALKDLLSIYVSVPYLF

SEQ ID NO: 18313 - protein, 75 aa, Glycine max
MLIPAYTKQRRISSYCSRFVSFAVASSSSPYLVQILLTFTTTALLFTAFRFRVTANNERRCSLYPLLVREDLKQC

SEQ ID NO: 18314 - DNA, 1103 bp, Glycine max
atttgttccattccgtgcgcggtgaatggtgatcttattgtatttgagacttgagttggaagtcatggcgattggtaatgagaatcagccacaacaatctgaaggcaaagtgtggaatttgttcaagcttccctttcgccattcaacttcaactcctcacaatcacaatcaagtttccacctccaattctgtttcttcctttgccaaatcgctcctcccctcaccacgtcgtcttaagcttgatccttccaacaagctctacttcccttatgagccgggcaagcagggtaggagtgccatcaggattaaaaacaccagcaaatccaacgtagctttcaagtttcaaacaaatgcacccaagagttgtttcatgcgccctcctgggggcattctggcaccgggcgagagtataattgcaactgtgttcaagtttatagaacatccattgaataatgaaaagccagaaaaaactggactcaaattcaaaatcacgagcttgaaggtcaaaggaccaattgattatgtccctgaaatgtttgatgagctgaaggatcaagtaacagtggagcagattttgcaggttgtttttcttgatccagagcgtaactgtcctgctttggaaaaactgaagcttcagctggttgaggctgatgctgctgttgaggcacgtaagagagccccagaagatgcaggtcctaagattctcggagaagggctcgtcgtagatgaatggaaagagaggagggaaagatacctggccaaacagcagggtgaagtggtagtggactctatatagctaagttttgagtaggaaattgtgttactgcgggaaggtgactttagggaaacaattatatttaatcgcaacgtttggcttagcgaaaattaaagtggtgaatgactagcgtgaagtgttcttttgagaaacttatgattagatgagaacatcctctattatgtacataagtgtcagtgtcattgcatttgggtttcctggaatgatattttgatggattgatgtaaaatggtagtttttgtaagatggatgatttgctgtcatggcatggtttcatggtaaacttcaattgttgagattttcatcc

SEQ ID NO: 18315 - protein, 256 aa, Glycine max
MVILLYLRLELEVMAIGNENQPQQSEGKVWNLFKLPFRHSTSTPHNHNQVSTSNSVSSFAKSLLPSPRRLKLDPSNKLYFPYEPGKQGRSAIRIKNTSKSNVAFKFQTNAPKSCFMRPPGGILAPGESIIATVFKFIEHPLNNEKPEKTGLKFKITSLKVKGPIDYVPEMFDELKDQVTVEQILQVVFLDPERNCPALEKLKLQLVEADAAVEARKRAPEDAGPKILGEGLVVDEWKERRERYLAKQQGEVVVDSI

SEQ ID NO: 18316 - protein, 243 aa, Glycine max
MAIGNENQPQQSEGKVWNLFKLPFRHSTSTPHNHNQVSTSNSVSSFAKSLLPSPRRLKLDPSNKLYFPYEPGKQGRSAIRIKNTSKSNVAFKFQTNAPKSCFMRPPGGILAPGESIIATVFKFIEHPLNNEKPEKTGLKFKITSLKVKGPIDYVPEMFDELKDQVTVEQILQVVFLDPERNCPALEKLKLQLVEADAAVEARKRAPEDAGPKILGEGLVVDEWKERRERYLAKQQGEVVVDSI

SEQ ID NO: 18317 - protein, 141 aa, Glycine max
MRPPGGILAPGESIIATVFKFIEHPLNNEKPEKTGLKFKITSLKVKGPIDYVPEMFDELKDQVTVEQILQVVFLDPERNCPALEKLKLQLVEADAAVEARKRAPEDAGPKILGEGLVVDEWKERRERYLAKQQGEVVVDSI

SEQ ID NO: 18318 - DNA, 898 bp, Glycine max
aagacacaactccaacaaggcattgtttggtttggtttggttacttgaaaatctcgaatcgcttaattttgatttagttttccaccgcaacgcggaacctctttctcgaactggctaactctcaggcaagtggctcggacgctgattccagcaacacacggctggtggttgcactgtatgacgccctaaactccggcgactccaacgccgtcgtcaagatcgtcgccgccgacctcgagtggtggttccatggtccgccctctcaccagtttttgatgcgcatgctcaccggcgactccgccgccgacaactccttccgattcgttccgcagtccatcgccgccttcggctccaccgtcatcgtcgagggctgcgactccgcccgcaacattgcctgggtccacgcctggaccgtcactgatgggatgatcactcaaatcagagagtacttcaacaccgccctcaccgtcactcgcatccacgattccggcgagattgttccggccagatccggcgccggccgtttgccctgcgtctgggagagcagcgtctccggtcgggtcgggaaatccgtccccggtttggttctcgcaatataaaatataaaataagtaattagggaaggacgaggtcacgtgttgccgttgctataataattaaataagggacttgtgcacgtggcggtgactggatcgatcggtttcagggaacattgatactttgtgttagtattggaggttagggagatgtgagagctttgttgttattggtgtggtttgttttgtttgcttgtgtgtttttcaccactatgggcgtattcaggtggttgtatctttcttttgttatttggagtgttgatgatgatgcaataagaatatctatggactatgcttttaag

SEQ ID NO: 18319 - protein, 107 aa, Glycine max
MRMLTGDSAADNSFRFVPQSIAAFGSTVIVEGCDSARNIAWVHAWTVTDGMITQIREYFNTALTVTRIHDSGEIVPARSGAGRLPCVWESSVSGRVGKSVPGLVLAI

SEQ ID NO: 18320 - protein, 105 aa, Glycine max
MLTGDSAADNSFRFVPQSIAAFGSTVIVEGCDSARNIAWVHAWTVTDGMITQIREYFNTALTVTRIHDSGEIVPARSGAGRLPCVWESSVSGRVGKSVPGLVLAI

SEQ ID NO: 18321 - protein, 57 aa, Glycine max
MITQIREYFNTALTVTRIHDSGEIVPARSGAGRLPCVWESSVSGRVGKSVPGLVLAI

SEQ ID NO: 18322 - DNA, 584 bp, Glycine max
accatttcttcaaaccttatctttcctcaaaaacacacacagacgatggcgtcgctgctaatcggagctcctccgcgagtcaccgtcgcatcatcttcgaggctatcatcatctcactcggaaaccgtcggtgtctctctcccttgcttcactcagcagctgtctctctccgcttcgtcatcatccagctcaattccacttgtgtactgtggccgaggcgaccgcaaaacagcgagaggaaagcgtttcaatcactccttcgggaatgcgaggccacggaacaaggataaaggaagagggccgcagagagtaccagtccctcctgcaccaccgaggaaggataagtttgagaacgacgagaagatcaagattgacatcgacgagtccctcttctccaactagagtctttcttcacttcttctcactgtaattctctatttgagtagaagatgctgctactctttcttgctgttaaacatatcctctttctatgaaaaaatctgctttcttgttttcattgataatgtttctgtaatatgagtgatcgagtcttaactttgttttattaagagacattgaaagat

SEQ ID NO: 18323 - protein, 133 aa, Glycine max
TISSNLIFPQKHTQTMASLLIGAPPRVTVASSSRLSSSHSETVGVSLPCFTQQLSLSASSSSSSIPLVYCGRGDRKTARGKRFNHSFGNARPRNKDKGRGPQRVPVPPAPPRKDKFENDEKIKIDIDESLFSN

SEQ ID NO: 18324 - protein, 118 aa, Glycine max
MASLLIGAPPRVTVASSSRLSSSHSETVGVSLPCFTQQLSLSASSSSSSIPLVYCGRGDRKTARGKRFNHSFGNARPRNKDKGRGPQRVPVPPAPPRKDKFENDEKIKIDIDESLFSN

SEQ ID NO: 18325 - protein, 95 aa, Glycine max
HFFKPYLSSKTHTDDGVAANRSSSASHRRIIFEAIIISLGNRRCLSPLLHSAAVSLRFVIIQLNSTCVLWPRRPQNSERKAFQSLLRECEATEQG

SEQ ID NO: 18326 - DNA, 904 bp, Glycine max
attctgtgccccccaacttgtcattcaattccaccctgaagattgtgcttcaggtggttcaaagaagatgggttcactagaaagatcaaagaagaaagttcttctatggaagaaggccatgctccatttttccctatgttttttgatgggggttttcacaggcttagctccaacaggtaaatcttctctcttttccaccaaagttgctgtctcaaataggacagaatttgcaccacaacctagtgaaatgtcaaacctcacaacaaatgtcaatagaatttggatagctccaatgccagataccatgcccgtgaagcctagaatccttgaaaatgaaaagaaaaaaacaacaaagttgcatgcaaaaaaacagccccagttgaagcctagaagactcataatcattgtaacaccaacaagcacaaaactaccccaccaagcagtgtttttgagaaggttggcaaatactataaagctggttcctcaaccattgctgtggtttgttgtggaagctaaaaccaattccacagaactgccagagatattaaggaaaactggcatcatgtataggcatgtggttttcaaggaaaatttcacggaattagaagctgaactgaatcaccagaggaatcttgcacttaagcacattgagcaccacaggctcaacggcattgtacactttgctggcctttccaatgtttatgatctccaattcttccatcagcttagagatattgaggtctttggaacatggccaatcgcattgttagctgcacacaggaagaaagtgaaaatcgaaggacctgtatgtgattcatcacaagtcattggttggcatcttaggaatatgaacaatgaaactgatacaatcactcccccaattcatatttcaagttttgctttt

SEQ ID NO: 18327 - protein, 301 aa, Glycine max
FCAPQLVIQFHPEDCASGGSKKMGSLERSKKKVLLWKKAMLHFSLCFLMGVFTGLAPTGKSSLFSTKVAVSNRTEFAPQPSEMSNLTTNVNRIWIAPMPDTMPVKPRILENEKKKTTKLHAKKQPQLKPRRLIIIVTPTSTKLPHQAVFLRRLANTIKLVPQPLLWFVVEAKTNSTELPEILRKTGIMYRHVVFKENFTELEAELNHQRNLALKHIEHHRLNGIVHFAGLSNVYDLQFFHQLRDIEVFGTWPIALLAAHRKKVKIEGPVCDSSQVIGWHLRNMNNETDTITPPIHISSFAF

SEQ ID NO: 18328 - protein, 279 aa, Glycine max
MGSLERSKKKVLLWKKAMLHFSLCFLMGVFTGLAPTGKSSLFSTKVAVSNRTEFAPQPSEMSNLTTNVNRIWIAPMPDTMPVKPRILENEKKKTTKLHAKKQPQLKPRRLIIIVTPTSTKLPHQAVFLRRLANTIKLVPQPLLWFVVEAKTNSTELPEILRKTGIMYRHVVFKENFTELEAELNHQRNLALKHIEHHRLNGIVHFAGLSNVYDLQFFHQLRDIEVFGTWPIALLAAHRKKVKIEGPVCDSSQVIGWHLRNMNNETDTITPPIHISSFAF

SEQ ID NO: 18329 - protein, 262 aa, Glycine max
MLHFSLCFLMGVFTGLAPTGKSSLFSTKVAVSNRTEFAPQPSEMSNLTTNVNRIWIAPMPDTMPVKPRILENEKKKTTKLHAKKQPQLKPRRLIIIVTPTSTKLPHQAVFLRRLANTIKLVPQPLLWFVVEAKTNSTELPEILRKTGIMYRHVVFKENFTELEAELNHQRNLALKHIEHHRLNGIVHFAGLSNVYDLQFFHQLRDIEVFGTWPIALLAAHRKKVKIEGPVCDSSQVIGWHLRNMNNETDTITPPIHISSFAF

SEQ ID NO: 18330 - protein, 253 aa, Glycine max
MGVFTGLAPTGKSSLFSTKVAVSNRTEFAPQPSEMSNLTTNVNRIWIAPMPDTMPVKPRILENEKKKTTKLHAKKQPQLKPRRLIIIVTPTSTKLPHQAVFLRRLANTIKLVPQPLLWFVVEAKTNSTELPEILRKTGIMYRHVVFKENFTELEAELNHQRNLALKHIEHHRLNGIVHFAGLSNVYDLQFFHQLRDIEVFGTWPIALLAAHRKKVKIEGPVCDSSQVIGWHLRNMNNETDTITPPIHISSFAF

SEQ ID NO: 18331 - DNA, 835 bp, Glycine max
aatattaatctcttccatcacttaaatctcaattcaccgcaaaccaaaaaaagcttcatcatcatcttcttcttctctgcatcatcacaatggctgaagtacgttcacaacaacaacaaccccagcatgtgcaagtccacgcaaccacaacacacaccccacaacaccatggcggggaaggtggcagcggcattctgaacctcatcccggagatgtccctcacgggttcccaactcctagctctcctcgccggcgttccccttggtgcaatgctgctcctcctctccggcatctcgctcatcgccagcctcttggggctggcggtggcgacgccgctcttcatcttcttcagcccgctgctggtccccgccgccttcgccataggaatggcggtgaccgcggtgctggcggcgggggcgtgcgggctggcggggctcgtgttgttctcgtgggtggtgaactatctccggcagatgccacgggggacgacgatgatgacggtgctgccggagcaagcgaagcggcacgtggcggacatggcggagtacgtggggcagaagacgaaggaggttgggcaagacattcagacaagggcacatcatgcccagggaacaacaaggatgacagtgcattgagttatcatgagacaagaaaatggtttcaatttatatcgcttatgtatgacttgtgagatatactagtatgtaattaacctttggtacgtgtgttttggactttggaggagttccattttcagtgttccatgttgtgtcactttctgtatttgctcatgtacgtgtaatcagtaatattaatgcatttttcttttgggttc

SEQ ID NO: 18332 - protein, 181 aa, Glycine max
MAEVRSQQQQPQHVQVHATTTHTPQHHGGEGGSGILNLIPEMSLTGSQLLALLAGVPLGAMLLLLSGISLIASLLGLAVATPLFIFFSPLLVPAAFAIGMAVTAVLAAGACGLAGLVLFSWVVNYLRQMPRGTTMMTVLPEQAKRHVADMAEYVGQKTKEVGQDIQTRAHHAQGTTRMTVH

SEQ ID NO: 18333 - protein, 140 aa, Glycine max
MSLTGSQLLALLAGVPLGAMLLLLSGISLIASLLGLAVATPLFIFFSPLLVPAAFAIGMAVTAVLAAGACGLAGLVLFSWVVNYLRQMPRGTTMMTVLPEQAKRHVADMAEYVGQKTKEVGQDIQTRAHHAQGTTRMTVH

SEQ ID NO: 18334 - protein, 121 aa, Glycine max
MLLLLSGISLIASLLGLAVATPLFIFFSPLLVPAAFAIGMAVTAVLAAGACGLAGLVLFSWVVNYLRQMPRGTTMMTVLPEQAKRHVADMAEYVGQKTKEVGQDIQTRAHHAQGTTRMTVH

SEQ ID NO: 18335 - DNA, 941 bp, Glycine max
atccttttctctgggaattatagtttgtagagaacacatacatacattttcattttcagaggaatgatcatggaagaatcctcggtacacgagatcaaaacccctctcctgtcatctaacaatgaggaagatgaagttggaagcagtactagccataggcagcaaaatgaagagaactcgcccataaaacaagtggccctaacggtgccaaccaccgatgacccatctcttccagttctgacgttccgaatgtgggtgttgggaactctatcatgcgtgctgctgtcgttcctgaaccagttcttctggtaccgcatccagcctctcaccatcaccgcgatctccgcccagatcgcggtggtgccgctcggccaactcatggccgcaacgatcactaagcgcgtgttcttcagaggaacacgctgggaattcactctcaatccgggacccttcaacgtcaaggagcacgttctcatcaccatcttcgccaactccggcgccggcaccgtctacgccatccacgttgttaccgctgtcaaaatcttttaccacaaacacatctccttctttgtctccttgcttgtggtcatcaccacacaggtattgggtttcggatgggctggcatatttagaagatacctggtagagccagcggcaatgtggtggccagcaaatttagttcaagtttcactcttcaggtaataattataatactacagcattaacattttattattctaatttatatggtcaatatgaagagtaaatgtattgaatactatgctctagctagtaacttgacacactacgtaagaattagttagttcgccgacaatatcgtaataagatacaaaagtatccatacctaccaataacatcaatgtaatatatttacgattttttagtttacctatatgtcatcactcactcttgcgtggtgt

SEQ ID NO: 18336 - protein, 212 aa, Glycine max
MIMEESSVHEIKTPLLSSNNEEDEVGSSTSHRQQNEENSPIKQVALTVPTTDDPSLPVLTFRMWVLGTLSCVLLSFLNQFFWYRIQPLTITAISAQIAVVPLGQLMAATITKRVFFRGTRWEFTLNPGPFNVKEHVLITIFANSGAGTVYAIHVVTAVKIFYHKHISFFVSLLVVITTQVLGFGWAGIFRRYLVEPAAMWWPANLVQVSLFR

SEQ ID NO: 18337 - protein, 210 aa, Glycine max
MEESSVHEIKTPLLSSNNEEDEVGSSTSHRQQNEENSPIKQVALTVPTTDDPSLPVLTFRMWVLGTLSCVLLSFLNQFFWYRIQPLTITAISAQIAVVPLGQLMAATITKRVFFRGTRWEFTLNPGPFNVKEHVLITIFANSGAGTVYAIHVVTAVKIFYHKHISFFVSLLVVITTQVLGFGWAGIFRRYLVEPAAMWWPANLVQVSLFR

SEQ ID NO: 18338 - protein, 150 aa, Glycine max
MWVLGTLSCVLLSFLNQFFWYRIQPLTITAISAQIAVVPLGQLMAATITKRVFFRGTRWEFTLNPGPFNVKEHVLITIFANSGAGTVYAIHVVTAVKIFYHKHISFFVSLLVVITTQVLGFGWAGIFRRYLVEPAAMWWPANLVQVSLFR

SEQ ID NO: 18339 - DNA, 843 bp, Glycine max
acgagtcactcttcttagtgatacttatcctttgctgaaccttgttgtgatctgacatggcagaagaacaacaacgacggatcctggtggccgtggatgaaggcgaggagagcatgtatgctctctcatggtgccttaagaaccttgcttttcaaaattccaaagacacccttcttcttctctacgtcaaaccccctcgagtcacttattcagccttcgatggcacaggatatttgttttcctctgacataacggctaccatggagaggtatagccaacaagtggccgattgcgtcttggagaaagccaagaaattgtgtaacaatattgaaaatgtagagacgagggtagagaatggcgatccaagggacgtgatttgtcagatggttcaaaagttgggtgctgatgtcttagtcatgggaagccatggttatggtctcatcaagagggctttccttggaagcgtcagcaatcactgtgcacagaacgtgaagtgcccggttttgattgttaagaagccaaaaccaaccaccggagaaacataataatgataataataataaattaatcgttactagctttgtttttatgtaaaaaatagacaaccagtttgcttctgtcgcttatgtgttatttgggctctgtgtgttttgtttgtttctcctctaaaggaatatctcgccaaatattaaatgttaaaggctaagtgaagatgaggatgcacgccttttggttttgactttattattttctattcaaaagtttcctattcgtttgttacttttacataatttgtactccatgttgaactattgaatattgataatgctcctaaatcatgat

SEQ ID NO: 18340 - protein, 162 aa, Glycine max
MAEEQQRRILVAVDEGEESMYALSWCLKNLAFQNSKDTLLLLYVKPPRVTYSAFDGTGYLFSSDITATMERYSQQVADCVLEKAKKLCNNIENVETRVENGDPRDVICQMVQKLGADVLVMGSHGYGLIKRAFLGSVSNHCAQNVKCPVLIVKKPKPTTGET

SEQ ID NO: 18341 - protein, 143 aa, Glycine max
MYALSWCLKNLAFQNSKDTLLLLYVKPPRVTYSAFDGTGYLFSSDITATMERYSQQVADCVLEKAKKLCNNIENVETRVENGDPRDVICQMVQKLGADVLVMGSHGYGLIKRAFLGSVSNHCAQNVKCPVLIVKKPKPTTGET

SEQ ID NO: 18342 - protein, 94 aa, Glycine max
MERYSQQVADCVLEKAKKLCNNIENVETRVENGDPRDVICQMVQKLGADVLVMGSHGYGLIKRAFLGSVSNHCAQNVKCPVLIVKKPKPTTGET

SEQ ID NO: 18343 - DNA, 806 bp, Glycine max
cataacatatctccctctccaaatggcattcccagttatcagcagtgactactgtgctccttacgctatcaatcttcaaatcaatacaaaaacaggtttcacgtacgacgcaaacaatgcctgtcgcttttatatcgaagataaattattcacacttcacaagcgacgtgtcttgtgtgataatcaaggaaaccccattgtcactctatacaagaagagaatgacattgcatgggcgatgccaagtttttaggggttataaaagcaaagatttctctcaattgctcttttcagtgaagagatcatcaatgataccgagtgggatggttaacttagaggtcttcctcgctaacaaccaaagagaaagtgcctgtgactttagagtcaacgtttaatttgtagagataaaagatcatgcactgtttatgccggtgaatctcctagaattgttgccacgatggagaataatggcggcttcaatgttttggtcgatccctatgtggactacgcattcatagtggcactacttatgattgttagcgagatgaaacattattttgatgaaatggtgaatttggccgcccgaatgacaattgcattgggtagtagtatgacttaacagagctccaaaacaattttactcaattatggacctaattaaaattaaatcatgggcttgatttctgttagaatagatagggtttgacttttgtttttagaggaatgtttatttccacttcagtaccttagatctaagttttgttgtaccagtacaagtatcatttcttaaaacaaatgcttgaaaac

SEQ ID NO: 18344 - protein, 130 aa, Glycine max
ITYLPLQMAFPVISSDYCAPYAINLQINTKTGFTYDANNACRFYIEDKLFTLHKRRVLCDNQGNPIVTLYKKRMTLHGRCQVFRGYKSKDFSQLLFSVKRSSMIPSGMVNLEVFLANNQRESACDFRVNV

SEQ ID NO: 18345 - protein, 123 aa, Glycine max
MAFPVISSDYCAPYAINLQINTKTGFTYDANNACRFYIEDKLFTLHKRRVLCDNQGNPIVTLYKKRMTLHGRCQVFRGYKSKDFSQLLFSVKRSSMIPSGMVNLEVFLANNQRESACDFRVNV

SEQ ID NO: 18346 - DNA, 1131 bp, Glycine max
gaattgcaacccaagctataggtttaataaacgttgaaactattcctcctgcgccatctccattgctgttttctctctgcttgctattacaatccaattcaagaagttcgttcaactttgatgctcaagtctaacaacatatataaccattgacagatattcaaattcagcataattgtgattaaaattttggtccttccctggaatgaaaatactgtttgtcaataaatttgggagtgatttttgcggttatatttaatgggctgctactgttcaacttcaaagaaaaccgaagcacaaggttatgaggaacccactgttcttgcatctgtgacaccttgtgagtaccatgatccatcattgaatgttactgttagtgaagtagaggccttgcatgaactctacaagaagttgagcaattcaattattgaagatggtcttattcacagggaagaattccagctggcactattcaggaataaaaacaagaaaaatctgtttgcagataggatttttgacttatttgatctcaagcgcaacggggtcattgagtttggggaatttgttcgatcactgggtgtttttcacccaaatgcagcattagaagacaagattacctttgcttttaggttgtatgatctgaggcagacagggtttattgaacgagaggagttaaaggagatggtattggcacttttgcatgagtcggatcttgagctttcagatgatatgattgaaaccattgtggataagacttttagtgatgctgatataaacggtgatggaaggatcgatcaagatgaatggaaagcatttgtgtccaagcatccatccttgataaagaatatgacacttccatatctgaaggatattaccttggcttttcccagttttgtcacaggaacggatattgaagagtcagagatgtgactctgggaggttttggcttcaccaataatgatgctatacactagcatagtagtatttgagtcattttgaatacaaggttagaagtactcttgagaatttttctattggaaaaagttctatatttttaatagaaaagctctaaaaaacacttctggtttgtatccaaacataccatatatatctttgatttcgtctcttgat

SEQ ID NO: 18347 - protein, 223 aa, Glycine max
MGCYCSTSKKTEAQGYEEPTVLASVTPCEYHDPSLNVTVSEVEALHELYKKLSNSIIEDGLIHREEFQLALFRNKNKKNLFADRIFDLFDLKRNGVIEFGEFVRSLGVFHPNAALEDKITFAFRLYDLRQTGFIEREELKEMVLALLHESDLELSDDMIETIVDKTFSDADINGDGRIDQDEWKAFVSKHPSLIKNMTLPYLKDITLAFPSFVTGTDIEESEM

SEQ ID NO: 18348 - DNA, 1069 bp, Glycine max
caattggcgattcttcctcacggacctaaaccgcaagtggcctaactcccctacaacaccatagctaaactccaaccacatattcttaaaccaagttcacatatataaattaaggtacatagctcaaaattttgtgccacacaccaacccaagtgccaaaatgaaagcccatttggtccttttcttgctcatgattcttgtcaccttcactagcaatgttaacactctctcgattaatcccaaatctaactcttcaattcctcaattgacccaacagaaaaggcctgacaatgagaccatatatagggtgtcaaagcagctatgttggggttgcattgcggagtcactagagtttttgttcaggcacaacttggtgagagcagccaagtgggaacttccactgatgtgggacttccagctggagcaatacgcgaggtggtgggctggtgaaaggaaagcagattgcaagctcgaacattctttcccagaagatggtttcaagcttggagagaacatttattggggtagtggctcagcgtggacgccaagtgatgctgtaagagcatgggctgatgaagagaaatactacacctacgccactaatacctgtgtgccaggtcagatgtgtggccattacactcaaatagtatggaagagcacccgaagaattggatgtgctcgggttgtatgtgatgatggagatgtcttcatgacttgtaattatgaccctgtgggcaattatgttggagagcgaccctattagattcttataaactatgtgtgcattaattcatgtggatagattgaaactctagtattacataatatgtagtgctagcttatgtgagtgtcatgaatttactagctagtttagtttagcagtgagtatgtgcgagtgtatgtatatagtacttgtgggagaatatgggattggttttaataattacctagtacttggaacaataaataaaagtaccaagaagtaattaaagggtaccagtagttggagatctgttgcctgaggttaaactttgagtcaagtgaaataaaatatttatcctcccatgtg

SEQ ID NO: 18349 - protein, 200 aa, Glycine max
MKAHLVLFLLMILVTFTSNVNTLSINPKSNSSIPQLTQQKRPDNETIYRVSKQLCWGCIAESLEFLFRHNLVRAAKWELPLMWDFQLEQYARWWAGERKADCKLEHSFPEDGFKLGENIYWGSGSAWTPSDAVRAWADEEKYYTYATNTCVPGQMCGHYTQIVWKSTRRIGCARVVCDDGDVFMTCNYDPVGNYVGERPY

SEQ ID NO: 18350 - protein, 190 aa, Glycine max
MILVTFTSNVNTLSINPKSNSSIPQLTQQKRPDNETIYRVSKQLCWGCIAESLEFLFRHNLVRAAKWELPLMWDFQLEQYARWWAGERKADCKLEHSFPEDGFKLGENIYWGSGSAWTPSDAVRAWADEEKYYTYATNTCVPGQMCGHYTQIVWKSTRRIGCARVVCDDGDVFMTCNYDPVGNYVGERPY

SEQ ID NO: 18351 - protein, 119 aa, Glycine max
MWDFQLEQYARWWAGERKADCKLEHSFPEDGFKLGENIYWGSGSAWTPSDAVRAWADEEKYYTYATNTCVPGQMCGHYTQIVWKSTRRIGCARVVCDDGDVFMTCNYDPVGNYVGERPY

SEQ ID NO: 18352 - DNA, 832 bp, Glycine max
aaccttacgcattagatcaatattaaagctaaccactcgtttgcattgtatggtatatcattccaagaatctcagctgcagtaaacaacgaccatgaaactaatgacagcaacaacaacgtttgatgtctctgccacatgcttccgtgcccctcctccttcgtgctcaatgaatccatgccacaccagtttttcagttataaactccctgaatcctcacaagggacgacggataagcgttgctgttccacccaagtttccaaacttccggagggaagcatctctgcaggggaatttggaggctattagagtcccaacttcggtgcctgtgcgtgtagcatacgagcttcttctagctggtcatcgatatttggatgtaaggaccccggaagagttcgatgctggacacgctcctggcgcaattaacattccttatatgttcagagttggatcagggatgacaaagaacagcaactttattagagaggtgtcttcacagtttaggaaagatgatgaaattattgtcgggtgtgagcttggtaaaagatctatgatggccgcaagtgacttgctagctgctgggttcactggactcacagacatggctggtggttatgctgcatggacacaaaatggacttccaacagagctatgaagtgtttctgttggaactgtagctgtaaatagaataagttttgggaggagtccaatgcatggaaatgcagaaacacttcaccaagacagtgacaatctgacactgggaaaacaaaaatctataaatggaaaattaaatgtatttgtcgatatcaacaataaataaaatgttaatatat

SEQ ID NO: 18353 - protein, 186 aa, Glycine max
MKLMTATTTFDVSATCFRAPPPSCSMNPCHTSFSVINSLNPHKGRRISVAVPPKFPNFRREASLQGNLEAIRVPTSVPVRVAYELLLAGHRYLDVRTPEEFDAGHAPGAINIPYMFRVGSGMTKNSNFIREVSSQFRKDDEIIVGCELGKRSMMAASDLLAAGFTGLTDMAGGYAAWTQNGLPTEL

SEQ ID NO: 18354 - protein, 183 aa, Glycine max
MTATTTFDVSATCFRAPPPSCSMNPCHTSFSVINSLNPHKGRRISVAVPPKFPNFRREASLQGNLEAIRVPTSVPVRVAYELLLAGHRYLDVRTPEEFDAGHAPGAINIPYMFRVGSGMTKNSNFIREVSSQFRKDDEIIVGCELGKRSMMAASDLLAAGFTGLTDMAGGYAAWTQNGLPTEL

SEQ ID NO: 18355 - protein, 161 aa, Glycine max
MNPCHTSFSVINSLNPHKGRRISVAVPPKFPNFRREASLQGNLEAIRVPTSVPVRVAYELLLAGHRYLDVRTPEEFDAGHAPGAINIPYMFRVGSGMTKNSNFIREVSSQFRKDDEIIVGCELGKRSMMAASDLLAAGFTGLTDMAGGYAAWTQNGLPTEL

SEQ ID NO: 18356 - DNA, 910 bp, Glycine max
atagttgaatttttaacttgtctgttcttatcttcatcctacgccaatagcccaaaaccttgttctctttttgtggttcatttctctcttccagatgccacttgccgttcttcaccctcacgattttctcaggaaaaacccatctaaccagtaccagaccataatccctcactctcccaacatgaatcctaataagtctcatcggacttcccgaaaccgtaagaagcggcccgatccaagcccacaaggcgttgtcagcccagcccggctcacattatccccgaaaccccaagtcaaaaacaagccgcagcagcaactcgtcatgggtcaggtcaaaatactcaaacgcggccaacttttgacccaaacgacgccggatccaccgccgcagacggaaatcgtcgatcagaagttaactccgcagacggaaaccgtcgaaaaaaaggacttaacttcaatcgtagatggtttatatgcaggctattcgatgttggtgatgtctccacctcctagctccgttccgttaccggctttcatcactaagaagattgcggttgttagtgacgccacgagcgacttgcggaaaatgttacggcttgattttccctaatcctgtggcggtttgtgaatgaacgaggatttgaacggaggttgttggtgattagggcattgtagtgctcgatcttctcttattttttcagcgggaaggtcgtgtcacgaatgcaagtctcttattgtttagaactttcttcagattgccgtacatacatgttactactgggattagtcttcgtactttttagattaattactttgtgatactaattattagttttaaggaataggcttctgtatatctgtgtaatgctttgtaagtatttaggatatagaagcattttcttcctctctc

SEQ ID NO: 18357 - protein, 171 aa, Glycine max
MPLAVLHPHDFLRKNPSNQYQTIIPHSPNMNPNKSHRTSRNRKKRPDPSPQGVVSPARLTLSPKPQVKNKPQQQLVMGQVKILKRGQLLTQTTPDPPPQTEIVDQKLTPQTETVEKKDLTSIVDGLYAGYSMLVMSPPPSSVPLPAFITKKIAVVSDATSDLRKMLRLDFP

SEQ ID NO: 18358 - protein, 142 aa, Glycine max
MNPNKSHRTSRNRKKRPDPSPQGVVSPARLTLSPKPQVKNKPQQQLVMGQVKILKRGQLLTQTTPDPPPQTEIVDQKLTPQTETVEKKDLTSIVDGLYAGYSMLVMSPPPSSVPLPAFITKKIAVVSDATSDLRKMLRLDFP

SEQ ID NO: 18359 - protein, 95 aa, Glycine max
MGQVKILKRGQLLTQTTPDPPPQTEIVDQKLTPQTETVEKKDLTSIVDGLYAGYSMLVMSPPPSSVPLPAFITKKIAVVSDATSDLRKMLRLDFP

SEQ ID NO: 18360 - DNA, 922 bp, Glycine max
aatcgtctccaccttgctttcttctccaatgtccgattctctcaccgatcttgcgccaaatacaaattcgttacatcctaacccagggttccgacgagcatggtggacggtccgacgagtccaggcaatggtagccatgagagtggcgagcatagccctcgctctaacgtgcgcgagtaggacaggtacctccccatcgctaacataagccccatcatgaagaaggcactacctacgaatggtaaaatcgccaaggacgccaaagagactgttcaggaatgcttatccgagtttttaagatcaacctttcagacacatgtattgagatggatggattacattcagcacaagcaagaatttgtaggtttatttgagaaaatattgttgcagaagcctggatttgagcccccggtaacacatcctgttggagttgtggaagctgatttaaaatcaaacaacactgagcaaagcgtaaagaatgtcagcaagtccgaagtagactcaagcaaggataaaaacaaagttgaggattgacggaaaagaaacagccggataagattacaccggtattttctttgcactcgttaactttgcatttttaaaattcataactcatgttttgtttaagggtgaagatttaacattcaacatgagtctaaaggtggggaacatgagtttagtggttgcattggagcagtatatcagcttctttcagagataaagttcctggatggatgaaagatactttttttgtgagtttgtattgttaaggcatagtattttgttatcttttgaagatcaattcttattatagtttaactagtaaatttttattcttttcttttagcctattcttatttttttctcttgttaaaaatcatagtaatgttatatggtgcaatttatggttttaggagtgcac

SEQ ID NO: 18361 - protein, 105 aa, Glycine max
MKKALPTNGKIAKDAKETVQECLSEFLRSTFQTHVLRWMDYIQHKQEFVGLFEKILLQKPGFEPPVTHPVGVVEADLKSNNTEQSVKNVSKSEVDSSKDKNKVED

SEQ ID NO: 18362 - protein, 68 aa, Glycine max
IVSTLLSSPMSDSLTDLAPNTNSLHPNPGFRRAWWTVRRVQAMVAMRVASIALALTCASRTGTSPSLT

SEQ ID NO: 18363 - protein, 67 aa, Glycine max
MDYIQHKQEFVGLFEKILLQKPGFEPPVTHPVGVVEADLKSNNTEQSVKNVSKSEVDSSKDKNKVED

SEQ ID NO: 18364 - DNA, 617 bp, Glycine max
ctatcaagttaatttgcgtctatattcattttggcatcgaggttgaatctcatcggagagagaaaaaccataaccatgtctggaagaggaaagggaggcaagggtctcggaaagggaggagcgaaacgacaccgtaaggttctgagggataacattcagggcataacgaagcccgcaattcgccgtctcgcgagacgtggcggcgtgaagcgtatcagtggtctcatctacgaagaaacccgcggtgttctcaagatcttcctcgagaacgtcattcgcgacgctgtcacctacactgagcacgctcgccgcaagaccgtcactgccatggacgttgtttacgccctcaagaggcagggcaggaccctctacggtttcggcggttagagaattaccgatttctgcattgcgtcgtggattagggtttcttatagtgtcagtcaatttcgctgttgatattatgcaacggttctttagctgtagcttgagatttaacgattgttctttgagtcgtagttatgagaatttttagtatgtcaatttgattatatttatgccttcttgttactcagcatgcaacgctaaactgaaatttatttgcaatgttcttatgcctt

SEQ ID NO: 18365 - protein, 103 aa, Glycine max; identical to SEQ ID NO: 71

SEQ ID NO: 18366 - DNA, 659 bp, Glycine max
aaaaccgtaaataaataaaggaaaatacccattaaacatttgtaaaaaaaggttttttggggattattaactaactaacataatggtgcgccttcacgtagctctccttcttctcttcattgccgtctccaccgccatcgtatcagctaccgataaaccgtcggtaaccaccgccggacctccaaccgcaacaactccgaccagtggagatgtcgaggcagcagaggctccaggagacgacaatgccatcggaacaaccgacgatgatgcacctggtactcccggagatgatgatgtggcagtcgccggacctatcggaagcgaaacttcgtacgcaaactatccgccgcctcagcaaacttccggcagtggcgtcactgctatgattggagtcgtttctgtcgctgctacgacggttggatcgttcttctttttctgaggtgtgattggtgcatgtaatttaagaaattaataatgtttttattgaatgttttggagtaatacttttttccttgtagatgtatcatgtataagcattttgcttgtcccttcatgtataacattgggacggtacatatcattacaacataaaaaactttgtgtatgtgattctcatatatatggtttattgtgtataataccttgtgattatttacgtg

SEQ ID NO: 18367 - protein, 118 aa, Glycine max
MVRLHVALLLLFIAVSTAIVSATDKPSVTTAGPPTATTPTSGDVEAAEAPGDDNAIGTTDDDAPGTPGDDDVAVAGPIGSETSYANYPPPQQTSGSGVTAMIGVVSVAATTVGSFFFF

SEQ ID NO: 18368 - DNA, 402 bp, Glycine max
aaaaagtgtatatagatatcgattgtagtgagctgtatcttccatctttcaatacattgaattaggtttataatttaaaaattttactcaaggaaaatgagtggctttagagcagcaggaatgaactacattcaagtgtccaacatttgtgctaagctgctaaggcgagctctaaagccaaatttgaagacagaggctctaaaacgagacgaatctgttgtgaggttcactccatggaaagatggaaaggcaatcactgaaaaataaagagattccggaaagattaagaggacgacataaggaaacccagcagcagttcaacataaagtcacctaaaaccatcttagattgaattgttaattatttaagctgtttttactcgctattaaagagtgttaattt

SEQ ID NO: 18369 - protein, 56 aa, Glycine max
MSGFRAAGMNYIQVSNICAKLLRRALKPNLKTEALKRDESVVRFTPWKDGKAITEK

SEQ ID NO: 18370 - protein, 48 aa, Glycine max
MNYIQVSNICAKLLRRALKPNLKTEALKRDESVVRFTPWKDGKAITEK

SEQ ID NO: 18371 - protein, 36 aa, Glycine max
MERQSLKNKEIPERLRGRHKETQQQFNIKSPKTILD

SEQ ID NO: 18372 - DNA, 817 bp, Glycine max
attaacattcctccaagcaccatcaagattcaagcacatagttatcatcaattccccagctagttttggccacgcctgcatcttcttctgctttaagctatggcctctaacttcagcttgagaactttgatgatatttgcccttgcattttctctcgccctgcaaggcactcttggagggatagaatgcgagagtctgagccatgacacatgctcattcgccgtgacatctgctggcaaacgatgtgtgcttgagaagcaggtgaagaggactggtgaggaagcatacacatgcaggacatcagagattgaagctgataaactgaaggaccacattgaaactgaacaatgcatcaaggcttgtggtttggacagaaagtcccttggaatctcatcagactctcttcttcaatctagcttcacgcaaaagctctgctcccccatctgctaccagtgttgcccaaacgttgttgacttatacttcaatctggcagctggtgaaggtgtgtttcttcccaagttgtgtgaagcacaaggtctaaatgctcgtcgaggaatggctgaactgaaaagctctggtatcgtggcaccgggacctgtgcacggtgtgcagttcacagctactcctccgattaaccctgtggagctcacaattgaacctgccgttgccccatcaccaaactaaagtcaagtctagtttttttagaacacgcaaaagaaattgagaaaagcgtgtattaaacaacttagcatatactagtatacagatgagagtggcatatatactatattttgtttgtaataatgaagttgcacct

SEQ ID NO: 18373 - protein, 194 aa, Glycine max
MASNFSLRTLMIFALAFSLALQGTLGGIECESLSHDTCSFAVTSAGKRCVLEKQVKRTGEEAYTCRTSEIEADKLKDHIETEQCIKACGLDRKSLGISSDSLLQSSFTQKLCSPICYQCCPNVVDLYFNLAAGEGVFLPKLCEAQGLNARRGMAELKSSGIVAPGPVHGVQFTATPPINPVELTIEPAVAPSPN

SEQ ID NO: 18374 - protein, 184 aa, Glycine max
MIFALAFSLALQGTLGGIECESLSHDTCSFAVTSAGKRCVLEKQVKRTGEEAYTCRTSEIEADKLKDHIETEQCIKACGLDRKSLGISSDSLLQSSFTQKLCSPICYQCCPNVVDLYFNLAAGEGVFLPKLCEAQGLNARRGMAELKSSGIVAPGPVHGVQFTATPPINPVELTIEPAVAPSPN

SEQ ID NO: 18375 - DNA, 1026 bp, Glycine max
aagatgcatttttctttttctattcaacatggattgttgaaggtagctgaaagagctcttttcttatggaacaatgaccacatcgtcaacttgattgcgcataaccgacaagtgatcctgcccatcatatttccagctttagacaggaatgttcaaagccattggaaccctgctgtcgtcaacctaactcacaatattagaaagatgttcttggagatggatgagaagctcttcatttcttgtcataatcactttaaggaggaagaagcaatcttgatctcaacagcggagaagcggaaggaggcatggaaacaactagagcatgcagccagtctcaggcccgtaattggaaatactgcagttttagtgtcctgacttgcattgcgggctggatcctcaatccttgttaacctcatgttatggtggaaaatctcaagatatgtggaatagctggttattgggagtggcattttgtatttgaatcctatgttcttagccttaattgcaaaaatattcctcctatttttttcaacttactaaattggtcctcttatattttaattcactgtcagagtctttttttttttttttaaatggctatttgtgttcttagagtagaaattgaacattgatggttaaggggaaatgttactaatacgtgttattatctaattggtaagtaaaatggtaaataaaaattaatgattaataagacaatgacacttgggagtaaatgttctttattaacagtccacgttcaattttagatatgggaatttaaatagtcaattttagatatgggaatttaaatagtcaattaaaatatagaagattgattttttgagtttgagtttgaataaataggaggattattttttgcaattaagccatgtacttatgatgcttttgaagtgagagggttttgattgctactgtgtggtacatcatgatgaagaccatgcagtgaatgaaaccattttctgtgcaactttatttccaaaatcttccgtgtatgttcttttactc

SEQ ID NO: 18376 - protein, 124 aa, Glycine max
KMHFSFSIQHGLLKVAERALFLWNNDHIVNLIAHNRQVILPIIFPALDRNVQSHWNPAVVNLTHNIRKMFLEMDEKLFISCHNHFKEEEAILISTAEKRKEAWKQLEHAASLRPVIGNTAVLVS

SEQ ID NO: 18377 - protein, 123 aa, Glycine max
MHFSFSIQHGLLKVAERALFLWNNDHIVNLIAHNRQVILPIIFPALDRNVQSHWNPAVVNLTHNIRKMFLEMDEKLFISCHNHFKEEEAILISTAEKRKEAWKQLEHAASLRPVIGNTAVLVS

SEQ ID NO: 18378 - DNA, 667 bp, Glycine max
acagagcagaagattgatgcccatttttcacagccagaaattgtagtagaagaccaagtggataaaccgattcctgtgcaagacaaatctgatatcgctgaagaggttactgctgctgccaaagaaaaccaattgcctgaacatcctcaaagtagtctaacatttgatgatccaagtaaagaatctgtggcacaatctgatgggattattggaatacaaagcactgagacagacaatgccccaagactggaagagggacatcatacatccacatctacacagaccagtgcagttccagatgaaaatgggatgaaaaatattcaacctgagcaactggaaatacaagaaacagagagaagagagagtgcattaggcaaagatatagagcaactacctaccctccttgaggagtatcagttaaggaataaatctgaaaaaagccctgcaacttatatatctagtcatggctttactgagaatagccattttcctgaaggaaaagaggcacttagtggtgcaatggaggagttaaaagatggttacatttctgagaatgggaaactggttcttgatttcttgcaagccatccatgccgcagagaaaaggcaggctgacttagatgcacgcgtttttagtgaagagaagaaagtgttaaaggaaaagtatg

SEQ ID NO: 18379 - protein, 222 aa, Glycine max
TEQKIDAHFSQPEIVVEDQVDKPIPVQDKSDIAEEVTAAAKENQLPEHPQSSLTFDDPSKESVAQSDGIIGIQSTETDNAPRLEEGHHTSTSTQTSAVPDENGMKNIQPEQLEIQETERRESALGKDIEQLPTLLEEYQLRNKSEKSPATYISSHGFTENSHFPEGKEALSGAMEELKDGYISENGKLVLDFLQAIHAAEKRQADLDARVFSEEKKVLKEKY

SEQ ID NO: 18380 - protein, 119 aa, Glycine max
MKNIQPEQLEIQETERRESALGKDIEQLPTLLEEYQLRNKSEKSPATYISSHGFTENSHFPEGKEALSGAMEELKDGYISENGKLVLDFLQAIHAAEKRQADLDARVFSEEKKVLKEKY

SEQ ID NO: 18381 - DNA, 1191 bp, Glycine max
aatacgaaattctttgaaaaagaattgtaaccgttattagcaaaaagaagatgatactttttcaaatatctatttcaagctatagtttagattcttattccatcattaatttccacttatgccttgtagatttatcctattttgcttatcaaggcttcaagcctatttacttggtattttatttttatgttctgttttatatccctatctactcacttgtgatattttctttgacttccatacaccagatcaaattttcttggtacaaagttcattatatacgatacacagcctccatactcttctgcccatatatgccctcctgggactgggaagacgagccgcagattttattccaaaaaggtctcgcctaaggtcccatctgggagttacaacatagctcaggtaacatatgaattaaatgtgcttgggactcgaggaccaagaaagatgcactgcgttatgcattcaataccagcttcagcactagatgcaggtggcactgttcctggccagccagagcttcttccccgttccctggaggactcgtttcggagcatctcgttttcaaagtctctagatcattctattgagttcagcagttcgcgattttctgagattggggaatcctgcatcgaagatgatgatggcaagatgagacccttggttctgaaaaacaagcttccaagatggcatgaacagttacaatgttggtgccttaatttccgtggacgagtaacagttgcgtctgttaaaaactttcagttgattgctgccacccaaccagctgctggtgcacctacaccatctcaaccagctccaccggagcacgataagatcattcttcagtttggcaaagttgggaaggacatgttcaccatggattatcggtaccctttatctgcattccaagcttttgcaatatgcttgagcagctttgacaccaaattggcttgtgaataagataaatcatgaatcagaagggttataagtgagctaatgaaacaatgatgttgatggtatatttccctttgtttttcttttcttttcctattttcattatcagtatcatgggagtaggcaattgttgttactcagcttttgtatgactaaattgtaaccgtagtgcatctctgatgtaataggattttagagcatttttaacatacaatgttgctatgtttctttctc

SEQ ID NO: 18382 - protein, 170 aa, Glycine max
MHCVMHSIPASALDAGGTVPGQPELLPRSLEDSFRSISFSKSLDHSIEFSSSRFSEIGESCIEDDDGKMRPLVLKNKLPRWHEQLQCWCLNFRGRVTVASVKNFQLIAATQPAAGAPTPSQPAPPEHDKIILQFGKVGKDMFTMDYRYPLSAFQAFAICLSSFDTKLACE

SEQ ID NO: 18383 - protein, 166 aa, Glycine max
MHSIPASALDAGGTVPGQPELLPRSLEDSFRSISFSKSLDHSIEFSSSRFSEIGESCIEDDDGKMRPLVLKNKLPRWHEQLQCWCLNFRGRVTVASVKNFQLIAATQPAAGAPTPSQPAPPEHDKIILQFGKVGKDMFTMDYRYPLSAFQAFAICLSSFDTKLACE

SEQ ID NO: 18384 - protein, 107 aa, Glycine max
MILFQISISSYSLDSYSIINFHLCLVDLSYFAYQGFKPIYLVFYFYVLFYIPIYSLVIFSLTSIHQIKFSWYKVHYIRYTASILFCPYMPSWDWEDEPQILFQKGLA

SEQ ID NO: 18385 - DNA, 481 bp, Glycine max
ggtggatctaatggccgtgcgacgccggggagcgcgacttcaccggcgtgcagcccgaggagtagtggagattatggatacggtctctggccttattgtatgtatagaggttttgtgatgtcggcgagcgtggagggtgaggggaggtgcagcaagcctactgtggaggtgagcgtgccgcacgtgaattgcacggaggatgcggcggcgtttgtggctttagcagctgccgttgatctgagcgtggatgcgtgcaggcttttctctcaacggctgaggaaggagctgtgccagcagctggatttgcttggctgattccgctggttttctttgtcgtttcgtgttttgccccctgtcgtttggtttaaatttttttttttagtggggttgttcattttgagtgagaggcattttactaactaacaaacaatttacaggctgtacagaggaaggagagtattagagtgggcgctgtgtattc

SEQ ID NO: 18386 - protein, 104 aa, Glycine max
GGSNGRATPGSATSPACSPRSSGDYGYGLWPYCMYRGFVMSASVEGEGRCSKPTVEVSVPHVNCTEDAAAFVALAAAVDLSVDACRLFSQRLRKELCQQLDLLG

SEQ ID NO: 18387 - protein, 71 aa, Glycine max
MYRGFVMSASVEGEGRCSKPTVEVSVPHVNCTEDAAAFVALAAAVDLSVDACRLFSQRLRKELCQQLDLLG

SEQ ID NO: 18388 - protein, 65 aa, Glycine max
MSASVEGEGRCSKPTVEVSVPHVNCTEDAAAFVALAAAVDLSVDACRLFSQRLRKELCQQLDLLG

SEQ ID NO: 18389 - DNA, 1360 bp, Glycine max
aaaaactcagacaaccacacaaatattagaacctctctttctccctcaccacaaccaccaccaccaccatttgagcttctttccaacattaatcctgcaaacgacaattacatgtataatggcactgttcaaagtagtgtcattcagaaggacttgactagtttggagaaaattgaagaaggtttagcgcaagcacgggcctcaattcaggaatatatcctatcaaggaactatacttcacaaaggagagaaagttttgtccccaaaggatccatttaccgaaatccccatgcttttctccagagccacatagagatggtgaaaagattcaaggtgtgggtttaccaagaaggggaacaaccattagtacatgatggtccagtaaacaacatatatgcgattgaaggtcaatttatggacgaaatagacaataatgataagtggagccaattcagggcaagacatcctgaggaggcacatgtgtttttccttccattcagcattgccaatgtggttcactatgtctacaagcctatcctaaagcaatctgactacgaacctgtccgtttgcaactcttggttgaagactatattagtgttattgaagataaatatccttactggaatagaagcaaaggtgcagaccattttttgctttcgtgtcatgattgggctccaaaagtttccaatggcaatcctgaactttttcaaagtttcattagggcactttgcaatgctaacacttcagaagggtttcatccaaatagagatgtgtccatccctgaagtgtacttgcctgttggaaagctaggtccgccgagcctaggccagcacccaaacagccgcactatattggcttttttcgcaggaggggtccatggagaaattagaaaaatatttttaaaacattggaaggacaaagataatgaagtgcgagttcatgaatatcttccaaaaagtcaaaattacacaaaattaatgggacaaagcaagttttgcttgtgccctagtgggcatgaagttgcaagtcccagagtggttgaagcaattcatgctgggtgtgtgcccgtaataatttgtgataattattctctacctttcagtgatgtgctgcattggagtcaattttcagtgaaggtttcggtacaaaaaataccagaaatcaaaagtatattacaaagtatttcaaggaaaaagtacttgagattgcacatgaatgtgttaagagttcgaagacactttatgattaatcggccagcaaaaccatttgatatgatgcatatgattcttcactcaatttggctgagaaggctaaacataaagttgattgcttcataattaatcaccagccattttccat

SEQ ID NO: 18390 - protein, 445 aa, Glycine max
KNSDNHTNIRTSLSPSPQPPPPPFELLSNINPANDNYMYNGTVQSSVIQKDLTSLEKIEEGLAQARASIQEYILSRNYTSQRRESFVPKGSIYRNPHAFLQSHIEMVKRFKVWVYQEGEQPLVHDGPVNNIYAIEGQFMDEIDNNDKWSQFRARHPEEAHVFFLPFSIANVVHYVYKPILKQSDYEPVRLQLLVEDYISVIEDKYPYWNRSKGADHFLLSCHDWAPKVSNGNPELFQSFIRALCNANTSEGFHPNRDVSIPEVYLPVGKLGPPSLGQHPNSRTILAFFAGGVHGEIRKIFLKHWKDKDNEVRVHEYLPKSQNYTKLMGQSKFCLCPSGHEVASPRVVEAIHAGCVPVIICDNYSLPFSDVLHWSQFSVKVSVQKIPEIKSILQSISRKKYLRLHMNVLRVRRHFMINRPAKPFDMMHMILHSIWLRRLNIKLIAS

SEQ ID NO: 18391 - protein, 408 aa, Glycine max
MYNGTVQSSVIQKDLTSLEKIEEGLAQARASIQEYILSRNYTSQRRESFVPKGSIYRNPHAFLQSHIEMVKRFKVWVYQEGEQPLVHDGPVNNIYAIEGQFMDEIDNNDKWSQFRARHPEEAHVFFLPFSIANVVHYVYKPILKQSDYEPVRLQLLVEDYISVIEDKYPYWNRSKGADHFLLSCHDWAPKVSNGNPELFQSFIRALCNANTSEGFHPNRDVSIPEVYLPVGKLGPPSLGQHPNSRTILAFFAGGVHGEIRKIFLKHWKDKDNEVRVHEYLPKSQNYTKLMGQSKFCLCPSGHEVASPRVVEAIHAGCVPVIICDNYSLPFSDVLHWSQFSVKVSVQKIPEIKSILQSISRKKYLRLHMNVLRVRRHFMINRPAKPFDMMHMILHSIWLRRLNIKLIAS

SEQ ID NO: 18392 - protein, 340 aa, Glycine max
MVKRFKVWVYQEGEQPLVHDGPVNNIYAIEGQFMDEIDNNDKWSQFRARHPEEAHVFFLPFSIANVVHYVYKPILKQSDYEPVRLQLLVEDYISVIEDKYPYWNRSKGADHFLLSCHDWAPKVSNGNPELFQSFIRALCNANTSEGFHPNRDVSIPEVYLPVGKLGPPSLGQHPNSRTILAFFAGGVHGEIRKIFLKHWKDKDNEVRVHEYLPKSQNYTKLMGQSKFCLCPSGHEVASPRVVEAIHAGCVPVIICDNYSLPFSDVLHWSQFSVKVSVQKIPEIKSILQSISRKKYLRLHMNVLRVRRHFMINRPAKPFDMMHMILHSIWLRRLNIKLIAS

SEQ ID NO: 18393 - DNA, 587 bp, Glycine max
ggtgggaaatacgatgttgttcaagcatgtaaaagtgtagcaaaaaaagtcaaagatggtcttcttcatttggacaacatcaatgaaaaaattattgaaaaagaattggaaactaaatgtactgagtttccttatccagatctactaatacgagctggtggtgagcttagattgagcaacttcttgttgtggcaattggcatacacagaattttattttaataaaacaccgtggccagattttggaaaggaagaatttgtagatgccttaagatcatttcagcaaagacaaagacactatggtggtgaacgacattcataagcatatgtctgtaatatagtattatcacttaattaatcttttaggattaagtgtataatggttttgggattatgtttaaattattggaccaagctaacctactaagtcgtgtgttcattatagctgaggtatctcacttaaggttttgctttgttcaatatagtgacatcactatatgcagtgctaacaaacttttgattagtttgttgttgacctggctttgtaacaatgttttgaagtaggtttaatatattagcttctaaact

SEQ ID NO: 18394 - protein, 106 aa, Glycine max
GGKYDVVQACKSVAKKVKDGLLHLDNINEKIIEKELETKCTEFPYPDLLIRAGGELRLSNFLLWQLAYTEFYFNKTPWPDFGKEEFVDALRSFQQRQRHYGGERHS

SEQ ID NO: 18395 - protein, 56 aa, Glycine max
MFKLLDQANLLSRVFIIAEVSHLRFCFVQYSDITICSANKLLISLLLTWLCNNVLK

SEQ ID NO: 18396 - DNA, 1480 bp, Glycine max
tgatggttacctgactcaacctgatgggtcaaatgtgaatttgaaaattcggaaaggtttccagcatatatgtgtagaacaacctggtgtacatgaatttagttttgttgactcatgtatcttctttgggagttcatcagtgaaaattaatacatctgatcaattgcccatccatctaataggagagaagtatcttcttaatggacaaataaatgtgcagtctggctcacttgatgcattgcctgataatatagttgttgatattaaacatgatggagctggtgttattgattatgctacagccacatttaagtcccattcaaaagatcaaatggaggctgctatatttgagtattccgtttggaccaatctaggagaaaagcttaccttcattcctcgcgactcaaggaatgatgggcagaagaaacttttattttatcctagagaacatcaagtatcagtgactgatgataattgtcaagtttatattcctacattttcttgtcaactgggtgtatatattgaaggatcagtttcacctcctctttctggcgtccatatcagagtttttgctgctggagatagcagctttactacacttaaaagtggtgaattggttcttgaaacgaccactggtattgatggttcctttgtggcaggtcctctgtacgatgatattggttacaatgttgaggcttcaaagcctggatatcatttaaaacaagttgcgcctcattcttttacttgtcagaagcttagtcaaatttcagtacacatacatcacaaagatgattctaaagagcccattccttctgttctgttgtctttgagtggtgacaatggttatagaaacaactcagtatcaggagctggtgggacattcctgtttgacaatttgtttcctggaatgttttatttgcgtcctgttttgaaggagtatgctttctcacctccagcacaggcaatagatcttggagcaggggagttcaaagaagttgttttccaggccacacgcgtagcctacagtgctacaggtatagtgtctctcttgtctggtcaacccaaaggagaagtttcggttgaagcccggtcagagtcaaaaggctattttgaggaaactgtgacagattcatctggaaattatcgtctgagaggactactgcctgatactgactatgttgttaaagtggctaaaagggatgtgggcagttctaatatagagcgtgcatctccagattctattgctgtcaaggttggaactgaggatatcaagggattggattttatagtttttgaggagccggaaatgacaattataagttgccacgttgaaggaaatggtacagatgaactacataaacacctgatggtagaaatcaggtcagctagtgacctaaacaagatagagtcagtcttccccctgccaatttcaaacttcttccaagtgaagggcttatcaaaaggcagacaccttctaaag

SEQ ID NO: 18397 - protein, 493 aa, Glycine max
DGYLTQPDGSNVNLKIRKGFQHICVEQPGVHEFSFVDSCIFFGSSSVKINTSDQLPIHLIGEKYLLNGQINVQSGSLDALPDNIVVDIKHDGAGVIDYATATFKSHSKDQMEAAIFEYSVWTNLGEKLTFIPRDSRNDGQKKLLFYPREHQVSVTDDNCQVYIPTFSCQLGVYIEGSVSPPLSGVHIRVFAAGDSSFTTLKSGELVLETTTGIDGSFVAGPLYDDIGYNVEASKPGYHLKQVAPHSFTCQKLSQISVHIHHKDDSKEPIPSVLLSLSGDNGYRNNSVSGAGGTFLFDNLFPGMFYLRPVLKEYAFSPPAQAIDLGAGEFKEVVFQATRVAYSATGIVSLLSGQPKGEVSVEARSESKGYFEETVTDSSGNYRLRGLLPDTDYVVKVAKRDVGSSNIERASPDSIAVKVGTEDIKGLDFIVFEEPEMTIISCHVEGNGTDELHKHLMVEIRSASDLNKIESVFPLPISNFFQVKGLSKGRHLLK

SEQ ID NO: 18398 - protein, 383 aa, Glycine max
MEAAIFEYSVWTNLGEKLTFIPRDSRNDGQKKLLFYPREHQVSVTDDNCQVYIPTFSCQLGVYIEGSVSPPLSGVHIRVFAAGDSSFTTLKSGELVLETTTGIDGSFVAGPLYDDIGYNVEASKPGYHLKQVAPHSFTCQKLSQISVHIHHKDDSKEPIPSVLLSLSGDNGYRNNSVSGAGGTFLFDNLFPGMFYLRPVLKEYAFSPPAQAIDLGAGEFKEVVFQATRVAYSATGIVSLLSGQPKGEVSVEARSESKGYFEETVTDSSGNYRLRGLLPDTDYVVKVAKRDVGSSNIERASPDSIAVKVGTEDIKGLDFIVFEEPEMTIISCHVEGNGTDELHKHLMVEIRSASDLNKIESVFPLPISNFFQVKGLSKGRHLLK

SEQ ID NO: 18399 - DNA, 1179 bp, Glycine max
agtgtgcagggaatgttgtgttttttatggttcaggaaaatttgagaataacaacgtgttccatgatagagatgtgtttctggaagactataaagaaatgaataggagcttaaagatatatgtttatcctcacagggaagacgatccttttgcaaatgtgcttttgcctgtggaatctgaacccggtggcaattatgccagtgaaagttacttcaaaaaggtacttatgaagagccatttcattacaaaagacccaccagaagcagatcttttctttcttcccttttccatggcaagattgtggcacgatcgaagagttggtgtgggaggtatacaagacttcattagagactacattcagaatatcagtcacaggtatccatattggaacaacacaggtggtgccgatcacttttatgttgcttgtcattcaattggaaggtctgccatggacaaagcacctgatgtgaaattcaatgccattcaagttgtattctcatctagttattttctaactgggtactttgctcataaggatgcatgtctaccacaaatttggccaagaaaaggaaatccccctaaccttgtttcatcaaagaggaaaaggctagctttctttgctggaggagtaaattccccagtacgtgtaaaacttcttgagacatggaaaaatgattcagaaatctttgtgcaccatggaagacttaaaacaccatatgcagatgaattgctaggtagcaagttctgccttcatgttaagggctttgaagtgaacacagctcgcattggagattctctatattatggttgcgttccagtgatcattgccaactactatgaccttccatttgctgatgtgctaaactggaagagcttttcagttgttgtcactaccttagatattcccttgctgaaaaagatcctcaaggatatcatcagttccaataaatatttgatgttacaaagcaatgttttgaaggtgaggaaacacttccaatggcattcacccccgcaagacttcgatgcattttatatggttatgtatgaattatggcttagacgaagttctataaaaaattcgtgggtagattctttcagagtttaatttatatgtatgccactgtaaaatattttcacacaagcatttaataagaatttactttatcatggttatatctt

SEQ ID NO: 18400 - protein, 367 aa, Glycine max
VCRECCVFYGSGKFENNNVFHDRDVFLEDYKEMNRSLKIYVYPHREDDPFANVLLPVESEPGGNYASESYFKKVLMKSHFITKDPPEADLFFLPFSMARLWHDRRVGVGGIQDFIRDYIQNISHRYPYWNNTGGADHFYVACHSIGRSAMDKAPDVKFNAIQVVFSSSYFLTGYFAHKDACLPQIWPRKGNPPNLVSSKRKRLAFFAGGVNSPVRVKLLETWKNDSEIFVHHGRLKTPYADELLGSKFCLHVKGFEVNTARIGDSLYYGCVPVIIANYYDLPFADVLNWKSFSVVVTTLDIPLLKKILKDIISSNKYLMLQSNVLKVRKHFQWHSPPQDFDAFYMVMYELWLRRSSIKNSWVDSFRV

SEQ ID NO: 18401 - protein, 335 aa, Glycine max
MNRSLKIYVYPHREDDPFANVLLPVESEPGGNYASESYFKKVLMKSHFITKDPPEADLFFLPFSMARLWHDRRVGVGGIQDFIRDYIQNISHRYPYWNNTGGADHFYVACHSIGRSAMDKAPDVKFNAIQVVFSSSYFLTGYFAHKDACLPQIWPRKGNPPNLVSSKRKRLAFFAGGVNSPVRVKLLETWKNDSEIFVHHGRLKTPYADELLGSKFCLHVKGFEVNTARIGDSLYYGCVPVIIANYYDLPFADVLNWKSFSVVVTTLDIPLLKKILKDIISSNKYLMLQSNVLKVRKHFQWHSPPQDFDAFYMVMYELWLRRSSIKNSWVDSFRV

SEQ ID NO: 18402 - protein, 292 aa, Glycine max
MKSHFITKDPPEADLFFLPFSMARLWHDRRVGVGGIQDFIRDYIQNISHRYPYWNNTGGADHFYVACHSIGRSAMDKAPDVKFNAIQVVFSSSYFLTGYFAHKDACLPQIWPRKGNPPNLVSSKRKRLAFFAGGVNSPVRVKLLETWKNDSEIFVHHGRLKTPYADELLGSKFCLHVKGFEVNTARIGDSLYYGCVPVIIANYYDLPFADVLNWKSFSVVVTTLDIPLLKKILKDIISSNKYLMLQSNVLKVRKHFQWHSPPQDFDAFYMVMYELWLRRSSIKNSWVDSFRV

SEQ ID NO: 18403 - DNA, 930 bp, Glycine max
acttgggggaatacctgttaccacgcctcattctgttcttccctctgctgttgctgttgctggaatgaccgaatcatgtaacactgtgaaaccatctgcgccttctgctcaacttaccatcttctatgctggtactgtcaatgtctttgatgatatctccgctgagaaggcacaagctatcatgttgttggctggcaatagcttatctgcaggttctaacatggcacagccaaaagttcaggtgcttgtctcgaagttggctgttggtgatggtgtgcctgtgagtcaacctgcaaatacatcacctggctctggtctttcaagtcctttatctgtttcttcacataccggcatacagtcagggagtggctcaactagtactgataaaacaactggagttcccaccactcctgtttgcaatgtggagcctccaaagatagtcagtgcaaccactatgttgacatcagctgtacctcaggcccggaaagcatccttggctcgatttttagaaaaacgcaaagaaagggtgatgagtgcagcaccatacaacctcgacaagaaagtctgaagagtgtgccactgcagaatacgctggtgctaacttttctgccactaacactgttttggccaagcaaggatagtagcctgcacctttaggaaacaaagtatttcggagaaaaatattgttgtaaccttaaaaatgttgtaagcagatgcttttattttcgttgatcacaacttatgctgacattctcgggttcagcacatagataggccattaccataattatttttgtggtgtagggcttttaccttgttatttgaaaggttgtttgaatgttagcttcctacactgtaacattggaccactatgtaatgtaactcatgatttgtttaaatttgtggagtaaaagcccagtttagatattt

SEQ ID NO: 18404 - protein, 188 aa, Glycine max
LGGIPVTTPHSVLPSAVAVAGMTESCNTVKPSAPSAQLTIFYAGTVNVFDDISAEKAQAIMLLAGNSLSAGSNMAQPKVQVLVSKLAVGDGVPVSQPANTSPGSGLSSPLSVSSHTGIQSGSGSTSTDKTTGVPTTPVCNVEPPKIVSATTMLTSAVPQARKASLARFLEKRKERVMSAAPYNLDKKV

SEQ ID NO: 18405 - protein, 167 aa, Glycine max
MTESCNTVKPSAPSAQLTIFYAGTVNVFDDISAEKAQAIMLLAGNSLSAGSNMAQPKVQVLVSKLAVGDGVPVSQPANTSPGSGLSSPLSVSSHTGIQSGSGSTSTDKTTGVPTTPVCNVEPPKIVSATTMLTSAVPQARKASLARFLEKRKERVMSAAPYNLDKKV

SEQ ID NO: 18406 - protein, 128 aa, Glycine max
MLLAGNSLSAGSNMAQPKVQVLVSKLAVGDGVPVSQPANTSPGSGLSSPLSVSSHTGIQSGSGSTSTDKTTGVPTTPVCNVEPPKIVSATTMLTSAVPQARKASLARFLEKRKERVMSAAPYNLDKKV

SEQ ID NO: 18407 - DNA, 1333 bp, Glycine max
agttagataccaagtcttctgttcgtccaaccttgcccagtgcggttgtggagaaggagtggacaccacaatttctctccattccatttgagagtttactttctcaaagcgagcgtagtgatactcttccaccctttcagtcatttttagaggttgaggaagctgaaactacctcagacccagagtcactttctgaatcgccttcactgtcactttccttggaagaggaacagatacatggtgaatcgtcttttgattatgcagcagaagcagcacatgccctcagtgaggcaaataaatcatcacctattggagtgaatccggacggatcgagatggtggaaagagacaggaattgagcgaagacctgatggcgtgatctgcagatggacaatgaccagaggtgttagtgctgacaaagctattgagtggcaagagaagtactgggaagcttctgatgattttggctataaggaacttggttcagagaaatctggacgtgatgcaaatggaaatatttggcgtgaattttggagagaatccttgtgtctggaaaatgggcttatgagttttgagaaaactgcagacaagtggggacgaaatgttaatggtaatgagtggcaggaaaaatggggggagcgctacaatgctgctggtcaaacagaaaaatgggcacacaagtggtgcagtattgacccaaacacaccgcttgaacctggacatgctcatgtttggcatgaaaggtggggtggcaaatacgacgggtacggtgggagcataaaatacaccgacaaatgggccgagcggtttgtggatggtggatgggataaatggggtgacaaatgggatgaaaattttgatccaaatgctaatggtgtgaagcagggggagagctggtgggaaggtaggcatggcgaccgctggaaccgaacttggggtgagcaacacaatggctctggttggattcacaagtacggccagagcagttctggggaacactgggacacacacgcaagagaagatacctggtatgagaaattccctcattatggtttcttcaattgcttcgaaaactccgtccagctcagggaagttcccaaaccatctgaaatactggaaatacagcaagttcaggaaccttgatttgctcaaaccttataaaaaatatataggaaccttattacatacctccatcgtctttagtatggtaatacgccaacttgtatgatgatcatttctaagctcttctagtactttaagcctttaaggactgaataatatgttcattgtttcccatacaacagcaaaatatacatatatttcgttcataaaag

SEQ ID NO: 18408 - protein, 379 aa, Glycine max
LDTKSSVRPTLPSAVVEKEWTPQFLSIPFESLLSQSERSDTLPPFQSFLEVEEAETTSDPESLSESPSLSLSLEEEQIHGESSFDYAAEAAHALSEANKSSPIGVNPDGSRWWKETGIERRPDGVICRWTMTRGVSADKAIEWQEKYWEASDDFGYKELGSEKSGRDANGNIWREFWRESLCLENGLMSFEKTADKWGRNVNGNEWQEKWGERYNAAGQTEKWAHKWCSIDPNTPLEPGHAHVWHERWGGKYDGYGGSIKYTDKWAERFVDGGWDKWGDKWDENFDPNANGVKQGESWWEGRHGDRWNRTWGEQHNGSGWIHKYGQSSSGEHWDTHAREDTWYEKFPHYGFFNCFENSVQLREVPKPSEILEIQQVQEP

SEQ ID NO: 18409 - protein, 249 aa, Glycine max
MTRGVSADKAIEWQEKYWEASDDFGYKELGSEKSGRDANGNIWREFWRESLCLENGLMSFEKTADKWGRNVNGNEWQEKWGERYNAAGQTEKWAHKWCSIDPNTPLEPGHAHVWHERWGGKYDGYGGSIKYTDKWAERFVDGGWDKWGDKWDENFDPNANGVKQGESWWEGRHGDRWNRTWGEQHNGSGWIHKYGQSSSGEHWDTHAREDTWYEKFPHYGFFNCFENSVQLREVPKPSEILEIQQVQEP

SEQ ID NO: 18410 - protein, 192 aa, Glycine max
MSFEKTADKWGRNVNGNEWQEKWGERYNAAGQTEKWAHKWCSIDPNTPLEPGHAHVWHERWGGKYDGYGGSIKYTDKWAERFVDGGWDKWGDKWDENFDPNANGVKQGESWWEGRHGDRWNRTWGEQHNGSGWIHKYGQSSSGEHWDTHAREDTWYEKFPHYGFFNCFENSVQLREVPKPSEILEIQQVQEP

SEQ ID NO: 18411 - DNA, 1225 bp, Glycine max
ttaaattgagagttgaacaagttttacagtctcaaccaagtcttatagtatcctacaaactcagtagtacacttgaattttactgctacactatctcagatttacttgggcgagaaactgcactttgtaatacactatgggcactgaaagatgctgctcagaaaacattttttgatattttaaaaggtcgaggggaaaagcttttgcggtatcccccacttgttgctgttgatctttccccgccaccagcagtgagggaaggggtatctgtacttcttgaagttatcgacaactacaacagcatgatggttcctgcttctggccaaaaacctgcttttggtccagttatatctgctatactggatccaatagttcagatgtgtgaacaagcagcggaggcacacaagtcaaagggagccggccattcatcaagaagaagtaggatgagttccgactctggtcaacttactaaatcatcagttgatgcaattttgtcaaatagtagctctgcatcttcttcactgactagtgaaaccccttcaaagatttttctcattaactgcttgtgtgccattcaacaacctctatctggatacgaggctgttgctgattacgtgaaaagacttggagcaatgatagataatcatttgtgtgttctcgtggaaaaagaagctgatgcaatcttaagaagatgtaatttgtcagagaagatgccgcacttccagaattcaatccacaaggaaggggacaatgaagtgggtaccccattggctgagatggaggacactagtccagctgttctttcggagtgtttgaaagctctgtttggccttatcttgggaagtgaaagttccctgccggaatttgagcagatgcaggttccaaggttgcgttctgaagctactattggcgtggccaggtcactggccgaagcttatgaccttatttataaggctattatggatcccaagaatggttatccggaccccaggtcgttggcaaggcatccacctaatcagataagaactatattaggaatttaagttttgtcgatttgtttagctccgagtccgacctcttgctcattatgttcattatgtttgttaattacgtatataacctctctctttctcatttgagattgtattgatatacttacaataaataattctgttatctattaacttttgagatgctatatcggaattctattattgttgttgtt

SEQ ID NO: 18412 - protein, 346 aa, Glycine max
KLRVEQVLQSQPSLIVSYKLSSTLEFYCYTISDLLGRETALCNTLWALKDAAQKTFFDILKGRGEKLLRYPPLVAVDLSPPPAVREGVSVLLEVIDNYNSMMVPASGQKPAFGPVISAILDPIVQMCEQAAEAHKSKGAGHSSRRSRMSSDSGQLTKSSVDAILSNSSSASSSLTSETPSKIFLINCLCAIQQPLSGYEAVADYVKRLGAMIDNHLCVLVEKEADAILRRCNLSEKMPHFQNSIHKEGDNEVGTPLAEMEDTSPAVLSECLKALFGLILGSESSLPEFEQMQVPRLRSEATIGVARSLAEAYDLIYKAIMDPKNGYPDPRSLARHPPNQIRTILGI

SEQ ID NO: 18413 - protein, 246 aa, Glycine max
MMVPASGQKPAFGPVISAILDPIVQMCEQAAEAHKSKGAGHSSRRSRMSSDSGQLTKSSVDAILSNSSSASSSLTSETPSKIFLINCLCAIQQPLSGYEAVADYVKRLGAMIDNHLCVLVEKEADAILRRCNLSEKMPHFQNSIHKEGDNEVGTPLAEMEDTSPAVLSECLKALFGLILGSESSLPEFEQMQVPRLRSEATIGVARSLAEAYDLIYKAIMDPKNGYPDPRSLARHPPNQIRTILGI

SEQ ID NO: 18414 - protein, 245 aa, Glycine max
MVPASGQKPAFGPVISAILDPIVQMCEQAAEAHKSKGAGHSSRRSRMSSDSGQLTKSSVDAILSNSSSASSSLTSETPSKIFLINCLCAIQQPLSGYEAVADYVKRLGAMIDNHLCVLVEKEADAILRRCNLSEKMPHFQNSIHKEGDNEVGTPLAEMEDTSPAVLSECLKALFGLILGSESSLPEFEQMQVPRLRSEATIGVARSLAEAYDLIYKAIMDPKNGYPDPRSLARHPPNQIRTILGI

SEQ ID NO: 18415 - DNA, 1313 bp, Glycine max
aacgcgccaccctcaactccgccgcgaacccttctcgcggactccgagagcgtggcccaactcctcggccacattaagttcctcctccgccgccgcgccgccgcactcgccgccctcgacgccgggctctactccgaggccatccgccacttctcgaaaatcgtcgacggccggcgcagcgcgccgcagagcttcctcgccgaatgctacatgcaccgcgcctccgcgcaccgttccgcagggcgaatcgccgagtcaattgccgattgcaaccgcaccctcgcattggaccccacttgcatccaagcactcgaaacaagagcttcactcttcgaaacaattcgctgtttaccagattctcttcacgatctcgaacacttaaagcttctctacaattcaatcttgcgtgatcgcaagcttcctggtcctgcgtggaagcgccacaacgtgcgctacagagaaattccagggaaactttgctccctcactattaaaattcaggaacttaaacagaggttggcttctggtgaaactggaaatgttgattactatgctttgattggtgtccgacgaggttgttcccggtcggagttggagagggcacacttgttgctttccttgaggcataagcctgataaggcaactgggttcatcgaaaggtgcgagcttgcagatgagcgtgatgttgagtctgttaaagaaagggtgaaaatgtcttcgttgttgttatatagattggttcagaagggttacactaatgtgatgggtaatattatggatgaggaagctgctgagaagcagagaaagaaggctgctttgcaagctcttgaagcacagaaagagaaagccaatgaagctgctgctgagttgaataaggtcgttgagagtaatagtactcaaatgtctcaaaataggtctatggtgtcttcttctacggtgaatccggcggtgtttcagggtgttttctgccgtgatcttacggtggtggggaacttgctttctcaggcggggtttaaccgatccatgccggtgaagtatgaagctttgagctgttgattgaatcgaagttggtcggaaatggaaatgtttggtggggggctgttggagatggtaccagcagagggaatctctggttcgttcgttcacttttgttgtacaaattatgcaaaggaaaaaaaaagaaaaaatatttagactgccggaaaattttgtcaccttttccttattttatctttcattagccatccttttatttctatctctctatcagatgtgtacagattatcagtactgaatgaagactctacttttgc

SEQ ID NO: 18416 - protein, 351 aa, Glycine max
NAPPSTPPRTLLADSESVAQLLGHIKFLLRRRAAALAALDAGLYSEAIRHFSKIVDGRRSAPQSFLAECYMHRASAHRSAGRIAESIADCNRTLALDPTCIQALETRASLFETIRCLPDSLHDLEHLKLLYNSILRDRKLPGPAWKRHNVRYREIPGKLCSLTIKIQELKQRLASGETGNVDYYALIGVRRGCSRSELERAHLLLSLRHKPDKATGFIERCELADERDVESVKERVKMSSLLLYRLVQKGYTNVMGNIMDEEAAEKQRKKAALQALEAQKEKANEAAAELNKVVESNSTQMSQNRSMVSSSTVNPAVFQGVFCRDLTVVGNLLSQAGFNRSMPVKYEALSC

SEQ ID NO: 18417 - protein, 281 aa, Glycine max
MHRASAHRSAGRIAESIADCNRTLALDPTCIQALETRASLFETIRCLPDSLHDLEHLKLLYNSILRDRKLPGPAWKRHNVRYREIPGKLCSLTIKIQELKQRLASGETGNVDYYALIGVRRGCSRSELERAHLLLSLRHKPDKATGFIERCELADERDVESVKERVKMSSLLLYRLVQKGYTNVMGNIMDEEAAEKQRKKAALQALEAQKEKANEAAAELNKVVESNSTQMSQNRSMVSSSTVNPAVFQGVFCRDLTVVGNLLSQAGFNRSMPVKYEALSC

SEQ ID NO: 18418 - DNA, 1245 bp, Glycine max
gattggacacgtgtgccaactctctctctctctctctctctctcatacattcccattgaggagaggttggggtgcgcaacacaacaccgcaccaaaactctcgttccctgccacaaccggaaacagaagccacgacacacaacacaaaacacaaagcattggtattcggtacgtaacatactctgtttcctctgacttcgaggttttccttcgctttggttcagaccaagcgatctctgtggctacaaacttggaaccatttttatgttttttttcccctgagccttcggttcccatgttcttcgctccaccgcatgttgtaacttgtaaccgcaattccattcctctattctttctcttacccttgagtcacgcacccaccctttttgcctctcacgtagttattgttgtgtgcatgctggtcctacttgattggtgatttttgtagaaactttgatcgatcgatctcttcatcgtcatgacagcttctgcttcaaattcgttgataaccgttaaccctgatgaacttcgcttccaatttgagttggagaagcaaacatattgcgatcttaaagttctgaataacacagagaactacgttgcctttaaggtcaaaaccacttcaccaaagaagtactttgtacgacctaataccggtgttgtacatccatgggacctatgtatcatcagagtcaccctccaggctcaacaagaataccctccagacatgcaatgcaaagacaagtttctcttgcagagtacaatagtgaatccaaacactgatgttgacgatcttccgccagatacttttaataaggatggcgaaaagtcgatagaggatatgaaactaagagtggtatatatctctcctatgtcaccccaaggaagcacagaagatgacacagtgaagaattcaactcaaaaacttgatgctaattctagtgaaaccgtgcagcgcctgaaggaggaaagagatgcctacgtcttacaatcacggcaactgcagcaggaactggacattctgaaaagaagaaatcgtagaggcgattcaggcttttccttcacttttgccgtgtttgtgggtctcattggattattgtgtggtttgcttttaaaactttcattgtcttcaccacctacagaatgatttcacactgatcaaaacctttgcatgcagacccttccgtgctattaagtgtaaagaattattttttctattgaatgggatttttattcattttgcac

SEQ ID NO: 18419 - protein, 222 aa, Glycine max
MTASASNSLITVNPDELRFQFELEKQTYCDLKVLNNTENYVAFKVKTTSPKKYFVRPNTGVVHPWDLCIIRVTLQAQQEYPPDMQCKDKFLLQSTIVNPNTDVDDLPPDTFNKDGEKSIEDMKLRVVYISPMSPQGSTEDDTVKNSTQKLDANSSETVQRLKEERDAYVLQSRQLQQELDILKRRNRRGDSGFSFTFAVFVGLIGLLCGLLLKLSLSSPPTE

SEQ ID NO: 18420 - protein, 145 aa, Glycine max
IGHVCQLSLSLSLSHTFPLRRGWGAQHNTAPKLSFPATTGNRSHDTQHKTQSIGIRYVTYSVSSDFEVFLRFGSDQAISVATNLEPFLCFFSPEPSVPMFFAPPHVVTCNRNSIPLFFLLPLSHAPTLFASHVVIVVCMLVLLDW

SEQ ID NO: 18421 - protein, 139 aa, Glycine max
MQCKDKFLLQSTIVNPNTDVDDLPPDTFNKDGEKSIEDMKLRVVYISPMSPQGSTEDDTVKNSTQKLDANSSETVQRLKEERDAYVLQSRQLQQELDILKRRNRRGDSGFSFTFAVFVGLIGLLCGLLLKLSLSSPPTE

SEQ ID NO: 18422 - DNA, 1278 bp, Glycine max
ataactgagaacatggccgaaagctcttcggctacgcctccaccaccgaagcccgtggtggttagggtcaaacgcaagccctcgcaatctccacttgatgctttctggctcgaaattaacgagaggccgttgaagcgtcctctcttggattttggaaatttatcaatctcctccaattctgctcaaaaggtggaattttataacaagaaggtttttgtgcaacatgtggagacaataagcagctctgaggtcacctttgatatcgtgcaatcctttgtggatcttggttccagtggtgcatctgattccaagtcaaaaattaaggaaagaaagaaattcttcaacagggacaataagcaagatcagctattgtctaaagctaaacaagaaaaggagtctttggcaaaagatgctcgctttgaacaaatatggaaaaacaggaagggaaacaaagggacagcacatgataaagcattacaagaaatgtgccacttgtatgacattgttcgcattgacaatgaagaaaaaaataaggaagtgcaacaggaagaaatgtcattggaggatcaacgacttttgtctagttacctccctttactgagagagtttattcctaatgcggctgcagaggttgaaactgatttgattgctcagttggttggtcattccaaagaagaaaattatgtgtacgacctctacaccgtgaaagatgagatggatataaacattgatgattcttcgtgttcatatccactagttcaagttgatgaggaggaggactattatgatgggacacagcattcagattatgaatctgatgactcaaatgctgaaaacaatccactgaatgattatccagatgaggtttctgaagaggatgaagaggatgaaaattctgagaatgaatcagaacgtgaggatggcaacacgagcagtgaatcatcagatgagaatatagaacatggtttttctgaagatgatgctgatccattatatgatgaggattttgatgaatatgaaggtgctcatagtgatgatgttgagcatatggatgatgaaaattggaggtggtcgtaccgatgaagttggctttagttttattttgcaaaatgtaaatctgatggggtaaaaatgttgtaggaacaaaatcaaacctaccatgccggagccatccaactagacaggcttttttgctattataagggatgctttaaggcattttttatggacctattagttttatgttgaaatttgagctagaatgcttacaaaaatggc

SEQ ID NO: 18423 - protein, 360 aa, Glycine max
ITENMAESSSATPPPPKPVVVRVKRKPSQSPLDAFWLEINERPLKRPLLDFGNLSISSNSAQKVEFYNKKVFVQHVETISSSEVTFDIVQSFVDLGSSGASDSKSKIKERKKFFNRDNKQDQLLSKAKQEKESLAKDARFEQIWKNRKGNKGTAHDKALQEMCHLYDIVRIDNEEKNKEVQQEEMSLEDQRLLSSYLPLLREFIPNAAAEVETDLIAQLVGHSKEENYVYDLYTVKDEMDINIDDSSCSYPLVQVDEEEDYYDGTQHSDYESDDSNAENNPLNDYPDEVSEEDEEDENSENESEREDGNTSSESSDENIEHGFSEDDADPLYDEDFDEYEGAHSDDVEHMDDENWRWSYR

SEQ ID NO: 18424 - protein, 356 aa, Glycine max
MAESSSATPPPPKPVVVRVKRKPSQSPLDAFWLEINERPLKRPLLDFGNLSISSNSAQKVEFYNKKVFVQHVETISSSEVTFDIVQSFVDLGSSGASDSKSKIKERKKFFNRDNKQDQLLSKAKQEKESLAKDARFEQIWKNRKGNKGTAHDKALQEMCHLYDIVRIDNEEKNKEVQQEEMSLEDQRLLSSYLPLLREFIPNAAAEVETDLIAQLVGHSKEENYVYDLYTVKDEMDINIDDSSCSYPLVQVDEEEDYYDGTQHSDYESDDSNAENNPLNDYPDEVSEEDEEDENSENESEREDGNTSSESSDENIEHGFSEDDADPLYDEDFDEYEGAHSDDVEHMDDENWRWSYR

SEQ ID NO: 18425 - protein, 199 aa, Glycine max
MCHLYDIVRIDNEEKNKEVQQEEMSLEDQRLLSSYLPLLREFIPNAAAEVETDLIAQLVGHSKEENYVYDLYTVKDEMDINIDDSSCSYPLVQVDEEEDYYDGTQHSDYESDDSNAENNPLNDYPDEVSEEDEEDENSENESEREDGNTSSESSDENIEHGFSEDDADPLYDEDFDEYEGAHSDDVEHMDDENWRWSYR

SEQ ID NO: 18426 - DNA, 1168 bp, Glycine max
gtgatgtttgagtgccacaagcttcagtttcagataatgtcaactgtgtataacaacagccatgctagaattgccacacactctgaattacgtagacaaattacttcctatcttgaaagtgagctccattttctatcctctagttttaccaagtggattggagctcagaaattctatctggaggccataaatggatggctgcacaaatgtgtttctcttaaacaaaagccaggcaagaaaaagagaccccaacgtccactcctaagaatgtatggtcctccaatatatgccacctgtgaaatctggttggaaaagctcggtgaattacccatccaggatgttgtggattctatgaagagtttagcaggtgaaattgcccggttcttaccgcgtcaagagaagaaccacagtaaaggtgcaaatcaaccccatataacatcttggaatgctcatatccgcagcgaatcatcggataatctattgagagatgacacattagaggactgggattcaggttttgatcaatttcgtgcaagctttctcggatttcttgctcaattaaataatttttccaggtcttcggtcatgatgtacactgatcttagacaagccattcagattgccaagaagaattatcatcaaagatctaattctcaggctcaagatggtcagtggaattctcactctccagatgaaaatcccaagtctcaatctctagacgataatttcaagtctcaatctaaagtggccaattctgaaaagaaaagcccaaaacaataagtaaagggttgcattaaatatggtggagttgcagcattataggtttatgttgaactcgtgaatgttgagtttcatacaagtccattggatgcagcatttgtacatgaaagcaaagaaaaggaaggaataaagtatatttacaggatgaccatactttatatgatagtttttcatcttttctataatacaagacagtggttacaggttaggaaaagctctaattactaggttctgatgatgtgttatgaatgcaaagagaaggaacttgtgaagtgtcatttttgtatacaaagtgtcatatataggactttttattttctttgccaatgtaatttaaatttgtcatatccatgagtataggttgaggtttatttgaattttgtgatgg

SEQ ID NO: 18427 - protein, 259 aa, Glycine max
VMFECHKLQFQIMSTVYNNSHARIATHSELRRQITSYLESELHFLSSSFTKWIGAQKFYLEAINGWLHKCVSLKQKPGKKKRPQRPLLRMYGPPIYATCEIWLEKLGELPIQDVVDSMKSLAGEIARFLPRQEKNHSKGANQPHITSWNAHIRSESSDNLLRDDTLEDWDSGFDQFRASFLGFLAQLNNFSRSSVMMYTDLRQAIQIAKKNYHQRSNSQAQDGQWNSHSPDENPKSQSLDDNFKSQSKVANSEKKSPKQ

SEQ ID NO: 18428 - protein, 258 aa, Glycine max
MFECHKLQFQIMSTVYNNSHARIATHSELRRQITSYLESELHFLSSSFTKWIGAQKFYLEAINGWLHKCVSLKQKPGKKKRPQRPLLRMYGPPIYATCEIWLEKLGELPIQDVVDSMKSLAGEIARFLPRQEKNHSKGANQPHITSWNAHIRSESSDNLLRDDTLEDWDSGFDQFRASFLGFLAQLNNFSRSSVMMYTDLRQAIQIAKKNYHQRSNSQAQDGQWNSHSPDENPKSQSLDDNFKSQSKVANSEKKSPKQ

SEQ ID NO: 18429 - protein, 247 aa, Glycine max
MSTVYNNSHARIATHSELRRQITSYLESELHFLSSSFTKWIGAQKFYLEAINGWLHKCVSLKQKPGKKKRPQRPLLRMYGPPIYATCEIWLEKLGELPIQDVVDSMKSLAGEIARFLPRQEKNHSKGANQPHITSWNAHIRSESSDNLLRDDTLEDWDSGFDQFRASFLGFLAQLNNFSRSSVMMYTDLRQAIQIAKKNYHQRSNSQAQDGQWNSHSPDENPKSQSLDDNFKSQSKVANSEKKSPKQ

SEQ ID NO: 18430 - DNA, 2137 bp, Glycine max
ttttaccagtcttttataatgtggatcattctcaggtgcgactgcaggaaggtagttatggagaagccttggtgaaacatgaggagagtttaaagcatagcatggagaagttggagaaatggaagatggctctgcatcaagtagctaacttgtctgacattaaaatcaaacatggagctcgatatgaatacgactttattggggagatagttgagtgggtctccagtaagattaatcctgctcattacccggttggattacggtcaaaagtgctggaagttaggaaacttttggatgttggacgtgatgatggtgtccacatgttagggatccatggaattgatggtgtagggaaatcaacacttgcacgagaagtttataataaactgatttctgaccattttgatgcttcctgttttattgaaaacgtgagagaaaaatctaaaaaacatgggttacatcacctccaaaacatccttctttcgaaaatacttggagagaaggacatcaacctcacaagtgcccaacaagtgatttcaatgatgcaacggcataggctccagcaaaagaaggttctcatggttctagatgatgttgacaggcctgagcaattgcaagcagttactggaaaacctgcttggtttggtcctggcagcaaagtcataattacaacacaagacaaacaactgttaacatcttatgacattaatagaacatatgaggtgaagaaattgaataaggatgatgctcttcaattacttaaatggaaagcttttaagatgcattacttcgatccaaggtatgaggagctcttaaatcatgcagtaacttatgcttctagtcttccattgactttggaaatattagcttccaacctatttggaaaaagtgtaaaagaatggaaatctactttccaccaatttgaaagaagtccgaataatccaatcgaaatgatacttaaagtaattttttattctttgaaggaaaaagaaaagagtgttcttcttgacattgcttgttgcttcaaaggatatgaattgacagaggttcaagatatacttcatgctcattatggtcaatgcataaagtattatattgacgttttggttgacaaatctctagtatacattagtcatggtacagagccttgtaatgatacaattacaatgcatgacttgattgctgaagagattgtccgacaggaatcaatgacaaagccaggtgagcgcaggagattatggtcattggaagatgtaagggaagttttaggatacaacacggcaactagcaaaattgaaatcatatgtctggattaccccatatttgatgaagaagaaatagtacaatgggatggaacagctttccaaaatatgcaaaacctcaaaacacttattattagaaatggtaatttttccaaaggtccggaatatcttccaaatagtttgagagtatttgaatggtggggatatccgtcacattgtttaccatctgattttcatccaaaggaacttgccatatgcaagttaccctgcagtcatatttctacaactgagttgaccaacttattgacgttcgtgaatgtgaaacttttgaaattttcaagcgaaaaggtaagcttaaaatattgagtgcttttggttgcatcaagcttaggagttttccaaccatcaagttgaccttgcttgaagacctccatccttcatgttatacttgagagttttccaaaaatatcagaaaagatggaaaatgtaagggaacttcatttgcagtacactgccataagtatatctgtctatttgtggagttgttcagttaccaagtagcactgtcatgttaccagaactgactgatattatagcttttggatggaaagggtagcaatggctaaatcaggaagatggtgaagaaaaagcgggttcaatagtatcttcaaaggatctgcatgaggccgaaaacactatcattttccaggagtaatatatagtggttcaatcaccaaagcaaagggaccttcaagttctttttggtttggtactaagtcccctgacatagttctttttcttcttattgcacctatggataatggatctggatttttttcatcccttgttcatcaatggcaataaatgttcccttc

SEQ ID NO: 18431 - protein, 541 aa, Glycine max
LPVFYNVDHSQVRLQEGSYGEALVKHEESLKHSMEKLEKWKMALHQVANLSDIKIKHGARYEYDFIGEIVEWVSSKINPAHYPVGLRSKVLEVRKLLDVGRDDGVHMLGIHGIDGVGKSTLAREVYNKLISDHFDASCFIENVREKSKKHGLHHLQNILLSKILGEKDINLTSAQQVISMMQRHRLQQKKVLMVLDDVDRPEQLQAVTGKPAWFGPGSKVIITTQDKQLLTSYDINRTYEVKKLNKDDALQLLKWKAFKMHYFDPRYEELLNHAVTYASSLPLTLEILASNLFGKSVKEWKSTFHQFERSPNNPIEMILKVIFYSLKEKEKSVLLDIACCFKGYELTEVQDILHAHYGQCIKYYIDVLVDKSLVYISHGTEPCNDTITMHDLIAEEIVRQESMTKPGERRRLWSLEDVREVLGYNTATSKIEIICLDYPIFDEEEIVQWDGTAFQNMQNLKTLIIRNGNFSKGPEYLPNSLRVFEWWGYPSHCLPSDFHPKELAICKLPCSHISTTELTNLLTFVNVKLLKFSSEKVSLKY

SEQ ID NO: 18432 - protein, 508 aa, Glycine max
MEKLEKWKMALHQVANLSDIKIKHGARYEYDFIGEIVEWVSSKINPAHYPVGLRSKVLEVRKLLDVGRDDGVHMLGIHGIDGVGKSTLAREVYNKLISDHFDASCFIENVREKSKKHGLHHLQNILLSKILGEKDINLTSAQQVISMMQRHRLQQKKVLMVLDDVDRPEQLQAVTGKPAWFGPGSKVIITTQDKQLLTSYDINRTYEVKKLNKDDALQLLKWKAFKMHYFDPRYEELLNHAVTYASSLPLTLEILASNLFGKSVKEWKSTFHQFERSPNNPIEMILKVIFYSLKEKEKSVLLDIACCFKGYELTEVQDILHAHYGQCIKYYIDVLVDKSLVYISHGTEPCNDTITMHDLIAEEIVRQESMTKPGERRRLWSLEDVREVLGYNTATSKIEIICLDYPIFDEEEIVQWDGTAFQNMQNLKTLIIRNGNFSKGPEYLPNSLRVFEWWGYPSHCLPSDFHPKELAICKLPCSHISTTELTNLLTFVNVKLLKFSSEKVSLKY

SEQ ID NO: 18433 - protein, 500 aa, Glycine max
MALHQVANLSDIKIKHGARYEYDFIGEIVEWVSSKINPAHYPVGLRSKVLEVRKLLDVGRDDGVHMLGIHGIDGVGKSTLAREVYNKLISDHFDASCFIENVREKSKKHGLHHLQNILLSKILGEKDINLTSAQQVISMMQRHRLQQKKVLMVLDDVDRPEQLQAVTGKPAWFGPGSKVIITTQDKQLLTSYDINRTYEVKKLNKDDALQLLKWKAFKMHYFDPRYEELLNHAVTYASSLPLTLEILASNLFGKSVKEWKSTFHQFERSPNNPIEMILKVIFYSLKEKEKSVLLDIACCFKGYELTEVQDILHAHYGQCIKYYIDVLVDKSLVYISHGTEPCNDTITMHDLIAEEIVRQESMTKPGERRRLWSLEDVREVLGYNTATSKIEIICLDYPIFDEEEIVQWDGTAFQNMQNLKTLIIRNGNFSKGPEYLPNSLRVFEWWGYPSHCLPSDFHPKELAICKLPCSHISTTELTNLLTFVNVKLLKFSSEKVSLKY

SEQ ID NO: 18434 - DNA, 1258 bp, Glycine max
acttttccctcaatggaacaaacctcagaagcagaaaaagaatcttgttaaaaagaagaaggatgtcaagcggagcaacacactggtgtcatgcatgcagacagccagttgtgcttgatgggagagatgctgtttgcccttactgcgatggaggatttgtacaagaacttgatgagttggaaggaattgcaccccaccataccttttgctcacaatcaggagagttccatcaaatgcctgacattttcgatgctatacctgcttttatgggacagaggggttctgaccagagatccaggcttatggatgatgctgttgataatttcatgaggcatagaacggctggaagaaactcaaactttgatgttagagggagatctggctctcgcccagttcctgaacggagttggggcgtttttagttctggtccttatttaatatttcatggtcaagttcccggatccaccttcgctgctggcagcccaagaggtggttctaggcatgttgattttggtgactactttatgggtcttggactggaagaacttattgagcaactcaccatgaatgatcggcgtggtccacccccggccgcactatcttcaattgatgcaatgcctactattaagataacacaggcgcatcttcgcttggattcacactgtccagtttgtaaagaaaaatttgaattgggcactgaagccagagaaatgccatgcaaccatatttaccattctgactgtattgttccttggttggttcagcataactcatgtcctgtttgccgtgttgagctgccacctcaaggacaggctagttcccggggtactcaaaattggggaggaaggaatgacagcaacaccagcagcagtggcagcaatgatagctccaggggtagagagaacagccgtcagaaccatggaaggagaaatccatcatcttttttgtggccattccgctcatctaactcaaacaataatcatcattctgatactgggggaagcagctcttcaaaccactcctgaccagaataatggaacaagttacagcggttggccctttgattgctaaaaatatcttttcttctcctggataagtacaatttgctgtctaataatgcttgtaatttaaaatgccaaggaaagaatttattatattaattttgtattttaaacttaagctcatgtaaggaagatagaagtttcttaaaatctttgtacatgaaattgcatggttagttgaatctctttgaaacttg

SEQ ID NO: 18435 - protein, 340 aa, Glycine max
FSLNGTNLRSRKRILLKRRRMSSGATHWCHACRQPVVLDGRDAVCPYCDGGFVQELDELEGIAPHHTFCSQSGEFHQMPDIFDAIPAFMGQRGSDQRSRLMDDAVDNFMRHRTAGRNSNFDVRGRSGSRPVPERSWGVFSSGPYLIFHGQVPGSTFAAGSPRGGSRHVDFGDYFMGLGLEELIEQLTMNDRRGPPPAALSSIDAMPTIKITQAHLRLDSHCPVCKEKFELGTEAREMPCNHIYHSDCIVPWLVQHNSCPVCRVELPPQGQASSRGTQNWGGRNDSNTSSSGSNDSSRGRENSRQNHGRRNPSSFLWPFRSSNSNNNHHSDTGGSSSSNHS

SEQ ID NO: 18436 - protein, 320 aa, Glycine max
MSSGATHWCHACRQPVVLDGRDAVCPYCDGGFVQELDELEGIAPHHTFCSQSGEFHQMPDIFDAIPAFMGQRGSDQRSRLMDDAVDNFMRHRTAGRNSNFDVRGRSGSRPVPERSWGVFSSGPYLIFHGQVPGSTFAAGSPRGGSRHVDFGDYFMGLGLEELIEQLTMNDRRGPPPAALSSIDAMPTIKITQAHLRLDSHCPVCKEKFELGTEAREMPCNHIYHSDCIVPWLVQHNSCPVCRVELPPQGQASSRGTQNWGGRNDSNTSSSGSNDSSRGRENSRQNHGRRNPSSFLWPFRSSNSNNNHHSDTGGSSSSNHS

SEQ ID NO: 18437 - protein, 263 aa, Glycine max
MPDIFDAIPAFMGQRGSDQRSRLMDDAVDNFMRHRTAGRNSNFDVRGRSGSRPVPERSWGVFSSGPYLIFHGQVPGSTFAAGSPRGGSRHVDFGDYFMGLGLEELIEQLTMNDRRGPPPAALSSIDAMPTIKITQAHLRLDSHCPVCKEKFELGTEAREMPCNHIYHSDCIVPWLVQHNSCPVCRVELPPQGQASSRGTQNWGGRNDSNTSSSGSNDSSRGRENSRQNHGRRNPSSFLWPFRSSNSNNNHHSDTGGSSSSNHS

SEQ ID NO: 18438 - DNA, 1559 bp, Glycine max
gaaaggaacagcaggttattaggcaaaagaaccttctgaaaactcggaaaaaatcacaggtaaaacaagaggagaataccttgcaggatttctatggtaattggtctccttcagcagcaccagcaaaacaatttcagaatcaattggcaccttctgtcatacaatcttctccctcttcaatttttgggcaaccaaagcagatccaaggagctgaaaccctatatcagaatatcataaatccatatgtgacttcttctgtgtatgggaaccttactaatacatatcctgctatgccaatgctatcgcagactcagccagcactttctggctacgaagtgtctcctggtatagtaaatcgtgtgaacaattctgtggactcagtcaagccccaaatcatgactcctcaggagaaaattgaaaaattgaggaggcggcagcaaatgcaggcaatgattgctattcagaaacaacgccaacaattgggccatcaagttcctagtaaatcaagcactcaaaaatgtcctccagaaattcaaagtcaccttagtgatgggactgatgaagatctaagaacttttcctgcgctagatccaccaattgaacaagatgattctaatacaatgtcagtggcagttggtaatgatttcgttgaagacaccgtactgtacgggcttcagcatattatatcaaagttagacatcaaaataagactctgcatcagagatagtttgttccggttggcacaaagtgcaacacaaaggcattatgctagtgatactagcagtacaaacaaaagtagcagagaagaacttgaagttgctgcaagagaagaaagcaatagccaaaacagatatgccaggatgcctgatgttgaaacagagacgaatcccattgatagaactgtggctcatttactttttcataggcctatggagttgacccaaaactattctgacaagttggagtcgcctatttctaccaaggtgcaatgtgaaagcaaagcagctaacccagtgaactttcccatgagttactcacaagatgaggacgcgaaaaacaatcaacaactttctcaccttgggtttaagaatccttgggttgatgcccagtctatggatcaaattaaaaacaatccttgcatagacatgtcagagaatgcatccaacacacatgaacttgaagcctctcaatgaagaaagaggttgtcccgaaatctgaggccattcggatcataagcaagtgcaactatcactgtagaatcctgggaaacagtttcatgcatgcatgttatcagtattattagtttttctgctgttttaaaacatgacaatgtatatcagtatctatgttgttttaatcataactacaacaaaagtgtctcgcaaagccacttatatgtcaaatttaagtctttgcctgactcacttagaccaggctttaaagttggtgtcgtatttctatatgtacgacttgccatacctacctacccctcatcatatcattatttaagattgagacataaacttgcgatttttaatttgaatttaagtatgttctgg

SEQ ID NO: 18439 - protein, 396 aa, Glycine max
KEQQVIRQKNLLKTRKKSQVKQEENTLQDFYGNWSPSAAPAKQFQNQLAPSVIQSSPSSIFGQPKQIQGAETLYQNIINPYVTSSVYGNLTNTYPAMPMLSQTQPALSGYEVSPGIVNRVNNSVDSVKPQIMTPQEKIEKLRRRQQMQAMIAIQKQRQQLGHQVPSKSSTQKCPPEIQSHLSDGTDEDLRTFPALDPPIEQDDSNTMSVAVGNDFVEDTVLYGLQHIISKLDIKIRLCIRDSLFRLAQSATQRHYASDTSSTNKSSREELEVAAREESNSQNRYARMPDVETETNPIDRTVAHLLFHRPMELTQNYSDKLESPISTKVQCESKAANPVNFPMSYSQDEDAKNNQQLSHLGFKNPWVDAQSMDQIKNNPCIDMSENASNTHELEASQ

SEQ ID NO: 18440 - protein, 300 aa, Glycine max
MPMLSQTQPALSGYEVSPGIVNRVNNSVDSVKPQIMTPQEKIEKLRRRQQMQAMIAIQKQRQQLGHQVPSKSSTQKCPPEIQSHLSDGTDEDLRTFPALDPPIEQDDSNTMSVAVGNDFVEDTVLYGLQHIISKLDIKIRLCIRDSLFRLAQSATQRHYASDTSSTNKSSREELEVAAREESNSQNRYARMPDVETETNPIDRTVAHLLFHRPMELTQNYSDKLESPISTKVQCESKAANPVNFPMSYSQDEDAKNNQQLSHLGFKNPWVDAQSMDQIKNNPCIDMSENASNTHELEASQ

SEQ ID NO: 18441 - protein, 298 aa, Glycine max
MLSQTQPALSGYEVSPGIVNRVNNSVDSVKPQIMTPQEKIEKLRRRQQMQAMIAIQKQRQQLGHQVPSKSSTQKCPPEIQSHLSDGTDEDLRTFPALDPPIEQDDSNTMSVAVGNDFVEDTVLYGLQHIISKLDIKIRLCIRDSLFRLAQSATQRHYASDTSSTNKSSREELEVAAREESNSQNRYARMPDVETETNPIDRTVAHLLFHRPMELTQNYSDKLESPISTKVQCESKAANPVNFPMSYSQDEDAKNNQQLSHLGFKNPWVDAQSMDQIKNNPCIDMSENASNTHELEASQ

SEQ ID NO: 18442 - DNA, 1372 bp, Glycine max
aagaagacccccaactcttcatgggattcccagagaaaacagaacgctgcatatgagtcttgcagaagcttgtaactatcagaagaacatatttgctcttgattcagaaagcaaacccttggatctgcctagctctaccaaaaatcttacacaaaatttgggcccgacaatggagggtttgagggatgcagttgatgaagctcctaaggaccaaccttgtgaagcttccacacaggtgcaccttgaagctttaaaggaagcatctctagagaaacccaaagaggtatttactgaatttccccaggaagcaccaattgaagctccaaatccaaatgaagtttccaaggaagttgatactgtatccaatagccatgaaagaaagaggcccattaaaatcaaggtcaagcaatcttctgccaccagtagggctgatactgataatcaagtggttgaatgttctttaggtggtcgtaatgaaatggatcatggagctagcagttcagtttctgtagatgcaccccagaggaattttgccgatactgttagcatcagtaatcataatattgacgaagttaattcttggcatgatcgtggttcgcgcatgactgccagcattggcagtgcaaagtttttgagtgatggtgatgaattggtcaaagaactgcagtgcactgctgattcaagtatagtttattcacaacctcagccagaagatccatcatcatccagtattatccaggataacaatatagatgctgatgcacgacgatatgccagccttcaaactctttcagttgcaagatttgatcctgacggagaatcattaggtaaagaaatttctgctcgggggaaagaaaagcacaaaagcaaggaaaagaaacggaaacaggaaagtaataaaggacaccatgatgatgcagaatatttggagcgaaaacgactaaagaaagagaaaaaacatcgggaaaaagagctggcaaaacttcagagtgatgaagcaaagagatcctccattgatttgtcaagcaagaaagtggaacccgtagtggacgttgctagacaggttaaatctgttgaacccagtggatataattctaaagtagaaataaaaaagatagataccaaatcggagccatctgaaggcacatctggtgcaccaaaaattcgaattaaaattaaaaaccgaatgctcagcaagtcctagggaatataatgtcctttattttgtggatgctagaatgaaaatcacaactccttcatattttctaggttgtatttttcttttcattatccggcgtagtagatcatttaggtacatacaattattgattcaatgagctttattcgctggtagttcttatctgattttaga

SEQ ID NO: 18443 - protein, 400 aa, Glycine max
RRPPTLHGIPRENRTLHMSLAEACNYQKNIFALDSESKPLDLPSSTKNLTQNLGPTMEGLRDAVDEAPKDQPCEASTQVHLEALKEASLEKPKEVFTEFPQEAPIEAPNPNEVSKEVDTVSNSHERKRPIKIKVKQSSATSRADTDNQVVECSLGGRNEMDHGASSSVSVDAPQRNFADTVSISNHNIDEVNSWHDRGSRMTASIGSAKFLSDGDELVKELQCTADSSIVYSQPQPEDPSSSSIIQDNNIDADARRYASLQTLSVARFDPDGESLGKEISARGKEKHKSKEKKRKQESNKGHHDDAEYLERKRLKKEKKHREKELAKLQSDEAKRSSIDLSSKKVEPVVDVARQVKSVEPSGYNSKVEIKKIDTKSEPSEGTSGAPKIRIKIKNRMLSKS

SEQ ID NO: 18444 - protein, 383 aa, Glycine max
MSLAEACNYQKNIFALDSESKPLDLPSSTKNLTQNLGPTMEGLRDAVDEAPKDQPCEASTQVHLEALKEASLEKPKEVFTEFPQEAPIEAPNPNEVSKEVDTVSNSHERKRPIKIKVKQSSATSRADTDNQVVECSLGGRNEMDHGASSSVSVDAPQRNFADTVSISNHNIDEVNSWHDRGSRMTASIGSAKFLSDGDELVKELQCTADSSIVYSQPQPEDPSSSSIIQDNNIDADARRYASLQTLSVARFDPDGESLGKEISARGKEKHKSKEKKRKQESNKGHHDDAEYLERKRLKKEKKHREKELAKLQSDEAKRSSIDLSSKKVEPVVDVARQVKSVEPSGYNSKVEIKKIDTKSEPSEGTSGAPKIRIKIKNRMLSKS

SEQ ID NO: 18445 - protein, 344 aa, Glycine max
MEGLRDAVDEAPKDQPCEASTQVHLEALKEASLEKPKEVFTEFPQEAPIEAPNPNEVSKEVDTVSNSHERKRPIKIKVKQSSATSRADTDNQVVECSLGGRNEMDHGASSSVSVDAPQRNFADTVSISNHNIDEVNSWHDRGSRMTASIGSAKFLSDGDELVKELQCTADSSIVYSQPQPEDPSSSSIIQDNNIDADARRYASLQTLSVARFDPDGESLGKEISARGKEKHKSKEKKRKQESNKGHHDDAEYLERKRLKKEKKHREKELAKLQSDEAKRSSIDLSSKKVEPVVDVARQVKSVEPSGYNSKVEIKKIDTKSEPSEGTSGAPKIRIKIKNRMLSKS

SEQ ID NO: 18446 - DNA, 2323 bp, Glycine max
gtatcctgttatgtgtcagatgatggtgctgcaatgctgtcatttgagtcccttgtggagacagctgactttgcaagaaagtgggttccattttgcaaaaagttttcaattgaaccacgcgcacctgagttctacttctctcagaagattgactacctgaaggacaaagtacaaccttcttttgtgaaggaacgtagagcaatgaagagggagtatgaagagtttaaagtgcgagttaatgctttggtagcaaaggctcagaaaacaccagatgaaggatggactatgcaagatggaacttcatggccaggaaacaactcacgtgatcaccctggcatgattcaggttttccttggacacagtggtgcccatgacatagagggaaatgaacttcccaggttggtgtatgtttctagagagaaaaggccaggctaccaacaccacaaaaaggctggtgctgaaaatgcactggtgagggtgtctgcagttctcacaaatgctcccttcattctcaatcttgactgtgatcattatgtgaacaatagcaaggctgtacgggaagcaatgtgttttctgatggatccagtagttggcagagatttgtgttatgtgcagtttccccagagatttgatggtatagatcgtagtgatcgatatgccaatcgaaacacagttttctttgatgttaacatgaaaggacttgatggcattcaaggacctatgtatgtgggaactggatgtgttttcaatagacaagcactttatggctacagtccaccatctatgcccaaattaccaaaatcatcatcctgctgttgctgcccctcaaagaagcaaaccaaagacgtctcagagctttatagagatgcaaagagggaagaacttgatgccgccatttttaatctcagggagattgacaactatgatgaatacgagaggtcaatgctgatttcacaaatgagctttgagaaaacatttggtttgtccactgttttcattgaatctacactaatggagaatggagggcttcctgaatctgctgatccctcaatgctgatcaaagaggccattcatgttattagctgtggatatgaagagaaaactgcatggggaaaagagattggttggatctatggttcagttactgaggatatcttaacggggttcaagatgcaatgccggggatggagatcagtttactgcatgcccttaaggcctgcattcaaaggatcagcaccaatcaatctttctgatcgtttgcaccaagttcttcgatgggcccttggatcagttgaaattttcttcagcagacattgccccctctggtatggttttgcgggaggtcgcctcaaatggctgcagagacttgcttacataaacaccattgtctacccctttacatcccttcctcttgttgcatattgtactttgcctgcaatttgccttctcacaggaaaattcatcataccaacgctttcaaaccttgcaagtgccctctttcttggacttttcctgtccattatagtcactagtgtgctcgagctgcggtggagtggtgtgaccattgaagctttgtggcgtaatgaacaattctgggttattggaggagtttcagcgcatctatttgccgtgttccaaggattcctgaagatgttggcaggtgttgacaccaacttcactgtcactgccaaagctgctgatgacaccgagtttggtgatctatacataatcaagtggaccacactcttaattcctccaacaacccttatcattattaatatggttggtgttgttgctggattttctgatgcactcaatggaggatatgagtcttggggaccactttttggaaaggttttctttgccttctgggtcattttccatctctatccattcctcaagggtctcatgggtcgccaaaaccgcaccccaaccattgttattctgtggtcagtgttgttggcttctgttttctctctggtttgggtcaagattaacccttttatcagcagacctgacagtgcaagcatttcccagacctgcatttctatagattgctaagtcatctgcctatataaaaagttttgaccatatgttaaaaatatggatgatgatgatgattgattgtgatttgagccgcagttgaaatgtgtaagcactttaaatgtaaggttgcaaacatggttgttacttcttttccatgcattggatgaaatttcctgtgtaaagatcaaccgttgactcattatatcaatgtaaaatagtgatttttctttccatttagaaattcgaatgatatgcagaaaataaagattataataac

SEQ ID NO: 18447 - protein, 686 aa, Glycine max
VSCYVSDDGAAMLSFESLVETADFARKWVPFCKKFSIEPRAPEFYFSQKIDYLKDKVQPSFVKERRAMKREYEEFKVRVNALVAKAQKTPDEGWTMQDGTSWPGNNSRDHPGMIQVFLGHSGAHDIEGNELPRLVYVSREKRPGYQHHKKAGAENALVRVSAVLTNAPFILNLDCDHYVNNSKAVREAMCFLMDPVVGRDLCYVQFPQRFDGIDRSDRYANRNTVFFDVNMKGLDGIQGPMYVGTGCVFNRQALYGYSPPSMPKLPKSSSCCCCPSKKQTKDVSELYRDAKREELDAAIFNLREIDNYDEYERSMLISQMSFEKTFGLSTVFIESTLMENGGLPESADPSMLIKEAIHVISCGYEEKTAWGKEIGWIYGSVTEDILTGFKMQCRGWRSVYCMPLRPAFKGSAPINLSDRLHQVLRWALGSVEIFFSRHCPLWYGFAGGRLKWLQRLAYINTIVYPFTSLPLVAYCTLPAICLLTGKFIIPTLSNLASALFLGLFLSIIVTSVLELRWSGVTIEALWRNEQFWVIGGVSAHLFAVFQGFLKMLAGVDTNFTVTAKAADDTEFGDLYIIKWTTLLIPPTTLIIINMVGVVAGFSDALNGGYESWGPLFGKVFFAFWVIFHLYPFLKGLMGRQNRTPTIVILWSVLLASVFSLVWVKINPFISRPDSASISQTCISIDC

SEQ ID NO: 18448 - protein, 675 aa, Glycine max
MLSFESLVETADFARKWVPFCKKFSIEPRAPEFYFSQKIDYLKDKVQPSFVKERRAMKREYEEFKVRVNALVAKAQKTPDEGWTMQDGTSWPGNNSRDHPGMIQVFLGHSGAHDIEGNELPRLVYVSREKRPGYQHHKKAGAENALVRVSAVLTNAPFILNLDCDHYVNNSKAVREAMCFLMDPVVGRDLCYVQFPQRFDGIDRSDRYANRNTVFFDVNMKGLDGIQGPMYVGTGCVFNRQALYGYSPPSMPKLPKSSSCCCCPSKKQTKDVSELYRDAKREELDAAIFNLREIDNYDEYERSMLISQMSFEKTFGLSTVFIESTLMENGGLPESADPSMLIKEAIHVISCGYEEKTAWGKEIGWIYGSVTEDILTGFKMQCRGWRSVYCMPLRPAFKGSAPINLSDRLHQVLRWALGSVEIFFSRHCPLWYGFAGGRLKWLQRLAYINTIVYPFTSLPLVAYCTLPAICLLTGKFIIPTLSNLASALFLGLFLSIIVTSVLELRWSGVTIEALWRNEQFWVIGGVSAHLFAVFQGFLKMLAGVDTNFTVTAKAADDTEFGDLYIIKWTTLLIPPTTLIIINMVGVVAGFSDALNGGYESWGPLFGKVFFAFWVIFHLYPFLKGLMGRQNRTPTIVILWSVLLASVFSLVWVKINPFISRPDSASISQTCISIDC

SEQ ID NO: 18449 - protein, 619 aa, Glycine max
MKREYEEFKVRVNALVAKAQKTPDEGWTMQDGTSWPGNNSRDHPGMIQVFLGHSGAHDIEGNELPRLVYVSREKRPGYQHHKKAGAENALVRVSAVLTNAPFILNLDCDHYVNNSKAVREAMCFLMDPVVGRDLCYVQFPQRFDGIDRSDRYANRNTVFFDVNMKGLDGIQGPMYVGTGCVFNRQALYGYSPPSMPKLPKSSSCCCCPSKKQTKDVSELYRDAKREELDAAIFNLREIDNYDEYERSMLISQMSFEKTFGLSTVFIESTLMENGGLPESADPSMLIKEAIHVISCGYEEKTAWGKEIGWIYGSVTEDILTGFKMQCRGWRSVYCMPLRPAFKGSAPINLSDRLHQVLRWALGSVEIFFSRHCPLWYGFAGGRLKWLQRLAYINTIVYPFTSLPLVAYCTLPAICLLTGKFIIPTLSNLASALFLGLFLSIIVTSVLELRWSGVTIEALWRNEQFWVIGGVSAHLFAVFQGFLKMLAGVDTNFTVTAKAADDTEFGDLYIIKWTTLLIPPTTLIIINMVGVVAGFSDALNGGYESWGPLFGKVFFAFWVIFHLYPFLKGLMGRQNRTPTIVILWSVLLASVFSLVWVKINPFISRPDSASISQTCISIDC

SEQ ID NO: 18450 - DNA, 1545 bp, Glycine max
attacttgacatttccgacaatctactttctggttccttaaaacccttgtcagtaggaaaccatgcacagctaactactatttacctcagaaacaactcaattagtggaaaaattccaccagagcttggatatttgcctgtcttaagtactctggatctaagatacaataatcttaccggaacagttcctctatctttgaaaaatttccatagcgtgaacctttcattcaataatttgaagggtcccattccatatggtttaagtgagattcagctaatagggaacaaggatgtatgtagcgatgattcctattacatagataaatatcaattcaagcgttgttctgcccaagacaacaaagtaaagcacaggcacaatcagctggtcatagttctccctatcctcttttttctaatcatggccttcctacgactcgtgcggctaaggcatattcgcattgcaactaagaacaaacatgcaaagacaactgcagccactaagaatggggacttgttctgtatatggaattatgatggaaacatagcctatgaagacatcattacagcaacccaggactttgacatgagatattgtattggaacaggtgcctatgggagcgtttatagggcacaattaccaagtggcaagattgttgccgtgaaaaaactccacggatttgaagcagaggtgccagcttttgatgagagtttcagaaaagaggtcaaagtattatcagaaataaagcatcgacatattgtgaagctccatggattctgcttgcacagaagaatcatgtttttgatatatgagtacatggagagaggcagcttgttttcagtgttgtttgatgatgtggaagccatggaattggattggaaaaagagggttaacattgtgaaaggcactgcacatgctctgtcctatcttcatcatgacttcactcctccaattgtgcatagagacatatcagccagcaatgtcttgcttaactcagactgggagcccagtgtttcagactttggcacagcccgattccttagctctgattcatcccatcgaactatggttgctggaaccattgggtacatagccccagagcttgcatatagtatggttgtgagtgaaaggtgtgatgtgtacagctttggagtggtggcactcgaaactttggtgggatcgcatcctaaggaaatactctcatcacttcaatcagcatctactgagaatggcatcacattatgtgaaatattggaccaacgcctcccacaggcaacaatgtcagttttaatggaaatagttagtgttgccatagttgcatttgcgtgcttaaatgccaatccttgctctcgcccaacaatgaaatcggtctctcaatgttttcttactcagcttacaccattagacattcctttgcgtgagatttcattgcagcagctcatgagtcaagaactcaggcattatttaaatttgtgaactcctgaaagtgaaacttctagttgaaattagatgtatcagcattcaataaacttgcaacatataccctt

SEQ ID NO: 18451 - protein, 490 aa, Glycine max
LLDISDNLLSGSLKPLSVGNHAQLTTIYLRNNSISGKIPPELGYLPVLSTLDLRYNNLTGTVPLSLKNFHSVNLSFNNLKGPIPYGLSEIQLIGNKDVCSDDSYYIDKYQFKRCSAQDNKVKHRHNQLVIVLPILFFLIMAFLRLVRLRHIRIATKNKHAKTTAATKNGDLFCIWNYDGNIAYEDIITATQDFDMRYCIGTGAYGSVYRAQLPSGKIVAVKKLHGFEAEVPAFDESFRKEVKVLSEIKHRHIVKLHGFCLHRRIMFLIYEYMERGSLFSVLFDDVEAMELDWKKRVNIVKGTAHALSYLHHDFTPPIVHRDISASNVLLNSDWEPSVSDFGTARFLSSDSSHRTMVAGTIGYIAPELAYSMVVSERCDVYSFGVVALETLVGSHPKEILSSLQSASTENGITLCEILDQRLPQATMSVLMEIVSVAIVAFACLNANPCSRPTMKSVSQCFLTQLTPLDIPLREISLQQLMSQELRHYLNL

SEQ ID NO: 18452 - protein, 351 aa, Glycine max
MAFLRLVRLRHIRIATKNKHAKTTAATKNGDLFCIWNYDGNIAYEDIITATQDFDMRYCIGTGAYGSVYRAQLPSGKIVAVKKLHGFEAEVPAFDESFRKEVKVLSEIKHRHIVKLHGFCLHRRIMFLIYEYMERGSLFSVLFDDVEAMELDWKKRVNIVKGTAHALSYLHHDFTPPIVHRDISASNVLLNSDWEPSVSDFGTARFLSSDSSHRTMVAGTIGYIAPELAYSMVVSERCDVYSFGVVALETLVGSHPKEILSSLQSASTENGITLCEILDQRLPQATMSVLMEIVSVAIVAFACLNANPCSRPTMKSVSQCFLTQLTPLDIPLREISLQQLMSQELRHYLNL

SEQ ID NO: 18453 - protein, 296 aa, Glycine max
MRYCIGTGAYGSVYRAQLPSGKIVAVKKLHGFEAEVPAFDESFRKEVKVLSEIKHRHIVKLHGFCLHRRIMFLIYEYMERGSLFSVLFDDVEAMELDWKKRVNIVKGTAHALSYLHHDFTPPIVHRDISASNVLLNSDWEPSVSDFGTARFLSSDSSHRTMVAGTIGYIAPELAYSMVVSERCDVYSFGVVALETLVGSHPKEILSSLQSASTENGITLCEILDQRLPQATMSVLMEIVSVAIVAFACLNANPCSRPTMKSVSQCFLTQLTPLDIPLREISLQQLMSQELRHYLNL

SEQ ID NO: 18454 - DNA, 1130 bp, Glycine max
gcttaaattaatcttcgttttggcctcaaccaacaataattctagtttctctcattccttctgtcccttaattgcgaagcaaatctttcttcttcccatggaaatggaaccgacgtgcgtcgacacttccctcaaccttaacgttattccttccccacacatcgaccacctcgcgggagaagttttgtttgaagagttgcggcgtctaagcagtgagaacaagaggctaactgagacgctgaaccacttgtgcgagagctatgttgccttgcagaaacatttgagtgaattcagccaacttaggaacgcaaattttgataaagaaggaacttgtgcagttccgtcgctaaagagaaagcccgagagtgagaattgtgtgaatctgtttggtactgagtgcaacaccatcacagaggaagaaacattcaaaaggcccaagcatagcaccgagccaaaggtttccaaagttcttacacggacagatgcatctgatactggcttatatgtgagggacggatatcagtggagaaaatacggtcagaaagtcactagagataacccttctcctagggcttacttcaagtgttcatatgcccctagctgtccagtaaaaaagaaggtgcaaagaagtgtagaagatccaagtgtgttggtaacaacttacgaaggggagcacaaccatgggcaacaacatcaaactgcagaaatatcaattaattcatcaagcaaaagtgaaacacctaggcctgcagtttcaccctcagccatgaatattcggagtagtgcagcagcaggtccaattgtaacacttgacttggtcaagtcaaaagttgttgacattaatgcgcaaaagtcatctctccagcagtttttagttcaccaaatggctacttctttgacaagagatcctaatttcacagccgcacttgcttctgccatctctggaagaattctagatgatacttctgtgggaaaacgttgaattattaagagatatatatgtattaatttcactgatgaacatatatgaattttgtcacttttcttcgttttaatatttaataacagctagtcacgaggagtagtgttctatgcagcatctatatttatcttatacaagtaaattttat

SEQ ID NO: 18455 - protein, 326 aa, Glycine max
LKLIFVLASTNNNSSFSHSFCPLIAKQIFLLPMEMEPTCVDTSLNLNVIPSPHIDHLAGEVLFEELRRLSSENKRLTETLNHLCESYVALQKHLSEFSQLRNANFDKEGTCAVPSLKRKPESENCVNLFGTECNTITEEETFKRPKHSTEPKVSKVLTRTDASDTGLYVRDGYQWRKYGQKVTRDNPSPRAYFKCSYAPSCPVKKKVQRSVEDPSVLVTTYEGEHNHGQQHQTAEISINSSSKSETPRPAVSPSAMNIRSSAAAGPIVTLDLVKSKVVDINAQKSSLQQFLVHQMATSLTRDPNFTAALASAISGRILDDTSVGKR

SEQ ID NO: 18456 - protein, 294 aa, Glycine max
MEMEPTCVDTSLNLNVIPSPHIDHLAGEVLFEELRRLSSENKRLTETLNHLCESYVALQKHLSEFSQLRNANFDKEGTCAVPSLKRKPESENCVNLFGTECNTITEEETFKRPKHSTEPKVSKVLTRTDASDTGLYVRDGYQWRKYGQKVTRDNPSPRAYFKCSYAPSCPVKKKVQRSVEDPSVLVTTYEGEHNHGQQHQTAEISINSSSKSETPRPAVSPSAMNIRSSAAAGPIVTLDLVKSKVVDINAQKSSLQQFLVHQMATSLTRDPNFTAALASAISGRILDDTSVGKR

SEQ ID NO: 18457 - protein, 292 aa, Glycine max
MEPTCVDTSLNLNVIPSPHIDHLAGEVLFEELRRLSSENKRLTETLNHLCESYVALQKHLSEFSQLRNANFDKEGTCAVPSLKRKPESENCVNLFGTECNTITEEETFKRPKHSTEPKVSKVLTRTDASDTGLYVRDGYQWRKYGQKVTRDNPSPRAYFKCSYAPSCPVKKKVQRSVEDPSVLVTTYEGEHNHGQQHQTAEISINSSSKSETPRPAVSPSAMNIRSSAAAGPIVTLDLVKSKVVDINAQKSSLQQFLVHQMATSLTRDPNFTAALASAISGRILDDTSVGKR

SEQ ID NO: 18458 - DNA, 1171 bp, Glycine max
attatcaatcctcatgcatttccttccaggatgacaattgctatgcttttggaatctgttgctgctaagggaggtagcttgcgtggagaatttgtagatgcaactccatttcgaagttcagtgaagaaagacagtggggagtctgattcaatgtcaggttcaattgtcgatgatcttggccttctgctaagagaaaaaggatttaattatcacggtttggaggttctatatagtggtgtttatggaacggaactaacatgtgagatatttattggacctgtttattatcaacggctgcgtcacatggtttcagacaaatttcaggttcgatctactggcacaattgaccaggtcacccggcagccaataaaaggacgaaagcgtggtgggggaattcgatttggagaaatggaacgcgactctctgcttgcacatggagctgcatatcttctgcatgataggttgcacacctgttctgattatcacattgctgatgtttgttcactttgtggaagcatgcttacaacaacattcacccaacctcaaaagcggccagttcgggagattggtggtctacccccgggaagagctccgaaaaaggtcacttgtcatgcttgccaaacgagtaagggcatggagacagttgccatgccctatgtatttagatatttggctgccgagttagcagcaatgaatataaaaatgactcttaagctcagtgatggagctggagccggagcctgatatgttatacttaaattgattggatgtgttaagtttgtgatttgtatcacaacaggaatgttcaatggaggctcagatgcttgctcacatcatggggagttaaaaaatttccaggccatgcattcatataggtgacatcacagactaatctgaattgctggctgcttttaacagatcctgatagtcgtgcaaggattgaagttagtcatgtgaaaatattgtttaatggattcaaatggtgggaggagataggtagattttataatgtcgtaaattgtatcataatcttgagttgtggtgatagcacccttaatcattgcttgaggacaaatacaattgtctattgtttttcgtattaaattatgttgtatccacctttagtaaaagtaaattcatacaatatagtttaattttgatactcttactc

SEQ ID NO: 18459 - protein, 247 aa, Glycine max
IINPHAFPSRMTIAMLLESVAAKGGSLRGEFVDATPFRSSVKKDSGESDSMSGSIVDDLGLLLREKGFNYHGLEVLYSGVYGTELTCEIFIGPVYYQRLRHMVSDKFQVRSTGTIDQVTRQPIKGRKRGGGIRFGEMERDSLLAHGAAYLLHDRLHTCSDYHIADVCSLCGSMLTTTFTQPQKRPVREIGGLPPGRAPKKVTCHACQTSKGMETVAMPYVFRYLAAELAAMNIKMTLKLSDGAGAGA

SEQ ID NO: 18460 - protein, 237 aa, Glycine max
MTIAMLLESVAAKGGSLRGEFVDATPFRSSVKKDSGESDSMSGSIVDDLGLLLREKGFNYHGLEVLYSGVYGTELTCEIFIGPVYYQRLRHMVSDKFQVRSTGTIDQVTRQPIKGRKRGGGIRFGEMERDSLLAHGAAYLLHDRLHTCSDYHIADVCSLCGSMLTTTFTQPQKRPVREIGGLPPGRAPKKVTCHACQTSKGMETVAMPYVFRYLAAELAAMNIKMTLKLSDGAGAGA

SEQ ID NO: 18461 - protein, 233 aa, Glycine max
MLLESVAAKGGSLRGEFVDATPFRSSVKKDSGESDSMSGSIVDDLGLLLREKGFNYHGLEVLYSGVYGTELTCEIFIGPVYYQRLRHMVSDKFQVRSTGTIDQVTRQPIKGRKRGGGIRFGEMERDSLLAHGAAYLLHDRLHTCSDYHIADVCSLCGSMLTTTFTQPQKRPVREIGGLPPGRAPKKVTCHACQTSKGMETVAMPYVFRYLAAELAAMNIKMTLKLSDGAGAGA

SEQ ID NO: 18462 - DNA, 1172 bp, Glycine max
ttttttccacaaccttgaatgtttaccgccccgccggataaggagaaggagaaggaggatctgcgtcgcaggcactgttcatcgccatgtctcgggttgataacagaaattcctcagccaccaagcgtgctaggactgatggtagtcgtagggaagatgattggacatgccccagctgtggcaatgtcaatttctctttcaggacaacttgtaacatgcgtaattgcactcaaccaaggccggctgatcataattcgaaatctgctgccaagcctctacaagctccgcagggttattcatcctcagctccttatttaggttctaataccccctcttcaatatatcttggtgttccaccatatggatcttctctgttcaatggatcatctgttcctccctatgatgttccattttctggaggatcagcatatcactacaattatggtagtcgcctttctgctggcagtccttatagaccattgcatttatctggaccaacaccctacacaggtggaccagtgattggaaatggtgggatatatggaatgccccaactgttggatcggtatggcctgggcatccctatcggacctgggacaatgggtgctaggcctggattttttcacgatgacaagtcacagaaaaaagatgcaactcgtgacaatgactggacatgtccaaaatgtggcaatgtcaatttttcattcagaactgtctgcaacatgagaaagtgcaacacacccaaacctggatcacaggcctcaaagtcggacaaaaattctaagcaaaagatgcctgagggaagctggaagtgcgaaaagtgtaacaacataaactatcctttcagaaccaagtgcaacagacagaattgtggtgctgacaagccggctgagtctgaagaatctccttcatcagctgcagatcaaaatgatcagtgagtactaggacatgtttgagggttgagaaggtccagagttgtcatcaagcattgctcagtctgggtgtctgacagtcagtcttgtcgtcttctatgttgcagcagttgtcaagtcactcaccttctcaatatgtgtcaagttgttgtattaactgagatggtattttggtctttgtggattgttatgacgcatgtgtcagccaactttcctggtataaaggttattgcatgttcc

SEQ ID NO: 18463 - protein, 283 aa, Glycine max
MSRVDNRNSSATKRARTDGSRREDDWTCPSCGNVNFSFRTTCNMRNCTQPRPADHNSKSAAKPLQAPQGYSSSAPYLGSNTPSSIYLGVPPYGSSLFNGSSVPPYDVPFSGGSAYHYNYGSRLSAGSPYRPLHLSGPTPYTGGPVIGNGGIYGMPQLLDRYGLGIPIGPGTMGARPGFFHDDKSQKKDATRDNDWTCPKCGNVNFSFRTVCNMRKCNTPKPGSQASKSDKNSKQKMPEGSWKCEKCNNINYPFRTKCNRQNCGADKPAESEESPSSAADQNDQ

SEQ ID NO: 18464 - protein, 240 aa, Glycine max
MRNCTQPRPADHNSKSAAKPLQAPQGYSSSAPYLGSNTPSSIYLGVPPYGSSLFNGSSVPPYDVPFSGGSAYHYNYGSRLSAGSPYRPLHLSGPTPYTGGPVIGNGGIYGMPQLLDRYGLGIPIGPGTMGARPGFFHDDKSQKKDATRDNDWTCPKCGNVNFSFRTVCNMRKCNTPKPGSQASKSDKNSKQKMPEGSWKCEKCNNINYPFRTKCNRQNCGADKPAESEESPSSAADQNDQ

SEQ ID NO: 18465 - DNA, 1251 bp, Glycine max
aatttatccgttagagaaaatattcatcgtggcagccaaatggattacagctagaggctgcagctaacttgataaaaacgcttgatcttgctccacatgggcaacatggtgttttgctacctgactttacttcaaatccagtgttagagtttcaaccttttcagtgcttttattgtcatcttgagctgaaattaaaggatccagatgcggcagtacctcctgttgataacacactcaagaaaattacagagcctgatcatgctgacttgcttttgcgaaagaaatctgcaatagactcattttgtagctcttttgagctaaaaggaaatcccttgaaaaagtcaaggtgcttatttggatgaaagagatatttttcaaatgatcaagaggttatgggagctcaaccagccaatctcattgagaaaatcggggatctgactcctgtccaagattttgaagccttgttttcacgcagggatagtccagattgggtagaaaaagcaattaatgaaacgaaaaagaaaatatttgatctggtggggtactcccacgaaggcgataactatcctaaagcactggaatgtttagttgtgcttcgcaagggttgcatccttgagcaggcaaccatctcccatattccggcacataaaagatacttaggattttccttgttcaacctttaatttatttgctatcactctttgaatttctttgttttatcggccttggctttttaacttgttatattaacaattctttttgtctgtgaaggaaccaaaacagttcaatgatttccttaaacatctatgtaatttctgtcaagagaaaattcttcatagtttctgtaaatattttgcttctaaggaacttaccttgatctccaaaacagaagctgttgacatgttttttgaagttactgatgacgaagccacaagtttcttgatgacgaagctgttgattgattccttcactacatgtgctgaaatatctgagagcttcattttttttgactcagtaatgagtatgaacaactgttttggaaaaaaaatatattgtaactcattgtaaatattatttgtactcaccttagattctggcacttgatttcatttgtgagaaatcagaatttgcaagcttgaattcatcaagcatacacgtttaacacacgaaacttttgcactctagtttgggatatgatgtcaaaaccatactgtagaaatataaggcagttatataaatctcttaaatctc

SEQ ID NO: 18466 - protein, 96 aa, Glycine max
MGAQPANLIEKIGDLTPVQDFEALFSRRDSPDWVEKAINETKKKIFDLVGYSHEGDNYPKALECLVVLRKGCILEQATISHIPAHKRYLGFSLFNL

SEQ ID NO: 18467 - protein, 55 aa, Glycine max
MFFEVTDDEATSFLMTKLLIDSFTTCAEISESFIFFDSVMSMNNCFGKKIYCNSL

SEQ ID NO: 18468 - DNA, 1591 bp, Glycine max
aaaaaagacataacattccctcccctgtctccaatattgattagccttagccacaaaacaatgttttccccaagagacatgccttctccatcctcaatcttttctgcctacgcctccatgacagcctccatcatgctcctacgttccatggccaacgacctcgttccccaaccaatccgtggctacctttacagcacgttccgttacctcataaagcctcgctccccaaccctcaccctcatcatcgaagagtccaccggcatagcccgtaaccaagtctacgacgctgcagaagcgtacctctccacccgtgtcagccccgaaaacgagaggctcaaaatcagcaagagcgcaaaggagaagaaattaaccgttcggttggagaagggcgagaaggtagtcgactgcttcgacggcgcgtgcttcaagtggagattcatctgcgcggaatccgagaagaacaaccccaacgaccacagcaacaataacagcatctccgtacggtccgaaaagcggtcttttgagctgagcttcccgaagaagtacaaggaaatggttctggactcttacctgcccttcattctcgaaaaggccaaggagatgaaagacgaggaaagggttctgaagatgcacactctcaacacctcgtattgttacagtggggtcaaatgggactctataaatctcgagcatccttcaacttttgagacgctggcgatggagccggagttgaagaatgcggtgattgaggacttggataggttcgtgaagaggaaggagttttataagagggttgggagggcgtggaaacgtggctacttgctctatggccctcctggtactggcaagtctagcttgatagctgctatggccaattacttgaagtttgacatctttgacctccaacttgggaacatagtaagggattctgacctcaggaaactgcttctggcgactgctaatagatccattttggtcattgaagacattgattgcagtgtggatctgccagagcgtcgccatggtgatcatggacgtaaacaaactgacgtacagttgaccttgtctggattactgaacttcatagacgggttatggtctagttgtggagacgagagaatcatcatattcaccaccaaccacaaggagaggctagacccagcactgttgaggccaggaagaatggacatgcacattcacatgtcctattgctcctaccaaggcttcaagattttggcctcaaactacttagaaactccctctgatcaccccctctttggtgaggtagaggggctaatagaggacatacaaataacccctgcgcaagtggcagaggagctgatgaagaacgaagaccctgaggccacacttgaaggattcgtgaagctacttaagaggaagaagatggaaggtgatgtgtgtgagaactctactcctgataaagcagaacctactcatcagcaatctaagaggcgcaaggttggttgcaagcaaaaacgaggtgttggaattaacaagagcattagtggtgtcactcaaataaggacaagaagaatgagagggtgtagtttgtaatcacctggtctcagaa

SEQ ID NO: 18469 - protein, 524 aa, Glycine max
KKDITFPPLSPILISLSHKTMFSPRDMPSPSSIFSAYASMTASIMLLRSMANDLVPQPIRGYLYSTFRYLIKPRSPTLTLIIEESTGIARNQVYDAAEAYLSTRVSPENERLKISKSAKEKKLTVRLEKGEKVVDCFDGACFKWRFICAESEKNNPNDHSNNNSISVRSEKRSFELSFPKKYKEMVLDSYLPFILEKAKEMKDEERVLKMHTLNTSYCYSGVKWDSINLEHPSTFETLAMEPELKNAVIEDLDRFVKRKEFYKRVGRAWKRGYLLYGPPGTGKSSLIAAMANYLKFDIFDLQLGNIVRDSDLRKLLLATANRSILVIEDIDCSVDLPERRHGDHGRKQTDVQLTLSGLLNFIDGLWSSCGDERIIIFTTNHKERLDPALLRPGRMDMHIHMSYCSYQGFKILASNYLETPSDHPLFGEVEGLIEDIQITPAQVAEELMKNEDPEATLEGFVKLLKRKKMEGDVCENSTPDKAEPTHQQSKRRKVGCKQKRGVGINKSISGVTQIRTRRMRGCSL

SEQ ID NO: 18470 - protein, 504 aa, Glycine max
MFSPRDMPSPSSIFSAYASMTASIMLLRSMANDLVPQPIRGYLYSTFRYLIKPRSPTLTLIIEESTGIARNQVYDAAEAYLSTRVSPENERLKISKSAKEKKLTVRLEKGEKVVDCFDGACFKWRFICAESEKNNPNDHSNNNSISVRSEKRSFELSFPKKYKEMVLDSYLPFILEKAKEMKDEERVLKMHTLNTSYCYSGVKWDSINLEHPSTFETLAMEPELKNAVIEDLDRFVKRKEFYKRVGRAWKRGYLLYGPPGTGKSSLIAAMANYLKFDIFDLQLGNIVRDSDLRKLLLATANRSILVIEDIDCSVDLPERRHGDHGRKQTDVQLTLSGLLNFIDGLWSSCGDERIIIFTTNHKERLDPALLRPGRMDMHIHMSYCSYQGFKILASNYLETPSDHPLFGEVEGLIEDIQITPAQVAEELMKNEDPEATLEGFVKLLKRKKMEGDVCENSTPDKAEPTHQQSKRRKVGCKQKRGVGINKSISGVTQIRTRRMRGCSL

SEQ ID NO: 18471 - protein, 498 aa, Glycine max
MPSPSSIFSAYASMTASIMLLRSMANDLVPQPIRGYLYSTFRYLIKPRSPTLTLIIEESTGIARNQVYDAAEAYLSTRVSPENERLKISKSAKEKKLTVRLEKGEKVVDCFDGACFKWRFICAESEKNNPNDHSNNNSISVRSEKRSFELSFPKKYKEMVLDSYLPFILEKAKEMKDEERVLKMHTLNTSYCYSGVKWDSINLEHPSTFETLAMEPELKNAVIEDLDRFVKRKEFYKRVGRAWKRGYLLYGPPGTGKSSLIAAMANYLKFDIFDLQLGNIVRDSDLRKLLLATANRSILVIEDIDCSVDLPERRHGDHGRKQTDVQLTLSGLLNFIDGLWSSCGDERIIIFTTNHKERLDPALLRPGRMDMHIHMSYCSYQGFKILASNYLETPSDHPLFGEVEGLIEDIQITPAQVAEELMKNEDPEATLEGFVKLLKRKKMEGDVCENSTPDKAEPTHQQSKRRKVGCKQKRGVGINKSISGVTQIRTRRMRGCSL

SEQ ID NO: 18472 - DNA, 1754 bp, Glycine max
taaagaatttggaatcaagattagtgagaaacttgctcaagttgaagctcgcatccttcctgctccatggctcaaatatcacgatacgggcagagaaaaggattgtcttcctcaagttgggcaatggaatatgatgaataagaaaatggttaatggggggacagttaacaactggttctgcataaacttttcaaggaatgttcaagatagtgttgcccgtggtttttgctatgaacttgctcagatgtgttatatatctggaatggcatttacacctgagccagtagtccccccagtcagtgctcgccctgatcaagtggaaaaggttcttaaaactcggtatcatgatgccaagaacaaactgcaaggaagagagcttgatttgctcatcgttatcttgcccgataataatggatctctttatggtgatctcaaacggatatgtgagactgacctaggacttgtttcacaatgttgcttaactaagcatgtcttcaaaatgagcaagcagtaccttgcaaatgttgctttgaaaattaatgtcaaagttggagggagaaacactgtactggttgatgcgctctcacgacgcattcccttggtcagtgacagacctacaattatttttggagctgatgtgactcatccacatcctggagaggattcaagcccatcaattgcagcagttgtggcttcgcaagactatcctgaaattacaaagtatgctggtttagtttgtgcccaagttcataggcaggaactcattcaggatcttttcaaacaatggcaagatccagtcagaggaacagtgactggtggaatgatcaaggaacttcttatatcttttaggagagctacaggacaaaagccacaacgcatcatattttatagggatggtgtgagtgagggacagttttatcaggttctactgtttgagcttgatgctattcgaaaggcatgtgcatccctggaacccaattatcagcctcctgtgacttttgtggtggttcaaaagcgtcaccacacaaggctctttgctagcaaccatcatgataagagttctgttgacaagagtggcaacatattgcctggcactgttgttgactccaaaatctgccatcccaccgaatttgacttttatctctgcagccatgctggaatacagggtacaagccgtcctgctcactaccatgtgttgtgggatgaaaacaattttactgctgatgccttgcaaacactcaccaacaatctttgctacacatatgctcggtgcacccggtctgtttcaatcgtgcctcctgcatactatgctcaccttgctgcattccgcgcaaggttttacatggaaccagagacgtcggatagtggctctatgacaagtggtgctgttgcaggccgtgggatgggcggtgtagggcgtagcacgcgtgtacctggtgccaatgctgctgtgagaccattgcctgcactcaaggagaacgtcaagagagttatgttttattgttaagacatgaatgccaaagattactgttaaaaccttgtttagtgagtgcttttttgctttcaaagtttctccagcagtggtcattaggtattgagttttttgaaactatttcaggagtgtggtgtgttgaataaggtgtgttgttttgaaagtatctcctgtgaggagtgctttttatctttgctgctgtgaggatatgaagtttgatgcaaattatgtttattgtcgaaagtactttgttgttgccgtg

SEQ ID NO: 18473 - protein, 501 aa, Glycine max
KEFGIKISEKLAQVEARILPAPWLKYHDTGREKDCLPQVGQWNMMNKKMVNGGTVNNWFCINFSRNVQDSVARGFCYELAQMCYISGMAFTPEPVVPPVSARPDQVEKVLKTRYHDAKNKLQGRELDLLIVILPDNNGSLYGDLKRICETDLGLVSQCCLTKHVFKMSKQYLANVALKINVKVGGRNTVLVDALSRRIPLVSDRPTIIFGADVTHPHPGEDSSPSIAAVVASQDYPEITKYAGLVCAQVHRQELIQDLFKQWQDPVRGTVTGGMIKELLISFRRATGQKPQRIIFYRDGVSEGQFYQVLLFELDAIRKACASLEPNYQPPVTFVVVQKRHHTRLFASNHHDKSSVDKSGNILPGTVVDSKICHPTEFDFYLCSHAGIQGTSRPAHYHVLWDENNFTADALQTLTNNLCYTYARCTRSVSIVPPAYYAHLAAFRARFYMEPETSDSGSMTSGAVAGRGMGGVGRSTRVPGANAAVRPLPALKENVKRVMFYC

SEQ ID NO: 18474 - protein, 458 aa, Glycine max
MMNKKMVNGGTVNNWFCINFSRNVQDSVARGFCYELAQMCYISGMAFTPEPVVPPVSARPDQVEKVLKTRYHDAKNKLQGRELDLLIVILPDNNGSLYGDLKRICETDLGLVSQCCLTKHVFKMSKQYLANVALKINVKVGGRNTVLVDALSRRIPLVSDRPTIIFGADVTHPHPGEDSSPSIAAVVASQDYPEITKYAGLVCAQVHRQELIQDLFKQWQDPVRGTVTGGMIKELLISFRRATGQKPQRIIFYRDGVSEGQFYQVLLFELDAIRKACASLEPNYQPPVTFVVVQKRHHTRLFASNHHDKSSVDKSGNILPGTVVDSKICHPTEFDFYLCSHAGIQGTSRPAHYHVLWDENNFTADALQTLTNNLCYTYARCTRSVSIVPPAYYAHLAAFRARFYMEPETSDSGSMTSGAVAGRGMGGVGRSTRVPGANAAVRPLPALKENVKRVMFYC

SEQ ID NO: 18475 - protein, 457 aa, Glycine max
MNKKMVNGGTVNNWFCINFSRNVQDSVARGFCYELAQMCYISGMAFTPEPVVPPVSARPDQVEKVLKTRYHDAKNKLQGRELDLLIVILPDNNGSLYGDLKRICETDLGLVSQCCLTKHVFKMSKQYLANVALKINVKVGGRNTVLVDALSRRIPLVSDRPTIIFGADVTHPHPGEDSSPSIAAVVASQDYPEITKYAGLVCAQVHRQELIQDLFKQWQDPVRGTVTGGMIKELLISFRRATGQKPQRIIFYRDGVSEGQFYQVLLFELDAIRKACASLEPNYQPPVTFVVVQKRHHTRLFASNHHDKSSVDKSGNILPGTVVDSKICHPTEFDFYLCSHAGIQGTSRPAHYHVLWDENNFTADALQTLTNNLCYTYARCTRSVSIVPPAYYAHLAAFRARFYMEPETSDSGSMTSGAVAGRGMGGVGRSTRVPGANAAVRPLPALKENVKRVMFYC

SEQ ID NO: 18476 - DNA, 1167 bp, Glycine max
aacattccaacgacacccaccacttcttcccatcagatgtgcgacgatcactgggtcaaggtcgccatggccgacgactccctggtcgtcgaccttctcctccgcctccaccgctctccgcctccgccgccctgcctcaacctccactggacggtgcgtcagcgccgctccagatccgctcacaacaaagcggagtccaccagggccagccccaccacgccgctctcatggagcggcgccacgtcagcaagcggcggcaacctcgatggctacgaggagtccaaaccatcccagacctcaagatctaaggttgctaatcccagcgaaacagccactaccagaaagacaaggagaaaaaagaccttaactgaactaaaagaggaggaggatttgttgctgaaagaaagaagaaatttggaaaaagaactggcatccttgcgtctcactattcagaaacatagagccacaaatgaaagcataaagagattgaagcttgattttgagtcacggcagaattctagtgctgctgctacggcctctgaggtgtctgggaaagctgtgaatggcccatttcaatttgtaaaatcagagtgtcatccatctaattccgtcacacatgacgattcacctgtttgtgcagcaaatgcttctcccaaagcacaagataatattggtaaccgagaatctacattcgtgctccctgatctaaatttgcctgccgatgaggatatcaacgccaatgtcatgcattgaactgaattagctaataaaggataggatctcgaatgacattccgcatactgataagttggacaaacgtcatcttgcaagtatgcctaaaagtaatagtataaggtatagcatgtcagtcctaacaaattagattttgctactgtaattgtagatgttaaaccattcacttttcccacttggtcaaaaactgatgtggaaattgttttttcttcttcttttttttcattcgtgaatctgagggtagtgtagaaatcctaacacatcaggcttagttccattcttttttcttcacatgtttctacattgtccaaaattctttgtggcaaccctcgatcgtcctttattatagatatattttatgataaatgtaattacgtgttctatacataattcaagaattttggttcttttaag

SEQ ID NO: 18477 - protein, 250 aa, Glycine max
NIPTTPTTSSHQMCDDHWVKVAMADDSLVVDLLLRLHRSPPPPPCLNLHWTVRQRRSRSAHNKAESTRASPTTPLSWSGATSASGGNLDGYEESKPSQTSRSKVANPSETATTRKTRRKKTLTELKEEEDLLLKERRNLEKELASLRLTIQKHRATNESIKRLKLDFESRQNSSAAATASEVSGKAVNGPFQFVKSECHPSNSVTHDDSPVCAANASPKAQDNIGNRESTFVLPDLNLPADEDINANVMH

SEQ ID NO: 18478 - protein, 238 aa, Glycine max
MCDDHWVKVAMADDSLVVDLLLRLHRSPPPPPCLNLHWTVRQRRSRSAHNKAESTRASPTTPLSWSGATSASGGNLDGYEESKPSQTSRSKVANPSETATTRKTRRKKTLTELKEEEDLLLKERRNLEKELASLRLTIQKHRATNESIKRLKLDFESRQNSSAAATASEVSGKAVNGPFQFVKSECHPSNSVTHDDSPVCAANASPKAQDNIGNRESTFVLPDLNLPADEDINANVMH

SEQ ID NO: 18479 - protein, 228 aa, Glycine max
MADDSLVVDLLLRLHRSPPPPPCLNLHWTVRQRRSRSAHNKAESTRASPTTPLSWSGATSASGGNLDGYEESKPSQTSRSKVANPSETATTRKTRRKKTLTELKEEEDLLLKERRNLEKELASLRLTIQKHRATNESIKRLKLDFESRQNSSAAATASEVSGKAVNGPFQFVKSECHPSNSVTHDDSPVCAANASPKAQDNIGNRESTFVLPDLNLPADEDINANVMH

SEQ ID NO: 18480 - DNA, 1142 bp, Glycine max
aaaaactgaagctcgagacaccattggagcaatcacgtttattgaatgacattccaaaagtaattcctgaaatagttgataacactctgtccctgaaggcttccccaacgaaagataagcttgagcaaaatggcttgtcagaattagccagtggaaagacttgtaactctgctggacgccattccaaacacagtggttttgttcactgtctaaataatagaacagatgttgcaggtccaaaatttgcagtaaaggaaaaccaagatgatacagcctttcctgttgcctctgttgagaatttgtttgccgatacgtcttcccaggataaaggcacttctcaaagaaatctgcctcagtctgcctcaaaagcaaggcaagatggtcccgaggctacacattttgaagaattaatcaatccagcaaagcaagatgatcctgaggctacactctttgaagaattaagcaatcctgcaaaatatggcttgtgtcaaccaaggaacactgaatctggttctgttatcataaatggcagaaatctgagtggtactggatatgctgaacaaataataaaggaaaagcaaagcattcctgttgtgagtgtcaatgacaaacaggatatgggtatctcagctattccagttgaagaacaggaaattagcatttcaacgacaaatgtcattgtgttaagtgacgatgatgaacaagaggccaatgctgcagataattcaatgggaagaaaggtggtggagagtcctgaaaattctatttggtattgtgtaggtccttatggtaaaaaaggaggacccttctcaatgtctgcactcaaacgttggagtgatagtgcctcacatcccttagaattcaaggtctggaagacaggtcagagtgaaacggaggcaatacctctcactgttgcgcttaaccgaattttctcaagtatgtaggtaaatgggaatgaagggggaaatcacttccttaatttaagtacataaacagtgttaatatagaatcaagtacttagagttttatgccttccaaaaaaaaaaagtgctccagagttttaaccaaatacaatagttgcttgtgtggaatgctgccaagttaaaagtacttaatatatgattttgttttcttttggttgt

SEQ ID NO: 18481 - protein, 313 aa, Glycine max
KLKLETPLEQSRLLNDIPKVIPEIVDNTLSLKASPTKDKLEQNGLSELASGKTCNSAGRHSKHSGFVHCLNNRTDVAGPKFAVKENQDDTAFPVASVENLFADTSSQDKGTSQRNLPQSASKARQDGPEATHFEELINPAKQDDPEATLFEELSNPAKYGLCQPRNTESGSVIINGRNLSGTGYAEQIIKEKQSIPVVSVNDKQDMGISAIPVEEQEISISTTNVIVLSDDDEQEANAADNSMGRKVVESPENSIWYCVGPYGKKGGPFSMSALKRWSDSASHPLEFKVWKTGQSETEAIPLTVALNRIFSSM

SEQ ID NO: 18482 - DNA, 1280 bp, Glycine max
tagttaaaaacttaaaatccatgtgcttgctcgagcaggaggtggtgaatttctgcaaatcgtactttgtggtgaacaaggaagcattccgtgacacaagacttgaggtcgtgatcaacgatgccagggttgaactagaagccagagatgagagctatgatgtgataattggcgacttggcagacccaattgatggaggtccttgctataaactttacaccaagtccttctatgagttgattgtcaagcctagactgaagcaaggtggcatatttgtaacacaggcaggaccagctggaatatttagtcacacagaagtcttctcatgtatctacaacaccttaagacaagttttcaagtgtaagtgtcttccgagggaaaagaaaagattattttttcctattaagtttttcctggttcaatataaagttcttttgacatcaattgcatcaaattccccttcttttcttttgtttgcagatgttgtgccttattcagctcacatcccatcctatgctgatatttggggatgggttatggtaaatattactgataattaatttcaagttcttgtttagtattatgtgttatgtatgttaagatatatgtgataagaaaagggggcacaaaaaaaagttgttcgaccactgaaaatatctttataagaaatgtaccttgagacaaatttagcatacaaaaccatagaaaattaaggtgtcatgcatggacattattgctaagactttttttggtctttggaatgtaacaggcttcagattctccattagacctgagtgcagaagagctagacctcagaatgagacataggattaagggggagaatggatatcttgatgggaaaacattcacatcagcctcaactttgagcaaaactgttcgcaactcgtaagtggaacttagttctattttatatcctcttgcaattgcatttattcgcctgtgatattctgttcttgacacacatttgacactattgacaggctggacaatgaaactcatgtatacacagaggaaagtgctaggttcatatatggccatggcaagcatgcataaccaagcttgagaagtaaaaccaaatagtaacgccaaaagagacacacaatgcaagtgaaaaaggctttccaagactttattttatttcatcttttatgcatttccctttgtttgttttttttttctttcttttggtgtgtagttcacctgaaaaggcttacatgatatatgaatgggctacaagcgggtcctatcttgtgcttctc

SEQ ID NO: 18483 - protein, 185 aa, Glycine max
VKNLKSMCLLEQEVVNFCKSYFVVNKEAFRDTRLEVVINDARVELEARDESYDVIIGDLADPIDGGPCYKLYTKSFYELIVKPRLKQGGIFVTQAGPAGIFSHTEVFSCIYNTLRQVFKCKCLPREKKRLFFPIKFFLVQYKVLLTSIASNSPSFLLFADVVPYSAHIPSYADIWGWVMVNITDN

SEQ ID NO: 18484 - protein, 179 aa, Glycine max
MCLLEQEVVNFCKSYFVVNKEAFRDTRLEVVINDARVELEARDESYDVIIGDLADPIDGGPCYKLYTKSFYELIVKPRLKQGGIFVTQAGPAGIFSHTEVFSCIYNTLRQVFKCKCLPREKKRLFFPIKFFLVQYKVLLTSIASNSPSFLLFADVVPYSAHIPSYADIWGWVMVNITDN

SEQ ID NO: 18485 - DNA, 1382 bp, Glycine max
tctataggaagtccaggtcctgattattcttttccatctctcactacatgtgatgaacttgagacaaaggcttcaactactttagttaaatgcaaatttggatcagttgaggctgcagcaaaggtgcgtactttggaagagcaggggagttcggcagacaaaattaaaaacttcgaatataattgtttgggagaaattagaattcttggtgctttaaaacacccttgcatagtggaaatgtacggacaccaaatttcatgtcaatggtctgtctcagctgatggtaatcctgaacaccgtgtattaagatctgcaatttttatggagtatgtggaagggggctccttaaaaaattatctggagaagctgtcagaagctggtgaaaagcatgttcctgtggagttggctttgcatatcgccaaagatgtctcatgtgctttgtcagagctgcactcaaagcacataattcatcgtgacataaaaagtgaaaacatactgtttaatttggataggaagagagatgatggaactcccactgtgaagctctgtgattttgatagtgcagtgccactaagatcaactttacatgtgtgttgtattgctcatgcgggaacacctcctccctgtatatgtgttggaacacctcggtggatggctccagaggttatgcggactatgtataaaaaaaactcctatggattggaagctgacatttggtcgtttggatgcttgcttttggagatgctgactctgcaaattccatattctggactttcagattcacacttccttgatagtctgcagatgggtaaacgaccacaattgactgatgagctgagagtattgagttcaatgaatggacccacaatgattccatctggtgaagagctggaaaaatcagatgctggggtagacatgctgaaattccttgttgatttgtttcataagtgcgtggaagaaaatccaagcaaacgtcctacagctgaagaaatccataaaatggtgcttgcacacacagatcgcttacaaatctaagattttaggaagatttagttaggttattgggtcgcccggtcctactgtcctagcgaaatatattcattctttttcttcatgaagtgtgttagggctaatccaagaataattgtttgtacttggtccaagtcttcagtgagttgtattattttcaaggggttagatccatgcggctctaatatataagtctgattgagatctttatagtgtagctagatctctttcgattgttaacgtttagacgaacatgagttcaaccattctgcaagtgtatctcattaatttattgatgccattgaattgaatcctcttattaatttattgatgcctttgaattgaatcctctt

SEQ ID NO: 18486 - protein, 344 aa, Glycine max
SIGSPGPDYSFPSLTTCDELETKASTTLVKCKFGSVEAAAKVRTLEEQGSSADKIKNFEYNCLGEIRILGALKHPCIVEMYGHQISCQWSVSADGNPEHRVLRSAIFMEYVEGGSLKNYLEKLSEAGEKHVPVELALHIAKDVSCALSELHSKHIIHRDIKSENILFNLDRKRDDGTPTVKLCDFDSAVPLRSTLHVCCIAHAGTPPPCICVGTPRWMAPEVMRTMYKKNSYGLEADIWSFGCLLLEMLTLQIPYSGLSDSHFLDSLQMGKRPQLTDELRVLSSMNGPTMIPSGEELEKSDAGVDMLKFLVDLFHKCVEENPSKRPTAEEIHKMVLAHTDRLQI

SEQ ID NO: 18487 - protein, 265 aa, Glycine max
MYGHQISCQWSVSADGNPEHRVLRSAIFMEYVEGGSLKNYLEKLSEAGEKHVPVELALHIAKDVSCALSELHSKHIIHRDIKSENILFNLDRKRDDGTPTVKLCDFDSAVPLRSTLHVCCIAHAGTPPPCICVGTPRWMAPEVMRTMYKKNSYGLEADIWSFGCLLLEMLTLQIPYSGLSDSHFLDSLQMGKRPQLTDELRVLSSMNGPTMIPSGEELEKSDAGVDMLKFLVDLFHKCVEENPSKRPTAEEIHKMVLAHTDRLQI

SEQ ID NO: 18488 - protein, 237 aa, Glycine max
MEYVEGGSLKNYLEKLSEAGEKHVPVELALHIAKDVSCALSELHSKHIIHRDIKSENILFNLDRKRDDGTPTVKLCDFDSAVPLRSTLHVCCIAHAGTPPPCICVGTPRWMAPEVMRTMYKKNSYGLEADIWSFGCLLLEMLTLQIPYSGLSDSHFLDSLQMGKRPQLTDELRVLSSMNGPTMIPSGEELEKSDAGVDMLKFLVDLFHKCVEENPSKRPTAEEIHKMVLAHTDRLQI

SEQ ID NO: 18489 - DNA, 1359 bp, Glycine max
gtgctgctgagcttaagtatggaactttgatgtcccttcagcgccaattagaagaagctgaaaagaacctaagtgacttccgaaactctggacaatctttactccgagaagaggtcactgaccttgatattacagagattgttagcaaatggaccggtataccattatcaaacctccaacaaacagagagagaaaagttagtcttgctggaacaggttcttcacaagagggtggttggtcaggatactgctgtaaaatctgtcgctgatgcaattcgccgttcaagggctggattgtctgatccaaatcggccaattgcaagcttcatgttcatgggtccgactggtgttggcaaaactgagcttgccaaggctttggctggttacttgtttaacactgaaaatgctcttgttagaattgatatgagtgagtacatggagaaacatgctgtttcacgtctagttggagcccctcctggttatgttggttatgaagaaggcggtcagctaactgaagtggtcaggagaagaccctactctgtggtactatttgatgaaatagagaaggcacatcacgatgtcttcaacatcttgttacagttgttggatgacggaaggattactgactctcaaggaaggactgttagcttcacaaattgtgttgtgattatgacttcaaacattggttctcattacatacttgacactcttcgtagtacacaagatgataaaactgcagtctatgatcagatgaaaagacaagttgttgagttggctaggcaaactttccatccagagttcatgaatcgcattgatgaatatattgttttccagcctctggattccgaacagatcagcaaaatagtggagctccagatggagcgagtgaaaaacaggctcaagcagaagaaaattgatcttcattacacagaaaaagctgttaaacttcttggtgtactgggttttgatccaaattttggagctagaccagttaaaagagtgatacagcaattggttgaaaatgaaattgctatgggagttctaaggggagatttcaaagaagaggactcaatcattgttgatgctgatgtgactctatcaggcaaagaacgttctcctctaaataaactgcttattaagaagttggacagccctgatgcggatgccatggtcgtcaatgattaattttgcctactagcttcagttagataaaagcagagttttaaaaaaaaaatggtaaaactccatagggtacgaacgtagtgcttttttttttgtgtgtaactattgtcttgaggatattgtgtttaaaaataattgttgattcaggttttattcgagactcgggtacttttttttt

SEQ ID NO: 18490 - protein, 393 aa, Glycine max
AAELKYGTLMSLQRQLEEAEKNLSDFRNSGQSLLREEVTDLDITEIVSKWTGIPLSNLQQTEREKLVLLEQVLHKRVVGQDTAVKSVADAIRRSRAGLSDPNRPIASFMFMGPTGVGKTELAKALAGYLFNTENALVRIDMSEYMEKHAVSRLVGAPPGYVGYEEGGQLTEVVRRRPYSVVLFDEIEKAHHDVFNILLQLLDDGRITDSQGRTVSFTNCVVIMTSNIGSHYILDTLRSTQDDKTAVYDQMKRQVVELARQTFHPEFMNRIDEYIVFQPLDSEQISKIVELQMERVKNRLKQKKIDLHYTEKAVKLLGVLGFDPNFGARPVKRVIQQLVENEIAMGVLRGDFKEEDSIIVDADVTLSGKERSPLNKLLIKKLDSPDADAMVVND

SEQ ID NO: 18491 - protein, 384 aa, Glycine max
MSLQRQLEEAEKNLSDFRNSGQSLLREEVTDLDITEIVSKWTGIPLSNLQQTEREKLVLLEQVLHKRVVGQDTAVKSVADAIRRSRAGLSDPNRPIASFMFMGPTGVGKTELAKALAGYLFNTENALVRIDMSEYMEKHAVSRLVGAPPGYVGYEEGGQLTEVVRRRPYSVVLFDEIEKAHHDVFNILLQLLDDGRITDSQGRTVSFTNCVVIMTSNIGSHYILDTLRSTQDDKTAVYDQMKRQVVELARQTFHPEFMNRIDEYIVFQPLDSEQISKIVELQMERVKNRLKQKKIDLHYTEKAVKLLGVLGFDPNFGARPVKRVIQQLVENEIAMGVLRGDFKEEDSIIVDADVTLSGKERSPLNKLLIKKLDSPDADAMVVND

SEQ ID NO: 18492 - protein, 285 aa, Glycine max
MFMGPTGVGKTELAKALAGYLFNTENALVRIDMSEYMEKHAVSRLVGAPPGYVGYEEGGQLTEVVRRRPYSVVLFDEIEKAHHDVFNILLQLLDDGRITDSQGRTVSFTNCVVIMTSNIGSHYILDTLRSTQDDKTAVYDQMKRQVVELARQTFHPEFMNRIDEYIVFQPLDSEQISKIVELQMERVKNRLKQKKIDLHYTEKAVKLLGVLGFDPNFGARPVKRVIQQLVENEIAMGVLRGDFKEEDSIIVDADVTLSGKERSPLNKLLIKKLDSPDADAMVVND

SEQ ID NO: 18493 - DNA, 1407 bp, Glycine max
agtggattttacacagccatacattgagtctgggctagttgttgtggcacctattaggaagatgaaatccagtgcttgggctttcttgaggccattcactccgatgatgtggtttgtcacgggaatgtttttcttggctgttggagttgttgtgtggatattagaacgtcgcttaaacgaagactttagaggcccatcaagaagacagtttgtgaccattatatggtttagcttttcaaccctgttttttgcacatagagaaaaaactgtgagcactctgggtcgcttagtgctaataatatggctttttgtggttttaatactcaactcaagctacattgcaagcctcacctccatcctaaccgtggaacagctctcttcctcggttaagggaatcgaaagcttggcaacaagcaatgaacgcatcggtttcctgagtggctcctttgcagagaattatctgacagaggagctcaacattcacagatccaggcttgttcctctcaactcaccatcagaatatgaaaaggccttgaaggatggtcctgctaatgggggtgtcactgcaataatagatgaacgtgcatacatggagctgttccttgcaaccagatgtgaatacggtattgttgggcaagagttcaccaagatgggttggggctttgcattcccgagagactctcccctagcaattgacatgtccactgccatcctaaaactatcagagaatggtgatctccagagaattcatgacaaatggctcacaagaagtgcatgcagctcagagggtgccaaacaaggcatagaccgacttgagctagaaagcttttggggtctgttcctactgagtggcattgcatgcttcattgctctcctttgctatgttatcagaatggcctatcgttttagcagacaccccaatagtaaccctgagggatgctcatcatactatactcgtcttagatcattctttacctttgtcaatgaaagagaagaagaggaagaaaaaaacatcatgtcaaagagaaaacgaaccgaaaagggatctagcagaagggtggcgcatgaagatggattaataatggatggctcaagtgttagtgtccatattgaaaacgatgccgcccaaggctaactaaaagggcatgtttgagtacacgtacgttgcaacagattttctctcattccgaaagtaacaaaactgcgtctttttcgttttgtgcattggaaagatggaaattacattgataacagctacacaaacataagctaactagtcgtaaatgtaggagtacttgtgttttaacgaaaactagctggatatgtaaacccatgctaagtgccaatggagccaaaaaaaattctgttattgcactatatatattaaattataatttttattctttt

SEQ ID NO: 18494 - protein, 377 aa, Glycine max
VDFTQPYIESGLVVVAPIRKMKSSAWAFLRPFTPMMWFVTGMFFLAVGVVVWILERRLNEDFRGPSRRQFVTIIWFSFSTLFFAHREKTVSTLGRLVLIIWLFVVLILNSSYIASLTSILTVEQLSSSVKGIESLATSNERIGFLSGSFAENYLTEELNIHRSRLVPLNSPSEYEKALKDGPANGGVTAIIDERAYMELFLATRCEYGIVGQEFTKMGWGFAFPRDSPLAIDMSTAILKLSENGDLQRIHDKWLTRSACSSEGAKQGIDRLELESFWGLFLLSGIACFIALLCYVIRMAYRFSRHPNSNPEGCSSYYTRLRSFFTFVNEREEEEEKNIMSKRKRTEKGSSRRVAHEDGLIMDGSSVSVHIENDAAQG

SEQ ID NO: 18495 - protein, 357 aa, Glycine max
MKSSAWAFLRPFTPMMWFVTGMFFLAVGVVVWILERRLNEDFRGPSRRQFVTIIWFSFSTLFFAHREKTVSTLGRLVLIIWLFVVLILNSSYIASLTSILTVEQLSSSVKGIESLATSNERIGFLSGSFAENYLTEELNIHRSRLVPLNSPSEYEKALKDGPANGGVTAIIDERAYMELFLATRCEYGIVGQEFTKMGWGFAFPRDSPLAIDMSTAILKLSENGDLQRIHDKWLTRSACSSEGAKQGIDRLELESFWGLFLLSGIACFIALLCYVIRMAYRFSRHPNSNPEGCSSYYTRLRSFFTFVNEREEEEEKNIMSKRKRTEKGSSRRVAHEDGLIMDGSSVSVHIENDAAQG

SEQ ID NO: 18496 - protein, 343 aa, Glycine max
MMWFVTGMFFLAVGVVVWILERRLNEDFRGPSRRQFVTIIWFSFSTLFFAHREKTVSTLGRLVLIIWLFVVLILNSSYIASLTSILTVEQLSSSVKGIESLATSNERIGFLSGSFAENYLTEELNIHRSRLVPLNSPSEYEKALKDGPANGGVTAIIDERAYMELFLATRCEYGIVGQEFTKMGWGFAFPRDSPLAIDMSTAILKLSENGDLQRIHDKWLTRSACSSEGAKQGIDRLELESFWGLFLLSGIACFIALLCYVIRMAYRFSRHPNSNPEGCSSYYTRLRSFFTFVNEREEEEEKNIMSKRKRTEKGSSRRVAHEDGLIMDGSSVSVHIENDAAQG

SEQ ID NO: 18497 - DNA, 1186 bp, Glycine max
gtagctttaattacttcgggaatatcaacgaaacatcatcgttggtcactttctaccaaaccacaacgctcaaattgttttcttttgctatcactgttaccgaatccctcactttcttcttcatcttcttctcctttgtcacttctcagcaccactcaatctcttcaatttctttcttctactggcaataagcatcagcacactgccacatccagttcccttctgtgtgttcctttcttctactctctccagtccagccaaaacgaagctccttccatcattttcagttttttctgtcaagtgttgttgcttcttctcccaaactcgtccaaacattgctggtaacaagtcccccatgaacttgttgagcagaattgttgggttgggtagcccaagggcagcagaaaacatgaattcaaccactgctcggggaccagatgatgacataccagcaccaggtcaacagtttgcccagtttggtgctggctgcttttggagtgttgagctggccttccagagggcatcaggggtgatcaagacagaagttggttatagccaggggcagttgcataatccaagctatgaggatgtgtgtacggggaccacacaccactcggaggttgtcagggtccaatatgatcccaatgtatgtagctatgagagtttgcttgatgtgttctgggctagacatgatcctaccacactgaatcggcagggaaatgatgtgggaacacaatacaggtctggaatatactattacacacctgaacaagagaaggcagccatagagtctttagaacaacaacagaagaagctgaacaggaagattgttactgagatccttcctgccaagaagttctacagggctgaagaataccatcaacagtaccttgagaaaggagggagatttggttccaagcaatctgcttctaagggatgcaatgatccaattcgatgctatggttagattaatatgactagatgtttaaagcagggagttttcttgataagtatttgttaatataccaataaagtaagtcacaatctacctactctctgtattctatttatagggtgaagatcactatagaatccgaatcagttttagagttatatagtattttatatgtatagttatctaaaaactgattttataacacctttaatcagtgactcttctcgagtt

SEQ ID NO: 18498 - protein, 203 aa, Glycine max
MNLLSRIVGLGSPRAAENMNSTTARGPDDDIPAPGQQFAQFGAGCFWSVELAFQRASGVIKTEVGYSQGQLHNPSYEDVCTGTTHHSEVVRVQYDPNVCSYESLLDVFWARHDPTTLNRQGNDVGTQYRSGIYYYTPEQEKAAIESLEQQQKKLNRKIVTEILPAKKFYRAEEYHQQYLEKGGRFGSKQSASKGCNDPIRCYG

SEQ ID NO: 18499 - protein, 185 aa, Glycine max
MNSTTARGPDDDIPAPGQQFAQFGAGCFWSVELAFQRASGVIKTEVGYSQGQLHNPSYEDVCTGTTHHSEVVRVQYDPNVCSYESLLDVFWARHDPTTLNRQGNDVGTQYRSGIYYYTPEQEKAAIESLEQQQKKLNRKIVTEILPAKKFYRAEEYHQQYLEKGGRFGSKQSASKGCNDPIRCYG

SEQ ID NO: 18500 - protein, 114 aa, Glycine max
VALITSGISTKHHRWSLSTKPQRSNCFLLLSLLPNPSLSSSSSSPLSLLSTTQSLQFLSSTGNKHQHTATSSSLLCVPFFYSLQSSQNEAPSIIFSFFCQVLLLLLPNSSKHCW

SEQ ID NO: 18501 - DNA, 1690 bp, Glycine max
aaatttatgtgactccgggtttgctgcgtaggggaatggttcctccctcagttgcttccttcctcttgtgtccacccagttccccctttcattttccattcaataattcaaacaccagttaatggctacccttctattccaccacaattcgcctcagatattctcttcctccttcttcttctcacagcattaaacgccgtcgttttcatgactccataattcaccggaagcagaacaacaacaagaagcagcagcagcagcgcgagttcacatgggattgggaacaaccgcgagaagcagaagaagaatcgtcatcgaagaaggttctagaacaagaacacacaacaacaccaacaacgccgatgccgatggagctggagcaggagctaggttcaacaacaatccagcgttccttcgacgcgcgctacacccgccacgcgcgcgactcgctcggcgaattgcctgacagcttcaccatcaccgacccctccatccccggccaccccatcgtcttcgccagcccgggcttcctcaagctcacgggctactccctccgcgaagtcctgggccggcccgcagccatcttccagggcccacgaacatcccgaaaatccgtaatcgaaattcgcgaggccgttagagaggagcgaaacgcgcaggtcgttttactcaactaccgcagagacggtacgccgttttggatgctttttcgtgtttcccctgttttcagcagcgacggtggcgccgtcgtgcactttgttgccgtacaggtaccgcttcagaaaaaagaagggtccggagtgagggatttcgggttcgggtgctgtcggaaggaagtgtgcgtggattcgttggcggagattgatcgcgtttgttcattggagcaagtgctcgaacctgatgtcagagctttgtgggatgcagaagtggagagagaagagccgtgtgaggcgagtgatgatgagaagcgaagtgctgttactgccatggacagtatattttctgtgctaacccattacagtgaggccacagggagattggtgtgtagaaagaggtccagcattcctgacgtgggtcttttaagcacatccttgattatttctcttggtagaatcaaacaaagctttgtatttttccatgcagaactaatccgcatttaccagacatgcctattgtttatgctagtgacgccttcttgaaattgacaggttatgcaaaaaatgaagttttgggccacaactgtagatttttaggtggaacagataccgatacctcgactttacatctgataagggaaagcattaaaacagaacaaccatgcacagtacgtattttgaattacaggaaggacaaaagctcattttggaattttcttcatatctcacccgttcgtgatgcttctggcaaggttgcatactttgtgggagttcaaatagaagacaacaataaaaacgatgatagccattgtttgagtcctgagaagagacaacttagtgtggttggtgtagtcaaggttgcagtgaggagtttatcaatgactgcgggatcttctgagtcgtagcaaaaggatcatgtgagtttggaacaaataatatttgcctacttcccagaaatattaatccattcgaaaaaataatcaatctcaattggtgattgttgagatgatagaaaggtaaaagaattaatttgt

SEQ ID NO: 18502 - protein, 278 aa, Glycine max
MPMELEQELGSTTIQRSFDARYTRHARDSLGELPDSFTITDPSIPGHPIVFASPGFLKLTGYSLREVLGRPAAIFQGPRTSRKSVIEIREAVREERNAQVVLLNYRRDGTPFWMLFRVSPVFSSDGGAVVHFVAVQVPLQKKEGSGVRDFGFGCCRKEVCVDSLAEIDRVCSLEQVLEPDVRALWDAEVEREEPCEASDDEKRSAVTAMDSIFSVLTHYSEATGRLVCRKRSSIPDVGLLSTSLIISLGRIKQSFVFFHAELIRIYQTCLLFMLVTPS

SEQ ID NO: 18503 - protein, 276 aa, Glycine max
MELEQELGSTTIQRSFDARYTRHARDSLGELPDSFTITDPSIPGHPIVFASPGFLKLTGYSLREVLGRPAAIFQGPRTSRKSVIEIREAVREERNAQVVLLNYRRDGTPFWMLFRVSPVFSSDGGAVVHFVAVQVPLQKKEGSGVRDFGFGCCRKEVCVDSLAEIDRVCSLEQVLEPDVRALWDAEVEREEPCEASDDEKRSAVTAMDSIFSVLTHYSEATGRLVCRKRSSIPDVGLLSTSLIISLGRIKQSFVFFHAELIRIYQTCLLFMLVTPS

SEQ ID NO: 18504 - protein, 165 aa, Glycine max
MLFRVSPVFSSDGGAVVHFVAVQVPLQKKEGSGVRDFGFGCCRKEVCVDSLAEIDRVCSLEQVLEPDVRALWDAEVEREEPCEASDDEKRSAVTAMDSIFSVLTHYSEATGRLVCRKRSSIPDVGLLSTSLIISLGRIKQSFVFFHAELIRIYQTCLLFMLVTPS

SEQ ID NO: 18505 - DNA, 1600 bp, Glycine max
aaaaagaagaaagaattaaggagttctcagatgtacagtcacagatccaacaaatatgtggagagatagccgggaacttgaaccttaatgatgtttcacctgcagttgatgagtctgatttgtccctgaagaagttggatgaatatcaatccgagctccaagaacttcaaaaggaaaagagcgagaggttgcacaaggttcttgaatttgtgagtacggtgcatgatctatgtgctgtccttggtatagacttcttcactactgtaactgaggttcatccaagtctaaatgactctactggtgttcaatccaagagcattagtaatgacacccttgcaaggctggctaagacagtcttgacgctgaaagaagataaaaaacagaggctgcacaagctccaagaattagcttctcagttaattgatctttggaatctaatggatactcatcccgaggaaaggagactatttgaccatgttacctgtaatatgtcagcttctgttgatgaagtcactgttcctggtgcccttgctctggatctgattgagcaggctgaagtggaagttgagagacttgatcagctgaaagccagcaggatgaaggaaattgctttcaagaagcaagcagagctcgaagagatatttgtctgtgctcatatagaagtagatccagatgctgcccgggagaagattatggccttgattgattcaggaaacattgaaccaactgaattactggctgacatggacaatcagatagcaacagcaaaagaagaagctttaagccgaaaagatatattggacaaggttgagaaatggatgtcagcatgtgaagaagaaagttggcttgaagattataatcgggatgataacaggtataatgcaagcagaggtgcacacttaaacctcaaacgtgcagagaaagctcggatattggtcaacaaaattccagctttggtcgatacattggttgctaaaactcgtgcatgggaagaagatcatggcatgtcatttacatatgatggtgttcctcttcttgccatgttagatgaatatgccatgctcagacatgaacgggaagaggaaaaacggaggatgagggatcagaaaaagcatcacgagcagcgaaacacggaacaagaaaccatctttggttcaagacccagccctgctaggccagttagttccagtaagtcaggaggtcctcgtgctaacggaggagccaatggtactcctaaccgacggctatcgcttaatgctcataaaaatggaaacaggtccacatcaaaagatggaaaaagggataacagactatctgctccggtgaattatgtggccatatcaaaagaagatgctgcttcccatgtttctggtactgaacccatcccggcatcaccctaatgacgagatcttcattttcaaccctataatttcatctttgtagcattgtcaaattactagttactgctttaggaattataatatgggagtgacaagtaattagagaggaactgttctgagctgtgtatgttcaatttgccattttggaggttttctcaatacatatgccctttaatatgaaaatatacacagttaagtcc

SEQ ID NO: 18506 - protein, 465 aa, Glycine max
KEERIKEFSDVQSQIQQICGEIAGNLNLNDVSPAVDESDLSLKKLDEYQSELQELQKEKSERLHKVLEFVSTVHDLCAVLGIDFFTTVTEVHPSLNDSTGVQSKSISNDTLARLAKTVLTLKEDKKQRLHKLQELASQLIDLWNLMDTHPEERRLFDHVTCNMSASVDEVTVPGALALDLIEQAEVEVERLDQLKASRMKEIAFKKQAELEEIFVCAHIEVDPDAAREKIMALIDSGNIEPTELLADMDNQIATAKEEALSRKDILDKVEKWMSACEEESWLEDYNRDDNRYNASRGAHLNLKRAEKARILVNKIPALVDTLVAKTRAWEEDHGMSFTYDGVPLLAMLDEYAMLRHEREEEKRRMRDQKKHHEQRNTEQETIFGSRPSPARPVSSSKSGGPRANGGANGTPNRRLSLNAHKNGNRSTSKDGKRDNRLSAPVNYVAISKEDAASHVSGTEPIPASP

SEQ ID NO: 18507 - protein, 320 aa, Glycine max
MDTHPEERRLFDHVTCNMSASVDEVTVPGALALDLIEQAEVEVERLDQLKASRMKEIAFKKQAELEEIFVCAHIEVDPDAAREKIMALIDSGNIEPTELLADMDNQIATAKEEALSRKDILDKVEKWMSACEEESWLEDYNRDDNRYNASRGAHLNLKRAEKARILVNKIPALVDTLVAKTRAWEEDHGMSFTYDGVPLLAMLDEYAMLRHEREEEKRRMRDQKKHHEQRNTEQETIFGSRPSPARPVSSSKSGGPRANGGANGTPNRRLSLNAHKNGNRSTSKDGKRDNRLSAPVNYVAISKEDAASHVSGTEPIPASP

SEQ ID NO: 18508 - protein, 303 aa, Glycine max
MSASVDEVTVPGALALDLIEQAEVEVERLDQLKASRMKEIAFKKQAELEEIFVCAHIEVDPDAAREKIMALIDSGNIEPTELLADMDNQIATAKEEALSRKDILDKVEKWMSACEEESWLEDYNRDDNRYNASRGAHLNLKRAEKARILVNKIPALVDTLVAKTRAWEEDHGMSFTYDGVPLLAMLDEYAMLRHEREEEKRRMRDQKKHHEQRNTEQETIFGSRPSPARPVSSSKSGGPRANGGANGTPNRRLSLNAHKNGNRSTSKDGKRDNRLSAPVNYVAISKEDAASHVSGTEPIPASP

SEQ ID NO: 18509 - DNA, 1248 bp, Glycine max
accaggtccgcgtggaaattgaatcactttttgatggtgttgatttttctgagccactcacccgagctcgttttgaggagttgaacaatgatttgttccggaagaccatggggccagtgaagaaggctatggaagatgcaggattacagaagagtcagattgatgagattgttcttgttggtggaagcacaaggattccaaaggtacaacagcttttgaaggactactttgatggaaaggagccaaacaagggtgtcaaccctgatgaagcagttgcctatggtgctgcagtgcaaggaagcattttgagtggagagggtggtgaagaaaccaaagacatccttctcctggatgtggctcccctcactctcggaattgaaactgttggtggagtcatgacaaagttgattcccagaaacactgttatcccaaccaagaaatctcaggtgttcaccacctatcaggaccagcagactacagtctccattcaggttttcgaaggcgagaggagtctcacaaaggattgccgccttcttgggaaatttgatctgtctggaattcctccagccccaaggggtacgcctcaaattgaagtgaccttcgaagttgatgccaacggcattctaaatgtgaaggcagaagacaagggcactggtaaatcagaaaagatcaccattacaaacgaaaagggacgtcttagccaggaagaaattgagagaatggttcgcgaagcagaggagtttgcagaggaagacaagaaggtgaaggagaggatcgatgctcgcaacagtcttgaaacctatgtatacaacatgaagaaccagatcagtgacaaggacaagctcgctgacaagttggagtctgatgaaaaggagaaaattgagactgctgtgaaagaagcactggaatggctggatgacaaccagagtatggagaaagaagattatgaagagaagctgaaggaggttgaagccgtttgcaacccaatcatcagtgctgtgtatcagagatctggaggagccccaggcggtggtggtgcatcaggcgaagaagacgaggacgattctcacgatgagctctagattagtcggagtctgttaaatttttatgatagctgggaattaagaagtcccctgcgcttgcttttttggtggcgatgataagatactttgtgaaattacttgtactttacttttttgcttagttttacgacgaaacttcttcagctgtatgaatgagccttgtttc

SEQ ID NO: 18510 - protein, 359 aa, Glycine max
QVRVEIESLFDGVDFSEPLTRARFEELNNDLFRKTMGPVKKAMEDAGLQKSQIDEIVLVGGSTRIPKVQQLLKDYFDGKEPNKGVNPDEAVAYGAAVQGSILSGEGGEETKDILLLDVAPLTLGIETVGGVMTKLIPRNTVIPTKKSQVFTTYQDQQTTVSIQVFEGERSLTKDCRLLGKFDLSGIPPAPRGTPQIEVTFEVDANGILNVKAEDKGTGKSEKITITNEKGRLSQEEIERMVREAEEFAEEDKKVKERIDARNSLETYVYNMKNQISDKDKLADKLESDEKEKIETAVKEALEWLDDNQSMEKEDYEEKLKEVEAVCNPIISAVYQRSGGAPGGGGASGEEDEDDSHDEL

SEQ ID NO: 18511 - protein, 324 aa, Glycine max
MGPVKKAMEDAGLQKSQIDEIVLVGGSTRIPKVQQLLKDYFDGKEPNKGVNPDEAVAYGAAVQGSILSGEGGEETKDILLLDVAPLTLGIETVGGVMTKLIPRNTVIPTKKSQVFTTYQDQQTTVSIQVFEGERSLTKDCRLLGKFDLSGIPPAPRGTPQIEVTFEVDANGILNVKAEDKGTGKSEKITITNEKGRLSQEEIERMVREAEEFAEEDKKVKERIDARNSLETYVYNMKNQISDKDKLADKLESDEKEKIETAVKEALEWLDDNQSMEKEDYEEKLKEVEAVCNPIISAVYQRSGGAPGGGGASGEEDEDDSHDEL

SEQ ID NO: 18512 - protein, 317 aa, Glycine max
MEDAGLQKSQIDEIVLVGGSTRIPKVQQLLKDYFDGKEPNKGVNPDEAVAYGAAVQGSILSGEGGEETKDILLLDVAPLTLGIETVGGVMTKLIPRNTVIPTKKSQVFTTYQDQQTTVSIQVFEGERSLTKDCRLLGKFDLSGIPPAPRGTPQIEVTFEVDANGILNVKAEDKGTGKSEKITITNEKGRLSQEEIERMVREAEEFAEEDKKVKERIDARNSLETYVYNMKNQISDKDKLADKLESDEKEKIETAVKEALEWLDDNQSMEKEDYEEKLKEVEAVCNPIISAVYQRSGGAPGGGGASGEEDEDDSHDEL

SEQ ID NO: 18513 - DNA, 1559 bp, Glycine max
agaaatagagagtaagcctgagatcatggaaaaagttggtgtggctgtaaatagcaaaaatcaagaatccaaagcaacttccaccattaccattaagggtttcatgagccttctaatgaaaagtgtagatgagaatggtgatggtagcaagagagttatttctctgggtatgggtgacccaactctcaccacttattttcccatctcaaatgtagctgaaaaagctgttgctgaagcacttcagtcacacaggtttcgtgactatgctcccactgcaggtcttccacaggccaggattgcaattgctgaatacctgtctcgtgaccttccttaccaattatcaagtgatgatgtttacatcacttgtggatgcacacaagccattgatgtttcagtggcgatgcttgctcgccccggtgcaaacatcattcttccaagaccaggtttcccactctatgaacttagcgcttcatttagaggagttgaagtgaggcattatgatctgcttccagagaaaggttgggaggttgatctagatgctgttgaagctcttgctgatcagaacactgttgctttggtgattataaatcctgggaatccttgtgggaatgtgtacagttaccatcatttggagaagattgctgaaactgcaaaacgggttggaacaattgtgattgctgatgaagtttatggccatcttgcatttgcgggcaagccttttgtgccaatgggagtttttggctctattgttcctgttctgactcttggctcattttctaagagatggatagttcctggatggaggcttagttggtttgtgacaaatgatccatctggcacttttagaaatccaaaggtagatgagcgctttaaaaagtactttgatcttttgggaggtccagccaccttcatccaggcagctgtacctcagataattgagcatactgaaaaggttttcttcaagaaaaccattgataatttgaggcatgttgcagatatatgttgtaaagagttgaaggatattccatacattatttgcccttataaaccagaagggtccatggctatgatggtgaaactaaacctttcacttctggaggatattagcgatgatattgatttctgtttcaagcttgctaaggaggaatctgttatcattcttccaggaactgcggtagggctgaataattggcttcgtattattttcgctacagatccagttgctcttgtagagggtttgaagagggtaaaatctttttgtgaaagacatgcaagaaagtggtcaatgactacagaataaaatccacaaattaaggcggctactattttgtattgaatacctagcttctcaaatatccaatttttacaaaattggatcgttttacgaataattgggttctcaaatatccatttttttgtgccagctctagtttatcactagcttttaaggaaggattctccaagtatctaggtgtttatcaattggtatttgtgtttattgttgtatctaaaaaattatatattttaaataattttgtgacgctatatattaatcaggt

SEQ ID NO: 18514 - protein, 432 aa, Glycine max
EIESKPEIMEKVGVAVNSKNQESKATSTITIKGFMSLLMKSVDENGDGSKRVISLGMGDPTLTTYFPISNVAEKAVAEALQSHRFRDYAPTAGLPQARIAIAEYLSRDLPYQLSSDDVYITCGCTQAIDVSVAMLARPGANIILPRPGFPLYELSASFRGVEVRHYDLLPEKGWEVDLDAVEALADQNTVALVIINPGNPCGNVYSYHHLEKIAETAKRVGTIVIADEVYGHLAFAGKPFVPMGVFGSIVPVLTLGSFSKRWIVPGWRLSWFVTNDPSGTFRNPKVDERFKKYFDLLGGPATFIQAAVPQIIEHTEKVFFKKTIDNLRHVADICCKELKDIPYIICPYKPEGSMAMMVKLNLSLLEDISDDIDFCFKLAKEESVIILPGTAVGLNNWLRIIFATDPVALVEGLKRVKSFCERHARKWSMTTE

SEQ ID NO: 18515 - protein, 424 aa, Glycine max
MEKVGVAVNSKNQESKATSTITIKGFMSLLMKSVDENGDGSKRVISLGMGDPTLTTYFPISNVAEKAVAEALQSHRFRDYAPTAGLPQARIAIAEYLSRDLPYQLSSDDVYITCGCTQAIDVSVAMLARPGANIILPRPGFPLYELSASFRGVEVRHYDLLPEKGWEVDLDAVEALADQNTVALVIINPGNPCGNVYSYHHLEKIAETAKRVGTIVIADEVYGHLAFAGKPFVPMGVFGSIVPVLTLGSFSKRWIVPGWRLSWFVTNDPSGTFRNPKVDERFKKYFDLLGGPATFIQAAVPQIIEHTEKVFFKKTIDNLRHVADICCKELKDIPYIICPYKPEGSMAMMVKLNLSLLEDISDDIDFCFKLAKEESVIILPGTAVGLNNWLRIIFATDPVALVEGLKRVKSFCERHARKWSMTTE

SEQ ID NO: 18516 - protein, 398 aa, Glycine max
MSLLMKSVDENGDGSKRVISLGMGDPTLTTYFPISNVAEKAVAEALQSHRFRDYAPTAGLPQARIAIAEYLSRDLPYQLSSDDVYITCGCTQAIDVSVAMLARPGANIILPRPGFPLYELSASFRGVEVRHYDLLPEKGWEVDLDAVEALADQNTVALVIINPGNPCGNVYSYHHLEKIAETAKRVGTIVIADEVYGHLAFAGKPFVPMGVFGSIVPVLTLGSFSKRWIVPGWRLSWFVTNDPSGTFRNPKVDERFKKYFDLLGGPATFIQAAVPQIIEHTEKVFFKKTIDNLRHVADICCKELKDIPYIICPYKPEGSMAMMVKLNLSLLEDISDDIDFCFKLAKEESVIILPGTAVGLNNWLRIIFATDPVALVEGLKRVKSFCERHARKWSMTTE

SEQ ID NO: 18517 - DNA, 1193 bp, Glycine max
tattttataaaattgcagcaaacacaccagaagaatcagataaaggattcaatagatgttgatgaaccggaagaggtgggagatccattgactgctgaagagttggaagaaaaggagcgcttgctagaagagggattttcttcatggacccggagggattttaatactttcattagggcctgcgaaaaatatggccgaaatgatataaaaggtattgcttctgagatggaaggaaaaactgaggaggaagttgaaagatatgcaaaggtcttcaaagaaagatacaaggaattaaatgattatgacagaattattaaaaacattgaaaggggggaggcaagaatttctcggaaagatgagatcatgaaggctattggaaagaagttggaccgctacaagaatccgtggctagagttgaagatacagtatgggcaaaacaaagggaagttgtacaacgaagaatgtgacagattcatgatatgcatggtgcacaaacttggctatgggaactgggatgagttaaaggcagcatttcgaacatcacccttgtttcgatttgattggtttgtcaaatctcgcacaactcaagaactggctaggaggtgtgacaccctcattcgactggtagaaaaggaaaaccaagaatacgatgagagggagagacaagctcgcaaagagaagaaacttgctaaaagcatgaccccatcaaagcgtgctttggcaagacagacagagagtccatcttctttgaagaagcgcaagcagttaaccatggacgattatgcaagcacggggaaaagaagaaaataaatgaacatatgttctatattgcgtaggataaggggttgttgggttttaaaagccttggtgattttgatgtggcccggacatgacaactgatggtcaggcttgtcttccaaaagccgtgctaccaacctgacttatgtaggctccaattatctgtcgtatggctagttagagaatatcatgtagaaatgggatgttgtattgtcagtatgtatatctacaaaaaaatccttagatttgaacagctagtgaaatgaatatatgttgtatgtttggaaaatccggttggccattgaattcgcaagtggaaaacttcaatttgatgccaaaataatgttttttacttgtatgaaattatatgattatacaagtaaaattctggagag

SEQ ID NO: 18518 - protein, 269 aa, Glycine max
YFIKLQQTHQKNQIKDSIDVDEPEEVGDPLTAEELEEKERLLEEGFSSWTRRDFNTFIRACEKYGRNDIKGIASEMEGKTEEEVERYAKVFKERYKELNDYDRIIKNIERGEARISRKDEIMKAIGKKLDRYKNPWLELKIQYGQNKGKLYNEECDRFMICMVHKLGYGNWDELKAAFRTSPLFRFDWFVKSRTTQELARRCDTLIRLVEKENQEYDERERQARKEKKLAKSMTPSKRALARQTESPSSLKKRKQLTMDDYASTGKRRK

SEQ ID NO: 18519 - protein, 194 aa, Glycine max
MEGKTEEEVERYAKVFKERYKELNDYDRIIKNIERGEARISRKDEIMKAIGKKLDRYKNPWLELKIQYGQNKGKLYNEECDRFMICMVHKLGYGNWDELKAAFRTSPLFRFDWFVKSRTTQELARRCDTLIRLVEKENQEYDERERQARKEKKLAKSMTPSKRALARQTESPSSLKKRKQLTMDDYASTGKRRK

SEQ ID NO: 18520 - protein, 148 aa, Glycine max
MKAIGKKLDRYKNPWLELKIQYGQNKGKLYNEECDRFMICMVHKLGYGNWDELKAAFRTSPLFRFDWFVKSRTTQELARRCDTLIRLVEKENQEYDERERQARKEKKLAKSMTPSKRALARQTESPSSLKKRKQLTMDDYASTGKRRK

SEQ ID NO: 18521 - DNA, 1653 bp, Glycine max
agcattcactccacacaccaaaaagtgtagtatgatgagcaacaaattattctacgcaaaccttgtgctcgctttctacctctcatgtcactatgctctagctcagactgaaaatttccctttgccactcaaagctgtgaatcttggaaattggctcgttattgaagggtggatgaaaccttctctctttgatggaataactaacaaagatcttttggatggaactcaagtgcaattcatgtctaccaagttacaaaagtatctctgtgcagaacatggaggaggaagtgctgttgttgccaaccgcaccaaagcttctggttgggaaactttcaggttgtggaggatcaatgaatccaccttcaattttagagtttctaataagcaatttataagattgacaaatcgagatggaggaagcaatttagtggctgattcagattcacctagcgacttggaaacatttgagattctgaggaatgatgatgaccctaacagggttcgcattagagcaccaaatggccagtttttacaggccatatctgagactgtggtgcttgcaaattatgaaggatccagttgggatgatagtgatccttcaatcttcaaaatgaatgttttgagtggcagcattataagaggcgaataccaaattacaaatggttatagcccagataaagctaccaaaatcatgagggatcactggaacacgtatatcattgaagatgatttcaagttcatgtcagaaaatggcttaaatgctgtgagaattcccgtggggtggtggacaacccaagacccaacaccaccaaagccatttgttgggggatccttggaagtgctggacaatgccttcacatgggcagaaaagtatggaattaaggtaattgtggacctgcatgctgtccaggctcacaaaatggaagacctcacagtgcctcaagagatggatatctagaatggggtgattcatacatatctgacactgtggcaaccatagacttcctagctgaaaggtattctaacagatcgggtctagttgcaatagaactaatgaatgagcctcaaggcgtaaatttggaaagccttaaaagctattatcaagcaggttatgatgctgtgaggaaacacacttctagtgcctatgtgatcatgtctaaccctcttgatagagattcaaaagtgcttttgtcctttgctggagctttcagtagagtggtcattgatgtgcactactacaatctcttttcggataggttctccaacatgaatgtgcagcagaacattgattttatcaaaaaccaaagggcctcagatcttagctctctcaccacatctaatggacccctcatttttgttggggaatggagtagtgattggaaagtacagagtgcatcaaagaaagatcaccaaaaatttacgcaagtgcaagtggatgtatactctcgtgccaaatttggatgggcttattgggcctacatatgtgactctaacttctggagcatcaagtggatgattgaaaacaattatattaagctttaattagtattgccctgtgctctaaaaagggtgttgggtattttactattttagatgtctattcaaatttgaagtgtaatttacaaataaaaataaagatagcctattactgtc

SEQ ID NO: 18522 - protein, 318 aa, Glycine max
AFTPHTKKCSMMSNKLFYANLVLAFYLSCHYALAQTENFPLPLKAVNLGNWLVIEGWMKPSLFDGITNKDLLDGTQVQFMSTKLQKYLCAEHGGGSAVVANRTKASGWETFRLWRINESTFNFRVSNKQFIRLTNRDGGSNLVADSDSPSDLETFEILRNDDDPNRVRIRAPNGQFLQAISETVVLANYEGSSWDDSDPSIFKMNVLSGSIIRGEYQITNGYSPDKATKIMRDHWNTYIIEDDFKFMSENGLNAVRIPVGWWTTQDPTPPKPFVGGSLEVLDNAFTWAEKYGIKVIVDLHAVQAHKMEDLTVPQEMDI

SEQ ID NO: 18523 - protein, 308 aa, Glycine max
MMSNKLFYANLVLAFYLSCHYALAQTENFPLPLKAVNLGNWLVIEGWMKPSLFDGITNKDLLDGTQVQFMSTKLQKYLCAEHGGGSAVVANRTKASGWETFRLWRINESTFNFRVSNKQFIRLTNRDGGSNLVADSDSPSDLETFEILRNDDDPNRVRIRAPNGQFLQAISETVVLANYEGSSWDDSDPSIFKMNVLSGSIIRGEYQITNGYSPDKATKIMRDHWNTYIIEDDFKFMSENGLNAVRIPVGWWTTQDPTPPKPFVGGSLEVLDNAFTWAEKYGIKVIVDLHAVQAHKMEDLTVPQEMDI

SEQ ID NO: 18524 - protein, 307 aa, Glycine max
MSNKLFYANLVLAFYLSCHYALAQTENFPLPLKAVNLGNWLVIEGWMKPSLFDGITNKDLLDGTQVQFMSTKLQKYLCAEHGGGSAVVANRTKASGWETFRLWRINESTFNFRVSNKQFIRLTNRDGGSNLVADSDSPSDLETFEILRNDDDPNRVRIRAPNGQFLQAISETVVLANYEGSSWDDSDPSIFKMNVLSGSIIRGEYQITNGYSPDKATKIMRDHWNTYIIEDDFKFMSENGLNAVRIPVGWWTTQDPTPPKPFVGGSLEVLDNAFTWAEKYGIKVIVDLHAVQAHKMEDLTVPQEMDI

SEQ ID NO: 18525 - DNA, 1390 bp, Glycine max
aaagcgaaaatcaaacccaaattcaattcagaatcagccatggagagcgacgacgacttcgagcttttgcctccttctcccgtccaagaacgaaagctcaagcgtttgaagaaagcagctagggttcccgaaccttctcaccctcctatctctcctcccaatttttccgtatcgggaaacggcgaagaacacttgacggagccaaacggcgaatctgggcccgaatttgaaactttgaccccaagcccaagcccgagcccgagcccgagcccgagcccgaaccctcaatctgacactccgaaaggtgtaaccgtcgacgacgatggtttgggcgcgaagagggttctggattttgattccttcggtgaggaactagggaaggttgtagaggagactgaagaagttagagatctgaagaccaacgaagaaatcagggatttgaatactgatgaagtagagaggaaacgacgaggtttagatgacttgccagagaagaacgagaagaagaagagaatcaaggacgacagtgacagcagcgagaagaagcctaaagtatctgccaccaataagagaaaggccgagaaggaacgacgagatactctgaaacagcttcaagcggagtctcagagacttcttcgagaaactagagatgcggcttttaaacctgctcctctggttcagaagccaatttcttcgatattggagaaaattcggcagcggaaattggagattttaaagaaatctgctgataatgtagaaaaggctgaaccggaagaaacaccagcttcttgccatgcagccactaaaagtaatttgggcacgtcacatattggtgaagaatctaatgatgctgcagctaattctaactctgagagcattccttctcccatggccaaggattcagaatctgagcatgcatttcgagctcctattggtgatactcaggttttctgccagccatttaccaagatgcttgccttaactgtagatattctatatttattgcttgtctggctgtattttctaggaactctacactgattctgaaagaagcgatactaaagatgaggctgtaaatgacaagtctaacaacccttcagaagaagtgtttgccccgtcaatgcttgcaatgaacttgaaacttgattctgctcctcctgatgatgatgtctcttccaatgaggaggaggaggacaatgacaaggagaacatagagccacacgtacatgtatcagttgacttgactttatcaccagatggtgaccctgttagggcttttgttgatgaagaagctgaagaggaagatgacagtgataatgacctacagcgtttccaagatgatgaaggtgaagatgatgatgatattgaggaagatgacatgattgcaact

SEQ ID NO: 18526 - protein, 346 aa, Glycine max
KAKIKPKFNSESAMESDDDFELLPPSPVQERKLKRLKKAARVPEPSHPPISPPNFSVSGNGEEHLTEPNGESGPEFETLTPSPSPSPSPSPSPNPQSDTPKGVTVDDDGLGAKRVLDFDSFGEELGKVVEETEEVRDLKTNEEIRDLNTDEVERKRRGLDDLPEKNEKKKRIKDDSDSSEKKPKVSATNKRKAEKERRDTLKQLQAESQRLLRETRDAAFKPAPLVQKPISSILEKIRQRKLEILKKSADNVEKAEPEETPASCHAATKSNLGTSHIGEESNDAAANSNSESIPSPMAKDSESEHAFRAPIGDTQVFCQPFTKMLALTVDILYLLLVWLYFLGTLH

SEQ ID NO: 18527 - protein, 333 aa, Glycine max
MESDDDFELLPPSPVQERKLKRLKKAARVPEPSHPPISPPNFSVSGNGEEHLTEPNGESGPEFETLTPSPSPSPSPSPSPNPQSDTPKGVTVDDDGLGAKRVLDFDSFGEELGKVVEETEEVRDLKTNEEIRDLNTDEVERKRRGLDDLPEKNEKKKRIKDDSDSSEKKPKVSATNKRKAEKERRDTLKQLQAESQRLLRETRDAAFKPAPLVQKPISSILEKIRQRKLEILKKSADNVEKAEPEETPASCHAATKSNLGTSHIGEESNDAAANSNSESIPSPMAKDSESEHAFRAPIGDTQVFCQPFTKMLALTVDILYLLLVWLYFLGTLH

SEQ ID NO: 18528 - DNA, 1334 bp, Glycine max
acacgccaattctaatcagcaggatcattccaatatgggcaacagaattgttatgggaaattcccttctctttatctctttcttcatcttcagctttagtttcttggaggctcaaaaggctccagcagtttatgtgtttggagactcacttgttgatgttggcaacaacaattacttgagtctctccattgaaaaggcaattcttcctcactatggcattgattttccaactaagaaacccactgggagatttagcaatggcaagaatgctgcagatttaattgctgaaaacttgggcctacctacttctccaccttatctctccctagtatctaaggtccacaacaacaacaagaagaacgtatctttcttgggtggtgttaattttgcctccggaggtgctggaatatttaatgcctcagataaaggatttaggcaatcaatacctttgccaaagcaagtggactactactcacaagtgcatgaacaactgatacaacaaataggagcatctactctcgggaaacacctctcaaagtccatcttcattgtggtgattggtggcaatgatatctttggttactttgactcaaaggatcttcaaaagaaaaacacccctcagcagtacgtggattccatggcttccacattaaaagtgcaactacagagattatacaacaatggtgcaaagaaatttgagattgctggtgttggtgcaattgggtgctgccctgcatacagggtcaagaacaaaacagaatgtgtttctgaagccaatgacttgtcggttaaatataatgaagctcttcaatccatgttaaaggaatggcaattggagaacaaagacataagttactcttactttgatacttatgctgccatccaagaccttgttcacaatccagcttcttacggatttgctaatgtgaaagctgcatgttgtggacttggtgagttgaatgcccaaattccatgcctgccaatttcgagcatttgttccaatagaaaagaccatattttctgggatgcattccatcctacagaggcagctgctcgcatctttgtggatgaaatttttaatggaccttcaaaatacatatctcctattaatatggaacagttactggccatttgaattggcaaataaattagtcacttagtcctttgtaatgtgctttccttttttgtggggttacttgttatcaagcaacacactggaacccaaaaaatgaagagaaaaaaaaacatcttattagattaaacatttggattaatctaattgtacgaaagagtgagtttatgaacttttagctcaagtgatttattttatattt

SEQ ID NO: 18529 - protein, 377 aa, Glycine max
HANSNQQDHSNMGNRIVMGNSLLFISFFIFSFSFLEAQKAPAVYVFGDSLVDVGNNNYLSLSIEKAILPHYGIDFPTKKPTGRFSNGKNAADLIAENLGLPTSPPYLSLVSKVHNNNKKNVSFLGGVNFASGGAGIFNASDKGFRQSIPLPKQVDYYSQVHEQLIQQIGASTLGKHLSKSIFIVVIGGNDIFGYFDSKDLQKKNTPQQYVDSMASTLKVQLQRLYNNGAKKFEIAGVGAIGCCPAYRVKNKTECVSEANDLSVKYNEALQSMLKEWQLENKDISYSYFDTYAAIQDLVHNPASYGFANVKAACCGLGELNAQIPCLPISSICSNRKDHIFWDAFHPTEAAARIFVDEIFNGPSKYISPINMEQLLAI

SEQ ID NO: 18530 - protein, 366 aa, Glycine max
MGNRIVMGNSLLFISFFIFSFSFLEAQKAPAVYVFGDSLVDVGNNNYLSLSIEKAILPHYGIDFPTKKPTGRFSNGKNAADLIAENLGLPTSPPYLSLVSKVHNNNKKNVSFLGGVNFASGGAGIFNASDKGFRQSIPLPKQVDYYSQVHEQLIQQIGASTLGKHLSKSIFIVVIGGNDIFGYFDSKDLQKKNTPQQYVDSMASTLKVQLQRLYNNGAKKFEIAGVGAIGCCPAYRVKNKTECVSEANDLSVKYNEALQSMLKEWQLENKDISYSYFDTYAAIQDLVHNPASYGFANVKAACCGLGELNAQIPCLPISSICSNRKDHIFWDAFHPTEAAARIFVDEIFNGPSKYISPINMEQLLAI

SEQ ID NO: 18531 - protein, 360 aa, Glycine max
MGNSLLFISFFIFSFSFLEAQKAPAVYVFGDSLVDVGNNNYLSLSIEKAILPHYGIDFPTKKPTGRFSNGKNAADLIAENLGLPTSPPYLSLVSKVHNNNKKNVSFLGGVNFASGGAGIFNASDKGFRQSIPLPKQVDYYSQVHEQLIQQIGASTLGKHLSKSIFIVVIGGNDIFGYFDSKDLQKKNTPQQYVDSMASTLKVQLQRLYNNGAKKFEIAGVGAIGCCPAYRVKNKTECVSEANDLSVKYNEALQSMLKEWQLENKDISYSYFDTYAAIQDLVHNPASYGFANVKAACCGLGELNAQIPCLPISSICSNRKDHIFWDAFHPTEAAARIFVDEIFNGPSKYISPINMEQLLAI

SEQ ID NO: 18532 - DNA, 1203 bp, Glycine max
gacaatttctcttctagcaatcaaccatctttggatcaaccctccaatttgtttacaatatggaacagaccctctcctttgaatttgagcatgaatttgttcaaaacacggcaagagtgaaatctgttgatatgcatccaactgagccatggattctactgggtttgtattcaggaactatttctatttggaactatcagacaaagactgaagagaagtctttaaaaatcagcgaatctccagtgagatcagcaaagttcattgctcgggaaaactggattgttgcagctacggatgacaaaaacattcacgtctacaattatgacaaaatggaaaagatagtagaatttgcggaacataaagattatatcaggagtttagctgttcatcctgtcctgccatatgtaatatcagcttcagatgatcaggttctaaaattgtggaattggaggaaaggttggtcttgttatgagaactttgaagggcactcacattatgtgatgcaagtggcattcaaccctaaggatccatctacctttgctagtgcatcccttgatggcaccttgaagatctggagccttgattcctctgctccaaattttaccctggaaggacaccagaaaggagtgaattgtgttgattacttcataaccaacgacaaacaatatcttttaagtggttctgatgattacactgccaaggtatgggattatcattctagaaactgtgtacagacgcttgaaggacatgaaaacaatgttacagcaatatgtgctcatcctgagcttcctataataataacagcttcagaggattctactgttaaaatatgggatgctgtcacttacaggcttcaaaccacgttgaactttggtctcaagagagtatggagtattggatacaagaaaggatcatctcagcttgcatttggttgtgaccaaggatttctaattgttaagatttcagaaggaagaccccaataagccaacatctggtagccagatgactagttatgatgagcttaactgcccagagaacatcatattctgccgttggttgtttatttctgagttgttactagttactagaataaattaatttagaatctacatattaccttatgtaatatattggtgtatgtacctgtgtgttcggattaatgtgttgccatttgagtgatatatataatatattttttttatc

SEQ ID NO: 18533 - protein, 307 aa, Glycine max
MEQTLSFEFEHEFVQNTARVKSVDMHPTEPWILLGLYSGTISIWNYQTKTEEKSLKISESPVRSAKFIARENWIVAATDDKNIHVYNYDKMEKIVEFAEHKDYIRSLAVHPVLPYVISASDDQVLKLWNWRKGWSCYENFEGHSHYVMQVAFNPKDPSTFASASLDGTLKIWSLDSSAPNFTLEGHQKGVNCVDYFITNDKQYLLSGSDDYTAKVWDYHSRNCVQTLEGHENNVTAICAHPELPIIITASEDSTVKIWDAVTYRLQTTLNFGLKRVWSIGYKKGSSQLAFGCDQGFLIVKISEGRPQ

SEQ ID NO: 18534 - protein, 283 aa, Glycine max
MHPTEPWILLGLYSGTISIWNYQTKTEEKSLKISESPVRSAKFIARENWIVAATDDKNIHVYNYDKMEKIVEFAEHKDYIRSLAVHPVLPYVISASDDQVLKLWNWRKGWSCYENFEGHSHYVMQVAFNPKDPSTFASASLDGTLKIWSLDSSAPNFTLEGHQKGVNCVDYFITNDKQYLLSGSDDYTAKVWDYHSRNCVQTLEGHENNVTAICAHPELPIIITASEDSTVKIWDAVTYRLQTTLNFGLKRVWSIGYKKGSSQLAFGCDQGFLIVKISEGRPQ

SEQ ID NO: 18535 - protein, 217 aa, Glycine max
MEKIVEFAEHKDYIRSLAVHPVLPYVISASDDQVLKLWNWRKGWSCYENFEGHSHYVMQVAFNPKDPSTFASASLDGTLKIWSLDSSAPNFTLEGHQKGVNCVDYFITNDKQYLLSGSDDYTAKVWDYHSRNCVQTLEGHENNVTAICAHPELPIIITASEDSTVKIWDAVTYRLQTTLNFGLKRVWSIGYKKGSSQLAFGCDQGFLIVKISEGRPQ

SEQ ID NO: 18536 - DNA, 1136 bp, Glycine max
tgtgtgtgctatgctggtggctcttctggtgttgttgtcgagcacgaggaggtaccgctacaagagactggtgggaagccctttgacgcagattgcgatggtgtttgtggcggcttggaggaagaggcacttggaattgccctctgattcatccttgttgttcaacttggatgatgtggctgatgaaagtctcagaaagaacaagcagatgttgcctcatagcaagcagtttcgcttcttagacaaggcagcgatcaaggacccaaaaatggacggcgaagaaatcacaatgcagaggaattggtatctctcaaccctaaccgacgtggaagaggtcaaaatggtgcaaagaattctcccggtgtgggccaccaccatcatgttctggacagtctacgcccaaatgaccacattctcagtccaacaagccaccaccatggaccgccgcatcggaaactccttccaaatccccgccgcgtcgctcaccgtcttcttcgtaggaagcgtcctcctaacggttcccatctacgaccgcgtcatcacccccatagccaaaaaaatctcacacaacccacaagggctcacccctctgcaacgcattggggtagggttagtgttctcaatcttcgccatggtgtcagcagcactcattgaaataaaacgcctaagaatggcacagttcttctttgtggggtcgggggaggcatttacgtacatagggcaactagatttcttcctgagggaatgccctagagggatgaagaccatgagcacgggtttgttcttgagcacgttgtcgttagggttttttcttagttctttgttggtgactttggtgcacaaagccacccgccaccgcgagccgtggctcgcggacaatcttaaccatgggagattgcatcacttctactggctattggctctgttgagtggtgtgaatttggtggcgtacttgttttgtgctaaggggtatgtgtacaaggacaagaggctcgctgaggcaggcattgagttggaggaaaccgacactgcttgccatgcttaggttttagtactttactcttggaagaagaagaaaaaaaatgtgttattaatttatgtgaaacattgttaaggttaatgtattttcatattgt

SEQ ID NO: 18537 - protein, 347 aa, Glycine max
VCAMLVALLVLLSSTRRYRYKRLVGSPLTQIAMVFVAAWRKRHLELPSDSSLLFNLDDVADESLRKNKQMLPHSKQFRFLDKAAIKDPKMDGEEITMQRNWYLSTLTDVEEVKMVQRILPVWATTIMFWTVYAQMTTFSVQQATTMDRRIGNSFQIPAASLTVFFVGSVLLTVPIYDRVITPIAKKISHNPQGLTPLQRIGVGLVFSIFAMVSAALIEIKRLRMAQFFFVGSGEAFTYIGQLDFFLRECPRGMKTMSTGLFLSTLSLGFFLSSLLVTLVHKATRHREPWLADNLNHGRLHHFYWLLALLSGVNLVAYLFCAKGYVYKDKRLAEAGIELEETDTACHA

SEQ ID NO: 18538 - protein, 344 aa, Glycine max
MLVALLVLLSSTRRYRYKRLVGSPLTQIAMVFVAAWRKRHLELPSDSSLLFNLDDVADESLRKNKQMLPHSKQFRFLDKAAIKDPKMDGEEITMQRNWYLSTLTDVEEVKMVQRILPVWATTIMFWTVYAQMTTFSVQQATTMDRRIGNSFQIPAASLTVFFVGSVLLTVPIYDRVITPIAKKISHNPQGLTPLQRIGVGLVFSIFAMVSAALIEIKRLRMAQFFFVGSGEAFTYIGQLDFFLRECPRGMKTMSTGLFLSTLSLGFFLSSLLVTLVHKATRHREPWLADNLNHGRLHHFYWLLALLSGVNLVAYLFCAKGYVYKDKRLAEAGIELEETDTACHA

SEQ ID NO: 18539 - protein, 315 aa, Glycine max
MVFVAAWRKRHLELPSDSSLLFNLDDVADESLRKNKQMLPHSKQFRFLDKAAIKDPKMDGEEITMQRNWYLSTLTDVEEVKMVQRILPVWATTIMFWTVYAQMTTFSVQQATTMDRRIGNSFQIPAASLTVFFVGSVLLTVPIYDRVITPIAKKISHNPQGLTPLQRIGVGLVFSIFAMVSAALIEIKRLRMAQFFFVGSGEAFTYIGQLDFFLRECPRGMKTMSTGLFLSTLSLGFFLSSLLVTLVHKATRHREPWLADNLNHGRLHHFYWLLALLSGVNLVAYLFCAKGYVYKDKRLAEAGIELEETDTACHA

SEQ ID NO: 18540 - DNA, 1715 bp, Glycine max
acactagtactcactgttgttcattgtgaaatcatcatcatcatgggttgctcagcctcaagaaccatcaccatagtggccaacaacaataaccaattagaggatccatcttctgcttctcttgcttcttctttctcttcctcttctgcctcacacaaatccattaactctacttcttcaccagcagcagcaccagttagaagaagagctctttctctcccaatgcctcttgttcatcaccctcccataaaaaagggtgacacacaccaccttgtctccctcacctccaccacctatggctcccttctcctcattgaccaaaaagacccaaacttgacccaaaaaaaccaaccccgcctcaccaaaacctcaaaccaaactgacccagcacactcactctccccagactcagtcatcaacacttgggaactcatggatggcttagatgaagaagaagaagaagaagaagaagaaattgccaatgccaagaagaagcctccttacacttccattttggacaaaccaagttcatgcaggtacacagcatttgatggttctgcaaggaagaaactgcttgattcctttgaatcactgaaaacttcacagacagcaatggaaaaggaaaactcttcttcttctccagcaccaaccaagaagccactttggcagcacttatccgaggaagctttgcttgctaagttggatccgagtgtggcttggagttacagaagagcattatcatcaaggaatctaggtagaaacaccttatctagagatgtaaggtcaatggggtctagccctttgatatttcattcttcttctttttcatttggtaagaacaatagtttgtgccgtttgtctggcactgaggacagaatagtgctttattgcactagtttgagagggatccgaaagacctatgaggattgttgttcggttaggatgattctgaggggcttcatggttgcggttgatgagagggacatctcaatggactcgtcctataggaaggagttgaaggatgctcttggtggaaaagcagtgacattgccacaggtctttatcagagggaggtatgtggggaatgctgagcaaatgaagcatctgaatgagtctggagaattggcaaggcttttggagggtttccccactcaggatcctgggtttgtgtgtgacaactgtggtgatgccaggtttgtgccatgccccaattgcaatggtagcaggaaggtgtttgagcatgaggaaggagggttgagaaggtgccctgattgcaatgagaatggcttgataagatgtccaggttgctgcccatgattggtggaaattagtcatctgaatcaggtataccccgattcgtgaagagtaatttctagaactactgatatccatttaagagataagtatctcttaaggtatatttttcagtgcccagaaagcctatggatcgaattcctgaccacaagcttaaaaaatgattaattatctgtcaatcatatcacatcatattgataatgatgttcttgtgtttgtttattggagtagaatttgtcattataaattttgacaactaccaagaatgcacatttcagtttcgtcctttgtttttagttagtactactttcagctgttatttgtttatgtcagacttttgctttattagcgtttaattacccttgtgaacagcagaaaataaaaaactgacaaggttatgt

SEQ ID NO: 18541 - protein, 438 aa, Glycine max
TLVLTVVHCEIIIIMGCSASRTITIVANNNNQLEDPSSASLASSFSSSSASHKSINSTSSPAAAPVRRRALSLPMPLVHHPPIKKGDTHHLVSLTSTTYGSLLLIDQKDPNLTQKNQPRLTKTSNQTDPAHSLSPDSVINTWELMDGLDEEEEEEEEEIANAKKKPPYTSILDKPSSCRYTAFDGSARKKLLDSFESLKTSQTAMEKENSSSSPAPTKKPLWQHLSEEALLAKLDPSVAWSYRRALSSRNLGRNTLSRDVRSMGSSPLIFHSSSFSFGKNNSLCRLSGTEDRIVLYCTSLRGIRKTYEDCCSVRMILRGFMVAVDERDISMDSSYRKELKDALGGKAVTLPQVFIRGRYVGNAEQMKHLNESGELARLLEGFPTQDPGFVCDNCGDARFVPCPNCNGSRKVFEHEEGGLRRCPDCNENGLIRCPGCCP

SEQ ID NO: 18542 - protein, 424 aa, Glycine max
MGCSASRTITIVANNNNQLEDPSSASLASSFSSSSASHKSINSTSSPAAAPVRRRALSLPMPLVHHPPIKKGDTHHLVSLTSTTYGSLLLIDQKDPNLTQKNQPRLTKTSNQTDPAHSLSPDSVINTWELMDGLDEEEEEEEEEIANAKKKPPYTSILDKPSSCRYTAFDGSARKKLLDSFESLKTSQTAMEKENSSSSPAPTKKPLWQHLSEEALLAKLDPSVAWSYRRALSSRNLGRNTLSRDVRSMGSSPLIFHSSSFSFGKNNSLCRLSGTEDRIVLYCTSLRGIRKTYEDCCSVRMILRGFMVAVDERDISMDSSYRKELKDALGGKAVTLPQVFIRGRYVGNAEQMKHLNESGELARLLEGFPTQDPGFVCDNCGDARFVPCPNCNGSRKVFEHEEGGLRRCPDCNENGLIRCPGCCP

SEQ ID NO: 18543 - protein, 364 aa, Glycine max
MPLVHHPPIKKGDTHHLVSLTSTTYGSLLLIDQKDPNLTQKNQPRLTKTSNQTDPAHSLSPDSVINTWELMDGLDEEEEEEEEEIANAKKKPPYTSILDKPSSCRYTAFDGSARKKLLDSFESLKTSQTAMEKENSSSSPAPTKKPLWQHLSEEALLAKLDPSVAWSYRRALSSRNLGRNTLSRDVRSMGSSPLIFHSSSFSFGKNNSLCRLSGTEDRIVLYCTSLRGIRKTYEDCCSVRMILRGFMVAVDERDISMDSSYRKELKDALGGKAVTLPQVFIRGRYVGNAEQMKHLNESGELARLLEGFPTQDPGFVCDNCGDARFVPCPNCNGSRKVFEHEEGGLRRCPDCNENGLIRCPGCCP

SEQ ID NO: 18544 - DNA, 1574 bp, Glycine max
actctctccatcaaataccaatcaatcaaaaagccagcgagaaaatgaaaattcgtggtggaataatcatagactgaagagaaaagttgtcgttgtgcagtgcactgtcatggaagaggatgaagagacgcagcaacgagtcactgactcgtccctctccaccgagtcacgcacttccactccttctgatggagcgccacccaactcggaaaccctagttcaccgctcctcgcttccgcatgaccttgccactcatatgcagggcagctctaccgcacataaaggtggaaaagctgagagtaaggtgtcagctcagcctcctgatgaggaaactattgaaaaagatgcagttgaggcacctcaaaaacagacagaaaatcaacttcagtctgtttgttcaacttcattatctgaactatcaccaacttctgtttcacattctttatcatctgcccttagtcccactgtatcacaacagagaccatctcctcccaaggctaatagtgtacaagtgtcgaaaggagacaaaggaacaccttctgatggtacaaccttatcttctgtttctgctgtaagggcatctgcatctgatggatacaactggcggaagtacggccagaagcaagtgaagaatcctatgggttctcgaagctattacaagtgtacccattcaaattgttgtgctaagaagattaaattttgtgaccattcaggacatgtgatagagattgtttataaaagtcaacataatcatgatcctccgcataaaattgataccaccaaggaaagtaagctcctgccttccagtgaacctaaagaagaaagcagtgttccaaagcagtctaccaaagttctgaataattctgatccatcatcttctccgaaagaacctttgcaagaagcaccctgcaatggtgataagaatctagaaaactcatctaatgttgagaatggtaaaattattttgaaggaaaagcatgtcaatgaccgagagccaaaaagaagattgaacaatggtgatttggattcagcagtaaaacatggcaagaaaccaaagtttgttgtacatgcgacagaggatgtggggatatcaggtgatggataccggtggcgcaagtagggacaaaagttggtgaagggaaatccacatttcagaaactactacagatgcacttcttctggatgtcctgtccgaaagcacattgagactgctgtggataattcaaaagctctcatcataacatacaagggagtgcatgatcatgacatgcctgtacccaagaaacgacatggcccgcctagtgcttcacttgtggctgcggcagcacctgcttcaatgaacaatgtgcagttcaaaaaaactggcttgctgcaaagccaggaaactgaagctcaatgttcagaggacacagaaggagaattgatgggggaagcgatggaccttgagggtgagaaagcaattgagtcggctcgaactcttttgagcataggttttgaaattaaaccttgttgaatacatcttttcataaactcatgcagttgcatctatataaattaattggtaggcctcatgt

SEQ ID NO: 18545 - protein, 372 aa, Glycine max
LSPSNTNQSKSQRENENSWWNNHRLKRKVVVVQCTVMEEDEETQQRVTDSSLSTESRTSTPSDGAPPNSETLVHRSSLPHDLATHMQGSSTAHKGGKAESKVSAQPPDEETIEKDAVEAPQKQTENQLQSVCSTSLSELSPTSVSHSLSSALSPTVSQQRPSPPKANSVQVSKGDKGTPSDGTTLSSVSAVRASASDGYNWRKYGQKQVKNPMGSRSYYKCTHSNCCAKKIKFCDHSGHVIEIVYKSQHNHDPPHKIDTTKESKLLPSSEPKEESSVPKQSTKVLNNSDPSSSPKEPLQEAPCNGDKNLENSSNVENGKIILKEKHVNDREPKRRLNNGDLDSAVKHGKKPKFVVHATEDVGISGDGYRWRK

SEQ ID NO: 18546 - protein, 336 aa, Glycine max
MEEDEETQQRVTDSSLSTESRTSTPSDGAPPNSETLVHRSSLPHDLATHMQGSSTAHKGGKAESKVSAQPPDEETIEKDAVEAPQKQTENQLQSVCSTSLSELSPTSVSHSLSSALSPTVSQQRPSPPKANSVQVSKGDKGTPSDGTTLSSVSAVRASASDGYNWRKYGQKQVKNPMGSRSYYKCTHSNCCAKKIKFCDHSGHVIEIVYKSQHNHDPPHKIDTTKESKLLPSSEPKEESSVPKQSTKVLNNSDPSSSPKEPLQEAPCNGDKNLENSSNVENGKIILKEKHVNDREPKRRLNNGDLDSAVKHGKKPKFVVHATEDVGISGDGYRWRK

SEQ ID NO: 18547 - protein, 287 aa, Glycine max
MQGSSTAHKGGKAESKVSAQPPDEETIEKDAVEAPQKQTENQLQSVCSTSLSELSPTSVSHSLSSALSPTVSQQRPSPPKANSVQVSKGDKGTPSDGTTLSSVSAVRASASDGYNWRKYGQKQVKNPMGSRSYYKCTHSNCCAKKIKFCDHSGHVIEIVYKSQHNHDPPHKIDTTKESKLLPSSEPKEESSVPKQSTKVLNNSDPSSSPKEPLQEAPCNGDKNLENSSNVENGKIILKEKHVNDREPKRRLNNGDLDSAVKHGKKPKFVVHATEDVGISGDGYRWRK

SEQ ID NO: 18548 - DNA, 1167 bp, Glycine max
acgttgtgtttggagacagggacaagcgaatgttgtcattggggtcttgacacccaatttatctgataaagaaaatattcctgattcattttacttaaatgtacttccttttgctgaggatgtgcgagagtttcaattcccttccttcactaatttcccagcatcgtggcaaccaaatggacaacagctagaggctgcagctaacttaataaaaacgcttgatcttgcaccacatgggcaagaggaagttttgctacctgactttacaccaaatccagtgttagagcgcttttatcgttatcttgagctgaaatcaaaggatccagatgtggcagtacctcctcttgatggcacactcaagaaaattacagagcctgatactgacctgcttttgcaaaacaaatctgaaatagactcattttgtaggtcttttgagctaaagggaaatcccttgaaaaagtcgaggcgtttattgggaggaaagagatctttttcaaatgatgaagaggttaaaggaaacagtactgctcaaccagccaatctcaccggaaatgcatctgttaaagttgggaaaattggggatctgactcccgttcaatattttgaagccttgatttcacgcagagatagtccagattgggttgtaaaagccattaatgaaatgaaaaataaaatatttgacctggtggaggactcccatgaaggggataactatcctaaagcactggaatgtttagttgcacttcgcaagggttgcatccttgagcaggaaccggaacagttcaatgatttccttaaacatctatggaatttctgtcaagagaaaaaccttcctagtttctgtgaatatcttgcttctaaggaactcaccttgatctccaaaacagaagctatagacagtgaaaatactgatgacaaagccagaaaaggtttcttggttaaatctgaaccaaaagttgattgattccttcactgtatgcgctgaaatatctgagagcttcattcttttgcctcagtaatgattagatatcttgtaaaaacatctgttttggaacaaaaatctaggaataccttgtaaattgtactcatactttaggataatgatatgtcaaaaccagactggagaagtatgatgcagttgcatggtagatgtttaagttggtttat

SEQ ID NO: 18549 - protein, 320 aa, Glycine max
RCVWRQGQANVVIGVLTPNLSDKENIPDSFYLNVLPFAEDVREFQFPSFTNFPASWQPNGQQLEAAANLIKTLDLAPHGQEEVLLPDFTPNPVLERFYRYLELKSKDPDVAVPPLDGTLKKITEPDTDLLLQNKSEIDSFCRSFELKGNPLKKSRRLLGGKRSFSNDEEVKGNSTAQPANLTGNASVKVGKIGDLTPVQYFEALISRRDSPDWVVKAINEMKNKIFDLVEDSHEGDNYPKALECLVALRKGCILEQEPEQFNDFLKHLWNFCQEKNLPSFCEYLASKELTLISKTEAIDSENTDDKARKGFLVKSEPKVD

SEQ ID NO: 18550 - DNA, 1249 bp, Glycine max
gactcatctcacaaaccatgagcacaatccaccaaacacacactcgtcgcgaaggtgaagacaaagagttcagtttctggggctcatcaaacatcataccttctgaaaatgattgtgatcaaccacaaggtaatgaatcaaggctcaaaaaggaagcatactttggagaaacacaccaaagaaaaagccttaaatatgagtattcacggttttgttcaacagtttcagacccttcaaggagcaaagctatttcagaaggacaaagggagcttatggagatgatgcaagacatgcctgagtctggttatgaactctctttccaagacatggtggttcatgagaagcaggtgctggaaccagagcaacaaccacaccaaaatgaaacttcactcgagaacactctcatgcaaagtagtagtggcaataaagctcaactcaaaagggtaagcaaaaagaagaaaaacaaaggcaatagtagtagacctggtcagatattgcgggtcgaaagcatggacagtgaaaccttcctcctcaagttgttctttcctatttctcttgattggatgaagaaggatagagcaaagaatggctccaaggtttcttcaagatcatcattgcaggaatctataaaacaagtgggaaaagaatggagaattaaaaaacttttcctttcaggagacaacagagaagatggcataggtcaaaaaaatggtggccgcatcaatagtgacataaacaggtatgatcatcacagcttgtccctctcgcatggttgctggccattccttccttatgcaaaaagcaaaacaaggaatctgtgaggataacaaactaataatatgaatagttctgttcctttggaagcttgaggtgccatggaaattcacaacaggaaaaaaaatgtgaaatagaaggagacaccataggttgtttttcaattccttggtttagttagtacttagtagtaatggcattcatttgcatatttgatcatcaaaatttctcttctggtgttatgggaaagatgttggggaaacggtccggggcatgtagtgtaagctacaggaattaacctttgcttctttcactgtatcagttaaatatttgttagttaaaaaaccataacctcgttatagtgagtcaaggaggcataatagagtagcatacaaatatggacatgtaccttgtacgctcattgttctgaagtctcatcatagagaaacgtaagatcacaggacttacttttggc

SEQ ID NO: 18551 - protein, 272 aa, Glycine max
LISQTMSTIHQTHTRREGEDKEFSFWGSSNIIPSENDCDQPQGNESRLKKEAYFGETHQRKSLKYEYSRFCSTVSDPSRSKAISEGQRELMEMMQDMPESGYELSFQDMVVHEKQVLEPEQQPHQNETSLENTLMQSSSGNKAQLKRVSKKKKNKGNSSRPGQILRVESMDSETFLLKLFFPISLDWMKKDRAKNGSKVSSRSSLQESIKQVGKEWRIKKLFLSGDNREDGIGQKNGGRINSDINRYDHHSLSLSHGCWPFLPYAKSKTRNL

SEQ ID NO: 18552 - protein, 267 aa, Glycine max
MSTIHQTHTRREGEDKEFSFWGSSNIIPSENDCDQPQGNESRLKKEAYFGETHQRKSLKYEYSRFCSTVSDPSRSKAISEGQRELMEMMQDMPESGYELSFQDMVVHEKQVLEPEQQPHQNETSLENTLMQSSSGNKAQLKRVSKKKKNKGNSSRPGQILRVESMDSETFLLKLFFPISLDWMKKDRAKNGSKVSSRSSLQESIKQVGKEWRIKKLFLSGDNREDGIGQKNGGRINSDINRYDHHSLSLSHGCWPFLPYAKSKTRNL

SEQ ID NO: 18553 - protein, 182 aa, Glycine max
MEMMQDMPESGYELSFQDMVVHEKQVLEPEQQPHQNETSLENTLMQSSSGNKAQLKRVSKKKKNKGNSSRPGQILRVESMDSETFLLKLFFPISLDWMKKDRAKNGSKVSSRSSLQESIKQVGKEWRIKKLFLSGDNREDGIGQKNGGRINSDINRYDHHSLSLSHGCWPFLPYAKSKTRNL

SEQ ID NO: 18554 - DNA, 1164 bp, Glycine max
aactcatagtcataacatatagagaagctatcctagttccaagctgtttattaccttgcatcttccgcaatcaccttctctcttcttcactcttatctctttttctctaaaaaatgtgactttgttgtacgtgagtgcgagtgagcctaaaacagtacggatacttgagcaaaggaacaaatatagaagtgtccaatgcgtaccaacaataccctttactctctctaaaaaacaaacaattctctacacacttgacactactctagtttcactgtttgttctctacttcactcacatctctgcgctgtgtgcgtgaaccagcagatagcaagcatgagtaaacaagacacgatgaaaattcacaattaccttctcaaggtcaatatccactgcgatggctgtgaagagaaagtaaagaaaatcctgcagaaaattgatggggtgtattctgtgaacatagatgcggagcgagggaaggtgatggtgtcagggcatgtagatccagctaaactgctaaaaaagctaaagaggtcagggaagcatgccgaactttggggtggccagagaggcatgatgtacaaccaaaactaccccacctaccctcagttcaagaacatgcacatagataacaccaaagggggcagcaaggacaacaagtctcagaatcacaaaggtggtgctcagaaaggaggtggtggtggtggtggtggtggtggtggtggtcaactagcacacttccaaaatgctaatggagggtcaaaagtaccccccaagaatcagaaatctgtcaacttcaacttatcagaggatgaacttgatgagagtgattttgatgaatttgatgatgactatgatgagtttgaagatgatttggaagaagaggaggaagaggaagagtatggtaatggttatggacatggtggtcatggtcatggtcatggtcatggccatgggcagcaggggcaggggcatcctatgcaacataacaagatgatggctatgatgggccaggtggggaatgggcgtgggccacatgggatgaatgggcctgctatgaacggccataaagggaatgggggtgtcaattatgggggtgtcaagaagggtgaggtcattgatctgcctatacaaataaagggcaaaggtggaaacttcaacgagggt

SEQ ID NO: 18555 - protein, 277 aa, Glycine max
MSKQDTMKIHNYLLKVNIHCDGCEEKVKKILQKIDGVYSVNIDAERGKVMVSGHVDPAKLLKKLKRSGKHAELWGGQRGMMYNQNYPTYPQFKNMHIDNTKGGSKDNKSQNHKGGAQKGGGGGGGGGGGGQLAHFQNANGGSKVPPKNQKSVNFNLSEDELDESDFDEFDDDYDEFEDDLEEEEEEEEYGNGYGHGGHGHGHGHGHGQQGQGHPMQHNKMMAMMGQVGNGRGPHGMNGPAMNGHKGNGGVNYGGVKKGEVIDLPIQIKGKGGNFNEG

SEQ ID NO: 18556 - protein, 271 aa, Glycine max
MKIHNYLLKVNIHCDGCEEKVKKILQKIDGVYSVNIDAERGKVMVSGHVDPAKLLKKLKRSGKHAELWGGQRGMMYNQNYPTYPQFKNMHIDNTKGGSKDNKSQNHKGGAQKGGGGGGGGGGGGQLAHFQNANGGSKVPPKNQKSVNFNLSEDELDESDFDEFDDDYDEFEDDLEEEEEEEEYGNGYGHGGHGHGHGHGHGQQGQGHPMQHNKMMAMMGQVGNGRGPHGMNGPAMNGHKGNGGVNYGGVKKGEVIDLPIQIKGKGGNFNEG

SEQ ID NO: 18557 - protein, 228 aa, Glycine max
MVSGHVDPAKLLKKLKRSGKHAELWGGQRGMMYNQNYPTYPQFKNMHIDNTKGGSKDNKSQNHKGGAQKGGGGGGGGGGGGQLAHFQNANGGSKVPPKNQKSVNFNLSEDELDESDFDEFDDDYDEFEDDLEEEEEEEEYGNGYGHGGHGHGHGHGHGQQGQGHPMQHNKMMAMMGQVGNGRGPHGMNGPAMNGHKGNGGVNYGGVKKGEVIDLPIQIKGKGGNFNEG

SEQ ID NO: 18558 - DNA, 1094 bp, Glycine max
tttcctcttccagcaacttagggacatgttggttggtattaaaaactcacaatgcaagggccgtgccagggaaactacctggaactgtaaggagaagattgtcattaataaaagcagaagtgaagtatgtgaacgctgaaaaggctaaggaacttgtggaagctgatggatatactgttcttgatgtgcgggacaaaactcagtttgtgcgagctcacataaaatcttgttctcatgtgcctctttttgttgaaaacaaagacaatgatcccggtactattataaaaaggcagctgcacaataatttttctgggttgttctttgggttaccattcactaagccaaatcctgagtttgtgcaatctgttaagagccagtttccgcctgaaagtaaactcttggttgtatgtcaggaaggactgaggtctgctgcagcagcaagtaagttagaagaagctggtttcgaaaatatagcatgcataacatctggccttcaaactgtaaaaccagggacttttgattctgtagggtctacagagttggagaatgccggcaaagctggcttggtgacaatccaaggaaaaatctcaactgtgctgggaactattcttgtttgtgcatatatattcgttaccttcttccctgaccaagcagagaagctattccaattggcccctacaggctaagcctaataaatccattgtagtctttcttgattttgttcttcctcactcattatgcatttatgcatgtagcataattaaggaacgtgtgattagaattgaggggaaaaaacatgaaatgtgaataaagtaatgtaagaattagtaatgtgagtatatggctatgatgctcaagaaaccaaatggtttatatcactggtagtattctccattaagcaagaagtatacccatttccattgtttaagataccagttatttcgaatttacgttcctagggaagtatgttgccttgtactggatggcataacccgctagattgccttcatctgtacttacaaatgactttgttgacacatttgaattttgaatcctctaatgagattgtattaaatgtatattcactccgttgt

SEQ ID NO: 18559 - protein, 227 aa, Glycine max
SSSSNLGTCWLVLKTHNARAVPGKLPGTVRRRLSLIKAEVKYVNAEKAKELVEADGYTVLDVRDKTQFVRAHIKSCSHVPLFVENKDNDPGTIIKRQLHNNFSGLFFGLPFTKPNPEFVQSVKSQFPPESKLLVVCQEGLRSAAAASKLEEAGFENIACITSGLQTVKPGTFDSVGSTELENAGKAGLVTIQGKISTVLGTILVCAYIFVTFFPDQAEKLFQLAPTG

SEQ ID NO: 18560 - DNA, 1536 bp, Glycine max
atttctgaaggagctttcaattgaagggcttgatgggattgtgagtattaatgctgattttttcgggagtagctcttgttcatttacatccttggaatctttgaggttctccaatatgaaggaatgggaagaatgggaatgtaaaggtgtgacaggtgcttttccacgtcttcaacgtctttctatagggtattgtcccaagctgaaaggtttgcctccccttggacttttgccatttctgaaggagctttcaattgaagggcttgatgggattgtgagtattaatgctgattttttcgggagtagctcttgttcatttacatccttggaatctttgaagttctccgatatgaaggaatgggaagaatgggaatgtaaaggtgtgacaggtgcttttccacgtcttcaacgtctttctataaggtattgtcccaagctgaaaggtttgcctccccttggacttttgccatttctgaaggagctttcaattcaaaggcttgatgggattgtgagtattaatgctgattttttcgggagtagctcttgttcatttacatccttggaatctttggatttctacgatatgaaggaatgggaagaatgggaatgtaaaggtgtgacaggtgcttttccacgtcttcaacgtctttctatatataattgtcccaagctgaaatggcacttgccagagcaactatctcatttaaatcgtctagggatttctggatgggactctctaacgaccattccgctagatatcttcccaatactcagggagcttgatatcagggagtgtcttaatctacaggggatttcacaggggcagactcataatcatctccagcgtctgagtatgagagagtgcccccaattagaatcattgcctgaaggaatgcatgtcctccttccatctcttgattatctgggcataattcgttgtccaaaagttgaaatgtttcccgaaggaggtttgccatcaaatttaaaaaatatgcatctctatggtagttacaaacttatgtcctcattgaaaagtgccttgggaggcaatcactctctagaaaccttacggattggaggagtggatgttgagtgtcttcctgaggaaggtgtactgccacactctcttgttactctagacatcagtcattgtgaagatctaaaaagactggactacaaaggtctctgccacctctcctctctcaaggaattgactctttggaactgccgcaggctccaatgcttaccagaggagggtctgcccaaatccatttcaactttgacaattcggaggtgtgggtttctcaaacaacgttgccgggaaccccaaggcgaagactggccaaagattgctcacattgaagacgtggatataaggtagtgaggttgattataaagaataatggtgaaagatgtagatgcttctctattgcctgcaatttactaattaattgttttctaaacttatttttgctttctgcttgctggacgccgccgctctgttatttattattcgactaaataattgtttaatac

SEQ ID NO: 18561 - protein, 459 aa, Glycine max
FLKELSIEGLDGIVSINADFFGSSSCSFTSLESLRFSNMKEWEEWECKGVTGAFPRLQRLSIGYCPKLKGLPPLGLLPFLKELSIEGLDGIVSINADFFGSSSCSFTSLESLKFSDMKEWEEWECKGVTGAFPRLQRLSIRYCPKLKGLPPLGLLPFLKELSIQRLDGIVSINADFFGSSSCSFTSLESLDFYDMKEWEEWECKGVTGAFPRLQRLSIYNCPKLKWHLPEQLSHLNRLGISGWDSLTTIPLDIFPILRELDIRECLNLQGISQGQTHNHLQRLSMRECPQLESLPEGMHVLLPSLDYLGIIRCPKVEMFPEGGLPSNLKNMHLYGSYKLMSSLKSALGGNHSLETLRIGGVDVECLPEEGVLPHSLVTLDISHCEDLKRLDYKGLCHLSSLKELTLWNCRRLQCLPEEGLPKSISTLTIRRCGFLKQRCREPQGEDWPKIAHIEDVDIR

SEQ ID NO: 18562 - protein, 421 aa, Glycine max
MKEWEEWECKGVTGAFPRLQRLSIGYCPKLKGLPPLGLLPFLKELSIEGLDGIVSINADFFGSSSCSFTSLESLKFSDMKEWEEWECKGVTGAFPRLQRLSIRYCPKLKGLPPLGLLPFLKELSIQRLDGIVSINADFFGSSSCSFTSLESLDFYDMKEWEEWECKGVTGAFPRLQRLSIYNCPKLKWHLPEQLSHLNRLGISGWDSLTTIPLDIFPILRELDIRECLNLQGISQGQTHNHLQRLSMRECPQLESLPEGMHVLLPSLDYLGIIRCPKVEMFPEGGLPSNLKNMHLYGSYKLMSSLKSALGGNHSLETLRIGGVDVECLPEEGVLPHSLVTLDISHCEDLKRLDYKGLCHLSSLKELTLWNCRRLQCLPEEGLPKSISTLTIRRCGFLKQRCREPQGEDWPKIAHIEDVDIR

SEQ ID NO: 18563 - protein, 343 aa, Glycine max
MKEWEEWECKGVTGAFPRLQRLSIRYCPKLKGLPPLGLLPFLKELSIQRLDGIVSINADFFGSSSCSFTSLESLDFYDMKEWEEWECKGVTGAFPRLQRLSIYNCPKLKWHLPEQLSHLNRLGISGWDSLTTIPLDIFPILRELDIRECLNLQGISQGQTHNHLQRLSMRECPQLESLPEGMHVLLPSLDYLGIIRCPKVEMFPEGGLPSNLKNMHLYGSYKLMSSLKSALGGNHSLETLRIGGVDVECLPEEGVLPHSLVTLDISHCEDLKRLDYKGLCHLSSLKELTLWNCRRLQCLPEEGLPKSISTLTIRRCGFLKQRCREPQGEDWPKIAHIEDVDIR

SEQ ID NO: 18564 - DNA, 861 bp, Glycine max
gatttgtgcttatagaggtacttcagattttgggggtccaagttttcctgttaatgagataaagccagtcgtacaccccccgtcctttgttcaacccaaatctactgctcagcctggtagtatggttccacctgttattgatctaactggacttgaagtttcagataatggccagaaaatgattactgaccttatgactaactatgacacaaatgttcgaggcaacaagaagacaagttcctgtaatcacttagctgcagaaaatttcgaccttcctcagcatgccatgcagcagcaacaggacaacttcattcgcggtcaaggaatcactgcagaaggcaacatctttgatgaagctaacatgcccaacaatcatcacatgtttgcaagagaagaaggtcaatttgaccgtttcaaagctttgaatgctccctttgagaccaatcacaacaacaacaacttccactcaatgtttggttccctttgtgatttggcatcatttgatttcaaggaggatatgcaaggagtagggatggatactcttcagaaacagccagatatttcaatatggtaccagtgaaaatgacaagttgaatctggaagctcgttatccacatcatgaattcttattttcatgtgatgttccttcagccaagtcttactggaattttcttcacatgtaattctgtaggcctagtagaactagatatttttgacttatcctttacaggtctagtagttgttacaataaaaaacttatatgtttagcccttgtgtgctttttttttttttatcagtctagccttgttacttaagattactattctatgcaagactgggatataaataagagttgaagtt

SEQ ID NO: 18565 - protein, 192 aa, Glycine max
ICAYRGTSDFGGPSFPVNEIKPVVHPPSFVQPKSTAQPGSMVPPVIDLTGLEVSDNGQKMITDLMTNYDTNVRGNKKTSSCNHLAAENFDLPQHAMQQQQDNFIRGQGITAEGNIFDEANMPNNHHMFAREEGQFDRFKALNAPFETNHNNNNFHSMFGSLCDLASFDFKEDMQGVGMDTLQKQPDISIWYQ

SEQ ID NO: 18566 - protein, 152 aa, Glycine max
MVPPVIDLTGLEVSDNGQKMITDLMTNYDTNVRGNKKTSSCNHLAAENFDLPQHAMQQQQDNFIRGQGITAEGNIFDEANMPNNHHMFAREEGQFDRFKALNAPFETNHNNNNFHSMFGSLCDLASFDFKEDMQGVGMDTLQKQPDISIWYQ

SEQ ID NO: 18567 - protein, 133 aa, Glycine max
MITDLMTNYDTNVRGNKKTSSCNHLAAENFDLPQHAMQQQQDNFIRGQGITAEGNIFDEANMPNNHHMFAREEGQFDRFKALNAPFETNHNNNNFHSMFGSLCDLASFDFKEDMQGVGMDTLQKQPDISIWYQ

SEQ ID NO: 18568 - DNA, 932 bp, Glycine max
tgaggaattcttctgtttctgcagagagttccgcgaggcttcaaaatgcagaaacaaggttgaaagaacttaaatctgccttggcagcacttggtagagaagcaacctctgctatgttgtctgtcgaagaacagcagcaacagatgactctccagagccttcgtacaatggtggatgctgagagatcctatcatcagcatgtccttgttattctagagaaactatatactgagataattgaggacagacaaccaaaagaggctacatcatttacactgccaaaagatggatataatcaacctgcagatgagaatgctaattcaagtggcattgattataaacacaacagtcaaacagccacatacttttttgcaaaggtcgtacatccatttgatgctcaagctgagggggagttaagcctatcagttgatgattttgttgtagttcgtcaggttggacccaatggatggtctgaaggagaatgcaaaggcaatgctggatggtttccctctgcttatgtagagagacaggacatgataccagccagcaagataacagaataacttcacaggataccaacattggtcttttgattaggtgaggcaaaaattgtatattataatcacggaatagatgcagcatttgaaaagccatagcatgtgcttgccattatttttgggtggttctatcatctcatctgtgcaatatgttgtatatgcgagtcataattgaaataggaaatagcactggcagtttgaatatgtaattgatatgtttattattggcatttgctttggccctttggtcaggaacttagttttatgctgttcatattctatagcattgtttgtaattctaaatgaagatatggcgagaaacattgtatttaagaaatcttcctatgcatcaatatgaaaaaagtaatttgtatc

SEQ ID NO: 18569 - protein, 186 aa, Glycine max
RNSSVSAESSARLQNAETRLKELKSALAALGREATSAMLSVEEQQQQMTLQSLRTMVDAERSYHQHVLVILEKLYTEIIEDRQPKEATSFTLPKDGYNQPADENANSSGIDYKHNSQTATYFFAKVVHPFDAQAEGELSLSVDDFVVVRQVGPNGWSEGECKGNAGWFPSAYVERQDMIPASKITE

SEQ ID NO: 18570 - protein, 149 aa, Glycine max
MLSVEEQQQQMTLQSLRTMVDAERSYHQHVLVILEKLYTEIIEDRQPKEATSFTLPKDGYNQPADENANSSGIDYKHNSQTATYFFAKVVHPFDAQAEGELSLSVDDFVVVRQVGPNGWSEGECKGNAGWFPSAYVERQDMIPASKITE

SEQ ID NO: 18571 - protein, 139 aa, Glycine max
MTLQSLRTMVDAERSYHQHVLVILEKLYTEIIEDRQPKEATSFTLPKDGYNQPADENANSSGIDYKHNSQTATYFFAKVVHPFDAQAEGELSLSVDDFVVVRQVGPNGWSEGECKGNAGWFPSAYVERQDMIPASKITE

SEQ ID NO: 18572 - DNA, 1282 bp, Glycine max
ataaaacctcttccatctttcctcagttcttctaaccaatccgaacccgaaaaatggaaaaggagcgacccgcacggagacccgacccgtttcacgcacgaccgccgccgccgccgtcggagacgccgcgcgaccccatggagttcctttcccggtcgtggagcgcctcggccctcgaagtatccaaggcactcgcatctcagcaacaacttccaccttcttccaacaacgttagcatcgtttgttataataataattctaatgcgtctataatactcgaagacatagctggtgaagtggaagagtctgctgcaactgtttctggcaaccctttctccttcgcttcttctgaaacctctcagatgatcatggaccgcatcatgtcccactccgaggtatcaccacgcacctcaggaagactctctcacagcagtggccctcttaatggctccctaacagatagccctccggtttctccttctgaaattgacgatttcaagtataaccgttccaacaacaaccacaacactgtcaacatgatcaccggcttgaatggtcaatactggggtgccggcggcgcggcgacgaccgccggtggtggcaagacggtggggaggtggctgaaggacaggaaggagaagaagaaggaggaaactagggcccacaatgctcagctccacgcggcggtttcggttgccggggtcgccgccgcgatggccgccatcgccgccgccacggctgcctcgtcgggctccaggaaggacgagcagatggcgaagaccgacatggcggtggcgtcagcagcgacgctggtggcggcccagtgtgtggaggctgccgaggccatgggggccgagcgcgaccacctggcctcggtggtcagctccgccgtgaatgtgaggtccgccggtgacatcacgacgttgacggcagctgcggccacagctttacgtggggctgccacgttgaaagcaagggtccttaaggaggtttggaacatagcagctgtgattcctgtggagaagaatttgggcggtggcagtggtggcggcgataatggtaatggtagcaatggtagctctaatagtagcttcagtggtgaaattgtaccagaagaaaatttcttggggatttgtagcagagaattgctagccagaggttgtgaacttctcaagcgcacacgcactggtgaactgcattggaaaattgtatctgtttacataaacaggatgaatcaggttatggtgaagatgaagagcaggcacgttgctgggaccatcac

SEQ ID NO: 18573 - protein, 409 aa, Glycine max
MEKERPARRPDPFHARPPPPPSETPRDPMEFLSRSWSASALEVSKALASQQQLPPSSNNVSIVCYNNNSNASIILEDIAGEVEESAATVSGNPFSFASSETSQMIMDRIMSHSEVSPRTSGRLSHSSGPLNGSLTDSPPVSPSEIDDFKYNRSNNNHNTVNMITGLNGQYWGAGGAATTAGGGKTVGRWLKDRKEKKKEETRAHNAQLHAAVSVAGVAAAMAAIAAATAASSGSRKDEQMAKTDMAVASAATLVAAQCVEAAEAMGAERDHLASVVSSAVNVRSAGDITTLTAAAATALRGAATLKARVLKEVWNIAAVIPVEKNLGGGSGGGDNGNGSNGSSNSSFSGEIVPEENFLGICSRELLARGCELLKRTRTGELHWKIVSVYINRMNQVMVKMKSRHVAGTI

SEQ ID NO: 18574 - protein, 381 aa, Glycine max
MEFLSRSWSASALEVSKALASQQQLPPSSNNVSIVCYNNNSNASIILEDIAGEVEESAATVSGNPFSFASSETSQMIMDRIMSHSEVSPRTSGRLSHSSGPLNGSLTDSPPVSPSEIDDFKYNRSNNNHNTVNMITGLNGQYWGAGGAATTAGGGKTVGRWLKDRKEKKKEETRAHNAQLHAAVSVAGVAAAMAAIAAATAASSGSRKDEQMAKTDMAVASAATLVAAQCVEAAEAMGAERDHLASVVSSAVNVRSAGDITTLTAAAATALRGAATLKARVLKEVWNIAAVIPVEKNLGGGSGGGDNGNGSNGSSNSSFSGEIVPEENFLGICSRELLARGCELLKRTRTGELHWKIVSVYINRMNQVMVKMKSRHVAGTI

SEQ ID NO: 18575 - protein, 306 aa, Glycine max
MIMDRIMSHSEVSPRTSGRLSHSSGPLNGSLTDSPPVSPSEIDDFKYNRSNNNHNTVNMITGLNGQYWGAGGAATTAGGGKTVGRWLKDRKEKKKEETRAHNAQLHAAVSVAGVAAAMAAIAAATAASSGSRKDEQMAKTDMAVASAATLVAAQCVEAAEAMGAERDHLASVVSSAVNVRSAGDITTLTAAAATALRGAATLKARVLKEVWNIAAVIPVEKNLGGGSGGGDNGNGSNGSSNSSFSGEIVPEENFLGICSRELLARGCELLKRTRTGELHWKIVSVYINRMNQVMVKMKSRHVAGTI

SEQ ID NO: 18576 - DNA, 1757 bp, Glycine max
taggttttatggtgcccttatcaggttgcagcaaaattggaaggttaaacggcaacgacaggcagctattgttccagggaatgaaggcttcacctttgatctcttagataactcatatgaccaagcagctattattcgctcattgtctatgtccactgttcgagtcaatcatgatgcagctggaatgctggcaataaatgtgtctcctgatttatgccattctctccaatttggttttgttggtgcacaatcagatgatacctggagaaaatccaatgaaaacaaatcccacttttcaggtgagcataatttgggagaaatgggtgaagagtccttaagtgatgaagagtgtgttaagaaaacgaattcactccttcgtgaagtacatgaagcaattttcaatgaacaggtgtttgatctggtgaatcgagaagcatttaacacagttgcaggtgtcagtgtgactggaatacgggaaaactatttacaattaagcttaggtcaaggaacctctgtgtacttaacacttgtgtccaatagtcaagatcattctacagttgaagatgaactcaatgataatgtagaaaatgcaattttacctctggaatcatctgatggaatgaagcgtgaagccaaacagaacacctctaagaaagggcagttttctaattccatctgctatgagatttatattcaacagatttttcatgaacatatatttggaaaaggtgacgaaaaggcaatttcctctggaaatcgtttgtctggcgtacaggcaagggatggatccagtcttcttggtcatttttttaaatctttggctcacaggatattttcaactaaagttcttgcagagctggaaaatgtggtatgcaaggtcccatatctacagctaatttctaatcccacatggaattctcgggcttcgtcatggacactctacatggaggttccccaatctattcttcgtggtagccaaaccaaaacatcagattattacgagaaaaatgctgccaagcgtcagttttggactaaggtggtggtaaatgatgattgcatcaacgttaaagctgaaggttctccaaatgttgcaggtttgttcaagggaaagattgaggaaacccattcaataaacaaatataactgcaacttagctgatcttcctgtgattattctgcagcaggttgctagccaaattattaattggctctatcaggaagctatgatggttgggataaaagtaaatcgagacttcttatgcctatctttggagctgaagcagggtgaaacacttggccttgttgcaagtgttgatccagaagatagtgaagagtgtatatcttggtggttggtcatggaggacagttttgctgaggagcaaaagcttcatatgagcatcacggatggtgcatctgaatataggaaattcctaggtcacttgtctcttgatttgttatacgcaacactgatcgacttggttggcttgtgcagtggtggaggcggccaatgaagttgtgtcaatgaatgtttttcttgcactttgtcaagtggaagatctaggaggtctcgtgcaacaactgttttctgtctatttatgagaaataaatgagaagagatgaagagaaaaatgttaaggtttttctttaaaaaaaaaaaaagaatcttcagtctgctatgagaagctttttcttttctaccttgatttataatgagatgttataagtaaaaatagactgttagctgcaattaatgtatat

SEQ ID NO: 18577 - protein, 502 aa, Glycine max
RFYGALIRLQQNWKVKRQRQAAIVPGNEGFTFDLLDNSYDQAAIIRSLSMSTVRVNHDAAGMLAINVSPDLCHSLQFGFVGAQSDDTWRKSNENKSHFSGEHNLGEMGEESLSDEECVKKTNSLLREVHEAIFNEQVFDLVNREAFNTVAGVSVTGIRENYLQLSLGQGTSVYLTLVSNSQDHSTVEDELNDNVENAILPLESSDGMKREAKQNTSKKGQFSNSICYEIYIQQIFHEHIFGKGDEKAISSGNRLSGVQARDGSSLLGHFFKSLAHRIFSTKVLAELENVVCKVPYLQLISNPTWNSRASSWTLYMEVPQSILRGSQTKTSDYYEKNAAKRQFWTKVVVNDDCINVKAEGSPNVAGLFKGKIEETHSINKYNCNLADLPVIILQQVASQIINWLYQEAMMVGIKVNRDFLCLSLELKQGETLGLVASVDPEDSEECISWWLVMEDSFAEEQKLHMSITDGASEYRKFLGHLSLDLLYATLIDLVGLCSGGGGQ

SEQ ID NO: 18578 - protein, 453 aa, Glycine max
MSTVRVNHDAAGMLAINVSPDLCHSLQFGFVGAQSDDTWRKSNENKSHFSGEHNLGEMGEESLSDEECVKKTNSLLREVHEAIFNEQVFDLVNREAFNTVAGVSVTGIRENYLQLSLGQGTSVYLTLVSNSQDHSTVEDELNDNVENAILPLESSDGMKREAKQNTSKKGQFSNSICYEIYIQQIFHEHIFGKGDEKAISSGNRLSGVQARDGSSLLGHFFKSLAHRIFSTKVLAELENVVCKVPYLQLISNPTWNSRASSWTLYMEVPQSILRGSQTKTSDYYEKNAAKRQFWTKVVVNDDCINVKAEGSPNVAGLFKGKIEETHSINKYNCNLADLPVIILQQVASQIINWLYQEAMMVGIKVNRDFLCLSLELKQGETLGLVASVDPEDSEECISWWLVMEDSFAEEQKLHMSITDGASEYRKFLGHLSLDLLYATLIDLVGLCSGGGGQ

SEQ ID NO: 18579 - protein, 441 aa, Glycine max
MLAINVSPDLCHSLQFGFVGAQSDDTWRKSNENKSHFSGEHNLGEMGEESLSDEECVKKTNSLLREVHEAIFNEQVFDLVNREAFNTVAGVSVTGIRENYLQLSLGQGTSVYLTLVSNSQDHSTVEDELNDNVENAILPLESSDGMKREAKQNTSKKGQFSNSICYEIYIQQIFHEHIFGKGDEKAISSGNRLSGVQARDGSSLLGHFFKSLAHRIFSTKVLAELENVVCKVPYLQLISNPTWNSRASSWTLYMEVPQSILRGSQTKTSDYYEKNAAKRQFWTKVVVNDDCINVKAEGSPNVAGLFKGKIEETHSINKYNCNLADLPVIILQQVASQIINWLYQEAMMVGIKVNRDFLCLSLELKQGETLGLVASVDPEDSEECISWWLVMEDSFAEEQKLHMSITDGASEYRKFLGHLSLDLLYATLIDLVGLCSGGGGQ

SEQ ID NO: 18580 - DNA, 1185 bp, Glycine max
aacgctggatgcaagacagcagcttccaacattataatgtcacttgcagtaatgttgacattgttattcctgacacccttgttccattacactcccctggtggtgctatcagctattatcgtatctgcaatgcttggactcatagattatgaagcagccatccatctatttaaggttgacaaatttgactttgtggtgtgcatgagtgcatacattggcgtggtctttggcagtgttgaaattggcttagtcatagctattgtaatatctgtacttcgggtacttctatttattgcaaggccaaggacattcgttttgggcaacattccaaattctgtgatataccgaaatgttgagcactatcaaaatgcaaaacatgttcctggaatgctaattctagagattgatgcaccaatttactttgccaatgccagctatttaagagaaaggatcacaaggtggattgatgaagaagaagaaagaattaaagctacaggggagactagtttgcagtatgttataattgatatgagtgctgttggaaacattgatacaagtggaataagtatgcttgaagaggtgaagaagattacagagagaagagagctacagcttgttttggtcaatcctgtaagtgaagtgatgaagaaactgaacaaatcgaagttccaaaatcatttagggaagaaatggatctatctgactgttgaagaggccgttggagcatgcaacttcaatctacgtgcaagcaaaacgaacccaaagaaagatgaaacagagggttggaacaatgtgtgactgagtcatatgccaaagagtattctaaataactcaaaaagcttattcgttttcgtcttagtaatgttaccactacaatgtgtggcatgagaatttctgaatcacgccgaagaagttttaaaggcataggaaaatgaaagatgcaagggtcttctaatttctcaactctgcatccttagttagaagaaaatctcctatgtataggctgttgaaataatctttacgtatcatgcttgataatatattcaagagaaatgctagcaacacactctcagacacactcttttgaacacatgtaaagaggtaaagaagtgtgttgctagcactcctccatattcaattgtaaagtaattgccatgagaatttaaaaatcctttggaaacgtcc

SEQ ID NO: 18581 - protein, 265 aa, Glycine max
NAGCKTAASNIIMSLAVMLTLLFLTPLFHYTPLVVLSAIIVSAMLGLIDYEAAIHLFKVDKFDFVVCMSAYIGVVFGSVEIGLVIAIVISVLRVLLFIARPRTFVLGNIPNSVIYRNVEHYQNAKHVPGMLILEIDAPIYFANASYLRERITRWIDEEEERIKATGETSLQYVIIDMSAVGNIDTSGISMLEEVKKITERRELQLVLVNPVSEVMKKLNKSKFQNHLGKKWIYLTVEEAVGACNFNLRASKTNPKKDETEGWNNV

SEQ ID NO: 18582 - protein, 253 aa, Glycine max
MSLAVMLTLLFLTPLFHYTPLVVLSAIIVSAMLGLIDYEAAIHLFKVDKFDFVVCMSAYIGVVFGSVEIGLVIAIVISVLRVLLFIARPRTFVLGNIPNSVIYRNVEHYQNAKHVPGMLILEIDAPIYFANASYLRERITRWIDEEEERIKATGETSLQYVIIDMSAVGNIDTSGISMLEEVKKITERRELQLVLVNPVSEVMKKLNKSKFQNHLGKKWIYLTVEEAVGACNFNLRASKTNPKKDETEGWNNV

SEQ ID NO: 18583 - protein, 248 aa, Glycine max
MLTLLFLTPLFHYTPLVVLSAIIVSAMLGLIDYEAAIHLFKVDKFDFVVCMSAYIGVVFGSVEIGLVIAIVISVLRVLLFIARPRTFVLGNIPNSVIYRNVEHYQNAKHVPGMLILEIDAPIYFANASYLRERITRWIDEEEERIKATGETSLQYVIIDMSAVGNIDTSGISMLEEVKKITERRELQLVLVNPVSEVMKKLNKSKFQNHLGKKWIYLTVEEAVGACNFNLRASKTNPKKDETEGWNNV

SEQ ID NO: 18584 - DNA, 1277 bp, Glycine max
aacctttcttcttctctctgttgctcctgccatgtgctgtctctgagttcaaactctacagttaagatgtccagtaacaatgcaacagctttggagattccaattctaagctactgtaaagttaaggtacgcggtgcagtatgcttggagcttcatagactcattgatagaatttcgcatgtaattttagccatcgaatctgctcgaccaaatagtacgttagcggtgcaggtgttgtgctcattaaacttcactttggctaaagccaagtcagttatcagacattgttccaagtgcagtaaactctacctggtatccttttgaacttgaaaccttgactctgatactgaaagatcaattttaacttaatctgatatatataaattgtctgctataacctttgaatatttcttaattagtattattttccatactagaaaatgttgttttgaaataactaacttaatttgcaaactggttaggcaatcacatcgcacaagatactttcaagatgtcaaaaagtaagaaatgcatttgaattttatttggctcagattcaaaatgcggttcaaactccattggctgatgaggttggttatactttttaattagccttttacaccatttggaatatgttatatgtttatagcttcttagtatttattttggccatatattgcacttgtttgtattttcatgacttgtgatttgtgcaacttgataatatttgagcttggaattgtcctacagatatctgcaatactacatgaccttagggatacagaattttccctggaatttgcagaagacgaggctaggaaagtactactttcactgcttgagaagaattttccagatgcagcttctatacaaaaggaagaacttgaagctattcaaattgcaacttctagattggagatcaaatccccgttttctctcttagtagagaaagcaacccttaagaagcaacttgaagaagtcagtgaaaaaaacctaaaggagaaggagcttctacaataccttttgtatctcttggtcaaacatgggaaatccatttgtcagtttcaaaatggaagccactccccgaaacatgaatgtcatgaccagtcctttgagaatgagttggttgtggatgaatcaagtcaatcactctcttaaaccaaaagttggagatttatgattgtttagcacttgaggttgttttgttcgtactatattactgtctagtgtccacagaaggtgatttgtgacttaaaacaaacatttctattttattc

SEQ ID NO: 18585 - protein, 153 aa, Glycine max
MTCDLCNLIIFELGIVLQISAILHDLRDTEFSLEFAEDEARKVLLSLLEKNFPDAASIQKEELEAIQIATSRLEIKSPFSLLVEKATLKKQLEEVSEKNLKEKELLQYLLYLLVKHGKSICQFQNGSHSPKHECHDQSFENELVVDESSQSLS

SEQ ID NO: 18586 - protein, 107 aa, Glycine max
NLSSSLCCSCHVLSLSSNSTVKMSSNNATALEIPILSYCKVKVRGAVCLELHRLIDRISHVILAIESARPNSTLAVQVLCSLNFTLAKAKSVIRHCSKCSKLYLVSF

SEQ ID NO: 18587 - protein, 85 aa, Glycine max
MSSNNATALEIPILSYCKVKVRGAVCLELHRLIDRISHVILAIESARPNSTLAVQVLCSLNFTLAKAKSVIRHCSKCSKLYLVSF

SEQ ID NO: 18588 - DNA, 1423 bp, Glycine max
gccttcttcggagaaccaaatcgtttgagcaccacgcgcttttcacgcgcagggggagtttgagaagggcttgcagcgctagcttggagcctttctccgacgaagagttcgcgaagaagattgaagatctcgcactcaagtttcagctctctgatgaaaataccaacgcgaacgatttggattcggaggattttcaggagatttctctgtcgtcgttgaatttcgctgaggagttcgagccgccggaggagatttttccggcaaacatcgaacggaaagcgaacagcgttgagcttccgttttcgctgaggataatcaagaagaagctgcagtggaaggaagggttcagagaggcaggggaatccgcgtattgctctgtcaagaaagcgttctcttccatggtttttatcatcagggagcttcacagtttcactatgcagatgagggagtttttgttctacgaagatctgcaagggattctcgaaagggtgcagaacgaaatgcacgcgtccttcgtgtggctgttccagcaagttttctctcacactccgactctgatggtgtatgtgatgattctcctagcgaattttacggttcactcaatggggaacaacgccgccatcgccgccgtggctccgccgccggtaacatcagtcgtggaggctcacgaccaaaggggtcatattcagagtcataacattgattcctcttccatcaagacgttctctgtttcgaacggtaaaaacacagcctacgtcggtggaggaaatggcggcggcgggaaggtccgtccggcggggaatggaaccgatggggacggccggttcgacaggtcgcgacacggtacggtattctccgacggcggtgcttcgtcgcaggtatataaaacaggggataaaacagagtcagtgtcagggcaagaggaggaggaagagttgaatctgtggaacgcgatggtggaagaggcttcgagaatggagggtttggatcgcgatgttatgaaacggttcgtttcgccggtgatggcgagaattgaatccgatgactatgcagagtatctgagaacagagcttgtgtaccaaactgggttgtctcaagaccccagcaacactctcctccttgtcaactatgcccagttcctctacctcgttgttcacgattttgacagagcggaagagttgttcaagagagcgatagaggtggagccaccagacgcagaggcatataataaatacgccaagtttctatggaaagtgaagaacgatttgtgggctgcagaagaaacctatttggaggctatttcagctgatcctgataacgcattctatgctgctgactatgctcattttttatggaacactggtggtgaagacacatgcttccctttatcctccccagacaactccaaagaagtttaatcaac

SEQ ID NO: 18589 - protein, 471 aa, Glycine max
LLRRTKSFEHHALFTRRGSLRRACSASLEPFSDEEFAKKIEDLALKFQLSDENTNANDLDSEDFQEISLSSLNFAEEFEPPEEIFPANIERKANSVELPFSLRIIKKKLQWKEGFREAGESAYCSVKKAFSSMVFIIRELHSFTMQMREFLFYEDLQGILERVQNEMHASFVWLFQQVFSHTPTLMVYVMILLANFTVHSMGNNAAIAAVAPPPVTSVVEAHDQRGHIQSHNIDSSSIKTFSVSNGKNTAYVGGGNGGGGKVRPAGNGTDGDGRFDRSRHGTVFSDGGASSQVYKTGDKTESVSGQEEEEELNLWNAMVEEASRMEGLDRDVMKRFVSPVMARIESDDYAEYLRTELVYQTGLSQDPSNTLLLVNYAQFLYLVVHDFDRAEELFKRAIEVEPPDAEAYNKYAKFLWKVKNDLWAAEETYLEAISADPDNAFYAADYAHFLWNTGGEDTCFPLSSPDNSKEV

SEQ ID NO: 18590 - protein, 339 aa, Glycine max
MVFIIRELHSFTMQMREFLFYEDLQGILERVQNEMHASFVWLFQQVFSHTPTLMVYVMILLANFTVHSMGNNAAIAAVAPPPVTSVVEAHDQRGHIQSHNIDSSSIKTFSVSNGKNTAYVGGGNGGGGKVRPAGNGTDGDGRFDRSRHGTVFSDGGASSQVYKTGDKTESVSGQEEEEELNLWNAMVEEASRMEGLDRDVMKRFVSPVMARIESDDYAEYLRTELVYQTGLSQDPSNTLLLVNYAQFLYLVVHDFDRAEELFKRAIEVEPPDAEAYNKYAKFLWKVKNDLWAAEETYLEAISADPDNAFYAADYAHFLWNTGGEDTCFPLSSPDNSKEV

SEQ ID NO: 18591 - protein, 327 aa, Glycine max
MQMREFLFYEDLQGILERVQNEMHASFVWLFQQVFSHTPTLMVYVMILLANFTVHSMGNNAAIAAVAPPPVTSVVEAHDQRGHIQSHNIDSSSIKTFSVSNGKNTAYVGGGNGGGGKVRPAGNGTDGDGRFDRSRHGTVFSDGGASSQVYKTGDKTESVSGQEEEEELNLWNAMVEEASRMEGLDRDVMKRFVSPVMARIESDDYAEYLRTELVYQTGLSQDPSNTLLLVNYAQFLYLVVHDFDRAEELFKRAIEVEPPDAEAYNKYAKFLWKVKNDLWAAEETYLEAISADPDNAFYAADYAHFLWNTGGEDTCFPLSSPDNSKEV

SEQ ID NO: 18592 - DNA, 1277 bp, Glycine max
aattcttccactaccccttttcgttattcttcttcaattctcccaaaaatcatatttttacactctgagtggtttttcagcttgtgggtcgatgtcaactgtgtcaaaagatgacaacttggcgctttcttcggaggactcttcatgcccagaagagtctgagcttgaattgggtcttgggttgagcctctcctctggctcttcatcaaaatctcatcaccaccatcatgctagaatttacactgctaaggattttccttcttctgcagcagcagcagcagcagcagcatcatcaccttcctcttcttcttcctctcccaacaacatcactgctggcaccaagagagctgctgccgattctcttgttgccaataaccgtcccagtcaagtagttggatggcctccacttcgaacatatagagtgaatagcttcaatagccatgcaaaatcaactgaagtattcaactctgtggctgagaaaagtaagaccgataatactgtggccaggaagactaatgacaatggcaatgataataacataaatgccaaagagaaaagacacctcaggagttccctgtttgtcaaggtaaatatggatgggataccaattggaaggaaggttgatttgagtgctcatagttcctatgaaaccttagcgcaaacattagaggatatgtttaatgaatcaactacagtcaccacttgcaaaggatcaaatggtgaggattatggctttattatcggaggagaaaggcattcaaaattattagatggatcttccaagtttgtgctcacttatgaagacaaggaaggagattggatgcttgttggggatgttccctgggggatgttctttagctcagtgaggaggctaagaatcatgaggacatctgaggctaatggacttgcaccgagattggaagaaaacataaaaaagagatgcaagcccatatagattccgttttcatggctaaggacatgaaaaacctgtcaaatagatgaagaggaaaaaccgaaacagaaaagtataggaatactgcaaatgtatgaagttttgagatttgaatgataaaatctcacacttttgcttaattaattcagtttgtttgtttaatttggtatctttgttgcggcctctctattcatctcacttggagggtgcaggcatcatagattttcatgcaatacaactaatcatacaagtcagactgcttgttagtgttgtaaatgtggaatgtttgctaactatttcagctataaagttttgtttgaacttc

SEQ ID NO: 18593 - protein, 317 aa, Glycine max
ILPLPLFVILLQFSQKSYFYTLSGFSACGSMSTVSKDDNLALSSEDSSCPEESELELGLGLSLSSGSSSKSHHHHHARIYTAKDFPSSAAAAAAAASSPSSSSSSPNNITAGTKRAAADSLVANNRPSQVVGWPPLRTYRVNSFNSHAKSTEVFNSVAEKSKTDNTVARKTNDNGNDNNINAKEKRHLRSSLFVKVNMDGIPIGRKVDLSAHSSYETLAQTLEDMFNESTTVTTCKGSNGEDYGFIIGGERHSKLLDGSSKFVLTYEDKEGDWMLVGDVPWGMFFSSVRRLRIMRTSEANGLAPRLEENIKKRCKPI

SEQ ID NO: 18594 - protein, 287 aa, Glycine max
MSTVSKDDNLALSSEDSSCPEESELELGLGLSLSSGSSSKSHHHHHARIYTAKDFPSSAAAAAAAASSPSSSSSSPNNITAGTKRAAADSLVANNRPSQVVGWPPLRTYRVNSFNSHAKSTEVFNSVAEKSKTDNTVARKTNDNGNDNNINAKEKRHLRSSLFVKVNMDGIPIGRKVDLSAHSSYETLAQTLEDMFNESTTVTTCKGSNGEDYGFIIGGERHSKLLDGSSKFVLTYEDKEGDWMLVGDVPWGMFFSSVRRLRIMRTSEANGLAPRLEENIKKRCKPI

SEQ ID NO: 18595 - DNA, 1450 bp, Glycine max
aagaatctctgacgccgttgtcggttttctccggccacggctacttccaacggatggcgacgacgaccacggagttcgatctcgattacgagttccccgatctcgattacgaccttcgctatctcagtctcgccggaatcgatgccctcaccgctttccaaaacctattaccggatgcggcgatgacttcattttcagcttgtggactaatagaccctcattgttctcaaaacctcactcccatgcattccaccatcactgctaccattgattctcagtcaacgatttgcgccaccagtaatgttgggagcccaatctcggcaaataaaccagagggcagagagaatcgtaccaaaggagccacgagtggttcctctgagccgtctgatgaggatgatgaagcaggtgcttgtgaacagagcacaaatccagctgatatgaagcgccttagaaggaaggtttctaatcgcgactctgctagaaggtcaagaagaagaaagcaagcgcaattgtctgagcttgagttgcaggtaaactggtctgttgggggagtacatgaatggtatttaatttgataaataagggaataaaatatagtaatgttaattcttagagctaattcatatgaattgtgattaagataatggaacgttactcgctctccgaatctataatttgtttttggaatttaagacatcaacattcaatatttggtcaaatgcacaagaagcaatataatgtttttgtttttttttcgtttgaattttgctttctcaggttgaaaaactcaaagtggaaaatgcaaccctatacaagcagttcacggatgctagtcaacattttcgtgaggctgatacgaataatcgagtgctaaaatcagatgtagaagctttgagagccaaggtgaagttagcggaggatatggtcactaggagctcttttactacgttaaactatcagcttcttcagacacaacaacatcaaatgagcacacccccgcaactgaacacgactaatcttcgccgcatggcgcatgtttcgccaaccatcaccgtccatggtaatgatgcctcatacaatggtgtaacagttggtgaacagaattcatcagcacttggaaacttggatatgactttcaacaacatcaacaatggagtcatgaacaatgctatgagttgtgggactatttggccacttgattagactctagctatgttatttgtcttgtctaatttgattagtagcctatgttaatgtcaagctgtgttatttgtcttcgcttgattcctctttaatgatgcctctgtttaaaatggtgtcttctttcgttgtatctagttttgtataaaaggacatgattgctttatccatttctctgaatgtaattgtaaaaagacaaacatctcaccttgccatatatatcatctaatagacagacaacaaaacctac

SEQ ID NO: 18596 - protein, 190 aa, Glycine max
ESLTPLSVFSGHGYFQRMATTTTEFDLDYEFPDLDYDLRYLSLAGIDALTAFQNLLPDAAMTSFSACGLIDPHCSQNLTPMHSTITATIDSQSTICATSNVGSPISANKPEGRENRTKGATSGSSEPSDEDDEAGACEQSTNPADMKRLRRKVSNRDSARRSRRRKQAQLSELELQVNWSVGGVHEWYLI

SEQ ID NO: 18597 - protein, 173 aa, Glycine max
MATTTTEFDLDYEFPDLDYDLRYLSLAGIDALTAFQNLLPDAAMTSFSACGLIDPHCSQNLTPMHSTITATIDSQSTICATSNVGSPISANKPEGRENRTKGATSGSSEPSDEDDEAGACEQSTNPADMKRLRRKVSNRDSARRSRRRKQAQLSELELQVNWSVGGVHEWYLI

SEQ ID NO: 18598 - protein, 130 aa, Glycine max
MTSFSACGLIDPHCSQNLTPMHSTITATIDSQSTICATSNVGSPISANKPEGRENRTKGATSGSSEPSDEDDEAGACEQSTNPADMKRLRRKVSNRDSARRSRRRKQAQLSELELQVNWSVGGVHEWYLI

SEQ ID NO: 18599 - DNA, 1342 bp, Glycine max
agcgatgatgtggggtatcccgaagagttgaacttggacagaagttctggtgatgattctatggaagaggatttgcctgagactaagcaaattgattctaagtttaatgttgatgaacttaaagacaaaatagagattgaagagcctattgtgaaggaggaaagtagtactatagctgttggagatggtctgtctgcaggagaaagtgatatccaccaagatattgacattagtccagttgctccaacagagaaacgaaaatttaatgaacaagcatcagttgggaacaatgagcctgcaaaaaggcaacgcaggtggaacactgaaacagttaaaggtccagatgcacaaagcactactcccaggcctgctactacacctagagatgagccaattgctttgaaacgcaacttctctaggtctgattcctctgcaactgatgatacacctaaagaacgcattgttccaccaccacaaaggtccccaactaattccctcaggattgatcgttttctccgtccatttaccctaaaagcagtgcaagaacttcttggtaagactgggaatgtcagcagcttctggatggaccaaataaagacccattgctatgtgacttactcgtctgtggatgaagccattgagacacggaatgctgtatataatttgcaatggccaccaaatggtgggcgtctcttagttgctgagtatgttgatcctgaagaagtgaaaatgaagttagaacctcctcctactcaggctgcatctgtcagcactgtcccagcagttcctcctgcacctccctcacagccagagccttcccctcgtctgcacagggagccgcatccagttccagctactctcccacctccaccaccattgtcaaaacccccaccagtagcaagagaacggcttccatctccaccaccccttcctgagaaagttgacccacccattgtcactctggatgatctctttcgcaaaaccacagccactcctcggatctactatctacctttgtctgaagagcaagttgcctcaaaacttacagcacagggtaaaagcgcgaggcagtagataggccattagcctgcaaatcttcttcccttgcagcctttactgatttggatattttaattagtggtatgggattattttgaatgtcttggcagatctggtggtgttttgtctcgggaagaaattgcattgcttgagacttaaatttatttagttttagaagtcgtgaactaagagctaccggggttggatagattttccccactgtttgaactaggcttgagcgaacctttacctaaaattttatggaaaaatttgacgttagaat

SEQ ID NO: 18600 - protein, 357 aa, Glycine max
SDDVGYPEELNLDRSSGDDSMEEDLPETKQIDSKFNVDELKDKIEIEEPIVKEESSTIAVGDGLSAGESDIHQDIDISPVAPTEKRKFNEQASVGNNEPAKRQRRWNTETVKGPDAQSTTPRPATTPRDEPIALKRNFSRSDSSATDDTPKERIVPPPQRSPTNSLRIDRFLRPFTLKAVQELLGKTGNVSSFWMDQIKTHCYVTYSSVDEAIETRNAVYNLQWPPNGGRLLVAEYVDPEEVKMKLEPPPTQAASVSTVPAVPPAPPSQPEPSPRLHREPHPVPATLPPPPPLSKPPPVARERLPSPPPLPEKVDPPIVTLDDLFRKTTATPRIYYLPLSEEQVASKLTAQGKSARQ

SEQ ID NO: 18601 - protein, 337 aa, Glycine max
MEEDLPETKQIDSKFNVDELKDKIEIEEPIVKEESSTIAVGDGLSAGESDIHQDIDISPVAPTEKRKFNEQASVGNNEPAKRQRRWNTETVKGPDAQSTTPRPATTPRDEPIALKRNFSRSDSSATDDTPKERIVPPPQRSPTNSLRIDRFLRPFTLKAVQELLGKTGNVSSFWMDQIKTHCYVTYSSVDEAIETRNAVYNLQWPPNGGRLLVAEYVDPEEVKMKLEPPPTQAASVSTVPAVPPAPPSQPEPSPRLHREPHPVPATLPPPPPLSKPPPVARERLPSPPPLPEKVDPPIVTLDDLFRKTTATPRIYYLPLSEEQVASKLTAQGKSARQ

SEQ ID NO: 18602 - DNA, 1480 bp, Glycine max
gataatacagcacaaaaaaacttcacacacacaacacaacactttcctctctctctctctctctctctctctagggttccaagtttgaacttgaaagtgttgaactttctctagctttttcacaaatttggttgcacttgcaactgaggcaggaaagagggatcaccagggggcacgagaggaggaagaggaaagagaagaaaaaacaagaaaagtagagaaaggggtaggtgttgtacagaaatagaaattaaaaaattgagtgaaaaattaaaagggaaatttttttagaagaagagtgatagggatatggggaggggaagagtggagttgaagaggatagagaacaagataaacaggcaagtcacttttgcaaagaggagaaatgggcttctcaagaaagcctatgagctatctgttctctgtgatgctgaggttgccctcatcatcttctccaaccgaggcaagctttatgagttctgtagcagctctagcatgctcaaaacacttgaaaggtaccagaaatgcagctatggtgctgtggaagttagcaaacctgccaaagagctcgagcagagcagctaccgtgaatacttgaagctgaaagcaagatttgaatcacttcaaaggacccaaagaaaccttttaggggaagacttaggcccactgaatatcaaagaacttgagcatcttgaacggcaattggattcatctctaaagcaagtgaggtccacaaagacacaattcatgctggaccagttatctgatcttcaaaccaagatgttagtagaagcaaacagatccttgacagtgaagctggaagaaatcaattcaagaaaccactacaggcaatcatgggaagctggtgatcaaagtatgccatatggtggtggtggtccagagaattctcactctcattctcactctcagggcttcttccaaccattggaatgcaaccctacactacatattggtcctgattacaggtacaatgctgtagcttcagatcagataactgccacaactcaacctcaacaagtgagtggctttattccagggtggatgctttgaactaattaggctcagtgcattcaggtggagacataaaaaagcaaacaccttacaaaagggcaaaagccaaaaatgcatcttggtgttggcaaggtgtaaatgcaaccctgcttctacagttattttggtgtataagaaactgatgttgtgacttgttcaaacttttgaacttttagccatagacatatatggcaatttataacattaggtatcttttaaaggatccctttttattattaaatatctgaacgaccgatttcaattttcttctattgcattacatattaatcttggcttgatgtaagctcagttttcttctaggtttttgcttgcattataagtgaaagattgtaaaatttcatgaagctctgaaatctcttttcaatctttcataaaaaaaatatacatc

SEQ ID NO: 18603 - protein, 253 aa, Glycine max
MGRGRVELKRIENKINRQVTFAKRRNGLLKKAYELSVLCDAEVALIIFSNRGKLYEFCSSSSMLKTLERYQKCSYGAVEVSKPAKELEQSSYREYLKLKARFESLQRTQRNLLGEDLGPLNIKELEHLERQLDSSLKQVRSTKTQFMLDQLSDLQTKMLVEANRSLTVKLEEINSRNHYRQSWEAGDQSMPYGGGGPENSHSHSHSQGFFQPLECNPTLHIGPDYRYNAVASDQITATTQPQQVSGFIPGWML

SEQ ID NO: 18604 - protein, 191 aa, Glycine max
MLKTLERYQKCSYGAVEVSKPAKELEQSSYREYLKLKARFESLQRTQRNLLGEDLGPLNIKELEHLERQLDSSLKQVRSTKTQFMLDQLSDLQTKMLVEANRSLTVKLEEINSRNHYRQSWEAGDQSMPYGGGGPENSHSHSHSQGFFQPLECNPTLHIGPDYRYNAVASDQITATTQPQQVSGFIPGWML

SEQ ID NO: 18605 - DNA, 1136 bp, Glycine max
tcaagagaaactaatgcatcaaagtcaaacagctatccaggaaaagagtctggtggtttagcaaatggtactaaaagtgaaaaccttgtgtcagctggggtgtcagttgaaactattgctgcaaaaaggatccagactgcattccgagcttataaggctagaaaagctttacgtcgcatgaaaggatttacaaaactgaagatcctaacagaaggtttctctgttaaaaagcaagccagtacagctataacataccttcattcatggagcaagatacaagttgagattagagctcgccgaatctgtatggtaaccgaagacaagatcaggaggaagaaactggagtctcaattaaaactggaggcaaagcttcatgatctggaggttgaatggtgtggtggttctgaaaccaaggaggaaatccttggaaggatacatgacagggaagaagcagcagttaagcgtgaaagagccatggcatatgccttttcccatcagtggagggccaactctagtcagagccaattgctaggtaattatgaacttagcaaagctaattggggttggagttggaaggaacgctggattgctgctcgtccatgggaaagccgtgtccctagcttatccatcaccccgaagaaatctcaacacaagcagccaagcccgagcaaagttcagaaggataagaacacatcaacacctaaaactcccgtctcggttaaacctccttcagccaacgcaaaaggcacttcaaaagctaggagattgtcttatccaacaactgagaaaactgtggttcaaggagtgcaatgagttctctggatgggttgttaagataaatcacaatttttaagtatcaagcctttttgataacttgaaattttcaattggttacagtccataaaaagccaacttatttatttattgattgcttccaatttgtgcatatgagcgtgactgaaattcaaaccactgcagagaatgtgttaacagacctgcttgtgggtgcgatttgttgattgcttctgtttattatctttttcaatcttgtatattcaaattcaagagagattgtagatagaacaatatatctatttttttccttctctgttgtaatagaaaatttccaatatgtg

SEQ ID NO: 18606 - protein, 270 aa, Glycine max
SRETNASKSNSYPGKESGGLANGTKSENLVSAGVSVETIAAKRIQTAFRAYKARKALRRMKGFTKLKILTEGFSVKKQASTAITYLHSWSKIQVEIRARRICMVTEDKIRRKKLESQLKLEAKLHDLEVEWCGGSETKEEILGRIHDREEAAVKRERAMAYAFSHQWRANSSQSQLLGNYELSKANWGWSWKERWIAARPWESRVPSLSITPKKSQHKQPSPSKVQKDKNTSTPKTPVSVKPPSANAKGTSKARRLSYPTTEKTVVQGVQ

SEQ ID NO: 18607 - protein, 211 aa, Glycine max
MKGFTKLKILTEGFSVKKQASTAITYLHSWSKIQVEIRARRICMVTEDKIRRKKLESQLKLEAKLHDLEVEWCGGSETKEEILGRIHDREEAAVKRERAMAYAFSHQWRANSSQSQLLGNYELSKANWGWSWKERWIAARPWESRVPSLSITPKKSQHKQPSPSKVQKDKNTSTPKTPVSVKPPSANAKGTSKARRLSYPTTEKTVVQGVQ

SEQ ID NO: 18608 - protein, 168 aa, Glycine max
MVTEDKIRRKKLESQLKLEAKLHDLEVEWCGGSETKEEILGRIHDREEAAVKRERAMAYAFSHQWRANSSQSQLLGNYELSKANWGWSWKERWIAARPWESRVPSLSITPKKSQHKQPSPSKVQKDKNTSTPKTPVSVKPPSANAKGTSKARRLSYPTTEKTVVQGVQ

SEQ ID NO: 18609 - DNA, 952 bp, Glycine max
aaacagtgcaaattaacaatcgttgttacaactttgcaacacaaacgtatttggaatttggggctaggttcatatatcggttgctacttaattcattatctatggccagtgaggcagcaggtattacaagacgggatggaacaagaacaacctcagcagcagcagcagcagcagcggtggttgaagagatcgtacctaattcgggatggacagacgaccattcgagccattttcttcttgtggatcttcctgaatttaggaaggaggaggtgacccttcaagttgatggctccgatggccgtataattgtgaaaggcgaaaggcaaacaaatgaacagaaacgtattcactttgagctggcctttccattgccaccagattcagatgtggataatatatccggaaactttgacagtgaaatccttcacgtgcatgtccccaagcgagcttcacatcaagaacacagagaaagtggtcatgagatagagagagcttcaaataatggcagtgttggaaggccacaagaaattgtaagtgaggaacacgaagttgttaatgaggggagggatcatggtcatttatcaacacgaggaagatagagataagaaggaagaaagaagaaatgaaaatgcacagtacatggataatggttattctaaaaaattaacaaggaagttggagcaaaaacgcgacatgtcaagagctctagtggaggttttgatgagaaacaagggagttgttacaactgctgttgtggccttttcgtttgggttgtatgtatctaataagttccattcatggaatgaaccataagtggagtcccttcatgacatgcatccatgaataacatgcataccatactgcttttatttctcatgcttgagtatatagatacaatcaataatgtatgtaccatgctgatgttataagcaatgcaataacatgtcgacgc

SEQ ID NO: 18610 - protein, 198 aa, Glycine max
TVQINNRCYNFATQTYLEFGARFIYRLLLNSLSMASEAAGITRRDGTRTTSAAAAAAAVVEEIVPNSGWTDDHSSHFLLVDLPEFRKEEVTLQVDGSDGRIIVKGERQTNEQKRIHFELAFPLPPDSDVDNISGNFDSEILHVHVPKRASHQEHRESGHEIERASNNGSVGRPQEIVSEEHEVVNEGRDHGHLSTRGR

SEQ ID NO: 18611 - protein, 165 aa, Glycine max
MASEAAGITRRDGTRTTSAAAAAAAVVEEIVPNSGWTDDHSSHFLLVDLPEFRKEEVTLQVDGSDGRIIVKGERQTNEQKRIHFELAFPLPPDSDVDNISGNFDSEILHVHVPKRASHQEHRESGHEIERASNNGSVGRPQEIVSEEHEVVNEGRDHGHLSTRGR

SEQ ID NO: 18612 - DNA, 582 bp, Glycine max
catcagaaacccacactttcatgatgaggccttctgcttcttctggtttgcgcatgatgcgtaccagtcgcattacctgttgcaccctttctcagtcttctaagccagcccgcaaaatccgtggtatcatgaaaccccgcaaagtctcccccgagatggaagacctcgtcggcgctcccgagatggctcgaacccaagtcctcaaacggatttgggcttacattaaggacaacaatcttcaggaccctacagacaagaggactataaattgtgatgagaagctgaagaaggtgtttgcagggaaagatcaagttgagatgctagagattgctcgcttgattagccctcacttccttaaaagtgaaagtgaaagttaggtttttgtatgaaggtcatgcttaggtgtattggacaattacatttggcctgggacatagtggcttttagtttttgtggtactttgaatacagaacgagcattgttgaagtgttcgttttgattgatgtagtcttttcaacaatttagtatttccctgttaggtttccatttgacatcttaaatgttatggttttatttgatcgt

SEQ ID NO: 18613 - protein, 124 aa, Glycine max
SETHTFMMRPSASSGLRMMRTSRITCCTLSQSSKPARKIRGIMKPRKVSPEMEDLVGAPEMARTQVLKRIWAYIKDNNLQDPTDKRTINCDEKLKKVFAGKDQVEMLEIARLISPHFLKSESES

SEQ ID NO: 18614 - protein, 118 aa, Glycine max
MMRPSASSGLRMMRTSRITCCTLSQSSKPARKIRGIMKPRKVSPEMEDLVGAPEMARTQVLKRIWAYIKDNNLQDPTDKRTINCDEKLKKVFAGKDQVEMLEIARLISPHFLKSESES

SEQ ID NO: 18615 - protein, 117 aa, Glycine max
MRPSASSGLRMMRTSRITCCTLSQSSKPARKIRGIMKPRKVSPEMEDLVGAPEMARTQVLKRIWAYIKDNNLQDPTDKRTINCDEKLKKVFAGKDQVEMLEIARLISPHFLKSESES

SEQ ID NO: 18616 - DNA, 551 bp, Glycine max
tttctcaatagttgatgaccatatatggttccggaattatcagatctctgctcatcataatgagtcggacaaattacctagaggtggccttgataaaatgacattgattgaggttggtccgcgattctgcttgaacccaattaaaatatttggtggcagttttggaggcccaactttatatgagaatccgctctatgtgtcaccaaatcagattcgagctttggagaaaaagaagaagtctggaaagtttgcaaagaaggtcaaagcaaagacaaggaggaaaatgcacgagatgtccaatcctctggagcctgatgagtttgcagatatgtggaaagattgattttaaatacaaccgcagctaccacataaaagaaaaacccatatttctcctatattatcctcgcattatattccataacattaaagggagacttttgtgattctataatgttattttctgtaatttcatgtggggtctggttattctctcttatcagacattgaacctagtggaaattaaattttgacagaggcttcagttttggatc

SEQ ID NO: 18617 - protein, 113 aa, Glycine max
FSIVDDHIWFRNYQISAHHNESDKLPRGGLDKMTLIEVGPRFCLNPIKIFGGSFGGPTLYENPLYVSPNQIRALEKKKKSGKFAKKVKAKTRRKMHEMSNPLEPDEFADMWKD

SEQ ID NO: 18618 - protein, 87 aa, Glycine max
MRIRSMCHQIRFELWRKRRSLESLQRRSKQRQGGKCTRCPILWSLMSLQICGKIDFKYNRSYHIKEKPIFLLYYPRIIFHNIKGRLL

SEQ ID NO: 18619 - protein, 82 aa, Glycine max
MCHQIRFELWRKRRSLESLQRRSKQRQGGKCTRCPILWSLMSLQICGKIDFKYNRSYHIKEKPIFLLYYPRIIFHNIKGRLL

SEQ ID NO: 18620 - protein, 81 aa, Glycine max
MTLIEVGPRFCLNPIKIFGGSFGGPTLYENPLYVSPNQIRALEKKKKSGKFAKKVKAKTRRKMHEMSNPLEPDEFADMWKD

SEQ ID NO: 18621 - DNA, 1246 bp, Glycine max
agtgctgttgaaccggttgattctgggatgactactggtccaagaaaaattgatgcatatgatttggattttgagattttccacaaggcacttgctggtggggttgttccacctttttccttgtctgatccaggatcagaaacttgtcttcctgctagagaacaaggttgggcaagactgaggaggaagtttgctagtggattgctcacatcccccaaattcatctgtgatgctgattcaaccccatgcaatgatcatcaacctagtgtatctgaggaagctgcatatgagcctttgtcaccatcatcaattcctccgtgtggttcaccggattcctttgaatgctatccaaatagggaaaaaggtagtcctgaagccatggacttctctgttcatggtgttgcttcatcattgccactgtctcctaccggcacatcaaatccttttccttgcttcataagctgcattccaaaattcaattccaagtcaccaacactctcaccttcaagttctgattacgccagttcatttactttttcgccttcctctaccaactggtccgacttgtccttggtgtcttctcggcagccatcaccatctggccttgaatcggctgaacccttttatgttaaagacgcgtctttctcagaaaattccactttacttcacaaagatgtctcttcacccttggaagaattttcagctaatcacacatttggagaggcgaactccaatttgcagttgaaaggttctttcctctccatcgccgagcgcagagggaatcatccaccgcctctgatgttgctaccctcagccagtgaatcctctcatgtccccaagaacaacgtggaggactgcaactaataacatccgaaagatggataataagaataagccttcaaatattttgcctataatatactgaaatcaggacatgcaacctgaattgctgatggtggttcggtaatttgttcatataaccaaaaagatgatggtggcttcggtaatttgttcatatatgccaaaatactacggataggtgacacaacagatgtaggcttgtttcttaaagtccattgttggaccttaacaatgccattgtgggacccagcgcactgcatctcatggctctatgggaccatgacctcgtgctagagctctctcctcctctactccaaccatcctccttcgacagcttggccttctttgcttttaatgcctcgttaatttcgtcccacacgtttac

SEQ ID NO: 18622 - protein, 287 aa, Glycine max
SAVEPVDSGMTTGPRKIDAYDLDFEIFHKALAGGVVPPFSLSDPGSETCLPAREQGWARLRRKFASGLLTSPKFICDADSTPCNDHQPSVSEEAAYEPLSPSSIPPCGSPDSFECYPNREKGSPEAMDFSVHGVASSLPLSPTGTSNPFPCFISCIPKFNSKSPTLSPSSSDYASSFTFSPSSTNWSDLSLVSSRQPSPSGLESAEPFYVKDASFSENSTLLHKDVSSPLEEFSANHTFGEANSNLQLKGSFLSIAERRGNHPPPLMLLPSASESSHVPKNNVEDCN

SEQ ID NO: 18623 - protein, 278 aa, Glycine max
MTTGPRKIDAYDLDFEIFHKALAGGVVPPFSLSDPGSETCLPAREQGWARLRRKFASGLLTSPKFICDADSTPCNDHQPSVSEEAAYEPLSPSSIPPCGSPDSFECYPNREKGSPEAMDFSVHGVASSLPLSPTGTSNPFPCFISCIPKFNSKSPTLSPSSSDYASSFTFSPSSTNWSDLSLVSSRQPSPSGLESAEPFYVKDASFSENSTLLHKDVSSPLEEFSANHTFGEANSNLQLKGSFLSIAERRGNHPPPLMLLPSASESSHVPKNNVEDCN

SEQ ID NO: 18624 - protein, 161 aa, Glycine max
MDFSVHGVASSLPLSPTGTSNPFPCFISCIPKFNSKSPTLSPSSSDYASSFTFSPSSTNWSDLSLVSSRQPSPSGLESAEPFYVKDASFSENSTLLHKDVSSPLEEFSANHTFGEANSNLQLKGSFLSIAERRGNHPPPLMLLPSASESSHVPKNNVEDCN

SEQ ID NO: 18625 - DNA, 1217 bp, Glycine max
agaattttgagaagaaaggaagaagaaaaagctgagaaacaaaggaaaaaggaggctaagttcctagctaagaagttgcaggaagaagaggcagccagaatcgcagaagaggagaggcagcgaaaagaggaggaagagagacaagccacagaagctgctttacaacagaagaaggtgaaagagaaagagaaaaagctcttgcggaaggagcgagcacgacttcggactctttcaggacctattttatcgcaccatttacttgatatttctgatgatgatgtagaaaggctttgcatgtcactagatatacagcagctaaggagtctctgtgagaacatgggaggcagacagatgttattagagcaagcaaaagttttgagagatgcactgagttctaagaaagaagaggcggttgatgagaaaactaaatcacaaaatgccaatggttccatcaaggctaatggcagtccttcactaagcaacattgagaagaaggagaaaccctggagtaaagaagagattgatctattgaggaaaggaatgcagaaatatcccaaaggaacctcacggagatgggaggttatttcagaatacattggtactggaagatctgttgaagaaattatgaaggcaactaaaactgtactccttcagaaacctgattcgtcaaaagcttttgacacatttcttgagaaaaggaaacctggtgcacaatcaattgagtctccattgacaaccagagaagaattaggagtgccagctcctgcctcctctacaaataatgcagaagactctcagaacaaaggtactgatgatcagaactcccctgctaatggagtttcttccagttcagaacaggatgtgtggtctgcggtgcaggaacgagcactagttcaagctttaaaagcctttccaaaggaaacaagccagagatgggagcgtgttgcaacagctgtacctgggaagactgtgaatcagtgtaagaaaaaatttgcattgatgaaggagagtttcaggaacaagaaaactgcagtctaatgttctgttgtgatattttagattttattaaatttttttctcaagagtataggctagtttcgaatatccatatactagtttatgagccaaaatttctagttttcttatcgtattactattggttgcttttgataacgtacttttgaacttggaattaatacattcacttttattgcctg

SEQ ID NO: 18626 - protein, 345 aa, Glycine max
RILRRKEEEKAEKQRKKEAKFLAKKLQEEEAARIAEEERQRKEEEERQATEAALQQKKVKEKEKKLLRKERARLRTLSGPILSHHLLDISDDDVERLCMSLDIQQLRSLCENMGGRQMLLEQAKVLRDALSSKKEEAVDEKTKSQNANGSIKANGSPSLSNIEKKEKPWSKEEIDLLRKGMQKYPKGTSRRWEVISEYIGTGRSVEEIMKATKTVLLQKPDSSKAFDTFLEKRKPGAQSIESPLTTREELGVPAPASSTNNAEDSQNKGTDDQNSPANGVSSSSEQDVWSAVQERALVQALKAFPKETSQRWERVATAVPGKTVNQCKKKFALMKESFRNKKTAV

SEQ ID NO: 18627 - protein, 247 aa, Glycine max
MSLDIQQLRSLCENMGGRQMLLEQAKVLRDALSSKKEEAVDEKTKSQNANGSIKANGSPSLSNIEKKEKPWSKEEIDLLRKGMQKYPKGTSRRWEVISEYIGTGRSVEEIMKATKTVLLQKPDSSKAFDTFLEKRKPGAQSIESPLTTREELGVPAPASSTNNAEDSQNKGTDDQNSPANGVSSSSEQDVWSAVQERALVQALKAFPKETSQRWERVATAVPGKTVNQCKKKFALMKESFRNKKTAV

SEQ ID NO: 18628 - protein, 233 aa, Glycine max
MGGRQMLLEQAKVLRDALSSKKEEAVDEKTKSQNANGSIKANGSPSLSNIEKKEKPWSKEEIDLLRKGMQKYPKGTSRRWEVISEYIGTGRSVEEIMKATKTVLLQKPDSSKAFDTFLEKRKPGAQSIESPLTTREELGVPAPASSTNNAEDSQNKGTDDQNSPANGVSSSSEQDVWSAVQERALVQALKAFPKETSQRWERVATAVPGKTVNQCKKKFALMKESFRNKKTAV

SEQ ID NO: 18629 - DNA, 1143 bp, Glycine max
tttgcattcagcctcccagtggaaagggccccaagcataagcagacatgcacatgtaatgtatgcttaacagtgaagcgacgattccgtacccttatgttacggcgtgagaagaaacaatcagaaaaagaagcagagacaactcgtaaaaagcaacagcaacaacatcctctaccattaccttcatctgaaattttgcttgatgaagattccttgccctgtagtaacacaggtgatagtagcccaaaccagaacaaagagggtaatgatggttctgatgatgatcctagccgaataaaatcatctgcttcgccgttcaaaggcaaaattgacctcaatatccaaccagagcgagaagaagaattatcacctggttcggattctggcggcatgatgaagttgctccatgatgctactgagcgatatctcaaacagcagactgtgaactctggtactggagattcatcaggcagtcagtcacagctggtaggagatgcaatgagggaagataaacttagcaatggtgttgcccatggcagtagtagtcataatactgataaggaacatgcccaatctttgcctatgaatgtgtgaaaatcatattggcgctagccataattgatacgttcttgcaaagctatattgaagtggggaaagattttgctgtacattttatccacttcggcttcttgctttttcttgtttgtacataaagaggagtaggaaaaaatggtgagaaaccaatatattccggtaatataagtgggcatcatagtggtttgtgtaggaaaactatgaaatgcagctgaatgggtagtaggttgaagctgtttagtttctttgagagctcaccgtgccacctgatttcaacaacgttgaaaatgtaactatgcctaatttgttctcccaatttattcttagcctgtaagatgtttatactttctagtaactgctagttctgttcgctgtttctctttattggaaatttggaggcacactttcacccgttttcagcaagcaacctatgctgtatacaatcaatgatggcagagaaatattggctgttttaaggggggaagtgcactcgtccattgttattgcactcggtacaaatctacccgtgtaattatttatagcctctgtt

SEQ ID NO: 18630 - protein, 196 aa, Glycine max
CIQPPSGKGPKHKQTCTCNVCLTVKRRFRTLMLRREKKQSEKEAETTRKKQQQQHPLPLPSSEILLDEDSLPCSNTGDSSPNQNKEGNDGSDDDPSRIKSSASPFKGKIDLNIQPEREEELSPGSDSGGMMKLLHDATERYLKQQTVNSGTGDSSGSQSQLVGDAMREDKLSNGVAHGSSSHNTDKEHAQSLPMNV

SEQ ID NO: 18631 - protein, 165 aa, Glycine max
MLRREKKQSEKEAETTRKKQQQQHPLPLPSSEILLDEDSLPCSNTGDSSPNQNKEGNDGSDDDPSRIKSSASPFKGKIDLNIQPEREEELSPGSDSGGMMKLLHDATERYLKQQTVNSGTGDSSGSQSQLVGDAMREDKLSNGVAHGSSSHNTDKEHAQSLPMNV

SEQ ID NO: 18632 - DNA, 1195 bp, Glycine max
ggttgggatgaagaggcactgttgttggccagcctcttcgttgaagacacgccggatagagatcccaagcacaagaagcgctacgtttggcactccaaaaccccaccaaactcatcaaggaaacgtagagctctgaggagtccacaagcaccaatccctgtagttcttgatcttgatgcagaagaaactcccagaaaagatagtgggagaaagaataaagaaatgaaagtttgtgttgataatgagggaaagaaagcttgtgttgagaatgagggaagcagagtgggaggagatgggaatgaatcaaaagagaagaactcggctgacgcttcttctagttctgttcttccctgcattgataaactaagggatgagctttcctgtgctatttgtttggagatatgctttgagccaagtaccactccttgtggtcacagcttctgtagaaaatgtctaagatctgctgcagacaagtgtggcaaaaagtgcccaaaatgcaggcagctaataagcaatggccgaccatgcactgtgaacacagttctctggaacacaatccagcttctgtttccacaagaagttgaagcaagaaaagaagccagtgccttgaatagtctccaacaagctcaaaatctgagtccagaatcagcattttttgctaatctaaggaatgacagacgacagccttttaggggggcatcaacaacaacatcatcaacacagcaggatgaggatgctgcattggctagaatgttgcagagacaaattgatgaacaaagaagcccgggaacaactcgaactcggtttgcaagattgagggcaagaagaggaggggtttctactagccaacatgaggatgcagctttggctctaaggatgaggagagaagagttcatgcaaacttatagagggagcagccagtctagcaggctaccctcatcattattagctagagaaaaattgagggctatggtatctagagccatgaacagaagagaagatcttagacaagggtgaatgttgttaacaactaaactttttttttctgaatgtcattttatggttatattcgtgtctcataatttgtgaggtgtgcattgttttgattttcaaggtacaaattgaattattcaaaactgaactggcattctgaattatgatgtttctactaagctattctttaatcttagtttac

SEQ ID NO: 18633 - protein, 338 aa, Glycine max
GWDEEALLLASLFVEDTPDRDPKHKKRYVWHSKTPPNSSRKRRALRSPQAPIPVVLDLDAEETPRKDSGRKNKEMKVCVDNEGKKACVENEGSRVGGDGNESKEKNSADASSSSVLPCIDKLRDELSCAICLEICFEPSTTPCGHSFCRKCLRSAADKCGKKCPKCRQLISNGRPCTVNTVLWNTIQLLFPQEVEARKEASALNSLQQAQNLSPESAFFANLRNDRRQPFRGASTTTSSTQQDEDAALARMLQRQIDEQRSPGTTRTRFARLRARRGGVSTSQHEDAALALRMRREEFMQTYRGSSQSSRLPSSLLAREKLRAMVSRAMNRREDLRQG

SEQ ID NO: 18634 - protein, 264 aa, Glycine max
MKVCVDNEGKKACVENEGSRVGGDGNESKEKNSADASSSSVLPCIDKLRDELSCAICLEICFEPSTTPCGHSFCRKCLRSAADKCGKKCPKCRQLISNGRPCTVNTVLWNTIQLLFPQEVEARKEASALNSLQQAQNLSPESAFFANLRNDRRQPFRGASTTTSSTQQDEDAALARMLQRQIDEQRSPGTTRTRFARLRARRGGVSTSQHEDAALALRMRREEFMQTYRGSSQSSRLPSSLLAREKLRAMVSRAMNRREDLRQG

SEQ ID NO: 18635 - DNA, 1281 bp, Glycine max
gaacataaacataaccaaaaaccgatgatgtatatacacctttcgcctttatccctggccgagacagctccatgtgccgttactcttaaaccctctctttcacttcactcatcgcattaacaaaccaagtaaccaacaatgaaatgaacaacaacaacaatgattcttcaacttcaccgaaccttcttctcctccaccaccacctcctcctcctccgtaccttcctcacaccccctctctttctgccacttcatgttgcagttcagggcgatccagactccaccaatcgctctcgcgccgcacgccacgtcatctctcaccggcgccaccgtccaatttcgaactcgtcttctcttccctccaagagttaccgcgaagtgccacgcgacgtcgtttggtaatttccgtttgcagtttgctttgaactccacgacgccgtttggcggcggcgttttctcgaggaggttcgccacgcgccccgcgactgatggtggcaagcagaagaagcggcaagtaagggctgccgtcgttcgcggaaaggagaaggacggaggtgcggtaaacgacgccgcgtcgaaagaggttgacaatgcggctgcttctgagggaagtttgggcgagaagaagaagaagggatcgtcacgcgccgctgcgagtggcgaagaggacgagaagagtgtgaagaagaaaacggcgaagcagaagaagacgacgtcgacgcaagaggatggtgctgttgaagcttctaaaaaatcttccaaagggaacaagaagaaggattcgaagaagagtttgactgagagtgctattgaagaaataacagagaattctgcttctgcgaaggacaaagtgaagaagaaaaatgggaattctagtctaattgaagaggcaaaacccctatggaattttacgtacaagccattgtatcctcccactggaaagtctgtggtggttgtggagtctgttacaaaggcgaaggttattaagagataccttggtgatatgtatgaagtcttgccaagctatggtcatgtaagagacttggctgcaaggtctggatcagtgcgacctgatgatgattttagtatggtgtgggaggttccatcgcctgcttggactcatctgaagagcatcaaggttgcactgagcggagcagaaaaccttattcttgcatcagatcctgatcgtgagggggaggctattgcttggcacatcattgagatgttacaacaacagggtgctctacatgataatatttctttagcaagagtagtctttcac

SEQ ID NO: 18636 - protein, 374 aa, Glycine max
MILQLHRTFFSSTTTSSSSVPSSHPLSFCHFMLQFRAIQTPPIALAPHATSSLTGATVQFRTRLLFPPRVTAKCHATSFGNFRLQFALNSTTPFGGGVFSRRFATRPATDGGKQKKRQVRAAVVRGKEKDGGAVNDAASKEVDNAAASEGSLGEKKKKGSSRAAASGEEDEKSVKKKTAKQKKTTSTQEDGAVEASKKSSKGNKKKDSKKSLTESAIEEITENSASAKDKVKKKNGNSSLIEEAKPLWNFTYKPLYPPTGKSVVVVESVTKAKVIKRYLGDMYEVLPSYGHVRDLAARSGSVRPDDDFSMVWEVPSPAWTHLKSIKVALSGAENLILASDPDREGEAIAWHIIEMLQQQGALHDNISLARVVFH

SEQ ID NO: 18637 - protein, 343 aa, Glycine max
MLQFRAIQTPPIALAPHATSSLTGATVQFRTRLLFPPRVTAKCHATSFGNFRLQFALNSTTPFGGGVFSRRFATRPATDGGKQKKRQVRAAVVRGKEKDGGAVNDAASKEVDNAAASEGSLGEKKKKGSSRAAASGEEDEKSVKKKTAKQKKTTSTQEDGAVEASKKSSKGNKKKDSKKSLTESAIEEITENSASAKDKVKKKNGNSSLIEEAKPLWNFTYKPLYPPTGKSVVVVESVTKAKVIKRYLGDMYEVLPSYGHVRDLAARSGSVRPDDDFSMVWEVPSPAWTHLKSIKVALSGAENLILASDPDREGEAIAWHIIEMLQQQGALHDNISLARVVFH

SEQ ID NO: 18638 - DNA, 1483 bp, Glycine max
aacacgaggaaaaaaggtttcttctgggatgagtccagctttcaatctttatgggtgtacattaattgtgcttgctgaatggaagcccccagtatatgataatacacgtggtatagttcttgtaactgctacaacacgccgtaattcaccaaataatttggattcgaagattcatcacaataaccttctcaataacatacttgcaaagattgaaggcaataatgcaaaagcagatgatgcaatcatgctcgaccaagatggttatttatcagaaaccaatgcaactaacatttttgttgttaaaaagggccgtgttttgacccctcatgctgattactgtcttcctggcattactcgtgcaactgtaatggatcttgtggtgaaagaacaattaatcttagaggagcgccgaatcagcttgtcagaagtgcatactgcagatgaggttcacatatacaatttcaaatatatatcttctctctctctcactatatatatatatatatatatatacacacacacacactgttacaagttacactaactttttttactgaagttacacgaactcttaaacaatcaaggtattatatagttatagtccatagtcgggttggtgtaatttatggcagtgttagttgatctctccttatatatttggtccaatttatgttgttataactagaagacctgtcttgaaggtatggacgactggaacaatgggagaactaagccccgtaagtgccttattataccttatcaattgaatcttattatatattgtgtgaatgtgctgccgggtatgcatctagaatacttcacctgttgggctgattcctttcataatcaaatgattgtcaaacctgaaaagaatgttgattgttatatattactacgatgttgattatcaactttgtgtccaatcaactcttggattatgatttatttgtgttactggcaagagcagattaattagcaaggataggacaagcagtaagaacattggttaaactgactaactctgcatagtgtcttttagataatagtagttagatggtatgagattaaattaaacttcattggatatcctatttaggtagtgaaggttgatggtcgcataattggcaatggagaagtaggaccagtcactagaaggttgcaagctgcttataaaaagttgacagaacagtctggtgtacctataccaacctatcttaagacttgaaagactgcagttggaagtgagaggaaattgctgctgtacattactaaaagctacatatatggaagcatttttccctctcgtattaattaataaaatagtgaagaagacctttttctctcagtttttttggggggaagggggtatatctaaataaatatagtacaatttgcaagtttaaaaatgtaatttagtacaaattttatcatcgtctcacgttttgcaacttttcgacaataaatatcaattctcatgcgctgt

SEQ ID NO: 18639 - protein, 180 aa, Glycine max
TRGKKVSSGMSPAFNLYGCTLIVLAEWKPPVYDNTRGIVLVTATTRRNSPNNLDSKIHHNNLLNNILAKIEGNNAKADDAIMLDQDGYLSETNATNIFVVKKGRVLTPHADYCLPGITRATVMDLVVKEQLILEERRISLSEVHTADEVHIYNFKYISSLSLTIYIYIYIYTHTHCYKLH

SEQ ID NO: 18640 - protein, 171 aa, Glycine max
MSPAFNLYGCTLIVLAEWKPPVYDNTRGIVLVTATTRRNSPNNLDSKIHHNNLLNNILAKIEGNNAKADDAIMLDQDGYLSETNATNIFVVKKGRVLTPHADYCLPGITRATVMDLVVKEQLILEERRISLSEVHTADEVHIYNFKYISSLSLTIYIYIYIYTHTHCYKLH

SEQ ID NO: 18641 - protein, 99 aa, Glycine max
MLDQDGYLSETNATNIFVVKKGRVLTPHADYCLPGITRATVMDLVVKEQLILEERRISLSEVHTADEVHIYNFKYISSLSLTIYIYIYIYTHTHCYKLH

SEQ ID NO: 18642 - DNA, 1560 bp, Glycine max
tccgacacatttttcattaccgccgtgataacacactaacaccaccacttcatcaactttacttgacaacaatattgtaaaactcaaaatctagtttcatactttttttcttcttcttgaaatggctctccaggctgcttctcttgttcctgcttctttctcggttcttaaagagggaaagagtggtgtgtctctcaaggactccaccttgttcggtctttcattttcagaacctatcaaagctaacttcagctcttctgcattgaggtgcaagagggaattcgaacaaaagctctgtgctgtgagggccgaaacagtggctacagcctctccagcagttaccaagtctacaccagaagggaagaaaacattgaggaagggcagtgttgtgataactggggcttcatctggactaggcctggccactgctaaggctttggctgagacgggaaaatggcatgtaataatggcctgcagggattacctcaaagctgcaagagctgcaaaatccgctggcatggctaaggaaaactacaccatcatgcacttggaccttgcctcgctcgacagtgtccgccaatttgttgataacttcagaagatcggaaatgccgttagatgtgctggtttgcaatgctgctgtttacttgccaactgctaaggaacctaccttcactgctgagggctttgaacttagtgttgggacaaatcatctggggcatttcctcctctcgcgcctgttgcttgaggacttggaaaaatccgattacccttcaaagcgcttgatcatcgttggttcaataacagggaacacaaacacattggctggtaatgtacctcccaaggctaaccttggtgacttgaggggacttcagggtggtttgaatgggctaaacagctcagccatgattgatggtggagacttcgatggtgccaaggcgtacaaggacagcaaagtctgcaatatgctcacaatgcaagaattccacagacgattccatgaggaaactggaatcacatttgcttccctttaccccggttgcattgccacaacaggcctgttcagagagcacattcccttgttcagaactctgttccctccattccagaagtacataaccaaaggctatgtctcagaagatgaagcaggaaagagacttgctcaggttgtaagtgatccaagcctaacaaaatctggtgtttactggagctggaacaaagcatcagcttcgtttgaaaaccagttgtctcaggaggccagtgatacagagaaggctcgtaagatctgggagattagtgagaaacttgttggttttgcctaagtgggaggagcctccaacatcccatgttgttctagagaccttgcacttgcatggaggaagaaaatgatgtctcaaaagagtggatagataacatcctatcattttgaatgcattgatgttgttttgttagctaggagcttctttgctttgatgtaaggtgtcaatggctttttgtgaatcaagactcaataaaatcattcagccatgtgggtgtggtgaagttgctcataaactttctg

SEQ ID NO: 18643 - protein, 399 aa, Glycine max
MALQAASLVPASFSVLKEGKSGVSLKDSTLFGLSFSEPIKANFSSSALRCKREFEQKLCAVRAETVATASPAVTKSTPEGKKTLRKGSVVITGASSGLGLATAKALAETGKWHVIMACRDYLKAARAAKSAGMAKENYTIMHLDLASLDSVRQFVDNFRRSEMPLDVLVCNAAVYLPTAKEPTFTAEGFELSVGTNHLGHFLLSRLLLEDLEKSDYPSKRLIIVGSITGNTNTLAGNVPPKANLGDLRGLQGGLNGLNSSAMIDGGDFDGAKAYKDSKVCNMLTMQEFHRRFHEETGITFASLYPGCIATTGLFREHIPLFRTLFPPFQKYITKGYVSEDEAGKRLAQVVSDPSLTKSGVYWSWNKASASFENQLSQEASDTEKARKIWEISEKLVGFA

SEQ ID NO: 18644 - protein, 284 aa, Glycine max
MACRDYLKAARAAKSAGMAKENYTIMHLDLASLDSVRQFVDNFRRSEMPLDVLVCNAAVYLPTAKEPTFTAEGFELSVGTNHLGHFLLSRLLLEDLEKSDYPSKRLIIVGSITGNTNTLAGNVPPKANLGDLRGLQGGLNGLNSSAMIDGGDFDGAKAYKDSKVCNMLTMQEFHRRFHEETGITFASLYPGCIATTGLFREHIPLFRTLFPPFQKYITKGYVSEDEAGKRLAQVVSDPSLTKSGVYWSWNKASASFENQLSQEASDTEKARKIWEISEKLVGFA

SEQ ID NO: 18645 - protein, 267 aa, Glycine max
MAKENYTIMHLDLASLDSVRQFVDNFRRSEMPLDVLVCNAAVYLPTAKEPTFTAEGFELSVGTNHLGHFLLSRLLLEDLEKSDYPSKRLIIVGSITGNTNTLAGNVPPKANLGDLRGLQGGLNGLNSSAMIDGGDFDGAKAYKDSKVCNMLTMQEFHRRFHEETGITFASLYPGCIATTGLFREHIPLFRTLFPPFQKYITKGYVSEDEAGKRLAQVVSDPSLTKSGVYWSWNKASASFENQLSQEASDTEKARKIWEISEKLVGFA

SEQ ID NO: 18646 - DNA, 1300 bp, Glycine max
aatgttaactatgttcttctttttttgttctcatctccacaccatgtcctaatctttctgcaccatcgttctccatttttggctttacaaaaccactgtgtctgattaagggttctttaatatttccaatatttcttgtagtgaaaaagttgttagctaaaagaagaccaagtttttggtgttgtagaaggaagagaagaattaacatgaaaattcagtgtgacgtgtgtgagagagctccagcaacagtgatttgttgcgcggatgaggctgctttgtgtgccaaatgtgacgttgaagttcatgctgcaaacaagcttgcaagcaagcaccaaagacttcttcttcaatgtctatcaagcaagcttcccacatgtgacatttgccaagacaagccagcattcatattttgtgttgaagacagagcactcttctgtcaggattgtgatgaaccaattcattcagccggaagcctttccgcgaaccaccagcgcttccttgctactggtatccgagtggcctcgagttctaattgcaccaaagacaatgaaaaaagtcactcggagcctcctaataggagtgcacaacaagtttctgcgaaaattcctcctcagcaagtgcctagcttcacatcctcttgggctgttgatgacttattggaactaacaggctttgaatcacctgagaaaaaggaatctctgcagtttggagagctggaatggcttacagatgtgggtattttcggcgaacaatttgctcaggaagccttggctgcagctgaagtacctcagcttcccgaaactcataacagtagcagtgttgcttcatacaaaacctccaaatcctacatgtcccacaaaaagcctaggattgaagtcctaaatgatgatgatgatgatgagtattttactgtgcccgatctcggctaagtacgtggcttgccatatgggatggtgcatgcatgattggaaaagattaattatgggaaaataattgttttttttaagctctattagtaaattgtcaaaaaagaatattattttcccaaaaaaactattccattcagacatgttgatatgttgtatattcaattattatgagaacgataattttcacaagttgtgtggagttgattaagtattgtacttaaggtgtttttttgctggatagcatagaatccatgcctttggggaataaattttccttgtccttatgcttcatacactaggggggattctcccacggtcacatcttccccaatccccctcgaatttgagacggttaattccattttgtttgc

SEQ ID NO: 18647 - protein, 240 aa, Glycine max
MKIQCDVCERAPATVICCADEAALCAKCDVEVHAANKLASKHQRLLLQCLSSKLPTCDICQDKPAFIFCVEDRALFCQDCDEPIHSAGSLSANHQRFLATGIRVASSSNCTKDNEKSHSEPPNRSAQQVSAKIPPQQVPSFTSSWAVDDLLELTGFESPEKKESLQFGELEWLTDVGIFGEQFAQEALAAAEVPQLPETHNSSSVASYKTSKSYMSHKKPRIEVLNDDDDDEYFTVPDLG

SEQ ID NO: 18648 - protein, 133 aa, Glycine max
MRLLCVPNVTLKFMLQTSLQASTKDFFFNVYQASFPHVTFAKTSQHSYFVLKTEHSSVRIVMNQFIQPEAFPRTTSASLLLVSEWPRVLIAPKTMKKVTRSLLIGVHNKFLRKFLLSKCLASHPLGLLMTYWN

SEQ ID NO: 18649 - protein, 120 aa, Glycine max
MLQTSLQASTKDFFFNVYQASFPHVTFAKTSQHSYFVLKTEHSSVRIVMNQFIQPEAFPRTTSASLLLVSEWPRVLIAPKTMKKVTRSLLIGVHNKFLRKFLLSKCLASHPLGLLMTYWN

SEQ ID NO: 18650 - DNA, 1249 bp, Glycine max
gagatataacagatttactggcatgcattacaaagatgacccaacaatcatggcctgggagcttatgaatgaacctaggtgcacatcggatccttcagggagaactattcaggcgtggatcacggaaatggcttcgtttgttaagtccatagacaggaaccacttattggaggctggactagaagggttttacggacaatcaacaccacaaagaaagagattgaatcccggtttcgacataggaacagacttcatcggaaacaatcgaataccggccattgattttgcaacagtccactgctaccccgaccaatgggtatcgagctcaaatattcagtatcaactttcattcttgaacaactggctgagtgcgcacttcatagacgcgcaataccgtataaagaaaccaatactagtggcggaatttgggaaatcatttaagagttcgagttcgtacgagagggatgaggtgttcaattcagtgtattacaaaatatatgcttctgctaagagaggaggggcagcgagtggagcattgttctggcagcttctgacggagggtatggagtctttccaagatggttacggaataattcttgggcagagttcctctacggccaatctcattgctcgccagtcccgcaagctgtacctgattcggaagatcttcgcgagggtcgcgaacatgcggcgatggcaaagggccagagctagaggtggaaacggaggcagatacattggcaactgagtgcatatttggttttgtagatacaatcgatcaggaaacttgtttttgcgtttattttgttttttgtgcctaaatattttcaactgcaaatgcattagaattacttactttactcgcctgtacacagttaaagcttgtttgtgctggggagatagacatcttttatataccagtttatctaccgagtgttgtttggaaggcgatggaggatggcccaccggagccaacagaagaccttggagatgaatcataatgttttcttataactattatgttttcgttgtttcagcttctctcttctttttgtttatacagagctaaagcagctctaagtttttccatgttgtctactcgtaggctactcaacctcactttagtttttaactttggaaacaatgttatttgtgttagtgttactacttcatattggtagaaaaagaaatgcaaaacaaagtgcgaatgtaagtttcaatcaaaatgttataaactcaagttaagttt

SEQ ID NO: 18651 - protein, 248 aa, Glycine max
RYNRFTGMHYKDDPTIMAWELMNEPRCTSDPSGRTIQAWITEMASFVKSIDRNHLLEAGLEGFYGQSTPQRKRLNPGFDIGTDFIGNNRIPAIDFATVHCYPDQWVSSSNIQYQLSFLNNWLSAHFIDAQYRIKKPILVAEFGKSFKSSSSYERDEVFNSVYYKIYASAKRGGAASGALFWQLLTEGMESFQDGYGIILGQSSSTANLIARQSRKLYLIRKIFARVANMRRWQRARARGGNGGRYIGN

SEQ ID NO: 18652 - protein, 241 aa, Glycine max
MHYKDDPTIMAWELMNEPRCTSDPSGRTIQAWITEMASFVKSIDRNHLLEAGLEGFYGQSTPQRKRLNPGFDIGTDFIGNNRIPAIDFATVHCYPDQWVSSSNIQYQLSFLNNWLSAHFIDAQYRIKKPILVAEFGKSFKSSSSYERDEVFNSVYYKIYASAKRGGAASGALFWQLLTEGMESFQDGYGIILGQSSSTANLIARQSRKLYLIRKIFARVANMRRWQRARARGGNGGRYIGN

SEQ ID NO: 18653 - protein, 232 aa, Glycine max
MAWELMNEPRCTSDPSGRTIQAWITEMASFVKSIDRNHLLEAGLEGFYGQSTPQRKRLNPGFDIGTDFIGNNRIPAIDFATVHCYPDQWVSSSNIQYQLSFLNNWLSAHFIDAQYRIKKPILVAEFGKSFKSSSSYERDEVFNSVYYKIYASAKRGGAASGALFWQLLTEGMESFQDGYGIILGQSSSTANLIARQSRKLYLIRKIFARVANMRRWQRARARGGNGGRYIGN

SEQ ID NO: 18654 - DNA, 1783 bp, Glycine max
atttcgctgatatttgataaggcagtgctggaaccaacattttgccccatgtatgctcagctgtgttctgatcttaatgaaaagctgcctccattcccatctgacgagcctggtgggaaagaaatcacttttaagcgagtactcttgaatatctgccaggaggcttttgaaggtgcagataaactgagggaagaactgagacagatgactgcccctgaccaggagatggagcgacgggacaaggaaagacttgtcaagattcgaacccttggaaatatccgtttaattggtgagctgttgaagcaaaaaatggttcccgaaaagattgttcatcacattgttcaggagcttttaggacctccagacatcaaggtctgtccagctgaggaaaatgttgaagccatatgtcagtttttcaacactattggtaagcagcttgatgaaagcccaaaatcacggcgcataaatgatatgtactttatccggttgaaagaattgagcaccaatccccaacttgcaccacggctgcggtttatggttcgtgatgttctagatttgcgttctaataactggattccaagacgtgaagaggtgaaagccaaaaccatcactgaaattcattcagaggcagaaaaaaatcttggattgcgtccaggtgccactgcaagtatgagaaataaccgtgtagtttcaggcgctctaggaaataccagtccaggaggattcccaattgctcgacctggtacaggtggtttgatgccagggatgccagggaccaggaggatgcctgggatgcctggaattgataatgacaactgggagatgcctaagacaagatcaatgccgagaggagacatgtcaggcatgcaaactggaggacatagccagtctccctttctttccaagacatccactgttaactctaggttactacctcaaggtagtggtggtattataagtgggagaagcagtgccctggtgcatggagctggtgctccttctgctgctcggccaccaaaccttggttttagtgctgaacccacacctcaaatcccttcacctgttaaagctgtttctgccatacccgctgagaagccacaacctccagctgcaaaattgaattttgatgaacttcagcgtaaaactgtttctcttctggaagaatatttcaatgtccggcttttggacgaggcattacagtgtgtggaggaactaaaagctccagcttattaccctgagtttgtcaaggaagctatttcccttgctctagataaaagtccgccatgcgctgaacctgttgccaatctttttgaatatctgttcattaagaagattctttcagccagagacatagggactgggtgcatgttatttgcttctctgctggatgatatcggcatagatttacctaaagcaccaaataattttggtgagataatagggaaactagttttggctgggggtttggattttaaggtggtgacagaaatccttaagaaggtggaggatgaccggttccagaaagcaatattttcttctgcgttgcaggtaattacctctgcatctgggcaagctgtgctggatgcacaagcatctgatattgaggcctgccagagtctgttcaactgaatcagatgagagtttgcatgagaataccgatctctgtaactgaaagaacatctctgccttgtttcacaactttcaaattccctatcctttacgctcgcactttttagagcattttgtattacagtatgttataaaagtgggagcttccagtatc

SEQ ID NO: 18655 - protein, 542 aa, Glycine max
ISLIFDKAVLEPTFCPMYAQLCSDLNEKLPPFPSDEPGGKEITFKRVLLNICQEAFEGADKLREELRQMTAPDQEMERRDKERLVKIRTLGNIRLIGELLKQKMVPEKIVHHIVQELLGPPDIKVCPAEENVEAICQFFNTIGKQLDESPKSRRINDMYFIRLKELSTNPQLAPRLRFMVRDVLDLRSNNWIPRREEVKAKTITEIHSEAEKNLGLRPGATASMRNNRVVSGALGNTSPGGFPIARPGTGGLMPGMPGTRRMPGMPGIDNDNWEMPKTRSMPRGDMSGMQTGGHSQSPFLSKTSTVNSRLLPQGSGGIISGRSSALVHGAGAPSAARPPNLGFSAEPTPQIPSPVKAVSAIPAEKPQPPAAKLNFDELQRKTVSLLEEYFNVRLLDEALQCVEELKAPAYYPEFVKEAISLALDKSPPCAEPVANLFEYLFIKKILSARDIGTGCMLFASLLDDIGIDLPKAPNNFGEIIGKLVLAGGLDFKVVTEILKKVEDDRFQKAIFSSALQVITSASGQAVLDAQASDIEACQSLFN

SEQ ID NO: 18656 - protein, 526 aa, Glycine max
MYAQLCSDLNEKLPPFPSDEPGGKEITFKRVLLNICQEAFEGADKLREELRQMTAPDQEMERRDKERLVKIRTLGNIRLIGELLKQKMVPEKIVHHIVQELLGPPDIKVCPAEENVEAICQFFNTIGKQLDESPKSRRINDMYFIRLKELSTNPQLAPRLRFMVRDVLDLRSNNWIPRREEVKAKTITEIHSEAEKNLGLRPGATASMRNNRVVSGALGNTSPGGFPIARPGTGGLMPGMPGTRRMPGMPGIDNDNWEMPKTRSMPRGDMSGMQTGGHSQSPFLSKTSTVNSRLLPQGSGGIISGRSSALVHGAGAPSAARPPNLGFSAEPTPQIPSPVKAVSAIPAEKPQPPAAKLNFDELQRKTVSLLEEYFNVRLLDEALQCVEELKAPAYYPEFVKEAISLALDKSPPCAEPVANLFEYLFIKKILSARDIGTGCMLFASLLDDIGIDLPKAPNNFGEIIGKLVLAGGLDFKVVTEILKKVEDDRFQKAIFSSALQVITSASGQAVLDAQASDIEACQSLFN

SEQ ID NO: 18657 - protein, 474 aa, Glycine max
MTAPDQEMERRDKERLVKIRTLGNIRLIGELLKQKMVPEKIVHHIVQELLGPPDIKVCPAEENVEAICQFFNTIGKQLDESPKSRRINDMYFIRLKELSTNPQLAPRLRFMVRDVLDLRSNNWIPRREEVKAKTITEIHSEAEKNLGLRPGATASMRNNRVVSGALGNTSPGGFPIARPGTGGLMPGMPGTRRMPGMPGIDNDNWEMPKTRSMPRGDMSGMQTGGHSQSPFLSKTSTVNSRLLPQGSGGIISGRSSALVHGAGAPSAARPPNLGFSAEPTPQIPSPVKAVSAIPAEKPQPPAAKLNFDELQRKTVSLLEEYFNVRLLDEALQCVEELKAPAYYPEFVKEAISLALDKSPPCAEPVANLFEYLFIKKILSARDIGTGCMLFASLLDDIGIDLPKAPNNFGEIIGKLVLAGGLDFKVVTEILKKVEDDRFQKAIFSSALQVITSASGQAVLDAQASDIEACQSLFN

SEQ ID NO: 18658 - DNA, 1088 bp, Glycine max
agattttgataagtcacccgcatcttgtgcctgccgcagtagagcagcaacttgagcaattccaaactgattgtgatggcgataaacaaaagaaagagccttctgcttcaggcaccgacttagttttatacaggagaattgctgaggttaaggctaaagagaggagaacagctctagaagagatattgtatgcattggtggtgcaaaagttcatggatgccaatatttctctgataccctccttaactccaaaccactctggtcaggttgattcatggccaagtgaagatggaaaactggaggagcttcactcaccggaagcctatgagatgatccaaaaccacttggctctcattttgggcaaccgtttaggggattcaacatctgttgctcagatcagcaaaatcagagtaggacaggtctatgcagcttcgataatgtacgggtactttctcaagcgggttgtccaaaggttccagctggagaagacaatgaagattcttcctaatggagcagaagagaatagcattcaacatactgttgtagatgattcaagaatcagtggtggagatggccgttctcatgttatgtcccatcctgaagtttctactttgcctggtggtggcatcagctcagggggatttggttatggttcaaaagtgtccaggttgcgtacctatgtgatgtcctttgatagcgagacattacagagatatgcaacaataagatccaaagaggctctcagcatcattgagaagcacaccgaagcattgtttggaagacctgaaattgttgtaacaccggagggggtaattgattctttgacggatcagagcatcaaaattagctttggtggtttgaagagacttgttttagaagctattacttttggttcctttctctgggatgttgagagctacgtcgactcaaggtaccattttgtcctcaactgagtcctgctcactcccatgcaccccaaggcaaagtctgtacggactgaaagtacaaatatttttcacctttttgatcagtgacattggaattggttttcactattaaaaggatatcttaaaattagatattcccac

SEQ ID NO: 18659 - protein, 316 aa, Glycine max
ILISHPHLVPAAVEQQLEQFQTDCDGDKQKKEPSASGTDLVLYRRIAEVKAKERRTALEEILYALVVQKFMDANISLIPSLTPNHSGQVDSWPSEDGKLEELHSPEAYEMIQNHLALILGNRLGDSTSVAQISKIRVGQVYAASIMYGYFLKRVVQRFQLEKTMKILPNGAEENSIQHTVVDDSRISGGDGRSHVMSHPEVSTLPGGGISSGGFGYGSKVSRLRTYVMSFDSETLQRYATIRSKEALSIIEKHTEALFGRPEIVVTPEGVIDSLTDQSIKISFGGLKRLVLEAITFGSFLWDVESYVDSRYHFVLN

SEQ ID NO: 18660 - protein, 246 aa, Glycine max
MDANISLIPSLTPNHSGQVDSWPSEDGKLEELHSPEAYEMIQNHLALILGNRLGDSTSVAQISKIRVGQVYAASIMYGYFLKRVVQRFQLEKTMKILPNGAEENSIQHTVVDDSRISGGDGRSHVMSHPEVSTLPGGGISSGGFGYGSKVSRLRTYVMSFDSETLQRYATIRSKEALSIIEKHTEALFGRPEIVVTPEGVIDSLTDQSIKISFGGLKRLVLEAITFGSFLWDVESYVDSRYHFVLN

SEQ ID NO: 18661 - protein, 207 aa, Glycine max
MIQNHLALILGNRLGDSTSVAQISKIRVGQVYAASIMYGYFLKRVVQRFQLEKTMKILPNGAEENSIQHTVVDDSRISGGDGRSHVMSHPEVSTLPGGGISSGGFGYGSKVSRLRTYVMSFDSETLQRYATIRSKEALSIIEKHTEALFGRPEIVVTPEGVIDSLTDQSIKISFGGLKRLVLEAITFGSFLWDVESYVDSRYHFVLN

SEQ ID NO: 18662 - DNA, 1237 bp, Glycine max
acgtagagttgaaccaacttctgatgcaaataatgtattaaaggagggtgatgtgattgtcagctttgatgatgttcgtgttggtagtgaaggaacagtcccattcagatcaaatgagcgaattgccttccacttcctcattagtcaaaaatttgcaggtgatactgcagagcttggtatcatcagagcagggacattaatgaaaactaaagttgttttaaactcacgagttcatttggttccctatcacattgatgaaggtctgccttcctatctaataattgctggtttagtattcacacccctctcagagccattgattgaggaagaatgtgaagactctatagggctaaaattattggcaagggcacgttattcattggcaaagtttaaaggggagcaaattgtaattctttcacaggtcttggcaaatgaagtcaacataggttatgaagatatgggcaatcagcaggttgtaaaattcaatggagctcgaattaaaaacattcatcaccttgcacacctcatcgattcatgcgaagacaggtatctgcgttttgaatttgaagacagctatgtagctgttttagagaaagaagctgttgctgctgcttcaccctccgtactgagtgattacggaatcccatctgaaagatcttctgatctttcgaaaccttatgtcgatacactagaagtagaaggtgaccaaccagcagaccaggaatttggtgatagcccagtttcaaattatgaatttggccctgatggactactctgggcataagaaacttgcatctgaagatatctgtgtgaaatttctcatggcggcagcatttgtagcaagtgatcacaattttgggctgcagagaaagtgctgcaacaacatggggcaaccttgatgtgaacacatgaatggttttatgctaccctgggggcatgttagaagcaacctatttaacagaaaggcgtaggaccataggaaagagagttcgtgattattttttcccatgtatgttttattctttcttgtcactcttcttgatttgataaacccaaatgatgtcttcaggtttgatatctacatttttcacgcgcattctgtatttttaaggaaatagtgaacataagagtgacttgtatacgcctttgatgcaatcaatgtaacattttacagtacattgattttaagtttgttctgattgaagttaaatggcatcaatttaacatttatgaagtc

SEQ ID NO: 18663 - protein, 260 aa, Glycine max
RRVEPTSDANNVLKEGDVIVSFDDVRVGSEGTVPFRSNERIAFHFLISQKFAGDTAELGIIRAGTLMKTKVVLNSRVHLVPYHIDEGLPSYLIIAGLVFTPLSEPLIEEECEDSIGLKLLARARYSLAKFKGEQIVILSQVLANEVNIGYEDMGNQQVVKFNGARIKNIHHLAHLIDSCEDRYLRFEFEDSYVAVLEKEAVAAASPSVLSDYGIPSERSSDLSKPYVDTLEVEGDQPADQEFGDSPVSNYEFGPDGLLWA

SEQ ID NO: 18664 - protein, 194 aa, Glycine max
MKTKVVLNSRVHLVPYHIDEGLPSYLIIAGLVFTPLSEPLIEEECEDSIGLKLLARARYSLAKFKGEQIVILSQVLANEVNIGYEDMGNQQVVKFNGARIKNIHHLAHLIDSCEDRYLRFEFEDSYVAVLEKEAVAAASPSVLSDYGIPSERSSDLSKPYVDTLEVEGDQPADQEFGDSPVSNYEFGPDGLLWA

SEQ ID NO: 18665 - DNA, 1324 bp, Glycine max
aaagatcatggatagttatgtccataacttcactctttcttcttccggtgttcatcttcacgaggccgattttgatgctcttaggccaagatgagaatatagcagaagtggcaggaaatatttctctttggtcaattcctatgatatttgcttttattgcctctttcacttgccagaatttcctgcaatctcaaagcaaaaataccatcatttctttcttggcagcattctcaatagttattcatttgttcctctcttggctattgacaattcaattcaagctcgagattcctggtgcaatgacttcaacaaatttggcattttggattcctaatattggtcaactaatatttataacatgtggttggtgctccgatacatggaaaggtttctcatttttggcattcaaagatctttggcctgttgtcaagctttccctttcatctggtatcatgttatgtcttgagctctggtacaacacaatattggttcttttaacgggcaacatggaaaatgctgaggtccaaattgatgctctatctatatgcctcaacatcaatggatgggaaatgatgatatcacttggtttcatggctgctgcaagtgttcgagtggcaaacgagcttggaaaaggaagctccaaagctgcaaagttctctatagttgtgacagtgcttacatccttggccattggatttgttctcttcttatttttcttatttttaaggggaaaacttgcttacatatttacctcaaataaagacgtggccgatgccgttggggacttgtcacctttgttggcaatctctattctactaaacagtgttcaacctgtactctcaggggttgctattggagcagggtggcaaagtattgtagcatatgtgaacatagggtgttattacatcataggtattcctgtaggagttgtgcttggtaacgttttgaatttgcaagtcaagggtatttggattggaatgttgtttggaacatttattcaaaccgtagtgctgactgtaatcacttacaaaactgattgggacgaacaggtaactaaagctcgtaatcgtattaataagtggtccaaggtggaatctgatcatgaaacaattacatcagatgattagtttcatgttccttctttgatttagttttttaaattcaaaattaatgaatctagccacggatttatttatggcaatatattttctgttgctagtgttatacaggcaaatattgtttatttgtatggacgcaaattatgttggataggatcggatccttgaatttaattggacattgttatttaaaaaagcaatactcc

SEQ ID NO: 18666 - protein, 374 aa, Glycine max
RSWIVMSITSLFLLPVFIFTRPILMLLGQDENIAEVAGNISLWSIPMIFAFIASFTCQNFLQSQSKNTIISFLAAFSIVIHLFLSWLLTIQFKLEIPGAMTSTNLAFWIPNIGQLIFITCGWCSDTWKGFSFLAFKDLWPVVKLSLSSGIMLCLELWYNTILVLLTGNMENAEVQIDALSICLNINGWEMMISLGFMAAASVRVANELGKGSSKAAKFSIVVTVLTSLAIGFVLFLFFLFLRGKLAYIFTSNKDVADAVGDLSPLLAISILLNSVQPVLSGVAIGAGWQSIVAYVNIGCYYIIGIPVGVVLGNVLNLQVKGIWIGMLFGTFIQTVVLTVITYKTDWDEQVTKARNRINKWSKVESDHETITSDD

SEQ ID NO: 18667 - protein, 369 aa, Glycine max
MSITSLFLLPVFIFTRPILMLLGQDENIAEVAGNISLWSIPMIFAFIASFTCQNFLQSQSKNTIISFLAAFSIVIHLFLSWLLTIQFKLEIPGAMTSTNLAFWIPNIGQLIFITCGWCSDTWKGFSFLAFKDLWPVVKLSLSSGIMLCLELWYNTILVLLTGNMENAEVQIDALSICLNINGWEMMISLGFMAAASVRVANELGKGSSKAAKFSIVVTVLTSLAIGFVLFLFFLFLRGKLAYIFTSNKDVADAVGDLSPLLAISILLNSVQPVLSGVAIGAGWQSIVAYVNIGCYYIIGIPVGVVLGNVLNLQVKGIWIGMLFGTFIQTVVLTVITYKTDWDEQVTKARNRINKWSKVESDHETITSDD

SEQ ID NO: 18668 - protein, 350 aa, Glycine max
MLLGQDENIAEVAGNISLWSIPMIFAFIASFTCQNFLQSQSKNTIISFLAAFSIVIHLFLSWLLTIQFKLEIPGAMTSTNLAFWIPNIGQLIFITCGWCSDTWKGFSFLAFKDLWPVVKLSLSSGIMLCLELWYNTILVLLTGNMENAEVQIDALSICLNINGWEMMISLGFMAAASVRVANELGKGSSKAAKFSIVVTVLTSLAIGFVLFLFFLFLRGKLAYIFTSNKDVADAVGDLSPLLAISILLNSVQPVLSGVAIGAGWQSIVAYVNIGCYYIIGIPVGVVLGNVLNLQVKGIWIGMLFGTFIQTVVLTVITYKTDWDEQVTKARNRINKWSKVESDHETITSDD

SEQ ID NO: 18669 - DNA, 1241 bp, Glycine max
agtaatgtatggtcttacaagcatgtattttgctggggttatggttcggttgattcttgtggctacccctgctgtgtgcctcattagtgctatagcggtttctgccactgtgaagaatttggctcgggtagtgagggccaaaagcccagctgttcaaagtggatctactaaaggaactaactctgcaaaaagctcttccaagggtgtagttgacaactcccagcctttccaaaagaatggtgctattgtgttactccttggtgctttctatttgctcagtagatatgtcattcactgcacttgggtcacatcagaggcttactcatctccctcaattgtcttggctgcgaggggtgcccatggcaacagggtcatctttgatgattatcgtgaagcttacttttggcttcgccagaacactccaccagatgcgaaggtgatgtcatggtgggattatggttatcaaatcactgccatgggaaacagaacagttattgttgacaataacacctggaataacacacacatagccactgttgggcgagcaatgtcatcctatgaggatgaggcttatgagataatgagatcacttgatgttgactatgtattagtcgtgtttggtggtgttactggttattcttctgatgatattaacaaatttctctggatggtgagaattggtggtggagtttttcctgtgataaaggagcctgattaccttgtcaatggagagtatcgtgtagataaaggagcagctccaaagatgttgaactgtcttatgtacaagctgtcctattatcggtttggggagctgacaacagaatatggcaaaccacctgggtatgatcgtgctagaggtgttgaaattggaaataaggacataaagcttgagtacttggaagaggcgttcactacacagaattggatagttcgtatttataaagtgaaaccccctaaaaacaggtggtaactccaaaaaaaacaaagactgttttctctgcgggaaatgatagcattctagtgaacttgagcgctgaaaatcttgttagcaatattacagattgtggattatttttgatctagaattagttgaggtaattttgtggatttttgaaatgttacagtttttatgacttttagtcaactgcccaacttaacctatcggcttggcaccacttgtctggcccaaattatacaagatagccagaatagaactgtgcaaatagcccgatatttccttc

SEQ ID NO: 18670 - protein, 322 aa, Glycine max
VMYGLTSMYFAGVMVRLILVATPAVCLISAIAVSATVKNLARVVRAKSPAVQSGSTKGTNSAKSSSKGVVDNSQPFQKNGAIVLLLGAFYLLSRYVIHCTWVTSEAYSSPSIVLAARGAHGNRVIFDDYREAYFWLRQNTPPDAKVMSWWDYGYQITAMGNRTVIVDNNTWNNTHIATVGRAMSSYEDEAYEIMRSLDVDYVLVVFGGVTGYSSDDINKFLWMVRIGGGVFPVIKEPDYLVNGEYRVDKGAAPKMLNCLMYKLSYYRFGELTTEYGKPPGYDRARGVEIGNKDIKLEYLEEAFTTQNWIVRIYKVKPPKNRW

SEQ ID NO: 18671 - protein, 321 aa, Glycine max
MYGLTSMYFAGVMVRLILVATPAVCLISAIAVSATVKNLARVVRAKSPAVQSGSTKGTNSAKSSSKGVVDNSQPFQKNGAIVLLLGAFYLLSRYVIHCTWVTSEAYSSPSIVLAARGAHGNRVIFDDYREAYFWLRQNTPPDAKVMSWWDYGYQITAMGNRTVIVDNNTWNNTHIATVGRAMSSYEDEAYEIMRSLDVDYVLVVFGGVTGYSSDDINKFLWMVRIGGGVFPVIKEPDYLVNGEYRVDKGAAPKMLNCLMYKLSYYRFGELTTEYGKPPGYDRARGVEIGNKDIKLEYLEEAFTTQNWIVRIYKVKPPKNRW

SEQ ID NO: 18672 - protein, 315 aa, Glycine max
MYFAGVMVRLILVATPAVCLISAIAVSATVKNLARVVRAKSPAVQSGSTKGTNSAKSSSKGVVDNSQPFQKNGAIVLLLGAFYLLSRYVIHCTWVTSEAYSSPSIVLAARGAHGNRVIFDDYREAYFWLRQNTPPDAKVMSWWDYGYQITAMGNRTVIVDNNTWNNTHIATVGRAMSSYEDEAYEIMRSLDVDYVLVVFGGVTGYSSDDINKFLWMVRIGGGVFPVIKEPDYLVNGEYRVDKGAAPKMLNCLMYKLSYYRFGELTTEYGKPPGYDRARGVEIGNKDIKLEYLEEAFTTQNWIVRIYKVKPPKNRW

SEQ ID NO: 18673 - DNA, 1322 bp, Glycine max
gtcgcaccgctgcagataaaaagaaagattctttaccagctctaagagatatcagagagcgatgcatcaatcaacttgagcaaatgcgatctgaccacatgaggaggcttaacccaactccatataaggttagtgttagtgcaaaattatacgacttcattcatttcctgtggctcaatgaggcaccagttggggagctacagtaaggcaaataaaatggtggcgtgccttcagaacccaatggtgcttacaccaccatcgccgccgatgccattgctcgcttccaggggcttcttcaggtgtatggtggaaatctaggatggtgctttattgaagaggcctattacaagctcctactggaggccctacttagcaaacaacaaggttctgcagaatataaggtgggaatggaacttaccaaatagtttggtaatcttggaactgggcgtgggcttgaaatggttgctgcctttgaaaaagcttccagcaagaaaattccattaaaaatgtgtcccagaagacccggggatgctactgctgtatatgcatctatggacaaggctgagaaagaacttggttggaagcaaaatacggtatagaggaaatgtgcagggatttatggaattggacaagcaaaaatccatggggataccaggggaagcattaaattaaatttggtgctcgatcggttgtacttggagattgctggctatgctctctggcacatgccgagatcaatccatcgatactaaccatgtgtttgtttgcctctacgtccaaatgaaatgcttcaatgctgatattccataccccaatccccacccaaacctctcttgaatgtacacaacaaacagtgtagcggctaaagtgccaaatgcagtgttaaacgaccaccagttgaagtatgaaaattttagcactttttctttgggtctgaagtcatcgaattggtcagcaccaaaagttgacatgttgggcttcagcacgccactgccaatggctacattgtgtgtgcaatatgaagctgatttcagaccaaacatgagcatttgtaaaaagaagaggaaaaaactttagcaagagttattgagactttagacagtaacttgatcttcttctctctatacatgtatggatgtaattttgtgatcttaatgtattaaaaatggcattagccaagaaaagctaagtacaaatagcagtggaagttctaacgctatctaatttaggcctacctatcatggttgcacaatatagctcctgcacagaaagtgatgtcagtggctaatagctataccaatatgatgagaaattcacaattc

SEQ ID NO: 18674 - protein, 79 aa, Glycine max
MYTTNSVAAKVPNAVLNDHQLKYENFSTFSLGLKSSNWSAPKVDMLGFSTPLPMATLCVQYEADFRPNMSICKKKRKKL

SEQ ID NO: 18675 - protein, 67 aa, Glycine max
RTAADKKKDSLPALRDIRERCINQLEQMRSDHMRRLNPTPYKVSVSAKLYDFIHFLWLNEAPVGELQ

SEQ ID NO: 18676 - protein, 47 aa, Glycine max
MLLLYMHLWTRLRKNLVGSKIRYRGNVQGFMELDKQKSMGIPGEALN

SEQ ID NO: 18677 - DNA, 1582 bp, Glycine max
ggttcttggcaaatctgtgagtaggttgcacaaacaacaaagctgccctgaaaatttatcagaactagacagcattcctatcaacgatgaagggaaatgctgcagcacaaatcctgccagatctcgcttggaaagaacaaggagcatccctactgaagttgaagtttccttaaatgcaattgaacctgaaagtcaagaaatttctgagacaaagagtctacctgaggttaaaaagactgaaggaattgtgatccctgaagattttctttgccctatatccttggaactaatgagggatcctgttattgtagccactggtcagacatatgagagatcttacatacagagatggatagattgtggaaatacaacatgtccgaaaactcagcagaagctccaacatttgacccttacaccaaattatgttttaaggagccttatttctcagtggtgtatagagcacaacattgagcagccaacaggactaaccaatggaaaattaaagaagagtgatggatcattcagagatgttacaggtgacatagcagcaattgaagctctggtatggaagctctccagccgatctgttgaggagcgtagatcagctgttactgaaattcgattgctatccaaacgaagtactgacaataggatactaattgctgaagctggagcaattccagttctagtcaaccttctaacatcagaagatgtactgacacaagacaatgcagttacctcaattctcaacctctccatatatgaaaacaacaagggacttataatgcttgctggtgccattccatccattgtccaagtcctccgagctggaaccatggaagcaagagaaaatgcagcagcaacccttttcagcttgtcacttgcagatgagaacaagataattattggcgcctcaggagctataccggctttagtggaattgctccaaaacgggagtcctagaggaaagaaggatgcagcaacagcattgttcaatttatgcatttatcaagggaacaagggcagggccattagggcaggtatcatcacagcattgttgaagatgcttacagattcaagcaaatcgatggttgatgaagccctaacgataatgtcagttcttgcaagccaccaagaggcaaaagttgccatagtaaaagccagcactataccagttttgatagatcttttgaggaccggattgcctcgcaataaagagaatgcagctgctattctacttgccttgtgcaagagggatgcagataatcttgcttgtataagtagacttggtgctctcatacctctctctgaacttgctcgaaatggcacagagagggccaaacggaaggctacttcattattggaacatattcataagttgcagcaactttgaatggtgtagttctgcaaagaactttaagtttcttctgttctctcattatttgatataattctccacactgcggtttgcaaactggtcatacgaggtgaaataagaaaatcagcctcattgattcagttattcttttcttggtttgttctttgttaaccccggtatgagcgtataaagaaatcaattgac

SEQ ID NO: 18678 - protein, 463 aa, Glycine max
VLGKSVSRLHKQQSCPENLSELDSIPINDEGKCCSTNPARSRLERTRSIPTEVEVSLNAIEPESQEISETKSLPEVKKTEGIVIPEDFLCPISLELMRDPVIVATGQTYERSYIQRWIDCGNTTCPKTQQKLQHLTLTPNYVLRSLISQWCIEHNIEQPTGLTNGKLKKSDGSFRDVTGDIAAIEALVWKLSSRSVEERRSAVTEIRLLSKRSTDNRILIAEAGAIPVLVNLLTSEDVLTQDNAVTSILNLSIYENNKGLIMLAGAIPSIVQVLRAGTMEARENAAATLFSLSLADENKIIIGASGAIPALVELLQNGSPRGKKDAATALFNLCIYQGNKGRAIRAGIITALLKMLTDSSKSMVDEALTIMSVLASHQEAKVAIVKASTIPVLIDLLRTGLPRNKENAAAILLALCKRDADNLACISRLGALIPLSELARNGTERAKRKATSLLEHIHKLQQL

SEQ ID NO: 18679 - protein, 367 aa, Glycine max
MRDPVIVATGQTYERSYIQRWIDCGNTTCPKTQQKLQHLTLTPNYVLRSLISQWCIEHNIEQPTGLTNGKLKKSDGSFRDVTGDIAAIEALVWKLSSRSVEERRSAVTEIRLLSKRSTDNRILIAEAGAIPVLVNLLTSEDVLTQDNAVTSILNLSIYENNKGLIMLAGAIPSIVQVLRAGTMEARENAAATLFSLSLADENKIIIGASGAIPALVELLQNGSPRGKKDAATALFNLCIYQGNKGRAIRAGIITALLKMLTDSSKSMVDEALTIMSVLASHQEAKVAIVKASTIPVLIDLLRTGLPRNKENAAAILLALCKRDADNLACISRLGALIPLSELARNGTERAKRKATSLLEHIHKLQQL

SEQ ID NO: 18680 - DNA, 1456 bp, Glycine max
atttccctgtaccctactacttttgggtttgatgttgtgataactatcttatggattaaattgcagctaagagtggacttgactggcgatcaaacacagaaggtattcgacaggatcctaacaaacttaggccgtactgccccaccagttcctggatttcgcatgcaaaaaggaggtaagaagctgcattattgataacatgcactttcataccctgaacatatctattggtcattcactttcattccctgccaagaacacacatgagcttagcatttggtatttgctgcaagatttctccctaatcctcaagtgtttcttaaatacgaggtatttccattttcctaccacattccagacttactaaaaagtaaagactgataacgatcttttatgtgaaataccatttggcagctgcttataccttcattacaaaatatctagttctttctctttccaaggcctggacaattaattagtcaccattttattcgctactcattttcttgctcaactaaggcttgtgaaatgaccagcatatccttcttattggtggtcttgatcttggtttttgcatgagtgctttaccaattggatgcccattttgacactttctgtatttgttagtgaaaaggggtttcactggttgaccctatcctctatagtagtcaattgtctctgttagattgataccaaatatgcaaccaatgatgagaatagtgggaaaagaaaggaaacttgattttcattttactcttcacagttacattgatagatgcttccttttcaaattcaatacttatttcttgctgttgatatgatttttcattttcctgctcatcatatttcagtatttttacagcataagaatttgcagttcatgagctttaactgtattaaattgttattgtgcatgtgatgtctgaactgctccaggaaaatcatcaaagatcccaaaggacttccttgtacagatgcttggggaagaacgtgtcaccaagttttcaatacaagaaatactcaattctaccatggctgattatgtgaaaaaggaaaacttggatgtaaaggaccggaagataagcactacccaaacgcaagaacaactcaaaaaatcattcaagccaggaaatgaatttggctttaatgttataattgagcctgaaaattcataagattctagataacttgttatgggggatctagttgttgagcgtaaccagattggcagttattggggcaacaagatttttctctctcaatgatatacagcttaaagagttattttaatggtcagttaggtgtactcctgaaaatgggctgcaatattctattatgagctttgcaggaaaaaatgtttaaaaaactcatcttcaaatttttttcattctgattttaaagggataccaaactgactcagagttatatataactgtcttctagcgtgatatattat

SEQ ID NO: 18681 - protein, 66 aa, Glycine max
MLGEERVTKFSIQEILNSTMADYVKKENLDVKDRKISTTQTQEQLKKSFKPGNEFGFNVIIEPENS

SEQ ID NO: 18682 - protein, 64 aa, Glycine max
ISLYPTTFGFDVVITILWIKLQLRVDLTGDQTQKVFDRILTNLGRTAPPVPGFRMQKGGKKLHY

SEQ ID NO: 18683 - protein, 55 aa, Glycine max
MHFHTLNISIGHSLSFPAKNTHELSIWYLLQDFSLILKCFLNTRYFHFPTTFQTY

SEQ ID NO: 18684 - DNA, 1371 bp, Glycine max
ggagacccttcattcacctatcagagacaaagcgctctctctccaaaaaaaaaaaaaactcgctaaattacaaaaatctcttcaaatcctctcaaccgaaaccctaatcataaaaccctagattttactttatttgtttccctcaatcgaatcgattttccccttccgaaaaccctaattccttcctcgctatcgaagatggacatcgagcagaagcaatcggagctcatagaccacttcgtcaagcgtgcctccgcggcctccgacgccgctgcactatcctccgttctcgtcgaagccacttctcacccttcgctcttcgctttctccgagattctcgctctgcccaatcttcttcagcttgaagcaactgagaattctgcttatcttgatatgcttcggttgtttgcacatggaacatggaatgattacaagagtaatgctgaccgtcttccacaattgatacctgatcagatcctcaagcttaagcaacttacagttcttacactggctgagacatataaggtactaccctatgaccaactgatgcaggagttagatgtgacaaatgttcgtgagcttgaagattttctaattaatgaatgcatgtatgcgggaatagttcgaggaaagttggatcagttgcggcggtgctttgaggtccaatttgcagctggtagggacttgaggcctgatcaactagggaatatgatacagactctctctaactggttgtctacatcagaaaatatgcttgtttcaattcaagagaagataaaatgggctgatgcaatgagtgaaattgacaagaagcacaggaaggatgtggaagagaaggtagaagaagtaaagaagtccattttcaaggccgacatcgacttcagagggcatgaggagatctgctctgaatctggtggagtgatggattatgaagaagatcgaagccgaccaaagaggaggcggcatccaatttcttgaagatttagtagataagggagctcattggagatgggttctttagttgcttgcctgacttttattcatggcatgcgtcaacagaggatatcagcttttgcagacagacaagtatatctcatcgatattgcccttgtctgtcacaccacaaagcgagatagggacaaggaaaaaaaggagggaaaacctgttaatttaggaaattgatagtgtttcttgaaccattatttaatcgtctactgagttggcaataacaagctgagatggtggtgcggctatttatttgcggttgctgaatgctatatatactgttttgttttgtattatgctgatatatttgctgcctcaattgcgttgttatactttgtggtgaatatatatattccaaaattatac

SEQ ID NO: 18685 - protein, 259 aa, Glycine max
MDIEQKQSELIDHFVKRASAASDAAALSSVLVEATSHPSLFAFSEILALPNLLQLEATENSAYLDMLRLFAHGTWNDYKSNADRLPQLIPDQILKLKQLTVLTLAETYKVLPYDQLMQELDVTNVRELEDFLINECMYAGIVRGKLDQLRRCFEVQFAAGRDLRPDQLGNMIQTLSNWLSTSENMLVSIQEKIKWADAMSEIDKKHRKDVEEKVEEVKKSIFKADIDFRGHEEICSESGGVMDYEEDRSRPKRRRHPIS

SEQ ID NO: 18686 - protein, 194 aa, Glycine max
MLRLFAHGTWNDYKSNADRLPQLIPDQILKLKQLTVLTLAETYKVLPYDQLMQELDVTNVRELEDFLINECMYAGIVRGKLDQLRRCFEVQFAAGRDLRPDQLGNMIQTLSNWLSTSENMLVSIQEKIKWADAMSEIDKKHRKDVEEKVEEVKKSIFKADIDFRGHEEICSESGGVMDYEEDRSRPKRRRHPIS

SEQ ID NO: 18687 - protein, 143 aa, Glycine max
MQELDVTNVRELEDFLINECMYAGIVRGKLDQLRRCFEVQFAAGRDLRPDQLGNMIQTLSNWLSTSENMLVSIQEKIKWADAMSEIDKKHRKDVEEKVEEVKKSIFKADIDFRGHEEICSESGGVMDYEEDRSRPKRRRHPIS

SEQ ID NO: 18688 - DNA, 1327 bp, Glycine max
agcaacaaatgatgtcattccttgcaaaggctgttcagagtcctggttttttagctcaatttgtacaacagcaaaatgagagtagtagacgcataacggaggcaaataaaaaacgccggcttaagcaggagggtattggtgaaatggaacatactgctgcttctgatggccaaattgttaaatatcaacctctgataaatgaagcagcaaaagcaatgctgaggcaaatgatgaaattggatacttctcgactagaatcttttagtaataacgctgataattacttgattggtgatcattcatcatcatccggtgcaacggacaggggaaactctttgagccggacttctggagtaacacttcaagtggtccctctgactacaatccagtcttctcacattccatctgcaacagggataggggatgacccttcaacaggaaaatctgagattctatctactcctcaagttgtagcctgtgatgaagttacgaaagctcagtactctaatgtaaatgtttcggttggagaatctaatgcacctgctatccctgttactcaaacagatgaaatcatgcgggacctctctacaataccagacatagtggcaggaaatattcttgatattcctcaagaaaattatatggcacctgagacaggcggtgaaggatatatggatcctacttcatttggagtgaatgtgtcattgcccattgattttgatagtatttcacctgaagcagacattgatgatttgttgaacaatcctcacttttgggatgatattttgcgaactccagtgtcagaggagattgatacgaatgatgctgaagtattcaaggagaatgaggtgcagccaatggaaaatggattggacaaatcacaaaatatggaccaacttactgagcagatgggcctactttcttctgatgccaaaagaatttgagtgtattatgaaagtgtacattattaatatttcatattgtgcaaggtaaccttagcctagacaatgggttatgttgttttagctaattacacctccaattgctcactcaggactcacatgcttttttgtttggtctggtttagtttgtgcatatgagaccgaacctaattgcttttgtagatttacgttcatttttccttagacccgtacctggttctgttctattgtcatcccttaatgtaagtaaggttctaagaggctagcttattgatgtgaagcgtcttagaaatgtgtaattttttaaaagtcatatcaacagggattcataataggatgatagtgtaaaataagtttatattatcaagtgcatgaccattaaactt

SEQ ID NO: 18689 - protein, 313 aa, Glycine max
QQMMSFLAKAVQSPGFLAQFVQQQNESSRRITEANKKRRLKQEGIGEMEHTAASDGQIVKYQPLINEAAKAMLRQMMKLDTSRLESFSNNADNYLIGDHSSSSGATDRGNSLSRTSGVTLQVVPLTTIQSSHIPSATGIGDDPSTGKSEILSTPQVVACDEVTKAQYSNVNVSVGESNAPAIPVTQTDEIMRDLSTIPDIVAGNILDIPQENYMAPETGGEGYMDPTSFGVNVSLPIDFDSISPEADIDDLLNNPHFWDDILRTPVSEEIDTNDAEVFKENEVQPMENGLDKSQNMDQLTEQMGLLSSDAKRI

SEQ ID NO: 18690 - protein, 311 aa, Glycine max
MMSFLAKAVQSPGFLAQFVQQQNESSRRITEANKKRRLKQEGIGEMEHTAASDGQIVKYQPLINEAAKAMLRQMMKLDTSRLESFSNNADNYLIGDHSSSSGATDRGNSLSRTSGVTLQVVPLTTIQSSHIPSATGIGDDPSTGKSEILSTPQVVACDEVTKAQYSNVNVSVGESNAPAIPVTQTDEIMRDLSTIPDIVAGNILDIPQENYMAPETGGEGYMDPTSFGVNVSLPIDFDSISPEADIDDLLNNPHFWDDILRTPVSEEIDTNDAEVFKENEVQPMENGLDKSQNMDQLTEQMGLLSSDAKRI

SEQ ID NO: 18691 - protein, 310 aa, Glycine max
MSFLAKAVQSPGFLAQFVQQQNESSRRITEANKKRRLKQEGIGEMEHTAASDGQIVKYQPLINEAAKAMLRQMMKLDTSRLESFSNNADNYLIGDHSSSSGATDRGNSLSRTSGVTLQVVPLTTIQSSHIPSATGIGDDPSTGKSEILSTPQVVACDEVTKAQYSNVNVSVGESNAPAIPVTQTDEIMRDLSTIPDIVAGNILDIPQENYMAPETGGEGYMDPTSFGVNVSLPIDFDSISPEADIDDLLNNPHFWDDILRTPVSEEIDTNDAEVFKENEVQPMENGLDKSQNMDQLTEQMGLLSSDAKRI

SEQ ID NO: 18692 - DNA, 1137 bp, Glycine max
cgttcaaccatgctgtcttggacgggactgccacgtggcagttcatgacctcatgggccgagatctgcagcggttcaccttccacgtcagcaccacccttcctggaccggaccaaggcccggaacacacgcgtgaagctggacctttcgctaccagagcccaacggcccaccaacttccaacggtgaagcaaagcccgcgccagcacttagggaaaaaatcttcaaattctctgagtcagccatcgacaagatcaagtcaacggtcaacgagaaccctccatcggacggctcaaaaccattctcaacatttcaggctctttcctcccacgtttggcgccatgtaagccatgcacgtaacttgaagccggaggattataccgtgttcaccgtctttgccgattgccggaagcgggtggacccgccaatgccggagacttatttcggaaacttaattcaggctatttttaccgttacagcggttgggctcttaacggcccatccgccacaattcggggcttcattggtgcagaaagccattgaagcccacaatgctaagactattgaggaacgtaacaaagagtgggaaagtgcacccaaaatttttgaattcaaagatgctggggtgaattgtgtggctgtgggaagttccccaaggtttaaagtttatgacattgattttggatgggggaagccagagaatgtgaggagtgggactaataacaagtttgatgggatgatttatttgtatccggggaaaagtggaggaaggagcattgatgtggaactaaccttggagcctgaggctatggggaagttggagcaagacaaggattttcttttggaagcataaaattgctagagcaagtgcaataaaaaaaatggctagaaaaagtacgttgagcaaatttggaagtagtactgctcagattgttgaaggggtcgacttcaatgtccaattatgaattctgatgtgattcatggatgcaatttaatttaaagttgtgctgttttaggattttatatattttgtggttctacgcttgattgattttgaacctactaatgtctgttccatatgtatggtcaatgattgtagttcatgacaagtgaaaggaattattgtgagttttaattat

SEQ ID NO: 18693 - protein, 282 aa, Glycine max
FNHAVLDGTATWQFMTSWAEICSGSPSTSAPPFLDRTKARNTRVKLDLSLPEPNGPPTSNGEAKPAPALREKIFKFSESAIDKIKSTVNENPPSDGSKPFSTFQALSSHVWRHVSHARNLKPEDYTVFTVFADCRKRVDPPMPETYFGNLIQAIFTVTAVGLLTAHPPQFGASLVQKAIEAHNAKTIEERNKEWESAPKIFEFKDAGVNCVAVGSSPRFKVYDIDFGWGKPENVRSGTNNKFDGMIYLYPGKSGGRSIDVELTLEPEAMGKLEQDKDFLLEA

SEQ ID NO: 18694 - protein, 268 aa, Glycine max
MTSWAEICSGSPSTSAPPFLDRTKARNTRVKLDLSLPEPNGPPTSNGEAKPAPALREKIFKFSESAIDKIKSTVNENPPSDGSKPFSTFQALSSHVWRHVSHARNLKPEDYTVFTVFADCRKRVDPPMPETYFGNLIQAIFTVTAVGLLTAHPPQFGASLVQKAIEAHNAKTIEERNKEWESAPKIFEFKDAGVNCVAVGSSPRFKVYDIDFGWGKPENVRSGTNNKFDGMIYLYPGKSGGRSIDVELTLEPEAMGKLEQDKDFLLEA

SEQ ID NO: 18695 - protein, 141 aa, Glycine max
MPETYFGNLIQAIFTVTAVGLLTAHPPQFGASLVQKAIEAHNAKTIEERNKEWESAPKIFEFKDAGVNCVAVGSSPRFKVYDIDFGWGKPENVRSGTNNKFDGMIYLYPGKSGGRSIDVELTLEPEAMGKLEQDKDFLLEA

SEQ ID NO: 18696 - DNA, 1409 bp, Glycine max
agaagcggaagctcgacgaggagcagcaccacgaggaccgccagatctcgccggcccctcccaccgccgacgagcgcgccgccctcctctccgacgtcgccgaacaggtgagcatcctcgagtcgactttcacgtggaacgaagcggaccgatccgcggccaagcgcgccactcacgcgctcgccgatctcgcgaagaatgaggatgtggtgaacttgattgttgaaggaggcgcgattccggctttggtgaagcatcttcaggcgccgcctctcagtgaccgtgtccagaatccgttgccgttcgagcacgaggttgagaaagggagcgctttcacactaggacttcttgccgtcaagccagaacatcagcagttcattgttgacagtggtgccttaacacatcttgttgatcttttgaagaggcacaggaatggcttaacttctcgtgctattaatagtctcattcgtagggccgcagatgctattactaatcttgctcatgagaacagcagcattaaaacccgtgtcaggatggagggtggaattccaccacttgttcatttgcttgattttgctgatgcaaaggtgcaacgagcagctgctggtgctctgcgaaccctggcttttaaaaatgatgaaaataaaaatcagattgttgaatgcaatgctcttccaactttgattctaatgctacgttctgaagatgctggtgttcattatgaagcggtcggtgtgattggtaatttagtccactcttcccctaatataaagaaagaagttcttctcgctggagctttacaaccggttattggattacttagttcctgctgctctgaaagccagagagaagcagcattgttacttggacaatttgcagcaactgattcagactgcaaggttcacattgtacagagaggtgctgtccaacctttgatagagatgcttcagtctcctgatgtacagctcagggaaatgtctgcttttgcattggggagattggcccaggacccacataaccaggctggtattgcacacaatggtggcttagtgccgctgctcaagcttcttgactcaaaaaatggctctttgcaacataatgctgcttttgctctttatggccttgcagataatgaggataatgcgtctgatttcataagggtaggtggagttcagagactgcaggatggagaatttattgttcaagcaactaaagattgtgttgccaaaacattgaaaagattagaggagaagattcatggccgtgtgctgaaccatttgttatatctcatgcgagtttcagaaaagggttgtcaaagacgagttgctttggctcttgcacatctttgctcttcagatgatcagagaataatttttattgatcactatggtcttgagttgcttattggg

SEQ ID NO: 18697 - protein, 469 aa, Glycine max
KRKLDEEQHHEDRQISPAPPTADERAALLSDVAEQVSILESTFTWNEADRSAAKRATHALADLAKNEDVVNLIVEGGAIPALVKHLQAPPLSDRVQNPLPFEHEVEKGSAFTLGLLAVKPEHQQFIVDSGALTHLVDLLKRHRNGLTSRAINSLIRRAADAITNLAHENSSIKTRVRMEGGIPPLVHLLDFADAKVQRAAAGALRTLAFKNDENKNQIVECNALPTLILMLRSEDAGVHYEAVGVIGNLVHSSPNIKKEVLLAGALQPVIGLLSSCCSESQREAALLLGQFAATDSDCKVHIVQRGAVQPLIEMLQSPDVQLREMSAFALGRLAQDPHNQAGIAHNGGLVPLLKLLDSKNGSLQHNAAFALYGLADNEDNASDFIRVGGVQRLQDGEFIVQATKDCVAKTLKRLEEKIHGRVLNHLLYLMRVSEKGCQRRVALALAHLCSSDDQRIIFIDHYGLELLIG

SEQ ID NO: 18698 - protein, 292 aa, Glycine max
MEGGIPPLVHLLDFADAKVQRAAAGALRTLAFKNDENKNQIVECNALPTLILMLRSEDAGVHYEAVGVIGNLVHSSPNIKKEVLLAGALQPVIGLLSSCCSESQREAALLLGQFAATDSDCKVHIVQRGAVQPLIEMLQSPDVQLREMSAFALGRLAQDPHNQAGIAHNGGLVPLLKLLDSKNGSLQHNAAFALYGLADNEDNASDFIRVGGVQRLQDGEFIVQATKDCVAKTLKRLEEKIHGRVLNHLLYLMRVSEKGCQRRVALALAHLCSSDDQRIIFIDHYGLELLIG

SEQ ID NO: 18699 - protein, 240 aa, Glycine max
MLRSEDAGVHYEAVGVIGNLVHSSPNIKKEVLLAGALQPVIGLLSSCCSESQREAALLLGQFAATDSDCKVHIVQRGAVQPLIEMLQSPDVQLREMSAFALGRLAQDPHNQAGIAHNGGLVPLLKLLDSKNGSLQHNAAFALYGLADNEDNASDFIRVGGVQRLQDGEFIVQATKDCVAKTLKRLEEKIHGRVLNHLLYLMRVSEKGCQRRVALALAHLCSSDDQRIIFIDHYGLELLIG

SEQ ID NO: 18700 - DNA, 1614 bp, Glycine max
gaagaaatggatcatacgagaagaggaaagaacaaagtgatggttctctcttctgaagaagaagaagaagaagaagaagaagaagaagaagaagaagacagcgattgcgatgaagcgtacgaatccgatgacggcgacgttgatgattcctccctctccgacaaagtcgtcgccctccttcgagaaggaaaagatattgaatctttgaaattaaacgaatgcaaagcgtatctacggaatcactgcttgaggatcgcaggaaatagagatgtttgtgttgccaggataaaggagcattggaggttaaaacatggaagtggctacacgatttacccaagatcgtcctttaccattaattgtactggtgatgtttgcatgggagatgttgttctgttcagacagaaggtttatgaaaagtttcataaagttactcggcatggaaaaactctaggaaacagaactgttgctgggagggttgtgaaggagagttatggtgcagctaaacaacaacatacctttactgttgaagtattgtggagtagtggggttaggaaattgcctcctctttctccgttgcttgtaaagggccggaatctctataaacagaaaacttaccggcagagatggaaaaatgaagctgatagaattgaggtacttagtgagaagcacaaacgtggtgcagcagcgagatctatgagatcattgaagcgaaaaaagaaaagttgttctgcaaatgaatctaaaggttcgaaatggcagcatgaaatccataataaaaaacgataaaaaataggaagatcaaatgtagtagataaggttaggcaccaagatggcatcaggcactttcaacttcgagaggtcacttcgtcaactcgagcaacgcagaaggagaaagcatcttcaagcaactacaaggggaagtcacaattgggctcaatttgaccgttaccaagttccagtttatccattacatagttatccacaaagtacataccaatatcaagtaaattctcaaagcaggaatgtgccaagtgaattcttttatcacaacagaggcctaattccaaatatgacaggatacccaccttccaggcttcgtgttggtgaattcacatctctgtcgcaacatccggtatccaatgatattcgtcatgcttgtacaaacctgtacgactttgaaatgaagaattatggatggagaaaatacggtataggatgtgaattgtgatctgtttttcattaggaagactcgagagtacacacagttttggtttcgccttttaacagtggcatgatctgggatccccatttgcgcatttccagtttgttctagtgaacgttcgcattctcaatggatggaaatggaatgtaagcattcttttttcaaacgcggtctgggttagaatgtacagatacttcaacatagttgcggaaccgatatgcgatcatatatcaaataaatttggtacttgtgatatactgttggatatttgtaattagtatgatttttttcattttttgaaactttttatccatataattaaatatcaataaaatattgttatgttaattattttttaaagttctaattattgataaaaattagatgttgcc

SEQ ID NO: 18701 - protein, 261 aa, Glycine max
EEMDHTRRGKNKVMVLSSEEEEEEEEEEEEEEDSDCDEAYESDDGDVDDSSLSDKVVALLREGKDIESLKLNECKAYLRNHCLRIAGNRDVCVARIKEHWRLKHGSGYTIYPRSSFTINCTGDVCMGDVVLFRQKVYEKFHKVTRHGKTLGNRTVAGRVVKESYGAAKQQHTFTVEVLWSSGVRKLPPLSPLLVKGRNLYKQKTYRQRWKNEADRIEVLSEKHKRGAAARSMRSLKRKKKSCSANESKGSKWQHEIHNKKR

SEQ ID NO: 18702 - protein, 259 aa, Glycine max
MDHTRRGKNKVMVLSSEEEEEEEEEEEEEEDSDCDEAYESDDGDVDDSSLSDKVVALLREGKDIESLKLNECKAYLRNHCLRIAGNRDVCVARIKEHWRLKHGSGYTIYPRSSFTINCTGDVCMGDVVLFRQKVYEKFHKVTRHGKTLGNRTVAGRVVKESYGAAKQQHTFTVEVLWSSGVRKLPPLSPLLVKGRNLYKQKTYRQRWKNEADRIEVLSEKHKRGAAARSMRSLKRKKKSCSANESKGSKWQHEIHNKKR

SEQ ID NO: 18703 - protein, 248 aa, Glycine max
MVLSSEEEEEEEEEEEEEEDSDCDEAYESDDGDVDDSSLSDKVVALLREGKDIESLKLNECKAYLRNHCLRIAGNRDVCVARIKEHWRLKHGSGYTIYPRSSFTINCTGDVCMGDVVLFRQKVYEKFHKVTRHGKTLGNRTVAGRVVKESYGAAKQQHTFTVEVLWSSGVRKLPPLSPLLVKGRNLYKQKTYRQRWKNEADRIEVLSEKHKRGAAARSMRSLKRKKKSCSANESKGSKWQHEIHNKKR

SEQ ID NO: 18704 - DNA, 1447 bp, Glycine max
agagatatttctatggatgattttgatttgttattacctgattatgatcagcatcagcagcagcaacagttccttaatgagttatcatgcctctctccacatgctatgaattctaatcccatgaaccgctctggtcgaatgaaactcttgactccttcaaatcttgatgatctgttttcagctgagagttcttctcctagatatgctgatccagcattggcttcagctgtgttttctccaactcacaaatcagctgtcttcaatcaatttcagcagcaccagcaaagcttgttggcaccggtgaatactaattttgcttctaaaaatgttgagcatcctttgttgcaggcctcattggtaatgtctccccgaaacatggaacctatttctccaatgggatctaggatttctatgctagcgcaacgtgagaagcaacaatttcgcagcttaagcttccgggaactcggctccaattctgctgcttctgctgcctctactacctctgccaattcttggtcaaaatgggggtcacctaatggtaattttgattggccagttggtgcttctgatgaaataggtaagctaagaaggtcatcatcatttgagcttgggaacaatggtgaggagcctgatttatcttgggtgcagtcacttgttaaggaatcaccagctgacgttaaaggtaaatttgcaaccactgtctcaaatgtttcagcagcagcagctggatcctccagtgagggatcaaacatgagcacacaaatggagtctgttgttgatcatgctgtgctgggagcatggcttgaacagatgcagcttgatcatcttgtggctcagcaaaactgaaatgagtttctgctgatcctgacgtatttaacaaaagaaatgtctcagtaaataaaaatatatattctttgttgaattttgttgatggaagaaggttacaataactaaagaacggatgcagtactaagataaagaaccattgaggaaaattcattttcaggtttagtgttacaaaagtaacttagaagggtcagaaaaccactgggtggcgttcacagaattaatgccactgaagggttttttggctgcatatctcttcaaattttaggtccacattcctgtcattttttccttccttgaggagcaaatgttgtatcgcaatgaagtcttagtcctaagtttgatctatcttttgattttatttctttatattttggggtaggatccaaagttacagaagggtcattggagtaattccttgtgtctccattttggtccaattttggggatgaaaacacaggttggttgctggatatggtatttcttttgtaatatggaataaatagttgtcgatgccaaggagttggtaagttaggaatatttgaacattgatcctttgggcatgtaacattcaattgaagtttattgctgtattatttct

SEQ ID NO: 18705 - protein, 281 aa, Glycine max
RDISMDDFDLLLPDYDQHQQQQQFLNELSCLSPHAMNSNPMNRSGRMKLLTPSNLDDLFSAESSSPRYADPALASAVFSPTHKSAVFNQFQQHQQSLLAPVNTNFASKNVEHPLLQASLVMSPRNMEPISPMGSRISMLAQREKQQFRSLSFRELGSNSAASAASTTSANSWSKWGSPNGNFDWPVGASDEIGKLRRSSSFELGNNGEEPDLSWVQSLVKESPADVKGKFATTVSNVSAAAAGSSSEGSNMSTQMESVVDHAVLGAWLEQMQLDHLVAQQN

SEQ ID NO: 18706 - protein, 277 aa, Glycine max
MDDFDLLLPDYDQHQQQQQFLNELSCLSPHAMNSNPMNRSGRMKLLTPSNLDDLFSAESSSPRYADPALASAVFSPTHKSAVFNQFQQHQQSLLAPVNTNFASKNVEHPLLQASLVMSPRNMEPISPMGSRISMLAQREKQQFRSLSFRELGSNSAASAASTTSANSWSKWGSPNGNFDWPVGASDEIGKLRRSSSFELGNNGEEPDLSWVQSLVKESPADVKGKFATTVSNVSAAAAGSSSEGSNMSTQMESVVDHAVLGAWLEQMQLDHLVAQQN

SEQ ID NO: 18707 - protein, 246 aa, Glycine max
MNSNPMNRSGRMKLLTPSNLDDLFSAESSSPRYADPALASAVFSPTHKSAVFNQFQQHQQSLLAPVNTNFASKNVEHPLLQASLVMSPRNMEPISPMGSRISMLAQREKQQFRSLSFRELGSNSAASAASTTSANSWSKWGSPNGNFDWPVGASDEIGKLRRSSSFELGNNGEEPDLSWVQSLVKESPADVKGKFATTVSNVSAAAAGSSSEGSNMSTQMESVVDHAVLGAWLEQMQLDHLVAQQN

SEQ ID NO: 18708 - DNA, 1329 bp, Glycine max
aggaacagagcaaacatgctgcttctttggcttttgccactgctgttgctgcagaggctgctgttgccgctgctcaggctgctgccgaggttgttcgtctcacaagtatgccacattacactggaaggactaaggaagaaattgcagccatcaaggttcagactgcattccgtggatatatggcaagaagggcattgcgtgcgttgagaggattggtgaggttgaaaacattagtacaagggcaatctgttaaacggcaagctgctagcaccctacgaagcatgcaaactctagcaagattacagtctcagattcgtgaaaggagaattagaatgtccgaagagaaccaagctcttcagcgccaactacatcagaaacatgaaaaagaacttgagaagttgcgtgctgctgttggagaagaatgggatgatagctcgcagtcaaaggagcaaattgaagcaaaattgttgcacaggcaagaagctgctttgagaagagagagagctttggcctattcattctcacatcagcaaacatggaagggctcttcaaagtcattaaatccaacatttatggatccaaacaatccccaatgggggtggagttggctagagagatggatggctactaggccatgggatggccatagcactgtggtggatcacaatgaccatgcatctgtgaagagtgcagcgagccgtgccgtgtctgtagggcaaatcaccaaattgtactctctccaagataaaaaaccttccccttttggctcaaaagcaagaagacctgcccctcaaagttcccattcaaaggcaccatctactaatggaaaagcaaggccatcaagctcaacaaagggtagtagtgtttggggtggagatgaggactcaagaagcatgtttagtgttcagtcggagcgctaccgccgacacagcattgcaggatcctcagtgagagatgatgatagccgtgcaagcacacctgccattccaagttacatggcagccacaagctcagcaaaggccaggtccaaaatcataaggcattcacctgaaaaaaaaggtggtggtggttctgtttctgcaaggaagcgactttctttctcaccctcttctgctgctaattcaagaaggcattctgatcctcctaaggtggaaatggtttacaataaggatgctgctgcggctacagtaagcaatggaaggggaaggtagtgtgctggggatgtcattgccacttcagcaattcttgtaggagcacaatatctatggatctatttggataaacttctccataatcacttataaatgaagaaaaacaaaagtaatatag

SEQ ID NO: 18709 - protein, 402 aa, Glycine max
EQSKHAASLAFATAVAAEAAVAAAQAAAEVVRLTSMPHYTGRTKEEIAAIKVQTAFRGYMARRALRALRGLVRLKTLVQGQSVKRQAASTLRSMQTLARLQSQIRERRIRMSEENQALQRQLHQKHEKELEKLRAAVGEEWDDSSQSKEQIEAKLLHRQEAALRRERALAYSFSHQQTWKGSSKSLNPTFMDPNNPQWGWSWLERWMATRPWDGHSTVVDHNDHASVKSAASRAVSVGQITKLYSLQDKKPSPFGSKARRPAPQSSHSKAPSTNGKARPSSSTKGSSVWGGDEDSRSMFSVQSERYRRHSIAGSSVRDDDSRASTPAIPSYMAATSSAKARSKIIRHSPEKKGGGGSVSARKRLSFSPSSAANSRRHSDPPKVEMVYNKDAAAATVSNGRGR

SEQ ID NO: 18710 - protein, 367 aa, Glycine max
MPHYTGRTKEEIAAIKVQTAFRGYMARRALRALRGLVRLKTLVQGQSVKRQAASTLRSMQTLARLQSQIRERRIRMSEENQALQRQLHQKHEKELEKLRAAVGEEWDDSSQSKEQIEAKLLHRQEAALRRERALAYSFSHQQTWKGSSKSLNPTFMDPNNPQWGWSWLERWMATRPWDGHSTVVDHNDHASVKSAASRAVSVGQITKLYSLQDKKPSPFGSKARRPAPQSSHSKAPSTNGKARPSSSTKGSSVWGGDEDSRSMFSVQSERYRRHSIAGSSVRDDDSRASTPAIPSYMAATSSAKARSKIIRHSPEKKGGGGSVSARKRLSFSPSSAANSRRHSDPPKVEMVYNKDAAAATVSNGRGR

SEQ ID NO: 18711 - protein, 343 aa, Glycine max
MARRALRALRGLVRLKTLVQGQSVKRQAASTLRSMQTLARLQSQIRERRIRMSEENQALQRQLHQKHEKELEKLRAAVGEEWDDSSQSKEQIEAKLLHRQEAALRRERALAYSFSHQQTWKGSSKSLNPTFMDPNNPQWGWSWLERWMATRPWDGHSTVVDHNDHASVKSAASRAVSVGQITKLYSLQDKKPSPFGSKARRPAPQSSHSKAPSTNGKARPSSSTKGSSVWGGDEDSRSMFSVQSERYRRHSIAGSSVRDDDSRASTPAIPSYMAATSSAKARSKIIRHSPEKKGGGGSVSARKRLSFSPSSAANSRRHSDPPKVEMVYNKDAAAATVSNGRGR

SEQ ID NO: 18712 - DNA, 1213 bp, Glycine max
gatctaaactaaaccactctctcttctcttcattctccctcttaattcttttctcttttctttctttcacacaaactcctcttattatgatgggtcttgatcaagatgctagcagcaactctggccttcatcttattctagggttagctttgactgccaccaccactactactccatcactaccatccatttccaacaagcttgatcatgttgatcatcatcaccatcttataactcttagaccaacaacaaagtcaccctataattcctctgaggctgaaccatcattaacgttgggcttgtcccgtgagagttacctcaaagtacccaaaaacatcataggacaaaacagcaacaacaaagtctcgtcttgtgatgaccctcttgatcacttgtccacacagactaattcacctcatcacagtgctgtttcctccttctccagtggcagggtcaagagggagagggatctcagttgcgaagaagttgtggatgcaacagagattgatcagagggaccatagctgtgaaggaatagtaagagccactgacgaagacgaagacggcaccgccgccagaaagaaacttaggcttagtaaagaacaatctgctttgctagaagaaagcttcaaacaacatagcaccctcaatcctaaacagaagcaagctttggcgaagcagttgaatcttaggccacgacaagttgaggtgtggttccagaacaggagagccagaacaaagctgaagcagacagaggtggactgcgagttcctaaagaaatgttgtgagacattaacagacgaaaacagacggttacagaaggagcttcaagagcttaaagcactgaaactggctcagcctctgtacatgcctatgcctgcggcaacactcaccatgtgcccctcttgtgagaggctcggcggcggcatcaacggtggcggcggcggttcccctaagacaccattctccatggctcctaagcctcacttcttcaaccccttcgccaacccttctgcagcatgttgattgattgttattataattaggcttttaattagttttcattaaaaaaaaaaaaaacagcaaaaaccaaagaagagttgccccacaacctttgtatttttttggttgagggatacgtcttatgaactacatagctagtgaaaaaaaggttaagggtgtaattaattaactaatatactgtagaaatttgc

SEQ ID NO: 18713 - protein, 340 aa, Glycine max
SKLNHSLFSSFSLLILFSFLSFTQTPLIMMGLDQDASSNSGLHLILGLALTATTTTTPSLPSISNKLDHVDHHHHLITLRPTTKSPYNSSEAEPSLTLGLSRESYLKVPKNIIGQNSNNKVSSCDDPLDHLSTQTNSPHHSAVSSFSSGRVKRERDLSCEEVVDATEIDQRDHSCEGIVRATDEDEDGTAARKKLRLSKEQSALLEESFKQHSTLNPKQKQALAKQLNLRPRQVEVWFQNRRARTKLKQTEVDCEFLKKCCETLTDENRRLQKELQELKALKLAQPLYMPMPAATLTMCPSCERLGGGINGGGGGSPKTPFSMAPKPHFFNPFANPSAAC

SEQ ID NO: 18714 - protein, 312 aa, Glycine max
MMGLDQDASSNSGLHLILGLALTATTTTTPSLPSISNKLDHVDHHHHLITLRPTTKSPYNSSEAEPSLTLGLSRESYLKVPKNIIGQNSNNKVSSCDDPLDHLSTQTNSPHHSAVSSFSSGRVKRERDLSCEEVVDATEIDQRDHSCEGIVRATDEDEDGTAARKKLRLSKEQSALLEESFKQHSTLNPKQKQALAKQLNLRPRQVEVWFQNRRARTKLKQTEVDCEFLKKCCETLTDENRRLQKELQELKALKLAQPLYMPMPAATLTMCPSCERLGGGINGGGGGSPKTPFSMAPKPHFFNPFANPSAAC

SEQ ID NO: 18715 - protein, 311 aa, Glycine max
MGLDQDASSNSGLHLILGLALTATTTTTPSLPSISNKLDHVDHHHHLITLRPTTKSPYNSSEAEPSLTLGLSRESYLKVPKNIIGQNSNNKVSSCDDPLDHLSTQTNSPHHSAVSSFSSGRVKRERDLSCEEVVDATEIDQRDHSCEGIVRATDEDEDGTAARKKLRLSKEQSALLEESFKQHSTLNPKQKQALAKQLNLRPRQVEVWFQNRRARTKLKQTEVDCEFLKKCCETLTDENRRLQKELQELKALKLAQPLYMPMPAATLTMCPSCERLGGGINGGGGGSPKTPFSMAPKPHFFNPFANPSAAC

SEQ ID NO: 18716 - DNA, 1332 bp, Glycine max
acttttcagcggcgaaaatgggaaaacgagagaagcagaagcagaggcatgagaggggtcaccgtggaagagggtctttcaactatcttcaagaagaccatgattttgatgacactccaagatcctcaccctctgaagaagaaggtgctgatggcagcaatgaggaaaaagaagaagatgaagaaaatgtaacaataagtcatgaaaaccaatctcatgatatgccttccaagttcctcctttaccaacaatctgtgcagtctccaaaaggagacataagttatatgcaaaagttctttctcatgtacgtgggtggaaggatgcccctccatcttcaagaagatttctgtggcacggcgcttcttagtacagaatggctccgcagtgattcaagaagaacagtagtaggattagatttggatcttgaggcactcaattggtgcatggaaaacaacatacctaaagttggggctgatggattttcaagaatttccctctttcatgggaatgttttacaacctcttcagtctaaacttgtaaaagtagatcctcaggagctggtaagcaatatttcattgtcacagaatgaagaaaatcttcagactggtgtgccagaatctgatgctccaacaggctctattgctcaagacgataagtatactaagggaaacataacactgcctggaagagatattgtgtgtgcttttaactacagctgctgctgtctacataaacgagcagaactggttatgtatttcaaacatgctcgtggggccttgtcaactaaaggtggaatttttgtgatggatttatatgggggtacgtcgtcagagcacaagttgaggcttcagagaagatttcctaattttacgtatgtatgggagcaagctgaatttgatattattcaacggaagacaaggattagcctccattttcatatgaagaaggaacaaagaaaacttcgccatgcattttcatacagctggcggttgtggacattacctgaaattagggattgcctagaagaggctggatttcggtctgttcacttttgggttcgagagatgccagacaccacagaaattatgaaaacagagggatttggtgcaggaaagaatgtaaaatacgaagaggcaacaagttttcagcaacaagattcttggaatgcttacatagttggtgttgcatagcttcatcttagaaagtgtagtttctgttacattaactttgtcacaagactcacaactagacaagcataacttgtaatcagttccattgcttggaacttccctttcttttatatgaaaattgaattggatttggcttgagatt

SEQ ID NO: 18717 - protein, 395 aa, Glycine max
FSAAKMGKREKQKQRHERGHRGRGSFNYLQEDHDFDDTPRSSPSEEEGADGSNEEKEEDEENVTISHENQSHDMPSKFLLYQQSVQSPKGDISYMQKFFLMYVGGRMPLHLQEDFCGTALLSTEWLRSDSRRTVVGLDLDLEALNWCMENNIPKVGADGFSRISLFHGNVLQPLQSKLVKVDPQELVSNISLSQNEENLQTGVPESDAPTGSIAQDDKYTKGNITLPGRDIVCAFNYSCCCLHKRAELVMYFKHARGALSTKGGIFVMDLYGGTSSEHKLRLQRRFPNFTYVWEQAEFDIIQRKTRISLHFHMKKEQRKLRHAFSYSWRLWTLPEIRDCLEEAGFRSVHFWVREMPDTTEIMKTEGFGAGKNVKYEEATSFQQQDSWNAYIVGVA

SEQ ID NO: 18718 - protein, 390 aa, Glycine max
MGKREKQKQRHERGHRGRGSFNYLQEDHDFDDTPRSSPSEEEGADGSNEEKEEDEENVTISHENQSHDMPSKFLLYQQSVQSPKGDISYMQKFFLMYVGGRMPLHLQEDFCGTALLSTEWLRSDSRRTVVGLDLDLEALNWCMENNIPKVGADGFSRISLFHGNVLQPLQSKLVKVDPQELVSNISLSQNEENLQTGVPESDAPTGSIAQDDKYTKGNITLPGRDIVCAFNYSCCCLHKRAELVMYFKHARGALSTKGGIFVMDLYGGTSSEHKLRLQRRFPNFTYVWEQAEFDIIQRKTRISLHFHMKKEQRKLRHAFSYSWRLWTLPEIRDCLEEAGFRSVHFWVREMPDTTEIMKTEGFGAGKNVKYEEATSFQQQDSWNAYIVGVA

SEQ ID NO: 18719 - protein, 322 aa, Glycine max
MPSKFLLYQQSVQSPKGDISYMQKFFLMYVGGRMPLHLQEDFCGTALLSTEWLRSDSRRTVVGLDLDLEALNWCMENNIPKVGADGFSRISLFHGNVLQPLQSKLVKVDPQELVSNISLSQNEENLQTGVPESDAPTGSIAQDDKYTKGNITLPGRDIVCAFNYSCCCLHKRAELVMYFKHARGALSTKGGIFVMDLYGGTSSEHKLRLQRRFPNFTYVWEQAEFDIIQRKTRISLHFHMKKEQRKLRHAFSYSWRLWTLPEIRDCLEEAGFRSVHFWVREMPDTTEIMKTEGFGAGKNVKYEEATSFQQQDSWNAYIVGVA

SEQ ID NO: 18720 - DNA, 1357 bp, Glycine max
tcagcgctacgtaggcccccccccccaagaacgataacaaaattgaaatcgaattgggtgcgaagtgaaatgttgcaaaccctaggaggcgtaatccctcgcttcgtgagtcgctcatggctccgaaacctgacggtgcgtgcaatggcattctcttcctcctcctccgattatggagaccagtcacgtggtggccttccccgcttctactccgaaactcttcctccttccaagggtagtgttatacgcgtgcaaggtgatgaattctggcatatgacaaaagttttgaggttaaccaccaatgatagggtacagctcttcaatgggaaaggaagtctggtagaaggatgcatacagagcattgatcgaactggacttgattttgttgcattgaatgatttgatatcaatccctccacaaaatacacaattgcatgtatttgctggttttggtactctgaagggtggccgtgctgactggcttgtagagaaatgcacagaatttggagccaatagtgttactcctctattgactgaacattctccgtcaatctcagaaaatcgggtggacagattgaaacgtgtcattttagcagcatccaaacaaagtcaacgactgcatgaaatggtcttgaaacatcctatagagattgatgaccttttgcaccttattgcgcaatcaaagctatctcttgttgcaactgcgaaggcaactcctgttcttagtgcattggcatcgttggaaaaggaaactagtggcttaatcataattggaccagaaggagatttcactgagaaagaagtgagtatgatgatggaagcaggtgctacagctgttagtcttggacctcatcgtcttcgggttgaaactgccacgatagcacttttggcaactgtcatgttatggtctgactcacagcaaatttcagtctgttgattcctcagtgtagctgagagagtacgtggatgacacagaggagtgggaggactacataatcattgccctggattgagaaacaaaaccgtctcctgcaagtgggagtgaagctttgcacagcaagtgtgcttttgaatgccttaatttgtgtgactggtgtatttgccatgaatattcatattaagctatttgatacagggatgcctcagttcctcgggactatttttggaggcattgctgcttgcatattcttgtatttggttaccgttttttggtatatggtggactagctgcccaccaaattgtgttccaaatataaatgtaatttgatttgaaagttagttttctatgtaggtgctagaaattttttcactacaagacaactacgggaagtcagtaacaatttctttctaatatattc

SEQ ID NO: 18721 - protein, 311 aa, Glycine max
SALRRPPPPRTITKLKSNWVRSEMLQTLGGVIPRFVSRSWLRNLTVRAMAFSSSSSDYGDQSRGGLPRFYSETLPPSKGSVIRVQGDEFWHMTKVLRLTTNDRVQLFNGKGSLVEGCIQSIDRTGLDFVALNDLISIPPQNTQLHVFAGFGTLKGGRADWLVEKCTEFGANSVTPLLTEHSPSISENRVDRLKRVILAASKQSQRLHEMVLKHPIEIDDLLHLIAQSKLSLVATAKATPVLSALASLEKETSGLIIIGPEGDFTEKEVSMMMEAGATAVSLGPHRLRVETATIALLATVMLWSDSQQISVC

SEQ ID NO: 18722 - protein, 288 aa, Glycine max
MLQTLGGVIPRFVSRSWLRNLTVRAMAFSSSSSDYGDQSRGGLPRFYSETLPPSKGSVIRVQGDEFWHMTKVLRLTTNDRVQLFNGKGSLVEGCIQSIDRTGLDFVALNDLISIPPQNTQLHVFAGFGTLKGGRADWLVEKCTEFGANSVTPLLTEHSPSISENRVDRLKRVILAASKQSQRLHEMVLKHPIEIDDLLHLIAQSKLSLVATAKATPVLSALASLEKETSGLIIIGPEGDFTEKEVSMMMEAGATAVSLGPHRLRVETATIALLATVMLWSDSQQISVC

SEQ ID NO: 18723 - protein, 263 aa, Glycine max
MAFSSSSSDYGDQSRGGLPRFYSETLPPSKGSVIRVQGDEFWHMTKVLRLTTNDRVQLFNGKGSLVEGCIQSIDRTGLDFVALNDLISIPPQNTQLHVFAGFGTLKGGRADWLVEKCTEFGANSVTPLLTEHSPSISENRVDRLKRVILAASKQSQRLHEMVLKHPIEIDDLLHLIAQSKLSLVATAKATPVLSALASLEKETSGLIIIGPEGDFTEKEVSMMMEAGATAVSLGPHRLRVETATIALLATVMLWSDSQQISVC

SEQ ID NO: 18724 - DNA, 1395 bp, Glycine max
atcaacacggatcaacaattgtggacgctcacaattgtactacttgcaaccaattcaatactgacactcaaggtgttggtcttttcggcaacagcactggtatgacatcaaaccacacacacgagtccgtcactacaaacaacaaccaacatctcggcgcgacctcagccagagctgacaaccacaacaacacgcacctcggagccacatcagcacgagacgaggagacactttctgcaggatcaacagcccgagctgagtccaacgcttacaggatgagtgccaacaacggagaccttgagaaggacttctctaacaggaacggacccaacggatatgggtatggtggcgcaaacaatcaccagcacctccacgagggcatggatgaggatctggccttgaagcacatccggaccgccggtagcatctccatctctcctgagctgttcgagaagctttacctttcgccaaagaacgaggtcaagggtgaacttcgtaagactttcggtaaccccactcctcttgctcttattggtttcctgttgtctctcaccccgcttagttggaccttgatgggatggcgcggagctggaggcagtggctcagcaagcattggatggtacttttttgctggaggccttctgatggtgctcggtggacttggtgaatggattctcggcaacaccttccccttcgtggtattcacgtcttttggtgccttctggcttggctacgccgctacccttgttcctacctacggagcgtacgagaactaccgcaacccgaacgagcaaggtagcactggtttggagtccgttggcttcaacgtcggcattgcctatttcatgatctgcatgggcatactctgtctcgtgtacctcgtctgctcgatgcgaaccaacctggtcttcttcctcatcttcttcactctcgtcccagctttcggcctccttgccggtacgtttatccacaccgcgcagggcaacgcaggaatcgcatccaagtgtcaagaagcagccggcgcattcacgttcgtcacgtgcatacttggatggtacatcttctttgcaatcatgcttgcgagcgtcgacttccccttctccctacctattgttgatctgtctggtatgatcaagggcgcaagcgagaagcagaaggtcgaccacgtcgagtaactttcaggttacgcacataccaggcgttggtaggagatgaaaaggataatcagtgggaagggaaattgcttgctagcgacggcgttgctgtctgctgaagcagctggttagcactcttgaacaatcttttcgatctgttgatgtgcgctgctacgtggtatgcgtggtgcgagatcacaatgttggaccgactaaagttttaatgaaaccttgtacttac

SEQ ID NO: 18725 - protein, 390 aa, Glycine max
QHGSTIVDAHNCTTCNQFNTDTQGVGLFGNSTGMTSNHTHESVTTNNNQHLGATSARADNHNNTHLGATSARDEETLSAGSTARAESNAYRMSANNGDLEKDFSNRNGPNGYGYGGANNHQHLHEGMDEDLALKHIRTAGSISISPELFEKLYLSPKNEVKGELRKTFGNPTPLALIGFLLSLTPLSWTLMGWRGAGGSGSASIGWYFFAGGLLMVLGGLGEWILGNTFPFVVFTSFGAFWLGYAATLVPTYGAYENYRNPNEQGSTGLESVGFNVGIAYFMICMGILCLVYLVCSMRTNLVFFLIFFTLVPAFGLLAGTFIHTAQGNAGIASKCQEAAGAFTFVTCILGWYIFFAIMLASVDFPFSLPIVDLSGMIKGASEKQKVDHVE

SEQ ID NO: 18726 - protein, 357 aa, Glycine max
MTSNHTHESVTTNNNQHLGATSARADNHNNTHLGATSARDEETLSAGSTARAESNAYRMSANNGDLEKDFSNRNGPNGYGYGGANNHQHLHEGMDEDLALKHIRTAGSISISPELFEKLYLSPKNEVKGELRKTFGNPTPLALIGFLLSLTPLSWTLMGWRGAGGSGSASIGWYFFAGGLLMVLGGLGEWILGNTFPFVVFTSFGAFWLGYAATLVPTYGAYENYRNPNEQGSTGLESVGFNVGIAYFMICMGILCLVYLVCSMRTNLVFFLIFFTLVPAFGLLAGTFIHTAQGNAGIASKCQEAAGAFTFVTCILGWYIFFAIMLASVDFPFSLPIVDLSGMIKGASEKQKVDHVE

SEQ ID NO: 18727 - protein, 299 aa, Glycine max
MSANNGDLEKDFSNRNGPNGYGYGGANNHQHLHEGMDEDLALKHIRTAGSISISPELFEKLYLSPKNEVKGELRKTFGNPTPLALIGFLLSLTPLSWTLMGWRGAGGSGSASIGWYFFAGGLLMVLGGLGEWILGNTFPFVVFTSFGAFWLGYAATLVPTYGAYENYRNPNEQGSTGLESVGFNVGIAYFMICMGILCLVYLVCSMRTNLVFFLIFFTLVPAFGLLAGTFIHTAQGNAGIASKCQEAAGAFTFVTCILGWYIFFAIMLASVDFPFSLPIVDLSGMIKGASEKQKVDHVE

SEQ ID NO: 18728 - DNA, 1348 bp, Glycine max
gatttttctgaattgattggtccaagaaggccccaagtccttcaatctctagccaatgcttgtgaacgctacggattttttcagctggtaaaccatggcatatcagatgatgttataagcagcatgagggatgtgagtggcaggttcttcgatcttccttttgaggaaagagccaaacacatgacaactgatatgcatgcaccggttagatatggaacaagcttcagccaaaccaaagatagtgtgttctgttggagggacttcttgaaactcctctgccatcccttgcctgatttcctccctcattggcctgctccccccttagactttaggaaagtggtggctacctactcagaagaaacaaaatacttatttctgatgttgatggaagctatccaagagagcctaggaatcaaagtagaagtcaagaagcaagaagaggagacagaaggaaatgacaataatattctgaaggacttggaagatgggagccagatgatggtggtcaatttctacccaccatgccctgaaccagacctaaccttggggatgccccctcattctgattatggattcctcacactcctcctccaagaccaggtggagggtttgcaaatccaattccaaggtcaatggctcactgtcaaacctatcaataacgctttcgttgtcaatgttggtgatcacctagagatatacagcaacgggaaatacaagagcgtgttacatagggttattgttaatgcaatgaagaaaaggacatctgtggcttcgctgcatagccttcctttcaactgcaccgtaagaccgtcacccaaactcattgacgaagccaaccccaaacgttacgcagacacgaattttgatacttttcttgcatacgtttccaccagagagccaaagagaaaggaattcctggactctaggaaattgtcttctacatgactagaagtctagaagaagaaaaataaatgaatttttttttcatccaatgcaaaaaattatataaattgaagtgaagtgtcatgacctacaataattttgggtgaactcagatattctgtggtcgagagtaaaagactgatctcttaggatattgatctgacacacaataattaattgattattaggggaaaattatgtgtgtaacatatatattattaatcttgatttggttggaccacttagattgtcactgatcctagacttgcagtctcgccctgtttttctgtattattattaacttgttattattatatgtaatatgtttgtacgtgataaaaaaaaaaaaaaaaaaaaaaaaaaaaaaaaaaaaaaaaaaaaaaagaaaaaaaaaaaaaaaaaagat

SEQ ID NO: 18729 - protein, 314 aa, Glycine max
DFSELIGPRRPQVLQSLANACERYGFFQLVNHGISDDVISSMRDVSGRFFDLPFEERAKHMTTDMHAPVRYGTSFSQTKDSVFCWRDFLKLLCHPLPDFLPHWPAPPLDFRKVVATYSEETKYLFLMLMEAIQESLGIKVEVKKQEEETEGNDNNILKDLEDGSQMMVVNFYPPCPEPDLTLGMPPHSDYGFLTLLLQDQVEGLQIQFQGQWLTVKPINNAFVVNVGDHLEIYSNGKYKSVLHRVIVNAMKKRTSVASLHSLPFNCTVRPSPKLIDEANPKRYADTNFDTFLAYVSTREPKRKEFLDSRKLSST

SEQ ID NO: 18730 - protein, 273 aa, Glycine max
MRDVSGRFFDLPFEERAKHMTTDMHAPVRYGTSFSQTKDSVFCWRDFLKLLCHPLPDFLPHWPAPPLDFRKVVATYSEETKYLFLMLMEAIQESLGIKVEVKKQEEETEGNDNNILKDLEDGSQMMVVNFYPPCPEPDLTLGMPPHSDYGFLTLLLQDQVEGLQIQFQGQWLTVKPINNAFVVNVGDHLEIYSNGKYKSVLHRVIVNAMKKRTSVASLHSLPFNCTVRPSPKLIDEANPKRYADTNFDTFLAYVSTREPKRKEFLDSRKLSST

SEQ ID NO: 18731 - protein, 254 aa, Glycine max
MTTDMHAPVRYGTSFSQTKDSVFCWRDFLKLLCHPLPDFLPHWPAPPLDFRKVVATYSEETKYLFLMLMEAIQESLGIKVEVKKQEEETEGNDNNILKDLEDGSQMMVVNFYPPCPEPDLTLGMPPHSDYGFLTLLLQDQVEGLQIQFQGQWLTVKPINNAFVVNVGDHLEIYSNGKYKSVLHRVIVNAMKKRTSVASLHSLPFNCTVRPSPKLIDEANPKRYADTNFDTFLAYVSTREPKRKEFLDSRKLSST

SEQ ID NO: 18732 - DNA, 1016 bp, Glycine max
tgttgataatataatgggtatagcatatgcaatggatctgctggattatgttcaaaagggtgagttgctagaaagtactacggttggagatatggctcacaaacctgcttattttgtacctgattcaatgtctgtttggaatcttcttagagagttcagaatcaggaaggttcacatggcggttgttcttaacgagtatggtggaactgtggggattgtaacactcgaagatgttgttgaggaaattgttggtgaaatatttgatgaaaatgactcaaaggaggagatacagaaaaaaactggttacattgtaatgcgagctgagggtgtttttgatgtggatgcaaacacatccattgatcagctctctgaagatttgaacatcaagatgccagagggtcaccaatatgagacggtatcaggctttgtgtgtgaagcatttggatacattccaaggacaggtgagtgcatcaaagtagttcttgaaagggaagatgaagatgataacaatgagtccaatgctgaccagcaggatcagaaggagaagaaccagagtttcaaacttgagatactagctggaaatgccagaaaggtgagcgctgttcggtttgaacacataaataataatgatgaaatgttggagactaaagtaactcgcatgatccccaaaatcatgaaaagaaaatggaggagtgatgcaaactcagacaatgatgcagaatatgacggagatacatttgcaaagacaccacaggatgacatttctagtgaatatttagttgatcaggaaaattctaacagaggttaagtttgtccgttattcatattttttctcctttctttatacctggcatgcttttgtgccatttttgcaacagcctataagatgaaaaaattgagatacatgttcaaaatgagaagcaatgagttcaagcatgtaaaaccttgcaaaagacgaatttgaggcgtctttgctaacgaaagtctttggtataataaagatgtcaggtttgatc

SEQ ID NO: 18733 - protein, 268 aa, Glycine max
VDNIMGIAYAMDLLDYVQKGELLESTTVGDMAHKPAYFVPDSMSVWNLLREFRIRKVHMAVVLNEYGGTVGIVTLEDVVEEIVGEIFDENDSKEEIQKKTGYIVMRAEGVFDVDANTSIDQLSEDLNIKMPEGHQYETVSGFVCEAFGYIPRTGECIKVVLEREDEDDNNESNADQQDQKEKNQSFKLEILAGNARKVSAVRFEHINNNDEMLETKVTRMIPKIMKRKWRSDANSDNDAEYDGDTFAKTPQDDISSEYLVDQENSNRG

SEQ ID NO: 18734 - protein, 264 aa, Glycine max
MGIAYAMDLLDYVQKGELLESTTVGDMAHKPAYFVPDSMSVWNLLREFRIRKVHMAVVLNEYGGTVGIVTLEDVVEEIVGEIFDENDSKEEIQKKTGYIVMRAEGVFDVDANTSIDQLSEDLNIKMPEGHQYETVSGFVCEAFGYIPRTGECIKVVLEREDEDDNNESNADQQDQKEKNQSFKLEILAGNARKVSAVRFEHINNNDEMLETKVTRMIPKIMKRKWRSDANSDNDAEYDGDTFAKTPQDDISSEYLVDQENSNRG

SEQ ID NO: 18735 - protein, 258 aa, Glycine max
MDLLDYVQKGELLESTTVGDMAHKPAYFVPDSMSVWNLLREFRIRKVHMAVVLNEYGGTVGIVTLEDVVEEIVGEIFDENDSKEEIQKKTGYIVMRAEGVFDVDANTSIDQLSEDLNIKMPEGHQYETVSGFVCEAFGYIPRTGECIKVVLEREDEDDNNESNADQQDQKEKNQSFKLEILAGNARKVSAVRFEHINNNDEMLETKVTRMIPKIMKRKWRSDANSDNDAEYDGDTFAKTPQDDISSEYLVDQENSNRG

SEQ ID NO: 18736 - DNA, 1284 bp, Glycine max
gtcagaactgccaacagatagccccatctctttctccttctccctaaacctcgaactcagcacccccatccactggtgattgtttgattgagccttgaagaaatggaccacagcgctgatgcacatcgcacggacttgatgaccataacgcggttcgtgctgaacgagcaatccaagcacccggagtcacgcggcgatttcaccatcttgctcagtcacattgttctcggttgcaagttcgtttgttccgctgtcagcaaggctggtcttgctaaacttattggactcgctggagaaaccaatgttcagggtgaagaacagaagaaacttgatgttctttccaatgaggttttcatcaaggctctcataagcagtggccgaacatgcatcttggtttctgaagaagacgaagaagcgataattgtggagccttctaagcgcggaaagtactgtgtttgctttgacccattggatggctcgtccaacattgattgtggggtttccattggcacaatttttggggtttatgcgttgaaagatgtccatgaaccaaccatagaagatgtcctgcttcctgggaagaacatggtggcagctggttactgtatgtatggaagctcttgcacgcttgtgttaagcactggagcaggtgttaatggtttcacccttgacccatctcttggtgagttcatcctaactcaccctaacattaagatcccaaagaaaggtaaaatttattcagtgaatgaaggaaatgccaaaaactgggatcgtcctactgctacttacgttgaaaaatgcaagtttcctgaagatggttcatcaccaaagtctctaagatatattggaagcatggtagctgatgttcatcgtacgttgctttatggaggcatctttttgtaccctgctgacaaaaaaagtccaaatggaaaacttcgtgtcctgtatgaagtcttcccaatgtcattcttgatggaacaggcaggaggacagtctttcacgggcaaggaacgggcacttgatttagttccaacgaagttgcatgagcgatctcccatattccttggtagctatgatgatgttgaggaaatcaaagctctttatgctgctgctgagggtgaacaagaatgaaattggaaaggtttcttgtatctttcgctacttacaagcgcttgttttctaattgttactagcaagtgcttataagaaaactagttatctggtcatgtatatgttaataaaattggttgatgtgcctgtcagggctatagaatttatttagat

SEQ ID NO: 18737 - protein, 342 aa, Glycine max
MDHSADAHRTDLMTITRFVLNEQSKHPESRGDFTILLSHIVLGCKFVCSAVSKAGLAKLIGLAGETNVQGEEQKKLDVLSNEVFIKALISSGRTCILVSEEDEEAIIVEPSKRGKYCVCFDPLDGSSNIDCGVSIGTIFGVYALKDVHEPTIEDVLLPGKNMVAAGYCMYGSSCTLVLSTGAGVNGFTLDPSLGEFILTHPNIKIPKKGKIYSVNEGNAKNWDRPTATYVEKCKFPEDGSSPKSLRYIGSMVADVHRTLLYGGIFLYPADKKSPNGKLRVLYEVFPMSFLMEQAGGQSFTGKERALDLVPTKLHERSPIFLGSYDDVEEIKALYAAAEGEQE

SEQ ID NO: 18738 - protein, 330 aa, Glycine max
MTITRFVLNEQSKHPESRGDFTILLSHIVLGCKFVCSAVSKAGLAKLIGLAGETNVQGEEQKKLDVLSNEVFIKALISSGRTCILVSEEDEEAIIVEPSKRGKYCVCFDPLDGSSNIDCGVSIGTIFGVYALKDVHEPTIEDVLLPGKNMVAAGYCMYGSSCTLVLSTGAGVNGFTLDPSLGEFILTHPNIKIPKKGKIYSVNEGNAKNWDRPTATYVEKCKFPEDGSSPKSLRYIGSMVADVHRTLLYGGIFLYPADKKSPNGKLRVLYEVFPMSFLMEQAGGQSFTGKERALDLVPTKLHERSPIFLGSYDDVEEIKALYAAAEGEQE

SEQ ID NO: 18739 - protein, 181 aa, Glycine max
MVAAGYCMYGSSCTLVLSTGAGVNGFTLDPSLGEFILTHPNIKIPKKGKIYSVNEGNAKNWDRPTATYVEKCKFPEDGSSPKSLRYIGSMVADVHRTLLYGGIFLYPADKKSPNGKLRVLYEVFPMSFLMEQAGGQSFTGKERALDLVPTKLHERSPIFLGSYDDVEEIKALYAAAEGEQE

SEQ ID NO: 18740 - DNA, 1498 bp, Glycine max
gataaatccaattataaatagactgattttcagaaatattagtatatatttatatgcatacaatgatgcaaacaaacaggaaccgtttggcagcttaatgcttcaagatctattatttgttacttcttccaatttatctgtaacttgtactcccctgccccttttaagaatacttatttacttattattttatttgcagtaatttcagctccttctgatgtcaaaaaacatgagcagaaagatgataaccttccagttgacatcaaattgcctgttaagcatgtattatccagagagcttcagctgtattttgacaaagtggccgagcttactttgagtgagtctgaatcagttctctttaaagaggcattagtaagtttggctactgattcaggacttcatccactagttccttatttcacatgctttatagctgatgaggtttcccgtggtttgaataattatcctcttctatttgccttgatgcgagttgttagtagccttctgcaaaaccctcacatccatattgaaccatatctacaccagttgatgccatctgttgtgacctgccttgttgctaaaaggttgggcagtaggttggcagacaaccactgggaacttagagactctacggctaatctggttgcctcaatatgcaaaaggtttggacatgtttacagtaatctccagtctcggttgacaaaaacattgctgaatgcattcttggatcccaagaaggcattgacgcaacactatggtgcaattcaggggttaggagcactgggtcccaacgtggttcgccttcttttgctgccgaaccttgaaacatatatgcgacttcttgaaccagagatgcttcttgagatgcagaaaaatgaaatgaaaaggcatgaagcttggctggtttatggagccttgctggtcagtgtatatatgatcgactaaagattttcccaacttttccatctcctccccttcatgctgtctggaagaccaatgcaaaagttcttacttcaactcataaacgcaaggcaagccctgagcaattggaacagcagccacctttgaaaaaagctgctacggatggtgagattggtgtggacctaatgaatcacgagcaagaggaggcagggactcaagcttcttcagccgattcaataattggctcatcatcatctaacacacagatgaaaaatgagactactttagatggagaagttagaagtaacgggggtgatactcaggcattgaagacatctgctgctctcacccaggtttggaaggacgagcttaactcaggacgtaccctggtatcactgtttgagttgtttggtgaaggaattctctccttcattcaggctcctgagatgtatatgttcttgtaacttagggagtatcatagtaatttgatggatagaacttggataacccatagaccattatttcgaaaacaaactaaaattcctccatggtatgccaagttcatgttgatgttttt

SEQ ID NO: 18741 - protein, 153 aa, Glycine max
MRVVSSLLQNPHIHIEPYLHQLMPSVVTCLVAKRLGSRLADNHWELRDSTANLVASICKRFGHVYSNLQSRLTKTLLNAFLDPKKALTQHYGAIQGLGALGPNVVRLLLLPNLETYMRLLEPEMLLEMQKNEMKRHEAWLVYGALLVSVYMID

SEQ ID NO: 18742 - protein, 131 aa, Glycine max
MPSVVTCLVAKRLGSRLADNHWELRDSTANLVASICKRFGHVYSNLQSRLTKTLLNAFLDPKKALTQHYGAIQGLGALGPNVVRLLLLPNLETYMRLLEPEMLLEMQKNEMKRHEAWLVYGALLVSVYMID

SEQ ID NO: 18743 - protein, 92 aa, Glycine max
MNHEQEEAGTQASSADSIIGSSSSNTQMKNETTLDGEVRSNGGDTQALKTSAALTQVWKDELNSGRTLVSLFELFGEGILSFIQAPEMYMFL

SEQ ID NO: 18744 - DNA, 1837 bp, Glycine max
aggtcctgccaaaaagtcaaatgtccaaagctcagctggccctaaatctgataaagtgcaactgattgagcataggcgagcatataattgtgaaatcatgctttcaaaagtgaaagtgccattgcatgatttaatgagctcagtgttagcactggaggagtcagcactcgacactgatcaggttgagaacctcataaagttttgtcctacaaaagaggagatggaattacttaagggttataatggggaaaaggagaagttgggaagatgcgaacagttcttaatggaattgatgaaagtaccacgggtggaatccaagctcagagttttttcgttcaggattcaattcaactctcaggtttctgaccttagaaatagcctgagtgttgtgaattctgcttcagaagaggcatgatatcttcctttttacggaaacatctttttgcaacatagtttctttgtcttttttcatgagaaataacattttggatgttgagattttgtttcctctattcagatcaggaattctgtcaaattaaagagaattatgcaaacaatactttctttaggaaatgctttgaaccaaggaactgccaagggttctgctattggattcagattggatagccttcttaaactcacagagacacgtgcacgggacaagaagatgactcttatgcattatctttgtaaggtgctagatgaccaactaccggacgttttagacttctccaaggatgttgctaacctagagccagcagcaaagatgcaattgaagtttttggctgaggagatgcaagctataaacaaaggattagaaaaagtggtacaggaactatcaacctctgaaaatgatgggcctatatcagaaactttctgcaagaaattgaaaaaattcctcggttctgctgaagctgatgtccgttctctggcttcactatattccagcgtgggtaggaacgtggatcaattgattctctattttggtgaagatccagctcgttgcccatttgagcaagttgtgtcaactttgctcaactttactaggatgttcaacaaagcccatgaagaaaaccgcaagcagctagagcttgaaatgaagaagacagcagaaagtgagaaaaagaaatgtgaatcagaaagaattttacctacagctatccggactggcaatgtcaaatagatgctactagctttgagaatcagtatatactctaacgtgaataggatttgactggacaaaaacgggtctggtgtatggtgtttttgaagagcatgtatagttacacaagtagtagtagctgacattgataaccaaaacgaagagaactgcaataccgcaatacactgcaaagtttagaaatggtgtagtttgcacgagttgtgttatttaccagccaacctgtatatatcttcctcttccctctccgctcagcaactgtatgattgtaagtattttcaggaaacctgggcattcgttattaattttttctctctccctcaggctctgttagcaacactgatttcacatctgtaatgcaatgcttgatttcttcttgtatagcttatatatgatttttttccccctagcaaaatatcttcttaggtgccccaaaaataagggaaatttcttgctcggtattattgaatgtgtactaccccagctataacactaaaatattgctaaagttggagatacttatggctcacataatcaaggtgacatacatttaatagtaccaaacaagagtctaaagcaaaccaagaatttcagttgaaataggcctttgttgccgtttctacttacatttattgaaatgataactgaatattattt

SEQ ID NO: 18745 - protein, 211 aa, Glycine max
MQTILSLGNALNQGTAKGSAIGFRLDSLLKLTETRARDKKMTLMHYLCKVLDDQLPDVLDFSKDVANLEPAAKMQLKFLAEEMQAINKGLEKVVQELSTSENDGPISETFCKKLKKFLGSAEADVRSLASLYSSVGRNVDQLILYFGEDPARCPFEQVVSTLLNFTRMFNKAHEENRKQLELEMKKTAESEKKKCESERILPTAIRTGNVK

SEQ ID NO: 18746 - protein, 171 aa, Glycine max
MTLMHYLCKVLDDQLPDVLDFSKDVANLEPAAKMQLKFLAEEMQAINKGLEKVVQELSTSENDGPISETFCKKLKKFLGSAEADVRSLASLYSSVGRNVDQLILYFGEDPARCPFEQVVSTLLNFTRMFNKAHEENRKQLELEMKKTAESEKKKCESERILPTAIRTGNVK

SEQ ID NO: 18747 - protein, 168 aa, Glycine max
MHYLCKVLDDQLPDVLDFSKDVANLEPAAKMQLKFLAEEMQAINKGLEKVVQELSTSENDGPISETFCKKLKKFLGSAEADVRSLASLYSSVGRNVDQLILYFGEDPARCPFEQVVSTLLNFTRMFNKAHEENRKQLELEMKKTAESEKKKCESERILPTAIRTGNVK

SEQ ID NO: 18748 - DNA, 958 bp, Glycine max
cattactttcaggtttcatttcaaaatattctctctctcctcttaaagcaaaacccttaattattaccaacgaccacacaccacagccactttcatcaatttccttaatccccacctccacataacaacaacaacgaactaacgccaccacattcattctttccttctttgtgcctacaatactactactactactactaattctacatggatggcaactcttttggaaacgtgccacccccaccaatacaagttcctgataacttggctatctcctcctcctcttcgccaactcccacgacatcatctccgtctccgacaccctctggaggctttcggtaccgcgggacgcggtgccggagcggaaagtgggtgtcggagataagggagccacgtaaaacgaatcgcatttggctggggacttacccgacagcggaaatggctgcggcggcatatgatgtcgccgcactcgcgttgaagggtcccgacacgcccgtcaacttccctaattcgatactgtcgtaccctattcctgcttcattgtcctccacggacattcgcgccgcggctgcggccgcggcgcaggctaggatcgtgagggcgccgcaggagagtgaggaaacggtaaaccctgatgatggcgggcaagggttatcggagaggcgtgaggagtacatttatgaggatgagttgttgaacatgccgaatttgctcgatgaaatggccagaggaatgcaggttagtccccttaggatcacttcctattcttcagatgattcgcctgggaattctgatggagataacctttggagttataccctttgatcactgatttgttgtttgttcagtgagtgagtatggtaatttgttttgtgtttgtttgaaagttcgagtcttgattatgtatgttcaaccttgttaaatatttgaaaggagggctttataacgggattgtggg

SEQ ID NO: 18749 - protein, 205 aa, Glycine max
MDGNSFGNVPPPPIQVPDNLAISSSSSPTPTTSSPSPTPSGGFRYRGTRCRSGKWVSEIREPRKTNRIWLGTYPTAEMAAAAYDVAALALKGPDTPVNFPNSILSYPIPASLSSTDIRAAAAAAAQARIVRAPQESEETVNPDDGGQGLSERREEYIYEDELLNMPNLLDEMARGMQVSPLRITSYSSDDSPGNSDGDNLWSYTL

SEQ ID NO: 18750 - protein, 128 aa, Glycine max
MAAAAYDVAALALKGPDTPVNFPNSILSYPIPASLSSTDIRAAAAAAAQARIVRAPQESEETVNPDDGGQGLSERREEYIYEDELLNMPNLLDEMARGMQVSPLRITSYSSDDSPGNSDGDNLWSYTL

SEQ ID NO: 18751 - DNA, 1013 bp, Glycine max
aatcccaatccaaatctcatcgccaagcaatcatcactctagccctttgccctccccacccgcagcagcatggcgagcccgcagtgctgcgcgaacccaccggcgctcaaccccgccgccggcgagggcaaggtcgtggacagcttcggcgggatcaaggcgtacgtcgccggcgcccaggactccaaggccgccgtcgtcctcatctccgacgtctacggttttgaagcgccgaatctgaggaagatagccgataaagttgcttcgtctggatattttgttgtcgtgccagatttcttacatggggatccatttgtacctgaaaacgctgaccgaccaatagcagtgtggataaaggagcataccccgggaaaagcatttgaagaggcaaaacctgttattgctgctctaaaggaacaaggagcgtctagtgttggggctgcaggttattgctggggtgcaaaggtagttgcagagctagggaaagctaatgagatccaggcagctgttatgtcgcacccttcatttgttactgttgatgatataaaagaggtgaaatgccccatctctatacttggagctgaaaccgacgtaatgtccccaccagaattggtcaaggagttcgagcaggttctatcctctaactcacggattgctcactttgtcaagatcttccctggggtttctcatggatggaccgtgagatacaaaagcgaagacgcagctgctgtgaagagcgcctaggaagccctggcggacatggttgactggtttaacaagaacctcaagtaaacctaatgaattagcggccatccttttgtaataagccagtgtcactcttcaggagtcatcacgcgagcacccacggtttatgttatggtcttagctatatagcctatagcgcatgcatctttgtctgccgcaggtctgctggtatgtgtgtgattgctcgtatcggggtctgcttgtgctgaacattgaactactgcactcaaataaaatgtggtatttac

SEQ ID NO: 18752 - protein, 224 aa, Glycine max
MASPQCCANPPALNPAAGEGKVVDSFGGIKAYVAGAQDSKAAVVLISDVYGFEAPNLRKIADKVASSGYFVVVPDFLHGDPFVPENADRPIAVWIKEHTPGKAFEEAKPVIAALKEQGASSVGAAGYCWGAKVVAELGKANEIQAAVMSHPSFVTVDDIKEVKCPISILGAETDVMSPPELVKEFEQVLSSNSRIAHFVKIFPGVSHGWTVRYKSEDAAAVKSA

SEQ ID NO: 18753 - DNA, 818 bp, Glycine max
ctagattagagttgatctcggctggtgatttcactagtccgcgcaggtgccaagcccggattgggcccgctgctcccctctcgtctcccgtcgtcggaccaccggcgacccctcttccaagccgccatcgtcctcacctccggcacttcctcttctccaccactcgacccagctcagcagcagggcggcggacgggaggatgatggggagcaacaaccccggcggcgctgggggagggggagggatggccccgggcacgggggccggcggcagcgacgggcggcacgacgacgaggccgtgctcaccgagttcctctcctccctcatggactacaatcccacgatcccggacgagctcgtggagcactacctcggccgaagcggcttccactgccccgacctacgcctaacaaggctggttgctgtagctgctcaaaagttcatttcagacattgcaagtgactctcttcagcactgcaaagccagggttgcagcacctgtcaaagataacaagagcaaacaaccaaaggatagacgtcttgtattgacaatggatgatctttcaaaagccttgcgtgagcatggtgttaatctgaaacatccagagtattttgcggacagcccatcagcagggatggccccctcaacaagagaggagtagaatcgattgcttcttcaacaagagagggctagaatcaattgtttcttataagcgtacccagtgaacggtcgtgtccttcccaactttatgtaacaaaaccttataagcatgtatcgaatgtcagttcttgatgtattatggacccgtagttgccttc

SEQ ID NO: 18754 - protein, 153 aa, Glycine max
MMGSNNPGGAGGGGGMAPGTGAGGSDGRHDDEAVLTEFLSSLMDYNPTIPDELVEHYLGRSGFHCPDLRLTRLVAVAAQKFISDIASDSLQHCKARVAAPVKDNKSKQPKDRRLVLTMDDLSKALREHGVNLKHPEYFADSPSAGMAPSTREE

SEQ ID NO: 18755 - protein, 152 aa, Glycine max
MGSNNPGGAGGGGGMAPGTGAGGSDGRHDDEAVLTEFLSSLMDYNPTIPDELVEHYLGRSGFHCPDLRLTRLVAVAAQKFISDIASDSLQHCKARVAAPVKDNKSKQPKDRRLVLTMDDLSKALREHGVNLKHPEYFADSPSAGMAPSTREE

SEQ ID NO: 18756 - protein, 138 aa, Glycine max
MAPGTGAGGSDGRHDDEAVLTEFLSSLMDYNPTIPDELVEHYLGRSGFHCPDLRLTRLVAVAAQKFISDIASDSLQHCKARVAAPVKDNKSKQPKDRRLVLTMDDLSKALREHGVNLKHPEYFADSPSAGMAPSTREE

SEQ ID NO: 18757 - DNA, 1040 bp, Glycine max
attttttttcgatagagaattaccaagttcaacttgaggaaatgaagaacatgagcagacaggaatacgttgcacacttgagaagaaaaagcagcgggttttctagaggtgcttcaatatacagaggggtcacaaggcatcaccaacatggaagatggcaagcgaggataggcagagttgctgagaacaaagacctttaccttgggacgttcagcacccaagaggaagcagcagaagcatacgatgtagcggcgatcaaatttcgcggcgcaaatgcagtcacaaactttgacatttcaagatacgatgtggagagaatcatggccagtagcaatctcctcgctggggagcttgcaaggcgtaagaaagataacgatcctagaaacaaggacatagactacaacaagagtgtagtaacaagtgtgaacaatgaggaaacggttcaagttcaagcaggaaacaacaataatgaaaacgactcagagtggaagatggttttatttaaccacccttcacagcagcaacaggcaaatggcaatggcagtgaccaaaaaataatgaactgtggaaattacagaaacagtgcattttctatggccctacaagatcttattgggattgattcggtgggttctgggcagcataatatgctggacgagtctagcaaaattgggactcatttttcaaacacgtcatcgctggtgacaagtttaagcagctcaagagaggctagtcctgagaaaaggggtccctcgcttctgttcccaatgcctccaatggaaacaaagattgtgaaccccattggtaccagtgttacctcttggctaccctcaccaacggttcaaatgaggccttctcctgctatctctttgtctcacttgccagtttttgcttcttggactgatacttaaatggagataggcacggtccatttttcatgttatgttatgtaactaaaatttacttttttccttcatcttttatttctaatttgatttcctaagtttaaaagcttttattttgatgttagattaaaaaac

SEQ ID NO: 18758 - protein, 302 aa, Glycine max
FFSIENYQVQLEEMKNMSRQEYVAHLRRKSSGFSRGASIYRGVTRHHQHGRWQARIGRVAENKDLYLGTFSTQEEAAEAYDVAAIKFRGANAVTNFDISRYDVERIMASSNLLAGELARRKKDNDPRNKDIDYNKSVVTSVNNEETVQVQAGNNNNENDSEWKMVLFNHPSQQQQANGNGSDQKIMNCGNYRNSAFSMALQDLIGIDSVGSGQHNMLDESSKIGTHFSNTSSLVTSLSSSREASPEKRGPSLLFPMPPMETKIVNPIGTSVTSWLPSPTVQMRPSPAISLSHLPVFASWTDT

SEQ ID NO: 18759 - protein, 289 aa, Glycine max
MKNMSRQEYVAHLRRKSSGFSRGASIYRGVTRHHQHGRWQARIGRVAENKDLYLGTFSTQEEAAEAYDVAAIKFRGANAVTNFDISRYDVERIMASSNLLAGELARRKKDNDPRNKDIDYNKSVVTSVNNEETVQVQAGNNNNENDSEWKMVLFNHPSQQQQANGNGSDQKIMNCGNYRNSAFSMALQDLIGIDSVGSGQHNMLDESSKIGTHFSNTSSLVTSLSSSREASPEKRGPSLLFPMPPMETKIVNPIGTSVTSWLPSPTVQMRPSPAISLSHLPVFASWTDT

SEQ ID NO: 18760 - protein, 286 aa, Glycine max
MSRQEYVAHLRRKSSGFSRGASIYRGVTRHHQHGRWQARIGRVAENKDLYLGTFSTQEEAAEAYDVAAIKFRGANAVTNFDISRYDVERIMASSNLLAGELARRKKDNDPRNKDIDYNKSVVTSVNNEETVQVQAGNNNNENDSEWKMVLFNHPSQQQQANGNGSDQKIMNCGNYRNSAFSMALQDLIGIDSVGSGQHNMLDESSKIGTHFSNTSSLVTSLSSSREASPEKRGPSLLFPMPPMETKIVNPIGTSVTSWLPSPTVQMRPSPAISLSHLPVFASWTDT

SEQ ID NO: 18761 - DNA, 894 bp, Glycine max
aatacgatcagttttggttcgtcttctcttcgagaggaagctttgatttgatcgtaatcgatagattgttattgttgattaagagagttgagtttttttgtgatcggaggtgatggattggggaagtgtgacggctgaagatctcgtcgatgctctccgagaggttgattggtcgtcgccgccgcgtccgctgtctgagttcttctcaaggttcaccgttcctaaatctctcgctaaatgggacagccgcctcaagtgcaatctctactattaccgaacgaactacttcatcatgatcgtctttatacttggattgggatttcttacaaggcctctcgccattctctctgcctttttgactgcagtaactgtggcatttcttaatgacagctttgcaggttcctttagtgagaaggccacacgaaccatcagaagtttctccccacagttagctgctaaaatgagacctccattggcgcctgtcattcgtggacgcccatcagcaaagagagcaatctatatctgtggccaaccccgttgggtctttgtcttgatatcctcacttgtgagttttgccctttggtatatttcatgtggtttgttcaccgtctctttggcactactcattgggcttcttgctacaattcttcatgcaaccttgagaacacccaacttgaaggcacgtcttaacaccttcagggaggaatttcgagcagtgtggcgtaactacagtgagatctagagtaatgtaagctcgagcagagtattgctgttgctgtaagctttgatttttttagctccatgactcggattatctgttacttgatttggtttctgctttctgtagccatattggcaacaagaaacaactcatttcaatgacttttctgtatc

SEQ ID NO: 18762 - protein, 209 aa, Glycine max
MDWGSVTAEDLVDALREVDWSSPPRPLSEFFSRFTVPKSLAKWDSRLKCNLYYYRTNYFIMIVFILGLGFLTRPLAILSAFLTAVTVAFLNDSFAGSFSEKATRTIRSFSPQLAAKMRPPLAPVIRGRPSAKRAIYICGQPRWVFVLISSLVSFALWYISCGLFTVSLALLIGLLATILHATLRTPNLKARLNTFREEFRAVWRNYSEI

SEQ ID NO: 18763 - protein, 149 aa, Glycine max
MIVFILGLGFLTRPLAILSAFLTAVTVAFLNDSFAGSFSEKATRTIRSFSPQLAAKMRPPLAPVIRGRPSAKRAIYICGQPRWVFVLISSLVSFALWYISCGLFTVSLALLIGLLATILHATLRTPNLKARLNTFREEFRAVWRNYSEI

SEQ ID NO: 18764 - DNA, 799 bp, Glycine max
acatagctttgaacacaaaacaaaaagtttacgttacaaatcgcataataaccgtcctaagtttattgagagaattttgcaagtgtgagaaacatggcatctcgtcaaaacaacaagcaagagcttgatgaaagagcaaggcaaggagagactgttgtcccgggtggaactggtggcaagagcctggaggctcagcaacaccttgctgaaggaaggagcaagggagggcaaacaaggaaggaacagctgggtacagaagggtaccaggaaatgggacgcaaaggagggttgagcactgtggacaaatcaggagaagaacgtgctcaagaggaaggcattggcatcgatgagtccaagttcaggactggtaataacaagaaccagaatcagaacgaagaccaggataagtgataatgtaacacccttcactagcatgtgtagtgtgttcttatgctagcttaaatgtgagtgtcaagtgttttaggaagtaggaaaagaataggttataaaaaataatgtttaggcaatagttatataggtcaaagtgtcatgtcatgtgtgtcgtgaaataattagctagcatgtttaggttgttttagggtttcttttgcatgtgtgtttctcttatgtgtgtaagtgatcagtgaggcatggctctatagctatccagaaattagcacaagcaagcatgtgcctccatttcactaatgtgtatgtatctatggtgtgaccacgttcaatactagaatgtaatggtctcaactcttatgttaacttatcgtggcacaaacaattacgt

SEQ ID NO: 18765 - protein, 105 aa, Glycine max
MASRQNNKQELDERARQGETVVPGGTGGKSLEAQQHLAEGRSKGGQTRKEQLGTEGYQEMGRKGGLSTVDKSGEERAQEEGIGIDESKFRTGNNKNQNQNEDQDK

SEQ ID NO: 18766 - protein, 54 aa, Glycine max
MKEQGKERLLSRVELVARAWRLSNTLLKEGAREGKQGRNSWVQKGTRKWDAKEG

SEQ ID NO: 18767 - DNA, 1775 bp, Glycine max
aatcctcataactgcactatcacacacatagttctcttatctggtgcaagtgcaacaatcaagtactcatcagcatgggaatgttgttgttgttgttgtcttattctctccttttcctggttctattccttacactgaaatcccttttccaaagcagaaaattgagaaacctaccaccaggtcctcctcctcttcccataataggtaaccttaacctcctcgaacaacctattcaccgtttcttccaacgcatgtccaaagaatatggaaacatcgtttccctttggttcggttcacgtctcgccgttgtcatttcctcaccaactgcataccaagaatgcttcaccaaacacgacgttgccttggccaaccggctaccttctctctcgggaaaatacatattctacaacaacaccaccgtagggtcctgctcccacggccagcactggcggaacctccgccgaatcaccgccctggacgtcctctccacgcagcgagtccactctttctccggaatccgaagcgacgagacgaaaaggttggtacagaggttgctggccaagaactccaaggagggttttgctcgcgtggagataagctccatgttcaatgacttgacctacaacaacatcatgaggatgatatcagggaagaggttttacggagaggagagtgagttgaagaacgttgagaaagcgagggagttcagagagacagtgacagagatgctagaactcatgggggtggctaataagggagatcacttacctttcctaagatggttcgattttcagaatgtggagaagcgtttgaagagtattagtaaaaggtatgataccatcttgaatgagatcattgatgagaaccgtagcaagaaggaccgcgagaattccatgattgatcatcttctcaaactgcaagagactcagcctgagtactacactgaccaaatcatcaaaggccttgctttggccatgctttttggcggaactgactcatcaacgggaaccttagagtggtcgctatctaatttattgaatcacccagaggtgttgaagaaagcaaaagaagaattggacactcaagtaggacaagaccgcttgttaaatgagtcagaccttccaaaacttccttatcttagaaagatcattcttgagacacttaggttgtatcctccagctccaattctaatacctcatgtgtcttcagaagatatcactattgaaggattcaatgtcccacgagacacaattgtgatcattaatggttggggcatgcagagagatcctcatttgtggaatgatgccacatgctttaaacctgagaggtttgatgtggaaggagaggagaaaaagttggtagcatttggaatgggaagaagggcttgcccaggagaacccatggctatgcaaagtgtcagctttactttgggattattgattcaatgttttgactggaaacgagtaagtgaggaaaagcttgatatgacagagaataattggattaccttgtcaaggttaattccattggaagccatgtgcaaggctcgtccactcgccactaaaattggagtttaattattaatagtttttttatttggtaaagttgggtcaacatctaatacttataatttcagtgtgcatgtggtggttatacatgttaaacataatagtatttgtttgtatgtttacaaggccagttgtagaattggtgtgcattaggatatattaatattgtatgcatccccaacttctcaaataaattttttacttttt

SEQ ID NO: 18768 - protein, 500 aa, Glycine max
MGMLLLLLSYSLLFLVLFLTLKSLFQSRKLRNLPPGPPPLPIIGNLNLLEQPIHRFFQRMSKEYGNIVSLWFGSRLAVVISSPTAYQECFTKHDVALANRLPSLSGKYIFYNNTTVGSCSHGQHWRNLRRITALDVLSTQRVHSFSGIRSDETKRLVQRLLAKNSKEGFARVEISSMFNDLTYNNIMRMISGKRFYGEESELKNVEKAREFRETVTEMLELMGVANKGDHLPFLRWFDFQNVEKRLKSISKRYDTILNEIIDENRSKKDRENSMIDHLLKLQETQPEYYTDQIIKGLALAMLFGGTDSSTGTLEWSLSNLLNHPEVLKKAKEELDTQVGQDRLLNESDLPKLPYLRKIILETLRLYPPAPILIPHVSSEDITIEGFNVPRDTIVIINGWGMQRDPHLWNDATCFKPERFDVEGEEKKLVAFGMGRRACPGEPMAMQSVSFTLGLLIQCFDWKRVSEEKLDMTENNWITLSRLIPLEAMCKARPLATKIGV

SEQ ID NO: 18769 - protein, 498 aa, Glycine max
MLLLLLSYSLLFLVLFLTLKSLFQSRKLRNLPPGPPPLPIIGNLNLLEQPIHRFFQRMSKEYGNIVSLWFGSRLAVVISSPTAYQECFTKHDVALANRLPSLSGKYIFYNNTTVGSCSHGQHWRNLRRITALDVLSTQRVHSFSGIRSDETKRLVQRLLAKNSKEGFARVEISSMFNDLTYNNIMRMISGKRFYGEESELKNVEKAREFRETVTEMLELMGVANKGDHLPFLRWFDFQNVEKRLKSISKRYDTILNEIIDENRSKKDRENSMIDHLLKLQETQPEYYTDQIIKGLALAMLFGGTDSSTGTLEWSLSNLLNHPEVLKKAKEELDTQVGQDRLLNESDLPKLPYLRKIILETLRLYPPAPILIPHVSSEDITIEGFNVPRDTIVIINGWGMQRDPHLWNDATCFKPERFDVEGEEKKLVAFGMGRRACPGEPMAMQSVSFTLGLLIQCFDWKRVSEEKLDMTENNWITLSRLIPLEAMCKARPLATKIGV

SEQ ID NO: 18770 - protein, 441 aa, Glycine max
MSKEYGNIVSLWFGSRLAVVISSPTAYQECFTKHDVALANRLPSLSGKYIFYNNTTVGSCSHGQHWRNLRRITALDVLSTQRVHSFSGIRSDETKRLVQRLLAKNSKEGFARVEISSMFNDLTYNNIMRMISGKRFYGEESELKNVEKAREFRETVTEMLELMGVANKGDHLPFLRWFDFQNVEKRLKSISKRYDTILNEIIDENRSKKDRENSMIDHLLKLQETQPEYYTDQIIKGLALAMLFGGTDSSTGTLEWSLSNLLNHPEVLKKAKEELDTQVGQDRLLNESDLPKLPYLRKIILETLRLYPPAPILIPHVSSEDITIEGFNVPRDTIVIINGWGMQRDPHLWNDATCFKPERFDVEGEEKKLVAFGMGRRACPGEPMAMQSVSFTLGLLIQCFDWKRVSEEKLDMTENNWITLSRLIPLEAMCKARPLATKIGV

SEQ ID NO: 18771 - DNA, 1215 bp, Glycine max
gttgctccaattccagtctgggagatcccaatatggaaagacatatcaccacgtctaaggaaggttaatgcagctctcaaattcatcaatgatactcttgatgatttgatagcaatatgcaagaaaatggtggatgaagaagagttacagtttcatgaggagtacatgaatgaaaaagatccaagtattctacacttcttgttggcatcaggagatgatgtgtcaagtaagcaacttcgtgatgacttaatgactatgctcattgctggacatgaaacatcagctgctgttttaacttggaccttttatcttctatccaaggagcctagagttgtgtccaagctccaagaagaggttgactctgtacttggagatcgatatccaactattgaagacatgaagaaactcaaatatacaacccgagtgatcaatgagtcattgaggctttacccacaaccacctgtgttaattcgccgctctcttgaggatgatgttcttggagagtaccctataaagagaggtgaagatatctttatatctgtatggaacctgcatcgcagtccaaaactatgggatgatgctgacaagtttaaacctgaaagatgggcattagatggaccaagtcctaatgagacaaatcaaaacttcaaatatcttccgtttggtggcggaccacggaaatgtgtaggtgatttgtttgcttcatacgagacggtagtagcacttgcaatgcttatgagacggttcaactttcaaatagcagttggagctcctccagttgagatgaccactggagctacaattcatacaacacaagggttgaagatgactgtaacacacagaataaaacctcctattgtgccctcattacagatgtcaactatggaagtggatccatccataagcctttctgatcaggatgaagtaagtcagaaaggagaaatttatcaggctcagtcctaattgctggtgtataaacaaatcataaaccatacaatgagtgcaaagggggaaaaaaagtagtattctttacattcttttagctgcttctgtgaaatatgtagtaaggtgaggcttgatgtccccaacaatccccccaaccccgctcctttcgcaaggaagagaactaaacttcaaatccttcacgcctttacagttcttattgaaaaggttgaaatacacaaattataaatatataaatacaactttaaatac

SEQ ID NO: 18772 - protein, 320 aa, Glycine max
VAPIPVWEIPIWKDISPRLRKVNAALKFINDTLDDLIAICKKMVDEEELQFHEEYMNEKDPSILHFLLASGDDVSSKQLRDDLMTMLIAGHETSAAVLTWTFYLLSKEPRVVSKLQEEVDSVLGDRYPTIEDMKKLKYTTRVINESLRLYPQPPVLIRRSLEDDVLGEYPIKRGEDIFISVWNLHRSPKLWDDADKFKPERWALDGPSPNETNQNFKYLPFGGGPRKCVGDLFASYETVVALAMLMRRFNFQIAVGAPPVEMTTGATIHTTQGLKMTVTHRIKPPIVPSLQMSTMEVDPSISLSDQDEVSQKGEIYQAQS

SEQ ID NO: 18773 - protein, 278 aa, Glycine max
MVDEEELQFHEEYMNEKDPSILHFLLASGDDVSSKQLRDDLMTMLIAGHETSAAVLTWTFYLLSKEPRVVSKLQEEVDSVLGDRYPTIEDMKKLKYTTRVINESLRLYPQPPVLIRRSLEDDVLGEYPIKRGEDIFISVWNLHRSPKLWDDADKFKPERWALDGPSPNETNQNFKYLPFGGGPRKCVGDLFASYETVVALAMLMRRFNFQIAVGAPPVEMTTGATIHTTQGLKMTVTHRIKPPIVPSLQMSTMEVDPSISLSDQDEVSQKGEIYQAQS

SEQ ID NO: 18774 - protein, 265 aa, Glycine max
MNEKDPSILHFLLASGDDVSSKQLRDDLMTMLIAGHETSAAVLTWTFYLLSKEPRVVSKLQEEVDSVLGDRYPTIEDMKKLKYTTRVINESLRLYPQPPVLIRRSLEDDVLGEYPIKRGEDIFISVWNLHRSPKLWDDADKFKPERWALDGPSPNETNQNFKYLPFGGGPRKCVGDLFASYETVVALAMLMRRFNFQIAVGAPPVEMTTGATIHTTQGLKMTVTHRIKPPIVPSLQMSTMEVDPSISLSDQDEVSQKGEIYQAQS

SEQ ID NO: 18775 - DNA, 1164 bp, Glycine max
atattctgggaattcaagcatcattaacagtaatcctgtcatgagtcaagctggtaatccatccagttcttcgcttcttctcgattcggtcccggggctgaagcacgacacagggttggctgttgagtggtctgttgatgaacagtacagattggaggaggaccttgccagatatgctgatgagccaagtatcatgaggtatatcaaaattgctgccctgttgcctgataaaactgttcgtgatgttgctttgaggtgtagatggttgacaagaaagcggaggaaatcagaagaacacaatctgggaaaaaaggtcaataatagaaaggataagccagtggaattagcttcaaagacaaatttacattcagctctgccctcaagcatggctacgtattctcgcatttcacaccatatggaccaaaggcaacggatacaatatgatggtatatgtagccctttgaagcaactcatggagcagaatgctcaagcttttaatcaaatcactgccaatttgtctacttacaagttgcaggataacatcgacctcttttgccacacaaggcacaatattaataccattcttaataatatgagtgagatgcctggcattatgagccaaatgccgccactgcaagttaacattaacgaagatcttgcaagtagtattttgcttaatagaacatagcgggcaaagcgctgactccatcaacatttccaacacaaattaaagtgaatcagtgtagagaggttcgcattcttagctgcaactgttttggtgccacatgccattgaggagctagggactatctcatgactttccagagtttctaatccatctttgatcttattgctccctgctttattatttcatttgaaggaaaccttggaactcctattgtataaacaaaacattttccttgcaaaaaaaaaaaaaaagaaaaaggagaaaataggaagcgattaatataacaatggtttgagctgaatgcaccttattgatttcagagtgcaggtgtttttctcatgccataggaactattgtagatctatttatgctagtttgtcatcgacttcaaatttaagtaatggtcatatttaacagttgatagctgttgtgtaatgtgtgaaggtaaatcattatttacataatttcttggttgt

SEQ ID NO: 18776 - protein, 228 aa, Glycine max
YSGNSSIINSNPVMSQAGNPSSSSLLLDSVPGLKHDTGLAVEWSVDEQYRLEEDLARYADEPSIMRYIKIAALLPDKTVRDVALRCRWLTRKRRKSEEHNLGKKVNNRKDKPVELASKTNLHSALPSSMATYSRISHHMDQRQRIQYDGICSPLKQLMEQNAQAFNQITANLSTYKLQDNIDLFCHTRHNINTILNNMSEMPGIMSQMPPLQVNINEDLASSILLNRT

SEQ ID NO: 18777 - protein, 215 aa, Glycine max
MSQAGNPSSSSLLLDSVPGLKHDTGLAVEWSVDEQYRLEEDLARYADEPSIMRYIKIAALLPDKTVRDVALRCRWLTRKRRKSEEHNLGKKVNNRKDKPVELASKTNLHSALPSSMATYSRISHHMDQRQRIQYDGICSPLKQLMEQNAQAFNQITANLSTYKLQDNIDLFCHTRHNINTILNNMSEMPGIMSQMPPLQVNINEDLASSILLNRT

SEQ ID NO: 18778 - protein, 164 aa, Glycine max
MRYIKIAALLPDKTVRDVALRCRWLTRKRRKSEEHNLGKKVNNRKDKPVELASKTNLHSALPSSMATYSRISHHMDQRQRIQYDGICSPLKQLMEQNAQAFNQITANLSTYKLQDNIDLFCHTRHNINTILNNMSEMPGIMSQMPPLQVNINEDLASSILLNRT

SEQ ID NO: 18779 - DNA, 946 bp, Glycine max
gcagcaacaaggagtgcaccatgctgctatacgagtacatgcccaatggaaacttggatgattggttgcatggcaaaaataaaggagataatttggtcgccgattggttcactaggtataagatcgccttgggcgtggctcagggaatctgctatcttcaccacgactgtgatcccgtcatcgtgcatcgcgatctcaaacctagtaacatattattggacgctgagatggaggccagagtcgcagattttggtgtcgccaagttgattcagaccgacgagtccatgtctgtcattgccggttcctatggctacattgctccagaatatgcttacacccttcaagtcgatgaaaagagtgacatttacagctacggagtggtgttgatggagatcctaagtggaaaacgttcggttgatgcagaatttggcgatgggaacagcgttgttgattgggttaggtctaagataaagtctaaagatggcattgatgacatattggacaagaatgcaggggcagggtgcacctcagtgagagaagagatgatacaaatgcttagaattgcattgctttgcaccagtagaaacccagcggataggccttctatgagggatgttgtgttgatgctgcaagaggccaagccaaagaggaaattgcttgatggtgttctaggtcgatgtgctggggacaatgtggttgttggtggtgacattcctttgccacaaaagccaattgcggatcaatgttaatgtgtttatatgattgaaatgatttttctttttttggatatttttcttattgtgggggattggtataggagaatcattttctattttactttcaatggaatttcaagtgttacttgttctagtttttttttctccagttacatattgttatgactcttgtttgctaatgcttatatattaaaaagtgtgcagctcat

SEQ ID NO: 18780 - protein, 248 aa, Glycine max
SNKECTMLLYEYMPNGNLDDWLHGKNKGDNLVADWFTRYKIALGVAQGICYLHHDCDPVIVHRDLKPSNILLDAEMEARVADFGVAKLIQTDESMSVIAGSYGYIAPEYAYTLQVDEKSDIYSYGVVLMEILSGKRSVDAEFGDGNSVVDWVRSKIKSKDGIDDILDKNAGAGCTSVREEMIQMLRIALLCTSRNPADRPSMRDVVLMLQEAKPKRKLLDGVLGRCAGDNVVVGGDIPLPQKPIADQC

SEQ ID NO: 18781 - protein, 242 aa, Glycine max
MLLYEYMPNGNLDDWLHGKNKGDNLVADWFTRYKIALGVAQGICYLHHDCDPVIVHRDLKPSNILLDAEMEARVADFGVAKLIQTDESMSVIAGSYGYIAPEYAYTLQVDEKSDIYSYGVVLMEILSGKRSVDAEFGDGNSVVDWVRSKIKSKDGIDDILDKNAGAGCTSVREEMIQMLRIALLCTSRNPADRPSMRDVVLMLQEAKPKRKLLDGVLGRCAGDNVVVGGDIPLPQKPIADQC

SEQ ID NO: 18782 - protein, 236 aa, Glycine max
MPNGNLDDWLHGKNKGDNLVADWFTRYKIALGVAQGICYLHHDCDPVIVHRDLKPSNILLDAEMEARVADFGVAKLIQTDESMSVIAGSYGYIAPEYAYTLQVDEKSDIYSYGVVLMEILSGKRSVDAEFGDGNSVVDWVRSKIKSKDGIDDILDKNAGAGCTSVREEMIQMLRIALLCTSRNPADRPSMRDVVLMLQEAKPKRKLLDGVLGRCAGDNVVVGGDIPLPQKPIADQC

SEQ ID NO: 18783 - DNA, 1259 bp, Glycine max
aaaatcctaggcattccatataattaacaatcgatttctcctgctcgttccgttgatctatatctgtttgtcatcaacatcgttcatcgaatagtcctccaccaaaaccttgggaacaagcaggttcctcttcgggtccagcgcctttcaaacccccgtcagctggcaacacaagtgatgtagttgaggcttcagggactgcaaaacctggggaaattgtttctagttctgataggagtgcagctgtcaacaggaatactcttgggaggcctgttcccacaaggccatgggagcagaattatggaaacagcacctatggaggatatgggtctacaatgaattataattctgggtatggatctggaatgtatggatcttcttatggtggactaggaggaggaatgtatggatcatcttatggtggggggatgtatggtaacagtatgtacaggggaggatatggtggcatgtatgggtcatccgggatgtacgggggtggaatgtataacagtggcttagggggtccaatgggtggttatggcatgggtggtggtccttatggagaacaagaccccaacaatccgtatggtgcccctccatccccacctggattttggatttctgccctacgtgtgatgcaaggtgtggttaacttttttggtcgaatatcaatactcatagaccagaacacacaggctttccatttgttcatgactgcacttctccagctgtttgaccgctctggaatgttgtatggagagctagctagatttgtgttgcggttgcttgggattaaaacaaagtccaagaaggttcacccgccaggtccaaatggacaaccgttgcctggacctggacctggacctggaccacacaatccttccggaaatgtaaactacatcgaggcaccaaaggctgctcctagtggttcttgggacaacgtttggggaaatgacgcaaatcaatgatacagtatgttgttctgctaaaagagtttgtccaaatacattgaaaagaagaaaaaaacagctgcattcatcatgaagatactgaaactgcagaagtcatgtgtatcctgggtttaaaattcagtttgctattttctctttgcttgcgttggctcttgattttactagaaaggggatcttaaataagataccatccctgcattataccttgtaaacattttctttgaatctgcaggaagctgctattttctccttacatgtattattttgtccatagggcatacctgcatt

SEQ ID NO: 18784 - protein, 210 aa, Glycine max
MNYNSGYGSGMYGSSYGGLGGGMYGSSYGGGMYGNSMYRGGYGGMYGSSGMYGGGMYNSGLGGPMGGYGMGGGPYGEQDPNNPYGAPPSPPGFWISALRVMQGVVNFFGRISILIDQNTQAFHLFMTALLQLFDRSGMLYGELARFVLRLLGIKTKSKKVHPPGPNGQPLPGPGPGPGPHNPSGNVNYIEAPKAAPSGSWDNVWGNDANQ

SEQ ID NO: 18785 - protein, 200 aa, Glycine max
MYGSSYGGLGGGMYGSSYGGGMYGNSMYRGGYGGMYGSSGMYGGGMYNSGLGGPMGGYGMGGGPYGEQDPNNPYGAPPSPPGFWISALRVMQGVVNFFGRISILIDQNTQAFHLFMTALLQLFDRSGMLYGELARFVLRLLGIKTKSKKVHPPGPNGQPLPGPGPGPGPHNPSGNVNYIEAPKAAPSGSWDNVWGNDANQ

SEQ ID NO: 18786 - protein, 188 aa, Glycine max
MYGSSYGGGMYGNSMYRGGYGGMYGSSGMYGGGMYNSGLGGPMGGYGMGGGPYGEQDPNNPYGAPPSPPGFWISALRVMQGVVNFFGRISILIDQNTQAFHLFMTALLQLFDRSGMLYGELARFVLRLLGIKTKSKKVHPPGPNGQPLPGPGPGPGPHNPSGNVNYIEAPKAAPSGSWDNVWGNDANQ

SEQ ID NO: 18787 - DNA, 1861 bp, Glycine max
attccagaatggaaaaatcaaattccctaccatttctttctgttattgttcttcttcttcatgtctctaactctctaactaccccaacaagagagtccattcacgacacttttcttcattgtcttcaaagccacacaacaaaccaaccagatcatgtttcaaacatagtctatgcgcaaaccaacacatcctacacctcagttcttcgagcctttgctagaaatgccaggttcagcgccccctccacgcaaaagccattactcattgtcacacctctcagtgaaaaccaagtacaagccactgtggtgtgcgccaaaagcattggccttcaactcaaaatcagaagtggtggccatgattttgaaggtgtttcatacatctcccaggtaccttttatcatccttgacatgttcaattttcaagatgtcacagtggacgtgcaaaatgagattgctgtgattcaagctggtgcaagtcttggacaagtttattacaggatttgggagaagagtaaagttcatggctttcctgcaggggcttgtcccactgtaggggttggtggccacttgagtggaggagggtatggtaacatgataagaaaatatgggttatctgttgatcatgttgttgatgctaaaattgttgatgtcaaaggtaggattcttgacaaggaatccatgggggaagatcttttctgggcaattagaggaggtggaggagcaagttttggtgtcatcttatcatacacagttaaacttgttccagtgccagaaaatgttacagtttttcaaattgacaagactttggaggaaaatgccaccgatctagttgttcaatggcaaaaggttgccccacacacagatgataggctttacttgaggcttgtcttacaacctgtaagttccaattttgtgaagggaaagaaaaccataagagcttcagttgaggctttgtttctaggagaagctgatgaacttgtcaaattgttggggcaggagtttcctttgctgggactgaaaaaagagctttgtcatgaaatgaggtggattgattctgtggtttggtgggctaattacaacgatggatcctcagttaatgcacttcttgaccgaaatcattactcggtgcattccaacaaaaggaaatctgattatgttcagaccccaatttccaaagatgggtttacatggatatggaaaaagatgattgaattgggaaaagttagcattgttttcaacccttatggagggaaaatgaatgaggtcccttctgatgctactccatttcctcaccgtgcagggaatctttacaagattcagtacactgtgagttggcaagaaccaggtgctgctgtggaaaaaagttttttgagtcagattagagtgctacacaattacatgaccccttttgtgtccaagaatccaaggagtgcatactttaactacagggaccttgatattggtatcaatagccatggtaaggataactttgaagatggaaaagtttatggtatcaagtacttcaataaaaattttgaaaggttggtgaaggttaagagtgccattgatccagaaaactttttctggaatgaacagagcattccaacatatccaagaagcaatgcgtaaggaacctaaccgacaaagggcaacaaaccgatttgttcatttagttgactttgttactttagcctctacgtgattggttgaattgttgtatcttgaatcttgctatttcgcagaaacttgtttttacagtacatatggaacttgtgtgtatttcgggaaattatatccttgtggacaaagatccttcgcttcttggattttcaccttcatctattctagcctttcgcttgtat

SEQ ID NO: 18788 - protein, 541 aa, Glycine max
SRMEKSNSLPFLSVIVLLLHVSNSLTTPTRESIHDTFLHCLQSHTTNQPDHVSNIVYAQTNTSYTSVLRAFARNARFSAPSTQKPLLIVTPLSENQVQATVVCAKSIGLQLKIRSGGHDFEGVSYISQVPFIILDMFNFQDVTVDVQNEIAVIQAGASLGQVYYRIWEKSKVHGFPAGACPTVGVGGHLSGGGYGNMIRKYGLSVDHVVDAKIVDVKGRILDKESMGEDLFWAIRGGGGASFGVILSYTVKLVPVPENVTVFQIDKTLEENATDLVVQWQKVAPHTDDRLYLRLVLQPVSSNFVKGKKTIRASVEALFLGEADELVKLLGQEFPLLGLKKELCHEMRWIDSVVWWANYNDGSSVNALLDRNHYSVHSNKRKSDYVQTPISKDGFTWIWKKMIELGKVSIVFNPYGGKMNEVPSDATPFPHRAGNLYKIQYTVSWQEPGAAVEKSFLSQIRVLHNYMTPFVSKNPRSAYFNYRDLDIGINSHGKDNFEDGKVYGIKYFNKNFERLVKVKSAIDPENFFWNEQSIPTYPRSNA

SEQ ID NO: 18789 - protein, 539 aa, Glycine max
MEKSNSLPFLSVIVLLLHVSNSLTTPTRESIHDTFLHCLQSHTTNQPDHVSNIVYAQTNTSYTSVLRAFARNARFSAPSTQKPLLIVTPLSENQVQATVVCAKSIGLQLKIRSGGHDFEGVSYISQVPFIILDMFNFQDVTVDVQNEIAVIQAGASLGQVYYRIWEKSKVHGFPAGACPTVGVGGHLSGGGYGNMIRKYGLSVDHVVDAKIVDVKGRILDKESMGEDLFWAIRGGGGASFGVILSYTVKLVPVPENVTVFQIDKTLEENATDLVVQWQKVAPHTDDRLYLRLVLQPVSSNFVKGKKTIRASVEALFLGEADELVKLLGQEFPLLGLKKELCHEMRWIDSVVWWANYNDGSSVNALLDRNHYSVHSNKRKSDYVQTPISKDGFTWIWKKMIELGKVSIVFNPYGGKMNEVPSDATPFPHRAGNLYKIQYTVSWQEPGAAVEKSFLSQIRVLHNYMTPFVSKNPRSAYFNYRDLDIGINSHGKDNFEDGKVYGIKYFNKNFERLVKVKSAIDPENFFWNEQSIPTYPRSNA

SEQ ID NO: 18790 - protein, 406 aa, Glycine max
MFNFQDVTVDVQNEIAVIQAGASLGQVYYRIWEKSKVHGFPAGACPTVGVGGHLSGGGYGNMIRKYGLSVDHVVDAKIVDVKGRILDKESMGEDLFWAIRGGGGASFGVILSYTVKLVPVPENVTVFQIDKTLEENATDLVVQWQKVAPHTDDRLYLRLVLQPVSSNFVKGKKTIRASVEALFLGEADELVKLLGQEFPLLGLKKELCHEMRWIDSVVWWANYNDGSSVNALLDRNHYSVHSNKRKSDYVQTPISKDGFTWIWKKMIELGKVSIVFNPYGGKMNEVPSDATPFPHRAGNLYKIQYTVSWQEPGAAVEKSFLSQIRVLHNYMTPFVSKNPRSAYFNYRDLDIGINSHGKDNFEDGKVYGIKYFNKNFERLVKVKSAIDPENFFWNEQSIPTYPRSNA

SEQ ID NO: 18791 - DNA, 636 bp, Glycine max
aaaaggcaaaggtctccaagatctcggctcagagagagagagagagagagagagagagatctgagagagaggtgcttcggagatgcacgacttctgcttcacgatcccctacgggttcgcggtcctggccggcggcctgctgggctacctccgccgcggcagcaccgcctccctggcgggcggcgccggcgtgggcgggcttctcctcctggcagggttcgtcagcctcaaggccttcgagaagcgccgcaactcctacctcgccctcgcgctcgagaccctttgcgcactggccttgacttttgttatggggcagagataccttgaaacttcaaagataatgccggctagtgttgttgctggcctcagtgttctgatgtcggcattctatctattcaaaattgctaccggtggcaaccatttctcgccaaagaaagagtagaccagacggtgcttggccaaactcaaagaccatatggcatattgtgttctgcattccaattgtaacttgactgatgctctatgttgtgcttgcacctttgctcaaatgttttgtatgcggacctgggaagtattcaccatgtaaatgaactaacatttcaattgtgcttcgccgaggtgcaaacttgtcttaag

SEQ ID NO: 18792 - protein, 119 aa, Glycine max
MHDFCFTIPYGFAVLAGGLLGYLRRGSTASLAGGAGVGGLLLLAGFVSLKAFEKRRNSYLALALETLCALALTFVMGQRYLETSKIMPASVVAGLSVLMSAFYLFKIATGGNHFSPKKE

SEQ ID NO: 18793 - protein, 108 aa, Glycine max
KRQRSPRSRLRERERERERDLRERCFGDARLLLHDPLRVRGPGRRPAGLPPPRQHRLPGGRRRRGRASPPGRVRQPQGLREAPQLLPRPRARDPLRTGLDFCYGAEIP

SEQ ID NO: 18794 - protein, 98 aa, Glycine max
KAKVSKISAQRERERERERSEREVLRRCTTSASRSPTGSRSWPAACWATSAAAAPPPWRAAPAWAGFSSWQGSSASRPSRSAATPTSPSRSRPFAHWP

SEQ ID NO: 18795 - DNA, 1641 bp, Glycine max
aaaaatgtgatcttttctttcactgctataaccccttttcttgttttttctcagcagccaaacagagctaatggtagtagcaatagcaagcaagagcaacatagtgtctctttggttcaggattgctccacaaatgctattaaccctataccacaactccagtaagcaatccccatccatgaccttcgatttcattaattacatactattttggaagcttttgatatagataaagataaatgttgttttctacctctttttttttgttaatgcagggataaaagtgaggagcaactaagtgtcagcagcagaaagaaagtgacatttgattccaatgtgaagacctatgagcctcttttggctgatgaagttgtggagaggaaaaatgaggaaggtgggaaggaggaagctttggcccaatcaaagtcatcttcctctgaagctagttctgtgacttcaacggggtcttaccctcccaatcataggtaccagaattgccgcaacagtgatgacgaagaggaagagattgattatggggacagtgatcttagtgatggagatgacgatgaagaatgcaatgaagtgagtgaggactttggagaagatgacatagtggcaagtactgctgctgatgatcatgtgtttgttgaagaggttgatgtgaagtccattgggtccaaccctaatgtcagagacagaagtgcttatgttcatcctgtgctgaatccagtggagaatctcactcagtggaaagttcttaaggctaagagaacaccaataaggcctcagaaagagaatgattttggggttggtgtaaaaggatcacctttcagcttgaattccaaaagcgacttgccaaagaagttgaaccgggagatacgagttgatgccagcctgtcaaattggttggtctcaccagaaactacacctgtttgcaaggctggctcagtggcttcctttgctggtagtacccctgataggatcacctcacaaggttcatattctgtgataagtcatgaagataggccaattttaggggcattgacattggaagagatcaaacaattttcggctacttcgtcttcacggaagtcaccaagtaggagtccagatgagatgcctattattggcactgttggaacctactggaatgttgcaggctctgctgaggaccctggctcagtctcttcctttaaaggaattccgaactcaacaagcaagtacagagaggtaaagatgcggtgaacacttttaagagatattattactcattagttgagggtgaactctgatttggacatgcactggtgcggtattgcaggataagagcgtgaattggcgctcaaccccttttgagacaagattagagaaagctttgaatagaggtgctgcttctgcttatgttcctcgtgtattttagaagttttcaatagtgcgtggattcgaggagagtgtgaattgtgcagggaaagtattttttttattcttttataaacacgatagagtgtagaatgtgacttttacttttctactgcaatttgtacttggctttgaagttataatataaaagttcaagtacagcttataacatctaaaataatatttagatgaaatcatatttcatgctttaacgattacacg

SEQ ID NO: 18796 - protein, 54 aa, Glycine max
KNVIFSFTAITPFLVFSQQPNRANGSSNSKQEQHSVSLVQDCSTNAINPIPQLQ

SEQ ID NO: 18797 - protein, 52 aa, Glycine max
MVVAIASKSNIVSLWFRIAPQMLLTLYHNSSKQSPSMTFDFINYILFWKLLI

SEQ ID NO: 18798 - protein, 42 aa, Glycine max
MPIIGTVGTYWNVAGSAEDPGSVSSFKGIPNSTSKYREVKMR

SEQ ID NO: 18799 - DNA, 2065 bp, Glycine max
gaacgaaacaaagtggacgaatcacaaccaaaaaacaaagaaacagaggcagagatatatgattatgaatttctcaacagaaccctctgcctcacgcttaccattctgatctccacttcttcgctgtttgtaacacgtttcatgcaatttaattcttcttcttcttgattttatgctgccctttttctcagacacccgttactgggaatttcaattttcattggttttgtcaaatcgattttcccaaaaccactcgccaattttattttatttttgctatgttttcgtcaattcttccttgtttgttgttaaagattgaatctttcctttcaattttgaaacttctgattatggggtatgtgtagttgcgacgaagtgaaatttcgttgctgcaaatagtgagaatttgctgtctttggtcagagttgctccgagtgatcgcttcccctggtgcgacgaagtgaaatttcgttgctgcaaatagtgagaatttgctgtctttggtcagagtggctccgagtgatcgcttcccctggtgcgacgaagtgaaatttcgttgctgcaaatagtgagaatttgctgtctttggtcagagtggctcagagtgatcgcttcccctggaatatttacaacttcaagaattggaagtagtgaatcccccaatagtggggcctcttcttcttttacccagcctatggaagatatgaatgaaaatgaagaaacagacttgctctcaatatcatggaatcaggactatgggtgctttgctgctggcacaagtcatgggtttcgtatctataattgtgagccttgcaaagaaactttcagacgtgatttaaaaagtggtggttttaaaattgtagagatgctgttccgatgcaatattctagcacttgttggtgctgtagctaattctcactatccaccaaataaagttttgatatgggatgatcatcagagcaggtgcattggtgaatttacatttaggtctgatgttcgtggagtgaaattaagacgcgatcgaattgtggttgttcttgagcacaagatatatgtttataacttcacagatttgaagcttcttcatcagattgagactctggcaaatcctagagggttgtgctgtctttcacactattcaaatacatttgttttggcttgtccaggtcttcacaagggacaggttcgagttgaacacttcggactgaacgtgacaaaattgatcaatgctcatgattctcaaattgcttgcttcactctgacattggatgggctccttcttgcaactgctagtgtaaagggcactttgattagaatcttcaatacaatggatgggtctcgtttacaagaagtaagaagaggggtagatagagctgaaatcaacagtatagctttgtctccaaatgtccagtggttagcagcatcaagtgacaaaggcactgttcatgtattcagcttgagagtgagagtgtttggggaggatagtgtgactcagccaaatgctgttcaagggcctgcactgtttcatcagaattcttcatcttctttagatcccttgatttctccaaatactggtgccaaccccaattcatcattatctttcatgagaggagttttaccaaaatattttagctcagaatggtcatttgcacagttccacttgcctgaatacactcctttcattgtggcatttggatctcagaactctgtgataattgttggtatggatgggagtttctacaaatgcagctttgatcaagtacatgggggagagatggtgcaacaggagtatgttcgtttcctaaaatttgaaaataggcccagataaaagcatttcaagttgctcaacatccttgccaagcagcaattatcctcaagccatgtaaatatgtgtccagcaccaggcaataaaactcttctcattttgtgtaaatacgattcccctgtattggaggatctggagacattttttttgtatatcttgtatattttgggggggaaattgaaagtaaaaaggagaaatatcgaagcaacagctgcatcacaaataaatcacttgctgaag

SEQ ID NO: 18800 - protein, 377 aa, Glycine max
MEDMNENEETDLLSISWNQDYGCFAAGTSHGFRIYNCEPCKETFRRDLKSGGFKIVEMLFRCNILALVGAVANSHYPPNKVLIWDDHQSRCIGEFTFRSDVRGVKLRRDRIVVVLEHKIYVYNFTDLKLLHQIETLANPRGLCCLSHYSNTFVLACPGLHKGQVRVEHFGLNVTKLINAHDSQIACFTLTLDGLLLATASVKGTLIRIFNTMDGSRLQEVRRGVDRAEINSIALSPNVQWLAASSDKGTVHVFSLRVRVFGEDSVTQPNAVQGPALFHQNSSSSLDPLISPNTGANPNSSLSFMRGVLPKYFSSEWSFAQFHLPEYTPFIVAFGSQNSVIIVGMDGSFYKCSFDQVHGGEMVQQEYVRFLKFENRPR

SEQ ID NO: 18801 - protein, 374 aa, Glycine max
MNENEETDLLSISWNQDYGCFAAGTSHGFRIYNCEPCKETFRRDLKSGGFKIVEMLFRCNILALVGAVANSHYPPNKVLIWDDHQSRCIGEFTFRSDVRGVKLRRDRIVVVLEHKIYVYNFTDLKLLHQIETLANPRGLCCLSHYSNTFVLACPGLHKGQVRVEHFGLNVTKLINAHDSQIACFTLTLDGLLLATASVKGTLIRIFNTMDGSRLQEVRRGVDRAEINSIALSPNVQWLAASSDKGTVHVFSLRVRVFGEDSVTQPNAVQGPALFHQNSSSSLDPLISPNTGANPNSSLSFMRGVLPKYFSSEWSFAQFHLPEYTPFIVAFGSQNSVIIVGMDGSFYKCSFDQVHGGEMVQQEYVRFLKFENRPR

SEQ ID NO: 18802 - protein, 320 aa, Glycine max
MLFRCNILALVGAVANSHYPPNKVLIWDDHQSRCIGEFTFRSDVRGVKLRRDRIVVVLEHKIYVYNFTDLKLLHQIETLANPRGLCCLSHYSNTFVLACPGLHKGQVRVEHFGLNVTKLINAHDSQIACFTLTLDGLLLATASVKGTLIRIFNTMDGSRLQEVRRGVDRAEINSIALSPNVQWLAASSDKGTVHVFSLRVRVFGEDSVTQPNAVQGPALFHQNSSSSLDPLISPNTGANPNSSLSFMRGVLPKYFSSEWSFAQFHLPEYTPFIVAFGSQNSVIIVGMDGSFYKCSFDQVHGGEMVQQEYVRFLKFENRPR

SEQ ID NO: 18803 - DNA, 1169 bp, Glycine max
aatttttttgtaattactgtgggatttattgtcctctgcctagtgtttttttttcctgcttttataattatttcttgttttgccataaaagaaagtcaatacatgtcatcattggttcttgttgtagggtaaatcaaaaaagcgtctctccaaaagagatctggttgaaagggttagggttctggatggtccggaaaaggataatgtatttcggggatttagaccagttgctgcaccatctgacctgttgaaagcttccagggcaaaaaagttgctccagaagaaggcaattgaaaaggagaaaagaaaagctgaggcactggcctctggaattgactggctaagtgatgattcagatgatgagcctcagaaagaaaacagagaacctcccttgtgtaatcttctcaaagatgaagaacatcaccagctaataattgatttgtgcaaggcattagcatccttgcaaaggtattgggaagcactggagattattaatctctttctaagattggcccatacatctctgtctactgaaaaaaaagaggagcttcgatctcttggagctcaaatggcatataacaccacagatccgaaacatgggtttgattgtgtaaaatacattgttcagcaacatccacacagtgttgcagcttggaattgctactacaaggttatctcaagattggaaaaccgagatacaagacattacaaatttgtacgtggtatgcaaggaaagtttgtggattgtgtgcctcctatccttatttctgggcatcagtttaccatatgtagccatcatcaagatgcagcaaggaaataccttgaagcttataaactattgccagagaatcctttggttaatctttgtgttggaacagccttgatcaacttagcattgggtttaagacttcaaaataagcatcaatgtgttgtacaaggtttagcattcctctacaataatttgagaatctgcgagaacagccaggtttgtctgctcagcatttcatgaatatttttgtgcccgtttaagaagaaaatgttttattattaataaaagatgataataagaaaaagatatcacctttttttatacataggactggctaagttcgtgtacatattctacaaattcttatccaatagaaaattatgctcgggtaattattatc

SEQ ID NO: 18804 - protein, 146 aa, Glycine max
MAYNTTDPKHGFDCVKYIVQQHPHSVAAWNCYYKVISRLENRDTRHYKFVRGMQGKFVDCVPPILISGHQFTICSHHQDAARKYLEAYKLLPENPLVNLCVGTALINLALGLRLQNKHQCVVQGLAFLYNNLRICENSQVCLLSIS

SEQ ID NO: 18805 - protein, 94 aa, Glycine max
MQGKFVDCVPPILISGHQFTICSHHQDAARKYLEAYKLLPENPLVNLCVGTALINLALGLRLQNKHQCVVQGLAFLYNNLRICENSQVCLLSIS

SEQ ID NO: 18806 - protein, 82 aa, Glycine max
FFCNYCGIYCPLPSVFFSCFYNYFLFCHKRKSIHVIIGSCCRVNQKSVSPKEIWLKGLGFWMVRKRIMYFGDLDQLLHHLTC

SEQ ID NO: 18807 - DNA, 1613 bp, Glycine max
aatttattgcaagcctgttgaactgtacaatattctctaccgccgcgctcttcaaaatccttcttttcttaggagatgtttgctttataaaataagagcaaggcgtaaaaggaggttgagagcaggaattgtgattttcaattatagggatcactacaacattcttcggaaaactgaagtgaccgaagacttttcttgtccgttttgcttgatgcagtgtggaagctttaagggtttgcgatttcatctttgttcatcacatgatctattcaactttgagttctgggttactgaagattaccaagcagtgaatgtctccgtgaaaattaatatattgagatcagagaatgttgctgatggagtaattccacaatcgcaaactttcttcttttggtttgttgtgcatatttatttaaagcagtcactaactaattcatataattttgagcaagattaccaactttaaattattcattaacaaaaatctgtaacagttcaagacctcgaaaacgtagaagaaaggactctgttcaaaatgaaaaatgcaccaatgtaaaattcctggagttggactcaccagaaggcatacataatggatttctagaaaaagatgatgatgatatactatcctgcaaaggggagaacgtgtctagaacatctcgtagtgagaaaattttgtctagagaaagaaatgatggaggaaaatttggtcctgatcattcttgcaccatggacgacctggagcatgttgaatccagtttcaacattccaggtgtttcaattgccatgccccaatcttctgtggaccctgaatgtagtaaatcaatatgtaaaagtgatccagctctgcctgctaaaacaaagaagctaagcatggatcgatcagactcaagaaaccggatgcttctgcagaagagacttttctttcactcacacagagtccagcctatggcactagaacaagtgttatcagaccgtgatagtgaagacgaagttgatgacgacattgcagatcttgaagatagaaggatgcttgatgattttgtggatgtttccaaagatgaaaaacagctcatgcatctctggaactcttttatgaggaagcaaagggtgctggcagatggtcatgttccgtgggcctgtgaggcattttccaagcttcatggaaaagagctgatctcatctcctgctttattttggtgttggaggttattcatgatcaaactttggaatcatggtcttcttgatgcgtgcactatgaacaactgtagcacaatattagatagttacagaaatgagtgattgggtacaagaaaaagttaaagaccagaaggaaactgactcaacaagaatatacagtcttccccgccttgtattttgcttgattgcaggttcccattttcttatttgcataatttatcatgattttttgaactgttattgtcctgtacattgtattaatgttgccaatgtattgagattgaaatttagggtattccctcacagtaattttactcctgaatcgtagcttgtctaacaaatataacttttttatatatgaaaatgtataaagtactgaagttttattacatcatataaaattttagcgggat

SEQ ID NO: 18808 - protein, 190 aa, Glycine max
MDDLEHVESSFNIPGVSIAMPQSSVDPECSKSICKSDPALPAKTKKLSMDRSDSRNRMLLQKRLFFHSHRVQPMALEQVLSDRDSEDEVDDDIADLEDRRMLDDFVDVSKDEKQLMHLWNSFMRKQRVLADGHVPWACEAFSKLHGKELISSPALFWCWRLFMIKLWNHGLLDACTMNNCSTILDSYRNE

SEQ ID NO: 18809 - protein, 171 aa, Glycine max
MPQSSVDPECSKSICKSDPALPAKTKKLSMDRSDSRNRMLLQKRLFFHSHRVQPMALEQVLSDRDSEDEVDDDIADLEDRRMLDDFVDVSKDEKQLMHLWNSFMRKQRVLADGHVPWACEAFSKLHGKELISSPALFWCWRLFMIKLWNHGLLDACTMNNCSTILDSYRNE

SEQ ID NO: 18810 - protein, 154 aa, Glycine max
IYCKPVELYNILYRRALQNPSFLRRCLLYKIRARRKRRLRAGIVIFNYRDHYNILRKTEVTEDFSCPFCLMQCGSFKGLRFHLCSSHDLFNFEFWVTEDYQAVNVSVKINILRSENVADGVIPQSQTFFFWFVVHIYLKQSLTNSYNFEQDYQL

SEQ ID NO: 18811 - DNA, 1414 bp, Glycine max
attattttacctcaactgcagcttttctagcccttcctttctccgcatcaatactcctatcagaagcttttgtgccagcctcttcatccctcttgcctcagatacacagtcacctaaggactctctttgatgccgcaggctttccttccacatcacaattgtttaccattctcaaccttaaggtttctcaaacaatcacttcctcaatcttcacccttccctttactctcacatttctcctcattgcaaaagcatccataattcaagctctaaatcaccacaaaccaactttgccaacttccttcacttccatggtgttccattacaagcctcttctacttacctacatctacaactctttcttcattctctcagcaaatgcatcttgcttttgcctcctctttttggccttcacctttgctgaagggctgggatacacttcaccaagttccacactttttatgtcagctgcagctgcagttctcttttctgttatccttgccaatgcacttgtgatttgcaacatggcactgacactatctggcatggagggacatggagggtacatggcaattctgaaggcctgtgttatgctaaggggaaagacatcaatggctttgttcctggcacttcctgccaatgtaggacttgctgccattgaggccttgttccagttcagggttgtaagagcctttcgcaatggtgaaatgtcatcaaggccttttatggctttagaggccattttcattgcctatttgttctcagttttcatcaccattgacacaattgtgagctgcatgttttacaaaagctgcaaggtgggattgaggggtgatcaggaagacaaacattttttgaggattgaattccctgaggaggaggacaattgtggttacatggtattgaagaattttgaagaactaccttaagtaacataaggtagaatattgttgttttcaatttggttatggcttttcttcttatgtttcccaaaagggaaggagctacaagttattcaaactatatactatgaatttgaaaaattcattcatgttactcgaaccaaatcgagcaacttctgaaggcataaaggtttcaacagagggacctcagctcaactatatgcagaaacaagaagctaaagattgatctaccattatattttaatgtctttcttttatgttgttcaaatgtcttctttttattccatctctctaccttgtatatttattaatcttttacttgtgaataatacaaaagctcctgtttatttccttgcgttttgtaacattttagatagatgaatactctcatcttaatgttacaggaaaataagggccactcaatttcttgtattattgttgttgttgccttttaataaacatagaagcagctgccagcacaatttcgttgc

SEQ ID NO: 18812 - protein, 308 aa, Glycine max
YFTSTAAFLALPFSASILLSEAFVPASSSLLPQIHSHLRTLFDAAGFPSTSQLFTILNLKVSQTITSSIFTLPFTLTFLLIAKASIIQALNHHKPTLPTSFTSMVFHYKPLLLTYIYNSFFILSANASCFCLLFLAFTFAEGLGYTSPSSTLFMSAAAAVLFSVILANALVICNMALTLSGMEGHGGYMAILKACVMLRGKTSMALFLALPANVGLAAIEALFQFRVVRAFRNGEMSSRPFMALEAIFIAYLFSVFITIDTIVSCMFYKSCKVGLRGDQEDKHFLRIEFPEEEDNCGYMVLKNFEELP

SEQ ID NO: 18813 - protein, 205 aa, Glycine max
MVFHYKPLLLTYIYNSFFILSANASCFCLLFLAFTFAEGLGYTSPSSTLFMSAAAAVLFSVILANALVICNMALTLSGMEGHGGYMAILKACVMLRGKTSMALFLALPANVGLAAIEALFQFRVVRAFRNGEMSSRPFMALEAIFIAYLFSVFITIDTIVSCMFYKSCKVGLRGDQEDKHFLRIEFPEEEDNCGYMVLKNFEELP

SEQ ID NO: 18814 - protein, 155 aa, Glycine max
MSAAAAVLFSVILANALVICNMALTLSGMEGHGGYMAILKACVMLRGKTSMALFLALPANVGLAAIEALFQFRVVRAFRNGEMSSRPFMALEAIFIAYLFSVFITIDTIVSCMFYKSCKVGLRGDQEDKHFLRIEFPEEEDNCGYMVLKNFEELP

SEQ ID NO: 18815 - DNA, 1677 bp, Glycine max
aaggttttactgagaagaagatggagcaggaacacccaaaccttgaaagcttcttatcatgggcagcacagcttggaatatcagactcaacaacacgcaccaaccaacctcagcactctctttcctcatgtttgggttcttctctatctgtctctcattttcctcacactggcgggagaggtttgggtgctgtgagagaccttaggaggggagagattgttctcagagttccaaaatctgctttaatgacaagagagactgttatggaagataaaaagctctgtgatgctgtcaatagacactcttctctctcctcagctcagatattgattgtttgcttgttgtatgaaatgggtaaaggaaagacttcaaggtggcatccttacctcatgcatttgccacacacttatgacgtactagccatgtttggtgaatttgagaagcatgctctgcaagttcagtttctattagaaattttagtttatcttgttaggtggatgaggcaatgtgggtcacagaaaaagccatgcttaaagccaaatcagagtggaaagaagctcattctctgatgcaagatctcatgtttaagcctcagttttttacatttaaggcttgggtttgggctgctgcaacgatatcttcccggacattgcatatcccgtgggatgaagctgggtgtttatgccctgtgggtgacttgtttaattatgatgcacctggaatagaaccatctggcattgaggatttagatcgtttgctatctaacacttccatccctgatactatcgtattgaatggagacaagaatattatggtagatgcagaacagcttgattcacactcttggagattaacagatggcgggtttgaggaagatgctaatgcatattgcttttatgctcgggaacattacaagaaaggagatcaggttctattatgctatggaacttacacaaatttggagcttcttgaacactatgggtttctcctacaagaaaatccaaatgacaaagtttttatccctttggaacctgctttatattcttccacttcatggtctaaggaatcactctacatccatcacaatgggaagccttcctttgcactactagctgcattgcggctgtgggcaacccctcaaagcaggaggaggtcagttggacatcttgtgtattctggttctcgagtttctacagacaatgaaattttcatcatgaaatggctgtcgaaaacttgtgatgctgtgttaaggaatctgccaacatctcttgaggaagacacttttctcctcaatgcaatggacaatagtcaagatttttcaactttcatggagatcacaaagttagtgtcttccagagatgagacttgtaccttcttagaaactcataatatgaaggatactcatagttttacggatgtaattttatctagaaaagcaagaaggtccatggacaggtggaaattagctgtccaatggaggctcaagtataagaaagtcatttttgattgcatcacttattgcaacaaaatactggattctttattaaaataatgctttgatatactggttacagtgtaattaaggctttttcttttctgtttttttctccttttctttcttaagataatagtttcttattgattgaaagaaggaagagaaaggatatatatattacc

SEQ ID NO: 18816 - protein, 348 aa, Glycine max
MWVTEKAMLKAKSEWKEAHSLMQDLMFKPQFFTFKAWVWAAATISSRTLHIPWDEAGCLCPVGDLFNYDAPGIEPSGIEDLDRLLSNTSIPDTIVLNGDKNIMVDAEQLDSHSWRLTDGGFEEDANAYCFYAREHYKKGDQVLLCYGTYTNLELLEHYGFLLQENPNDKVFIPLEPALYSSTSWSKESLYIHHNGKPSFALLAALRLWATPQSRRRSVGHLVYSGSRVSTDNEIFIMKWLSKTCDAVLRNLPTSLEEDTFLLNAMDNSQDFSTFMEITKLVSSRDETCTFLETHNMKDTHSFTDVILSRKARRSMDRWKLAVQWRLKYKKVIFDCITYCNKILDSLLK

SEQ ID NO: 18817 - protein, 341 aa, Glycine max
MLKAKSEWKEAHSLMQDLMFKPQFFTFKAWVWAAATISSRTLHIPWDEAGCLCPVGDLFNYDAPGIEPSGIEDLDRLLSNTSIPDTIVLNGDKNIMVDAEQLDSHSWRLTDGGFEEDANAYCFYAREHYKKGDQVLLCYGTYTNLELLEHYGFLLQENPNDKVFIPLEPALYSSTSWSKESLYIHHNGKPSFALLAALRLWATPQSRRRSVGHLVYSGSRVSTDNEIFIMKWLSKTCDAVLRNLPTSLEEDTFLLNAMDNSQDFSTFMEITKLVSSRDETCTFLETHNMKDTHSFTDVILSRKARRSMDRWKLAVQWRLKYKKVIFDCITYCNKILDSLLK

SEQ ID NO: 18818 - protein, 327 aa, Glycine max
MQDLMFKPQFFTFKAWVWAAATISSRTLHIPWDEAGCLCPVGDLFNYDAPGIEPSGIEDLDRLLSNTSIPDTIVLNGDKNIMVDAEQLDSHSWRLTDGGFEEDANAYCFYAREHYKKGDQVLLCYGTYTNLELLEHYGFLLQENPNDKVFIPLEPALYSSTSWSKESLYIHHNGKPSFALLAALRLWATPQSRRRSVGHLVYSGSRVSTDNEIFIMKWLSKTCDAVLRNLPTSLEEDTFLLNAMDNSQDFSTFMEITKLVSSRDETCTFLETHNMKDTHSFTDVILSRKARRSMDRWKLAVQWRLKYKKVIFDCITYCNKILDSLLK

SEQ ID NO: 18819 - DNA, 1234 bp, Glycine max
atatgagcttgacaaggaagagtatgcaaagaaagggagctacagaattgaccacactccaacattaaagtttcttgacaaggcatgtgtgaaaacagattcgaacactagtgcatggacgctatgcactgttactcaagtagaggagaccaaacaaatgataagaatgattccgatcttggttgctacatttgtgcctagtacaatgatggctcagataaataccctttttgtgaagcaaggtactactcttgacagacacctcggaagcttcaaaattcccccagcaagtttggctgcatttgttactgtgtccttgcttgtttgcattgtgctctatgaccgtttctttgtgaagatcatgcaaaggtttaccaagaaccccagaggcattacccttcttcagaggatgggaattggccttgtaatccacacactgatcatgatcattgcatctgggactgaaagctatagactcaaggttgcaagagaacatggggtagttgaaagtggagggcaagtccctttgagcatattcattttgcttcctcagtttatactcatgggaactgctgatgcattcttagaggttgcaaaaattgagtttttctatgatcaatccccggaacacatgaagagcattggaacttcatattccacaactaccttaggccttggtaacttcatcagttcctttcttctctcaacagtgtcaaatgtcaccaagaaaaatggtcacaaggggtggattttgaacaacctcaatgagtctcatcttgactactactatgcatttttcgcaatactaaacttcctcaacctcatcttcttcgcgtatgttactaggttctatgtatatagagttgaagtttcagattccatagacaagcttgcaaaagaactgaaggaaaagactgtgtccaacgttgtgaatcccaaagactagttgattgggtatctaaggggacaaaactactttatgtacaaatttggatggccaaagaactagatatgtgtgtgtctgtgggggtgtgtgcgtgttaactttggaatggttttgatcattggaagccacttcagaagagaacctaatcaagttatagttattggaggtcgttttagcatcatgtgatcattttccttatcctttgtaaccttcgggaaatgtcacttgcaccttgaaaaagcacgagattgaaaaaatgaatgtaatatgtttgaagtttttctttcc

SEQ ID NO: 18820 - protein, 314 aa, Glycine max
YELDKEEYAKKGSYRIDHTPTLKFLDKACVKTDSNTSAWTLCTVTQVEETKQMIRMIPILVATFVPSTMMAQINTLFVKQGTTLDRHLGSFKIPPASLAAFVTVSLLVCIVLYDRFFVKIMQRFTKNPRGITLLQRMGIGLVIHTLIMIIASGTESYRLKVAREHGVVESGGQVPLSIFILLPQFILMGTADAFLEVAKIEFFYDQSPEHMKSIGTSYSTTTLGLGNFISSFLLSTVSNVTKKNGHKGWILNNLNESHLDYYYAFFAILNFLNLIFFAYVTRFYVYRVEVSDSIDKLAKELKEKTVSNVVNPKD

SEQ ID NO: 18821 - protein, 262 aa, Glycine max
MIRMIPILVATFVPSTMMAQINTLFVKQGTTLDRHLGSFKIPPASLAAFVTVSLLVCIVLYDRFFVKIMQRFTKNPRGITLLQRMGIGLVIHTLIMIIASGTESYRLKVAREHGVVESGGQVPLSIFILLPQFILMGTADAFLEVAKIEFFYDQSPEHMKSIGTSYSTTTLGLGNFISSFLLSTVSNVTKKNGHKGWILNNLNESHLDYYYAFFAILNFLNLIFFAYVTRFYVYRVEVSDSIDKLAKELKEKTVSNVVNPKD

SEQ ID NO: 18822 - protein, 259 aa, Glycine max
MIPILVATFVPSTMMAQINTLFVKQGTTLDRHLGSFKIPPASLAAFVTVSLLVCIVLYDRFFVKIMQRFTKNPRGITLLQRMGIGLVIHTLIMIIASGTESYRLKVAREHGVVESGGQVPLSIFILLPQFILMGTADAFLEVAKIEFFYDQSPEHMKSIGTSYSTTTLGLGNFISSFLLSTVSNVTKKNGHKGWILNNLNESHLDYYYAFFAILNFLNLIFFAYVTRFYVYRVEVSDSIDKLAKELKEKTVSNVVNPKD

SEQ ID NO: 18823 - DNA, 954 bp, Glycine max
agcttggaatgtatcactacaggcttgtatgcacaaagtgcccgtagatgcatcagagcgtggatcaatctggcctgagcaatggccactgaggttggagaaaccaccttactggatagactctcaggctggtgtttatggaagagctgcttcagtggaattcactgctgattacaagcattggaaaaacgttatttcccacttgtatttgaatggaatgggtatcaattggtcttcagtaagaaatgtcatggacatgaaagctgtttatggagggtttgctgcggcactcagagccctgaaattgaatgtttgggtaatgaatgtggttccaattgattctccggacacactgccaataatatatgagcgtggattattcggtatttatcatgattggtgtgaatcattcaatacttaccctagatcatatgatctgctccatgctgactctatattctcaacacttaaggaaaagtgcaataaagtagcagtgattgcagaagttgataggatcctgagaccagaaggatatttggtcataagagacaatgttgaaactattggtgagatagagagcttggctaaatctctacaatgggatattaggttgacatattccaaaaatggagaaggattactttgcattcagaagacattctggcgtccaacaaaggttgaaacagttgcatcagccattgcatgatctcaacttcaaaggctgacacactccttgtttttacatattattattaatttatttagtagaatttgaatatatttttattaactttttaataagcacagtgaattttttttatttattaatgaatattccagccttagcacaagctgggagcaaaatatatagtacatagagaaggtttgtattctgtacagcaaatacacagcatgttactcatagtaagttttttctttcttggtgagatgatt

SEQ ID NO: 18824 - protein, 234 aa, Glycine max
AWNVSLQACMHKVPVDASERGSIWPEQWPLRLEKPPYWIDSQAGVYGRAASVEFTADYKHWKNVISHLYLNGMGINWSSVRNVMDMKAVYGGFAAALRALKLNVWVMNVVPIDSPDTLPIIYERGLFGIYHDWCESFNTYPRSYDLLHADSIFSTLKEKCNKVAVIAEVDRILRPEGYLVIRDNVETIGEIESLAKSLQWDIRLTYSKNGEGLLCIQKTFWRPTKVETVASAIA

SEQ ID NO: 18825 - protein, 225 aa, Glycine max
MHKVPVDASERGSIWPEQWPLRLEKPPYWIDSQAGVYGRAASVEFTADYKHWKNVISHLYLNGMGINWSSVRNVMDMKAVYGGFAAALRALKLNVWVMNVVPIDSPDTLPIIYERGLFGIYHDWCESFNTYPRSYDLLHADSIFSTLKEKCNKVAVIAEVDRILRPEGYLVIRDNVETIGEIESLAKSLQWDIRLTYSKNGEGLLCIQKTFWRPTKVETVASAIA

SEQ ID NO: 18826 - protein, 162 aa, Glycine max
MGINWSSVRNVMDMKAVYGGFAAALRALKLNVWVMNVVPIDSPDTLPIIYERGLFGIYHDWCESFNTYPRSYDLLHADSIFSTLKEKCNKVAVIAEVDRILRPEGYLVIRDNVETIGEIESLAKSLQWDIRLTYSKNGEGLLCIQKTFWRPTKVETVASAIA

SEQ ID NO: 18827 - DNA, 1083 bp, Glycine max
ttttcggtgctctgaaagagctcaagagaccgatgtggatgctgatgctggtgacagctgtgaactgggtggggtggttcccttactttttgttcgacaccgattggatggggcgcgaggtgtacggtggtcaagtgggggaggacgcgtacgccaatggagtgcgcgttgggtcgctagggctgatggtaaacgccgtcgttttgggcttcatgtcgctggcggtggagccgttggggaagatggttgggggagtgaagaggctgtgggcgattgtgaactttattctggcaattgggttcggaatgacggtggtgatcaccaaggtggcggagcaccagcgcaagatgaatcccgccgccgtgggtcacccctccgaaggggtggtggttgggtccatggttttctttggggttctcggagttcctcttgcgattactttcagtgttccatttgctctagcatcaatatactgcagcgcttcaggagcaggccaaggtttatctttgggagtcctcaatcttgcaattgtggtgccacagatggtggtgtctacattaagtggtccttgggatgctttgtttggtggtggcaacttgccggctttcatggtgggtgccgcggcggccgcattgagcgccataatggcgattgtcttgctgccaactccaaagccagctgatgaggccaaggcttcaagcatgatggcagggggctttcactagttaatcgagttttgcatgtttcagttttgtcccctgctttaataggaagaaaccaaaaaaagagtaataaaagaagaaaatttggatagtcttttaagatttgaattgaagctggtgtgtaattaagtaatagacccaccaagtgctacatttataaccttttgtagcacccactgaacatagtaattgtagagtttggtgtgattgtacataattgcagtggttggaacttggaagacccttcctcttgtataattttagtctgtttcagtgttcagaggaatgtggtgattaaggaggagtcttagttttaagactttatatcaattaatgataataagggaaatgctacttttat

SEQ ID NO: 18828 - protein, 240 aa, Glycine max
FGALKELKRPMWMLMLVTAVNWVGWFPYFLFDTDWMGREVYGGQVGEDAYANGVRVGSLGLMVNAVVLGFMSLAVEPLGKMVGGVKRLWAIVNFILAIGFGMTVVITKVAEHQRKMNPAAVGHPSEGVVVGSMVFFGVLGVPLAITFSVPFALASIYCSASGAGQGLSLGVLNLAIVVPQMVVSTLSGPWDALFGGGNLPAFMVGAAAAALSAIMAIVLLPTPKPADEAKASSMMAGGFH

SEQ ID NO: 18829 - protein, 230 aa, Glycine max
MWMLMLVTAVNWVGWFPYFLFDTDWMGREVYGGQVGEDAYANGVRVGSLGLMVNAVVLGFMSLAVEPLGKMVGGVKRLWAIVNFILAIGFGMTVVITKVAEHQRKMNPAAVGHPSEGVVVGSMVFFGVLGVPLAITFSVPFALASIYCSASGAGQGLSLGVLNLAIVVPQMVVSTLSGPWDALFGGGNLPAFMVGAAAAALSAIMAIVLLPTPKPADEAKASSMMAGGFH

SEQ ID NO: 18830 - protein, 228 aa, Glycine max
MLMLVTAVNWVGWFPYFLFDTDWMGREVYGGQVGEDAYANGVRVGSLGLMVNAVVLGFMSLAVEPLGKMVGGVKRLWAIVNFILAIGFGMTVVITKVAEHQRKMNPAAVGHPSEGVVVGSMVFFGVLGVPLAITFSVPFALASIYCSASGAGQGLSLGVLNLAIVVPQMVVSTLSGPWDALFGGGNLPAFMVGAAAAALSAIMAIVLLPTPKPADEAKASSMMAGGFH

SEQ ID NO: 18831 - protein, 160 aa, Glycine max
MVGGVKRLWAIVNFILAIGFGMTVVITKVAEHQRKMNPAAVGHPSEGVVVGSMVFFGVLGVPLAITFSVPFALASIYCSASGAGQGLSLGVLNLAIVVPQMVVSTLSGPWDALFGGGNLPAFMVGAAAAALSAIMAIVLLPTPKPADEAKASSMMAGGFH

SEQ ID NO: 18832 - DNA, 1010 bp, Glycine max
attgggccttgatcctgaaagggccaaagaactgccttatattgctagtatgggaatctatgtttttagcaaagatgtgatgcttcggcttctcagagaaaattttcctgcagcaaatgactttggaagtgaggttattcctggtgcaacagaaattggattaagggtgcaagcttacttatatgatggttactgggaagatattggtactattgaagcattttataatgcaaacttgggaataaccaagaagcctgtaccggattttagcttctatgatcgttctgctccaatttatacgcaacctagatatttgcctccttcaaaggttcttgatgctgatgtgacagacagtgttattggagaagggtgtgttattaaacattgcacaatcaatcattccgtagttggactccgttcctgcatttctgaaggtgcagttatagaggactctttgctaatgggtgcagactattacgagactgagaatgataagaatgccctttctgagactggtggcattcccattggtattgggaaaaattcacatatcagaaaagcaataattgacaaaaatgctcgcattggagaaaatgtgaagataatcaattttgataatgtccaagaagcagtaagggagacagaaggatattttatcaaaagtggaattgtcacggtgattaaagatgctttaattcctagtggaacaatcatataaagtcagccaacaccatgtatataaggttgggttgcatcatatggtgatcgccaatgcgcatcaagttctctcatcccttgcgagaccatgcttatttccattgcaaaatcatcaagctctgcatcaacttgttgtggataataatgaaataataaatggtgccattccatggcaacatttttctgtcactagtatgaggcactgttctaaatgtactgttgagtggaatttgaatatgtatgcttttgcaatcgcacacctaaataccttgtgcttatactccttgttacct

SEQ ID NO: 18833 - protein, 238 aa, Glycine max
LGLDPERAKELPYIASMGIYVFSKDVMLRLLRENFPAANDFGSEVIPGATEIGLRVQAYLYDGYWEDIGTIEAFYNANLGITKKPVPDFSFYDRSAPIYTQPRYLPPSKVLDADVTDSVIGEGCVIKHCTINHSVVGLRSCISEGAVIEDSLLMGADYYETENDKNALSETGGIPIGIGKNSHIRKAIIDKNARIGENVKIINFDNVQEAVRETEGYFIKSGIVTVIKDALIPSGTII

SEQ ID NO: 18834 - protein, 222 aa, Glycine max
MGIYVFSKDVMLRLLRENFPAANDFGSEVIPGATEIGLRVQAYLYDGYWEDIGTIEAFYNANLGITKKPVPDFSFYDRSAPIYTQPRYLPPSKVLDADVTDSVIGEGCVIKHCTINHSVVGLRSCISEGAVIEDSLLMGADYYETENDKNALSETGGIPIGIGKNSHIRKAIIDKNARIGENVKIINFDNVQEAVRETEGYFIKSGIVTVIKDALIPSGTII

SEQ ID NO: 18835 - protein, 212 aa, Glycine max
MLRLLRENFPAANDFGSEVIPGATEIGLRVQAYLYDGYWEDIGTIEAFYNANLGITKKPVPDFSFYDRSAPIYTQPRYLPPSKVLDADVTDSVIGEGCVIKHCTINHSVVGLRSCISEGAVIEDSLLMGADYYETENDKNALSETGGIPIGIGKNSHIRKAIIDKNARIGENVKIINFDNVQEAVRETEGYFIKSGIVTVIKDALIPSGTII

SEQ ID NO: 18836 - DNA, 1377 bp, Glycine max
tttttcttccctttttttataaattttttagaggctaacatggaggaggttgagcaagctaatagagtagctgttgaaagctgccatagggttctgagtttgttgtctcaaccaagggatcaggttcagcataggaatttaatggtggaaaccggtgaaactgtggtgaggttcaagaaggttgtttccatgcttcacaatggtttgggtcatgcaagagtgaggaaacttaaaaaccctcaaatcccctcttcccaccaaagcatcttcttagacaaccccaattgcaaaaccttaaccaacaacagcaacaacaaccatcactccaaaaaaaatctatactttccccaaaccagctaccctgacaattcagttcaggaacatggttcaaccattaagaattctctctctcttggacaaccctctttggaattgagctccaatgggaaaagtcctcttcacctcacacagcagggttcatcaaatcactatcacttctttcagcagcagcaacagcaaaggttgttgcagcagcagcagcaacaacaacaaatgaagcatcaagctgaaatgttgttccgaaggaacaatagtggcataaacctgaattttgacagcactagctgcacaccaacaatgtcatccactaagtcttttatttcttccttgagcatagatggaagtgtggctaacttggatggaagtgccttccatttaataggagctccacactcttctgatcagaattcgcaacagcctaagagaaaatgttctgccagaggcgatgagggaagcttgaaatgtgggagcagtgctagatgtcattgctctaagaagaggaaacatagagtgaagagggcaattaaggtgcctgctatcagcaacaaacttgcagatatccctcctgatgattattcgtggaggaagtatggacagaagccaatcaagggctctcctcaccctaggggatattacaagtgcagcagcatgagagggtgtcctgcaaggaagcatgttgagaggtgcttggaagagcctaccatgctaattgtcacctatgaaggtgaacataaccaccccaagttaccaacacaatctgcaaatgcatgaaactatgtggagagcttaaccagatcaagccaatcattcaattcgtcaaatcctctatgtgattggcttgagatgctgctgtacatatttttagtgatgcaaacaagcagggatggataatattgttggcgcagattttgtcttttggatagtttggctatccagccgttttatttagagggtgaggatgaggatcactgattaaatgaacaaagtctgtaaaattagctagtttcaattcctaagaactatttaatctttcttaag

SEQ ID NO: 18837 - protein, 369 aa, Glycine max
FFFPFFINFLEANMEEVEQANRVAVESCHRVLSLLSQPRDQVQHRNLMVETGETVVRFKKVVSMLHNGLGHARVRKLKNPQIPSSHQSIFLDNPNCKTLTNNSNNNHHSKKNLYFPQTSYPDNSVQEHGSTIKNSLSLGQPSLELSSNGKSPLHLTQQGSSNHYHFFQQQQQQRLLQQQQQQQQMKHQAEMLFRRNNSGINLNFDSTSCTPTMSSTKSFISSLSIDGSVANLDGSAFHLIGAPHSSDQNSQQPKRKCSARGDEGSLKCGSSARCHCSKKRKHRVKRAIKVPAISNKLADIPPDDYSWRKYGQKPIKGSPHPRGYYKCSSMRGCPARKHVERCLEEPTMLIVTYEGEHNHPKLPTQSANA

SEQ ID NO: 18838 - protein, 356 aa, Glycine max
MEEVEQANRVAVESCHRVLSLLSQPRDQVQHRNLMVETGETVVRFKKVVSMLHNGLGHARVRKLKNPQIPSSHQSIFLDNPNCKTLTNNSNNNHHSKKNLYFPQTSYPDNSVQEHGSTIKNSLSLGQPSLELSSNGKSPLHLTQQGSSNHYHFFQQQQQQRLLQQQQQQQQMKHQAEMLFRRNNSGINLNFDSTSCTPTMSSTKSFISSLSIDGSVANLDGSAFHLIGAPHSSDQNSQQPKRKCSARGDEGSLKCGSSARCHCSKKRKHRVKRAIKVPAISNKLADIPPDDYSWRKYGQKPIKGSPHPRGYYKCSSMRGCPARKHVERCLEEPTMLIVTYEGEHNHPKLPTQSANA

SEQ ID NO: 18839 - protein, 322 aa, Glycine max
MVETGETVVRFKKVVSMLHNGLGHARVRKLKNPQIPSSHQSIFLDNPNCKTLTNNSNNNHHSKKNLYFPQTSYPDNSVQEHGSTIKNSLSLGQPSLELSSNGKSPLHLTQQGSSNHYHFFQQQQQQRLLQQQQQQQQMKHQAEMLFRRNNSGINLNFDSTSCTPTMSSTKSFISSLSIDGSVANLDGSAFHLIGAPHSSDQNSQQPKRKCSARGDEGSLKCGSSARCHCSKKRKHRVKRAIKVPAISNKLADIPPDDYSWRKYGQKPIKGSPHPRGYYKCSSMRGCPARKHVERCLEEPTMLIVTYEGEHNHPKLPTQSANA

SEQ ID NO: 18840 - DNA, 1740 bp, Glycine max
ataaaatgatttctgcgatttcgtgggtgcccaaaggggtttcgaagtcggaacctgtcgtggctgatcctcctcccgaagaggaaatccaagaaatcatcgccagccacactaccaaaagtggagacagtgacaatgaagtcgccaacaacgatgaagttgtggcacaagcattaaacgtagctgatgcagttggcaaagcctccaccggaagctgtgacgaaataacccttgcgttgaaggaccttgacatggaccgttatgacgacgaagatgaaggaattgaggtgttcagttctggaattggtgatctttattatcccagtaacgacatggatccatatatcaaagataaaaacgatgatgattctgatgaactcgaagacatgatcatcaacccaactgattctgtcattgtttatgcatgtactgaggatgaagtcagttatcttgaggttttggttatcgaggatgccgattctagcgaaatgaacgtgtatcctcaccataatatcattattccagcatttccactctgcacagcttggctcgattgcccccttaaaggaggagaaagagggaacttcatagctgttggttcaatggaaccttccatagaaatttgggaccttgatgttattgatgaggtgcagccatgtgtggttttgggtggatttgaagagaaaaagaaaaaggggaaaaagaaaccaatcaaatacaaagatgacagtcacactgactcagtacttggtcttgcttggaacaaggagtacaggaatatactagcaagtgccggtgctgacaagcgagtgaagatttgggatgtggttgccgggaagtgtgatattacaatggagcatcactcggacaaggttcaagcagttgcttggaatcatcatgcaccacaggttcttcttagtggttcatttgatcatactgttgtcttgaaggatggaaggatgccatcacattctggctataagtggtcagtcacagctgatgtagagagcttggcatgggatctacatactgagcactcgtttgtggtgagtcttgaagatggtattgtcaagggttttgatattcggactgccaactctgattcctcatcagatctgagttctacatttacacttcatgcacatgacaaagctgttacctcagtatcctataatccatcggcacccaatctccttgccactggatccatggacaaaacggtaaaactttgggatttgtcgaacaaccaaccctcttgtgtagcatctaaatctccgagagcaggggttatctttaaaatttctttctcagaggacaaccccttcttgttggctataggaggctcaaagggaaaattgcaagtttgggataccttatctgatgctggcatttctcgaagatatgggaattacaagaatagatcgcaatctgggtcttgaagttgtagtcttccttcccgtactgctcaagttgtgttgcataaatcaaaattttgggattcactgcaaaaatatgttcttgatttattctttttttgcatcctaataacctttatttgaaatagcataaatttgaattggttgaacgtaaattgttgtgattccaatttccaacactttatagtttagtttggacatcttttgggggggcaaggcccaatgaaaactacaaagacatgctccctctgttttatgttatttgccgtttaagataatgtatatatccatggtcttaacactt

SEQ ID NO: 18841 - protein, 478 aa, Glycine max
KMISAISWVPKGVSKSEPVVADPPPEEEIQEIIASHTTKSGDSDNEVANNDEVVAQALNVADAVGKASTGSCDEITLALKDLDMDRYDDEDEGIEVFSSGIGDLYYPSNDMDPYIKDKNDDDSDELEDMIINPTDSVIVYACTEDEVSYLEVLVIEDADSSEMNVYPHHNIIIPAFPLCTAWLDCPLKGGERGNFIAVGSMEPSIEIWDLDVIDEVQPCVVLGGFEEKKKKGKKKPIKYKDDSHTDSVLGLAWNKEYRNILASAGADKRVKIWDVVAGKCDITMEHHSDKVQAVAWNHHAPQVLLSGSFDHTVVLKDGRMPSHSGYKWSVTADVESLAWDLHTEHSFVVSLEDGIVKGFDIRTANSDSSSDLSSTFTLHAHDKAVTSVSYNPSAPNLLATGSMDKTVKLWDLSNNQPSCVASKSPRAGVIFKISFSEDNPFLLAIGGSKGKLQVWDTLSDAGISRRYGNYKNRSQSGS

SEQ ID NO: 18842 - protein, 477 aa, Glycine max
MISAISWVPKGVSKSEPVVADPPPEEEIQEIIASHTTKSGDSDNEVANNDEVVAQALNVADAVGKASTGSCDEITLALKDLDMDRYDDEDEGIEVFSSGIGDLYYPSNDMDPYIKDKNDDDSDELEDMIINPTDSVIVYACTEDEVSYLEVLVIEDADSSEMNVYPHHNIIIPAFPLCTAWLDCPLKGGERGNFIAVGSMEPSIEIWDLDVIDEVQPCVVLGGFEEKKKKGKKKPIKYKDDSHTDSVLGLAWNKEYRNILASAGADKRVKIWDVVAGKCDITMEHHSDKVQAVAWNHHAPQVLLSGSFDHTVVLKDGRMPSHSGYKWSVTADVESLAWDLHTEHSFVVSLEDGIVKGFDIRTANSDSSSDLSSTFTLHAHDKAVTSVSYNPSAPNLLATGSMDKTVKLWDLSNNQPSCVASKSPRAGVIFKISFSEDNPFLLAIGGSKGKLQVWDTLSDAGISRRYGNYKNRSQSGS

SEQ ID NO: 18843 - protein, 395 aa, Glycine max
MDRYDDEDEGIEVFSSGIGDLYYPSNDMDPYIKDKNDDDSDELEDMIINPTDSVIVYACTEDEVSYLEVLVIEDADSSEMNVYPHHNIIIPAFPLCTAWLDCPLKGGERGNFIAVGSMEPSIEIWDLDVIDEVQPCVVLGGFEEKKKKGKKKPIKYKDDSHTDSVLGLAWNKEYRNILASAGADKRVKIWDVVAGKCDITMEHHSDKVQAVAWNHHAPQVLLSGSFDHTVVLKDGRMPSHSGYKWSVTADVESLAWDLHTEHSFVVSLEDGIVKGFDIRTANSDSSSDLSSTFTLHAHDKAVTSVSYNPSAPNLLATGSMDKTVKLWDLSNNQPSCVASKSPRAGVIFKISFSEDNPFLLAIGGSKGKLQVWDTLSDAGISRRYGNYKNRSQSGS

SEQ ID NO: 18844 - DNA, 1306 bp, Glycine max
tttctgctttttattgaactcattaccaaaagtagttttagcagtaatgattttgaagctacatacactggattattttttattttttaagatttttttgtatttttttataaatttattttggtttttgaactgtttttggttttttgcctcttttatatgatgattgttgatcgcattgagaaagaaaatagccatgcaaatggctgaagaaacagtatctgctaaagatagggatccatatactgcttttacaaaccgtgtaaaggagcttaactatggaaactcttatttcttctgggtatgacttttgaaatcagttaactcatcggctgaatgatctacttttgactttcagcatattgtctgttttgcaacctattagaaaaagtgacttacaaaaggttgatccatggaaagcttgtgaattcttcagcacatgtttcaaagatccatcaacatttcctgttgtgattgttgggaacattgatcccattattgtgatgcccttgatattgcatttcaaaattgttgtataccagaccgaagctggtggcaggatctgctgaagggtattctgaacatgttgagggaaggcttagggaggctaggatgaatcacccaaaggggataacggttgataaccgaggaaatatctatgttgcagatataatgaaaatgacaattaggaaatttagtgattcaagcaagcattatgttatactctgagcaatcctttgtcctcctcagtcctctcccccataagactttttttctacttctcacattagaatcgtaaattggagcctttatttagttaaggtttttgtttccaaggatcacaacaattgctggaggaaaatggagccggggagggggccatattgatgatccaagtgaagaagctaaatttcctaatgagttggatgtggtttatgttggaagtagttgttccctacttgtcatagacagggggaaccaagccatcaggaattgcaatgcttgttggggctgccttctttggctatatgcttgcattattacaacgtagactcggtacaattgtagcatctcaagatgttgagggtgcagcaatgtctggcatttcaccaagtccatatcaaaagttcttgaagtctgttaggcctccttcaattccatcatatcttggaaaagactatattttcacttctctattgcatctttctgacaatcttaatgttacaaacatttttctacattaccaattgtgcattgatgctgatacacttttgaagattaataattaataatatttcatattttt

SEQ ID NO: 18845 - protein, 96 aa, Glycine max
MLVGAAFFGYMLALLQRRLGTIVASQDVEGAAMSGISPSPYQKFLKSVRPPSIPSYLGKDYIFTSLLHLSDNLNVTNIFLHYQLCIDADTLLKINN

SEQ ID NO: 18846 - protein, 86 aa, Glycine max
MLALLQRRLGTIVASQDVEGAAMSGISPSPYQKFLKSVRPPSIPSYLGKDYIFTSLLHLSDNLNVTNIFLHYQLCIDADTLLKINN

SEQ ID NO: 18847 - protein, 64 aa, Glycine max
MSGISPSPYQKFLKSVRPPSIPSYLGKDYIFTSLLHLSDNLNVTNIFLHYQLCIDADTLLKINN

SEQ ID NO: 18848 - DNA, 1160 bp, Glycine max
ggttcaagtactgatctaattgctcaaagagtagaatatgtgctcgagtcagacaagagaagccacctcatggaccttcttcatgctcagagggaaactggagttaatggcaagcaaggtctgacattagtttttgtggaaacgaagaaaggagctgatgcattggaacactgcttgtgtgttaatggatttcctgcagctagcattcatggtgacagaacacaacaagaaagagaactagcattgaggtcattcaagactggaaacacaccaattctagtggcaacagatgttgctgcacgtggtcttgacatcccacgggtagcacatgtggtaaattttgatcttcccaatgacattgatgattatgtgcaccggataggaagaacggggcgagctggtaaaatgggattagcaacggccttcttcaacgaaggtaatttcaacatggctaaaccattagctgatctgatgcaagaagcaaatcaagaagtacctgcctggctcagccgttatgcggcaagggctacttacagtggtggcaacagaaataggaagtcggggggatcccgttttggtggccgagattttaggaaagagggctcgtttaataaagcaacagattactatggtggcggaactggtggtggatattgtggcaattatggtggagggtatggtcaaggtgtgcctagtgcttgggattagattagtgtcacatcactaattcattctcttgttgattgtatataaaatttctgactttaatggtgaaaaagctgtatcttctcaaccacggtttgcctgaatccatgcattccttatgacaggaaatcttttatcataggaaagatttaccattttcttggttttgctggtttggcaaataaggtggggaaatgctgcatatggagaagacaatctgtgtaagcaacccaaaaatttctgactgggatgacttgtttgagtctgtagaagagggagaggagagggagtaaacagattggagggggaccaatgggcatgagtaattctgtgttatgtattttgatagggtccttagcctttgacagtctaagtcgggagttatccctaattagcatgcacatatcgttgatttgattactctctcaactaaatggttctgtgcttaattacct

SEQ ID NO: 18849 - protein, 235 aa, Glycine max
GSSTDLIAQRVEYVLESDKRSHLMDLLHAQRETGVNGKQGLTLVFVETKKGADALEHCLCVNGFPAASIHGDRTQQERELALRSFKTGNTPILVATDVAARGLDIPRVAHVVNFDLPNDIDDYVHRIGRTGRAGKMGLATAFFNEGNFNMAKPLADLMQEANQEVPAWLSRYAARATYSGGNRNRKSGGSRFGGRDFRKEGSFNKATDYYGGGTGGGYCGNYGGGYGQGVPSAWD

SEQ ID NO: 18850 - protein, 212 aa, Glycine max
MDLLHAQRETGVNGKQGLTLVFVETKKGADALEHCLCVNGFPAASIHGDRTQQERELALRSFKTGNTPILVATDVAARGLDIPRVAHVVNFDLPNDIDDYVHRIGRTGRAGKMGLATAFFNEGNFNMAKPLADLMQEANQEVPAWLSRYAARATYSGGNRNRKSGGSRFGGRDFRKEGSFNKATDYYGGGTGGGYCGNYGGGYGQGVPSAWD

SEQ ID NO: 18851 - DNA, 1566 bp, Glycine max
aagacaatcactcatcaatgcaggtggcattattgagcaatcatttctgcctgggccatttgctgtggagatgtcttcggcagtttacaaggggtgggttttcactgatcaagcccttcctgcggatcttatcaagaggtaatattgatacacttatagactactaaaaattttggagttaaaattttcatttatttgataccagcatcgtgtatcctttggatagacatcttttttttatataaactaagttactattaaaagatcttaatttttatgcattgtctatctaaaccaattagaaatcatgctagatcttaacttaccatacactttaatttgtgattggattagaatgtaaaagtcctttacactatcaatacatattaaaaatgtaaaaaaaaactaatacaattacgttatggaagttaagagtgttgaaagagtcaaaattcacatcaatgatctttattttagtgatgtttatatcacaaaaagaaaagacacatttgctgttaataacaagttctttgttatcccccttgatgcagaggaatggcagtggaggatccatcctctccctatggccttcgccttgtgatagatgactacccttatgctgttgatggactagagatatggagtgctatccagacatgggttaaggactacgtctccttgtactatgccacggatgatgcagttaagaaagactcagaactccaagcttggtggaaggaagctgttgagaagggtcacggtgacttgaaagacaagccatggtggcctaagttgaacactcttcaagatctgattcacatttgctgcattattatatggactgcttcagcactccatgcagctgtgaatttcggacaatacccttatggcggtttcatcctaaatcgtccaactctaaccagaagattgctcccagagccaggaaccaaagaatatggtgaacttaccagtaatcatcaaaaggcttatttgagaacaattacaggaaagactgaggcccttgtggacctaacagtgatagagatattgtcaaggcatgcttctgatgaggtctaccttggacagagggacaatccaaattggactgatgacacaaaggcaattcaagcctttaagaagtttggaaacaagctgaaggaaattgaggacaaaatctcagggaggaacaagaattcaagccttaggaaccgtaatggaccggcgcagatgccctacactgtgcttcttcctaccagtggggaaggccttactttcagaggaattcccaacagcatctctatctaatgagagtgtgtggtgtgtggtgtgtggttttctttccttccaacgtacctctcattgacaaataaacgtgcaaacttatgtgtgcataattttcttatgtatgcttaagttttgtaattggatgctatctagtttttcatatctaatagggtgttgtgtcagtttttatgtatagtattgtgctcctatcatgttcacccgtatcatgttcacccgtatgtaagtctgatattctgatctatgaatgtcaaatcaaatttc

SEQ ID NO: 18852 - protein, 249 aa, Glycine max
MAVEDPSSPYGLRLVIDDYPYAVDGLEIWSAIQTWVKDYVSLYYATDDAVKKDSELQAWWKEAVEKGHGDLKDKPWWPKLNTLQDLIHICCIIIWTASALHAAVNFGQYPYGGFILNRPTLTRRLLPEPGTKEYGELTSNHQKAYLRTITGKTEALVDLTVIEILSRHASDEVYLGQRDNPNWTDDTKAIQAFKKFGNKLKEIEDKISGRNKNSSLRNRNGPAQMPYTVLLPTSGEGLTFRGIPNSISI

SEQ ID NO: 18853 - DNA, 1368 bp, Glycine max
ggtggatctccccaagcatagagcatgttagtcacgttagcagcgggcaagttggtccggcggcaccttccccttttctttcggctgttccatcttcaaaaccgtgggctcggatcttcaaaatcaaaacgaatttccattcgttatcatataaatacctcatcttcatccccaaaaccactttcagtttcagaacacaaagcaatggtggcgctcctagtggcaactacatccgaccctgcttccatcaacccggccaacgcgcttttgggcatgcccgggtggaaacccggtccccatttccaggatgatatgaagagctatgtgaatgaaggggtgagggtgttggtacatgggaagagcatagttgcggaagatgagttggacaagaggtgggaagaagttactggggaggttattgatgaagtgatcttcttcagcaagcacactgctgcctccaacaagcctgccctgactgttcaccctattggagttcctcatttgcgccaaggcgatgttcccccccaaggcggcagacctggatgggcagctcttccaaatcctaggatggggccttggcttcgccttttgaaaaaccttgcccaagctcataatcttgtccctgaatttgagattactttagaggccactcaccatggaccgttgaccaataagccaaccatgtttttggagattggtagtactgaagactattggaagagacaggatgctgctcaagttatggcacagttagtatgggaaggacttggacttggaggtgtgtcagatgtaggaaactggagcagggagaatgataacaagaaaatccttcttgggataggtggtggacattatgcacctcggcatgtggatgtagtattgaaagataatgtatgggtgggtcacctactttctggatattcgctgccaatggaagatccaaaccagtcaaaaggagaaaaaaatgtggagattggtggaacatggagacagtctataaaagctgcatatgaagccacttattctgcatttcctggtggtgaaattcttgcacatctagaccacaagagtttcaagggctggcagaagaatgccataacaggattccttgcggagcaaaacattaaaattggaaaacccaataacttctattgagtggatgctatgtgaacaacatagcttctgcagagtgcggaatgagtcaggctgaagattttggtagatcatactagcaatttaattcagttttcttgagatcacagtgatagttaatgaataactgaagtttgagataaactgatatatacataaatccaattctgatgaaaaacaatatttgcaattacatcaattaaaaccatatatagc

SEQ ID NO: 18854 - protein, 376 aa, Glycine max
MLVTLAAGKLVRRHLPLFFRLFHLQNRGLGSSKSKRISIRYHINTSSSSPKPLSVSEHKAMVALLVATTSDPASINPANALLGMPGWKPGPHFQDDMKSYVNEGVRVLVHGKSIVAEDELDKRWEEVTGEVIDEVIFFSKHTAASNKPALTVHPIGVPHLRQGDVPPQGGRPGWAALPNPRMGPWLRLLKNLAQAHNLVPEFEITLEATHHGPLTNKPTMFLEIGSTEDYWKRQDAAQVMAQLVWEGLGLGGVSDVGNWSRENDNKKILLGIGGGHYAPRHVDVVLKDNVWVGHLLSGYSLPMEDPNQSKGEKNVEIGGTWRQSIKAAYEATYSAFPGGEILAHLDHKSFKGWQKNAITGFLAEQNIKIGKPNNFY

SEQ ID NO: 18855 - protein, 316 aa, Glycine max
MVALLVATTSDPASINPANALLGMPGWKPGPHFQDDMKSYVNEGVRVLVHGKSIVAEDELDKRWEEVTGEVIDEVIFFSKHTAASNKPALTVHPIGVPHLRQGDVPPQGGRPGWAALPNPRMGPWLRLLKNLAQAHNLVPEFEITLEATHHGPLTNKPTMFLEIGSTEDYWKRQDAAQVMAQLVWEGLGLGGVSDVGNWSRENDNKKILLGIGGGHYAPRHVDVVLKDNVWVGHLLSGYSLPMEDPNQSKGEKNVEIGGTWRQSIKAAYEATYSAFPGGEILAHLDHKSFKGWQKNAITGFLAEQNIKIGKPNNFY

SEQ ID NO: 18856 - protein, 293 aa, Glycine max
MPGWKPGPHFQDDMKSYVNEGVRVLVHGKSIVAEDELDKRWEEVTGEVIDEVIFFSKHTAASNKPALTVHPIGVPHLRQGDVPPQGGRPGWAALPNPRMGPWLRLLKNLAQAHNLVPEFEITLEATHHGPLTNKPTMFLEIGSTEDYWKRQDAAQVMAQLVWEGLGLGGVSDVGNWSRENDNKKILLGIGGGHYAPRHVDVVLKDNVWVGHLLSGYSLPMEDPNQSKGEKNVEIGGTWRQSIKAAYEATYSAFPGGEILAHLDHKSFKGWQKNAITGFLAEQNIKIGKPNNFY

SEQ ID NO: 18857 - DNA, 1144 bp, Glycine max
aaaacccgcgtttccttgggtagtcgaaaggaagcagaatgggatccaaaattcttccaaaatgggcatcgaagccttgcgtaatgggaatcgacgaagctggaagaggccccgttttagggcctatggtctacggttgcttatactgctctcagtcctatctgaagaccctttccacgttgagttttcagattctaagacactcaaggaagagaagagggaagaattgtttgaaactttaaaactcaatgattctattggatgggatgttgatgtcattgacccccgggaactctccgctaaaatgcttaaaaagaataagattaacttgaatgagatttcacatagctctgccatgggcctcattgatagggtactgaaaatgggagtgcttctaactgaggtttatatagatacagttggagatgcagggaaatatgaaatgaagctctctaatagttttccatctatcaaatttgtggttgcaaagaaggctgatagcctttaccccgttgtcagtggtgcaagcatagttgcaaaggtcacaagggaccgtgctttaagagaatgggtgcttgatgagactgctgaaaacatgcagaggaattttggatccggatatcctggagatccccaaaccaagtcctggctagaggatcacaaacatcatatctttggatttccatcattggtccgatttagttggggaacctgcaactcttattttaaagatgccgcagaagtgttatgggagtctgacaatttagatgaagatggtggtggaagcaacaataagaatggcaagcggcaattgaaattaagcaatgtgggtttcaccacatccaagagaagtgaagaaatagaatcaagtggtaaaggacgctgtaggttttttcaggctcggaaacttgagcacctcacttatttctaaaagtgatgctcaagtattgtcccctctatttgccttattccagtaatatctagctatgtgaaactatatattattcgaatttcatccttagataacattttctgcatatacagatgatgctcagtctaacaagatgtgtaccaagtattgtgtcaatttaattattagtatacttaatatccattgaaatttaagccatcatattaaacattt

SEQ ID NO: 18858 - protein, 309 aa, Glycine max
KPAFPWVVERKQNGIQNSSKMGIEALRNGNRRSWKRPRFRAYGLRLLILLSVLSEDPFHVEFSDSKTLKEEKREELFETLKLNDSIGWDVDVIDPRELSAKMLKKNKINLNEISHSSAMGLIDRVLKMGVLLTEVYIDTVGDAGKYEMKLSNSFPSIKFVVAKKADSLYPVVSGASIVAKVTRDRALREWVLDETAENMQRNFGSGYPGDPQTKSWLEDHKHHIFGFPSLVRFSWGTCNSYFKDAAEVLWESDNLDEDGGGSNNKNGKRQLKLSNVGFTTSKRSEEIESSGKGRCRFFQARKLEHLTYF

SEQ ID NO: 18859 - protein, 289 aa, Glycine max
MGIEALRNGNRRSWKRPRFRAYGLRLLILLSVLSEDPFHVEFSDSKTLKEEKREELFETLKLNDSIGWDVDVIDPRELSAKMLKKNKINLNEISHSSAMGLIDRVLKMGVLLTEVYIDTVGDAGKYEMKLSNSFPSIKFVVAKKADSLYPVVSGASIVAKVTRDRALREWVLDETAENMQRNFGSGYPGDPQTKSWLEDHKHHIFGFPSLVRFSWGTCNSYFKDAAEVLWESDNLDEDGGGSNNKNGKRQLKLSNVGFTTSKRSEEIESSGKGRCRFFQARKLEHLTYF

SEQ ID NO: 18860 - protein, 208 aa, Glycine max
MLKKNKINLNEISHSSAMGLIDRVLKMGVLLTEVYIDTVGDAGKYEMKLSNSFPSIKFVVAKKADSLYPVVSGASIVAKVTRDRALREWVLDETAENMQRNFGSGYPGDPQTKSWLEDHKHHIFGFPSLVRFSWGTCNSYFKDAAEVLWESDNLDEDGGGSNNKNGKRQLKLSNVGFTTSKRSEEIESSGKGRCRFFQARKLEHLTYF

SEQ ID NO: 18861 - DNA, 1470 bp, Glycine max
aggagtcgatatattgggcaatgcaagtagcgcacttggacacatgagtaaaggtgtagctgcattgtctatggataaaaaatttattcaaagtcgacagagacaggaaaacaaaggtgtggaggatttgggtgatgttataagagagggaggtggagcattagctaaaggtttattcagaggggtgactggcattttaacaaagcctcttgaaggagcaaaatcttctggtgttgagggttttgttcagggtgttgggaagggaattattggtgccgctgcacaaccagtgagtggagttttggatcttctgtcaaaaacaaccgaaggtgctaatgctatgagaatgaaaattgcatctgctataacatctgatgaacaacttctcaggaggagactgcctcgtgttataggtggtgataatctgctaaaactatacgatgagtacaaagctcaaggacaggtcatactgcagttggcagaatcaggttcattttttggtcaggttgatctgttcaaggttcgcggaaagtttgccttatcagatgcttatgaagatcacttcatgcttccaaaagggaaaatcctcgtggtcacacatacaagagtcatactattgcaacaaccatccaatattattgctcagagaaagttcagccctgcaagggatccatgttcaataatgtgggatattctgtgggatgatcttggtactatggaactgactcatggcaaaaaagacaagccaaaagctcccccatcacagctcattttatatttgcaatctaggtcaatggatatgaaagaaaatcatcgcattataaaatgcatccgtgaaacccatcaagctcttcaaatttactcttcaattcagcatgcattgaacacttatggtccaggagtatcaaagggagttctgaaaaataaagtggcaaagccatattcaccccatgttgatgcccgtagtgttgacctatccccccaacagatgcctggatcagtccctctctcctcaacttttggaagcagtgcccgtgactaggactatacattgttcatcacattcaacatagtcaagtccctatctaaacagccctgtgctctattgaaattctaccgattagtccacctgatgacttccgttcaacccatgcagacagtcacatgagcccactcatatcaggactcagattgtaatgctggtttcaggaatgcaaccatatacctacccgaagataacggttacagttagttggagggaattggttcgaaatctatctattgctatgagtctcggagaaggcccatatctccaattttttcttagaatatcatataaatccaatacttcttgtataatattgagtgaaatagttttctttgtacatatacagaatcacacagctcatataggatcctacttgctctcatcttgcccctttcacatatagaattttttatttttgaact

SEQ ID NO: 18862 - protein, 346 aa, Glycine max
GVDILGNASSALGHMSKGVAALSMDKKFIQSRQRQENKGVEDLGDVIREGGGALAKGLFRGVTGILTKPLEGAKSSGVEGFVQGVGKGIIGAAAQPVSGVLDLLSKTTEGANAMRMKIASAITSDEQLLRRRLPRVIGGDNLLKLYDEYKAQGQVILQLAESGSFFGQVDLFKVRGKFALSDAYEDHFMLPKGKILVVTHTRVILLQQPSNIIAQRKFSPARDPCSIMWDILWDDLGTMELTHGKKDKPKAPPSQLILYLQSRSMDMKENHRIIKCIRETHQALQIYSSIQHALNTYGPGVSKGVLKNKVAKPYSPHVDARSVDLSPQQMPGSVPLSSTFGSSARD

SEQ ID NO: 18863 - protein, 332 aa, Glycine max
MSKGVAALSMDKKFIQSRQRQENKGVEDLGDVIREGGGALAKGLFRGVTGILTKPLEGAKSSGVEGFVQGVGKGIIGAAAQPVSGVLDLLSKTTEGANAMRMKIASAITSDEQLLRRRLPRVIGGDNLLKLYDEYKAQGQVILQLAESGSFFGQVDLFKVRGKFALSDAYEDHFMLPKGKILVVTHTRVILLQQPSNIIAQRKFSPARDPCSIMWDILWDDLGTMELTHGKKDKPKAPPSQLILYLQSRSMDMKENHRIIKCIRETHQALQIYSSIQHALNTYGPGVSKGVLKNKVAKPYSPHVDARSVDLSPQQMPGSVPLSSTFGSSARD

SEQ ID NO: 18864 - protein, 323 aa, Glycine max
MDKKFIQSRQRQENKGVEDLGDVIREGGGALAKGLFRGVTGILTKPLEGAKSSGVEGFVQGVGKGIIGAAAQPVSGVLDLLSKTTEGANAMRMKIASAITSDEQLLRRRLPRVIGGDNLLKLYDEYKAQGQVILQLAESGSFFGQVDLFKVRGKFALSDAYEDHFMLPKGKILVVTHTRVILLQQPSNIIAQRKFSPARDPCSIMWDILWDDLGTMELTHGKKDKPKAPPSQLILYLQSRSMDMKENHRIIKCIRETHQALQIYSSIQHALNTYGPGVSKGVLKNKVAKPYSPHVDARSVDLSPQQMPGSVPLSSTFGSSARD

SEQ ID NO: 18865 - DNA, 1388 bp, Glycine max
gcagtgtataccaaacatgactcatccagatgttccaataggaggggaggattgttccaccataaggaagatggttggtagctctcccaaatttagctttcctgtcaaggatcatctccaactaggaaaggagcttgatctatttgattttgatgcagctgcagaggtcagtgggtcaaagttctactacctgaaaaatgaagcagttttgttagagatggctcttgtaaattggacactctctgaagtgatgaagagaggctttactccattaacaacacctgaacttgtgcgatcctctgtggttgaaaaatgtggattccaacctcgtgcaaataatacccagatttattccatcgctgacagtgaccaatgcctcattggcactgcagagattcctgtcggtggccttcatatggattctatactctctgattcattgttacctttaaaatatgtggcattttctcattgtttccgtaccgaggctggtgctgctggcactgcaacaaggggtctttatcgagttcaccaattcagcaaggtggaaatgtttattttctgccgcccagaagagagtgaacattaccaccaagagcttattacaatcgaagaagacctcttctcatccctgggattgcattttaagtgagagttaccgctatgttcatagtagttagtacattctttcttcatttcttaacacgattccattgctgtttttattataactaagcttttatgcagaactttggatatggcttctgaagatttaggtgcacctgcctatcagaaattcgatgtggaggcttggatgcctggtttagaacggtttggtgagatctcaagcgcatcaaattgcacagactatcagagccgtcgtttgggaataaggtatcgtcctgcatcagaagcacaagccacaagtgcaaaaaaatctaaaggcaatcttgccccacctcagtttgttcatacattaaatgcaacagcttgtgctgtaccacggatgattatatgtttgcttgagaattaccaacaagaagatggatctgtccttatacctgagcccttgaggcccttcatgggtggccttagtgtcatcgccagaaaatcattatgattgatcacagtatttgtttccatttgaaggatgctgctgcggcattagactatggtgacagatgagttgaagcaattttcattagggtgatatttttacaaataatattaatagcctttttttccttataaactattttttgtatccttttttctttatgatgcaacgtgtatctaaatttattttttcagtaaaaacaatttttcagtaaaaacaatattccttgtatatcttttttctttttaatgaaaagaactagtagtaaact

SEQ ID NO: 18866 - protein, 216 aa, Glycine max
QCIPNMTHPDVPIGGEDCSTIRKMVGSSPKFSFPVKDHLQLGKELDLFDFDAAAEVSGSKFYYLKNEAVLLEMALVNWTLSEVMKRGFTPLTTPELVRSSVVEKCGFQPRANNTQIYSIADSDQCLIGTAEIPVGGLHMDSILSDSLLPLKYVAFSHCFRTEAGAAGTATRGLYRVHQFSKVEMFIFCRPEESEHYHQELITIEEDLFSSLGLHFK

SEQ ID NO: 18867 - protein, 211 aa, Glycine max
MTHPDVPIGGEDCSTIRKMVGSSPKFSFPVKDHLQLGKELDLFDFDAAAEVSGSKFYYLKNEAVLLEMALVNWTLSEVMKRGFTPLTTPELVRSSVVEKCGFQPRANNTQIYSIADSDQCLIGTAEIPVGGLHMDSILSDSLLPLKYVAFSHCFRTEAGAAGTATRGLYRVHQFSKVEMFIFCRPEESEHYHQELITIEEDLFSSLGLHFK

SEQ ID NO: 18868 - protein, 193 aa, Glycine max
MVGSSPKFSFPVKDHLQLGKELDLFDFDAAAEVSGSKFYYLKNEAVLLEMALVNWTLSEVMKRGFTPLTTPELVRSSVVEKCGFQPRANNTQIYSIADSDQCLIGTAEIPVGGLHMDSILSDSLLPLKYVAFSHCFRTEAGAAGTATRGLYRVHQFSKVEMFIFCRPEESEHYHQELITIEEDLFSSLGLHFK

SEQ ID NO: 18869 - DNA, 1471 bp, Glycine max
gatccaagaccatatttaatttgccaaccgcgccagatcgccattactacaacaacatagactagtgcggtgcattccctcgtttaccatgctttcctaagagaaagagaaaagtaaaacccctcactactgatagattttcattcctccgaggaaaaaaaaaacatgtcggatgctttgatcaatggattggccggagctggaggagggatcattgctcagctcatcacatacccacttcaaactgtaaacactcgccaacaaaccgagcgtgatccgaagaaagacacgaggagtcaaggggccctcgaacgaatgtgccaggttgtaaaagaagaggggtgggaacggttgtatggaggcttgatgccatcggtagtgggtacagctgcgtctcagggagtttactattatttctatcaaatattcaggaacaaagctgaagcagctgcactacaacaaaagaaaatgggcgttggtgatggatcagttgggatgctctcctctcttgttgttgctgctttatctgggtgtgttaacgtgctcttgacaaatcccatatgggtagttgttacgcgtatgcagacacatagaaaagagtcgaacagaactccagctgatcagggtttgtttgttgccactgagcagccaattctttctgcagttgagcctcttccttatggaactagtcatgtgattcaagaaatctacggtgaagctggaatttggggtttctggaaaggtgtattaccaacattaatcatggtaagcaatccttccatacagttcatgctgtatgaagccatgttggcaaagttaagaaaaagacgtgcttggagtaagaagggtagcaacggggtaactgctttagagatatttcttattggagctttagctaagcttggagctactgttgtaacttatccgatcctagttgtgaaggcaaggctccaagctagacaggataaaactggagacaggagacaccattacaaaggtacatgggatgctattattaaaatgatccgctatgaggggtttaatgggttttacaaaggcatgggcacaaaaatcgtacaaagtgtgctggctgctgctgttttgttcatgatgaaggaagaattagttaggggggttcgtttcttgcttgccaaggatgctgtaaagccaaagaatctgtgattggaggccactagcttgatcaagatttcatgtaccatcttcagttagcaaattagttcaaatggtaggggaattagagtgattcaaacaacatattgaaatatggctttaactgtatcttgattattttcatcaggttagtttccatagaggaaattcatgccaaaaattacacactgggttcattggtttgtttcatgaacaagacagggttgtagatttgaagtatgctgctgaaacaaatattctttttacgaacgaatatcactatctgatttcattggcagcc

SEQ ID NO: 18870 - protein, 338 aa, Glycine max
MSDALINGLAGAGGGIIAQLITYPLQTVNTRQQTERDPKKDTRSQGALERMCQVVKEEGWERLYGGLMPSVVGTAASQGVYYYFYQIFRNKAEAAALQQKKMGVGDGSVGMLSSLVVAALSGCVNVLLTNPIWVVVTRMQTHRKESNRTPADQGLFVATEQPILSAVEPLPYGTSHVIQEIYGEAGIWGFWKGVLPTLIMVSNPSIQFMLYEAMLAKLRKRRAWSKKGSNGVTALEIFLIGALAKLGATVVTYPILVVKARLQARQDKTGDRRHHYKGTWDAIIKMIRYEGFNGFYKGMGTKIVQSVLAAAVLFMMKEELVRGVRFLLAKDAVKPKNL

SEQ ID NO: 18871 - protein, 288 aa, Glycine max
MCQVVKEEGWERLYGGLMPSVVGTAASQGVYYYFYQIFRNKAEAAALQQKKMGVGDGSVGMLSSLVVAALSGCVNVLLTNPIWVVVTRMQTHRKESNRTPADQGLFVATEQPILSAVEPLPYGTSHVIQEIYGEAGIWGFWKGVLPTLIMVSNPSIQFMLYEAMLAKLRKRRAWSKKGSNGVTALEIFLIGALAKLGATVVTYPILVVKARLQARQDKTGDRRHHYKGTWDAIIKMIRYEGFNGFYKGMGTKIVQSVLAAAVLFMMKEELVRGVRFLLAKDAVKPKNL

SEQ ID NO: 18872 - protein, 271 aa, Glycine max
MPSVVGTAASQGVYYYFYQIFRNKAEAAALQQKKMGVGDGSVGMLSSLVVAALSGCVNVLLTNPIWVVVTRMQTHRKESNRTPADQGLFVATEQPILSAVEPLPYGTSHVIQEIYGEAGIWGFWKGVLPTLIMVSNPSIQFMLYEAMLAKLRKRRAWSKKGSNGVTALEIFLIGALAKLGATVVTYPILVVKARLQARQDKTGDRRHHYKGTWDAIIKMIRYEGFNGFYKGMGTKIVQSVLAAAVLFMMKEELVRGVRFLLAKDAVKPKNL

SEQ ID NO: 18873 - DNA, 1463 bp, Glycine max
gggttctcctgccgatcaggatgaagcaggggacaaattagaagatgtacttgataacgatgatgaagccagtgatagtcctgggagtgaaggatctttgcataataaagtggaagagaatgcaaaagaagctgaggaagaacctattgtgaaatctgaaactgatataaaggtcggaaacaaagagtcttctgctgaaatcatcaataaggggaatgatgcatctgaaaataccgagggattatcaagggaagagttgggccggcttgttgcttcacgctggacaggagaaaatactgataagtcaagtgctgaacctgatacgacattagacaatgaagatcacgaagatcttccaaaggggacaaataatgaggaatatgaaggctatgcttctgaaactgatgatgacattgacagcaacaaatatgatgatgacagtcacaaatatgacgatgaagatgaagttgatgaagagtatcgagaggatgagcatgatgaccttacttcctcctacaaatctgattctgataatgaaccagacttgtcagataatccttcttggttagagaaaatacagagaactgtgcggaatatttttcaggctgttaatttattccaggctccagtgaaccagtcagatgctgctcgtgttcgcaaggaatatgatgaatcaagtgccaagttgtctaaaatacagtctagaatatcaagtctgaagcaaaagctaaaacatgattttggtccagcaaaggagttttattcattctatgatcattgctttgagggcaaggagaacaagtacacttacaaagtctgcccctataaacaggcttctcaggaggagggctattccaacacccgtttggggagctgggacaaatttgaggattcatacagagtaatggtgttttctaatggtgataaatgctggaatggtcctgataggagtttgaaggtcaagctaagatgtgggttgaaaaacgagattactgatgtagatgaaccaagccgttgcgaatatgtagcagtattatctaccccagccctttgtcaagaggaagggctgaaggagttacaacacaagctagacttgttgaattcggaaataccatcaaaccatgatgagttgtgaacaaccgggatggagtttaacaggtagtatgatggttataaagcaactgaggaagtggtgccctaagttttgtatgctagagcttacacaaatataatattgggggaggttagggagaggctagaaactgattcgacttgggattgataatccttatggttgtccgagtttgcaacattctaatatgcttatcccattgcacatttttcctttattgaactcaattacgaaatggtctgtgtgcctctcctagaaattgtccattccattaccaaaaggcggatatttatactatgcaagatactggacagtcagaatttcttgagcc

SEQ ID NO: 18874 - protein, 377 aa, Glycine max
GSPADQDEAGDKLEDVLDNDDEASDSPGSEGSLHNKVEENAKEAEEEPIVKSETDIKVGNKESSAEIINKGNDASENTEGLSREELGRLVASRWTGENTDKSSAEPDTTLDNEDHEDLPKGTNNEEYEGYASETDDDIDSNKYDDDSHKYDDEDEVDEEYREDEHDDLTSSYKSDSDNEPDLSDNPSWLEKIQRTVRNIFQAVNLFQAPVNQSDAARVRKEYDESSAKLSKIQSRISSLKQKLKHDFGPAKEFYSFYDHCFEGKENKYTYKVCPYKQASQEEGYSNTRLGSWDKFEDSYRVMVFSNGDKCWNGPDRSLKVKLRCGLKNEITDVDEPSRCEYVAVLSTPALCQEEGLKELQHKLDLLNSEIPSNHDEL

SEQ ID NO: 18875 - DNA, 1661 bp, Glycine max
atatgacctctagaagaggtggagtatcaattcctagttattttggacacatgccaaacatgggttttgtaatgcagcatccgagttcaccacttcctagtccagttttatctggatacccagaaggaagtccaggccttccaggagttaggaatgaaataaatctttccccggcttctggaagaaatggaggcataatatctggatggcaagttcagagatcttttgacagtgctcatgaccccaaaattgttaattttcttgaagacttaaaatctggcaaaagtcgaagatttgaactatctgatattactggacatattgttgaatttagctctgatcagcatgggagtcgatttatacagcagaagttggaaagttgtagtgtcgaagagaagacattagtgtttaaagaggttcttccacatgcttctaaattaatgactgatgtttttggtaactacgtaatacagaagttttttgagtatggaagcccagagcagaggagagaacttgcagatcgacttgttggccagatactgcctttaagtttgcagatgtatggctgtcgtgtaatccaaaaggcacttgaggttattgagcttgaacagaaagctcagcttgttcatgagctagatggaaatgtaatgagatgtgttcgtgatcaaaatggtaaccatgttattcaaaagtgcattgaatctattccaaccaaaaagattagctttatactatctgcatttcgtggtcaagttgctactctatcgatgcatccttatggatgccgagtcatgcagagagttctagaacattgcacagacgagagtcaatgccagtttattgtagatgaaatcttggagtcagtctgtgctcttgctcaggatcagtatggtaattatgttacgcagcatgtcttggagagaggaaagcctcaagaaaggagtcaaattatcaacaagttgtcaggacatattgttcaattaagccagcataagtttgcttcaaatgttgtagaaaaatgtttggagtatggtgataccaccgaacgggagttgctagttgcagagatatttgggcatgatgaaaaatgtgataatttattgacaatgatgaaagatcaatttgcgaattatgtggtccagaaggtcattgatatctgttctgaaaatcaacgagcaatgttgctttctcacgtaagaattcatgctcatgctttgaagaaatacacttatggaaaacacattgtggctcggttggaacatcaatttggagagaatcaaacattcagctcatgatgaaaatagagagatgaagccatgggtctccagcaatgctgctgtgacgtgcaaaccccgcagcatcaacatatgttctgttgatcacagaaaatagctgagacatcgatagcttccagttgtttttactcctgacttcatacctgcaccgtgatagtttccacattgatggcttcaggggttatactttgaaactcaatgtaattatgtcattcaaataattgtttgaaaaagttatttgaataattatttggaaggaaacccttcccttcctgatgtataatttactgggtcttccgtgcttagtgtgtggttttcttggagatacaagtattcaagaattcttaaactcaactagtccttggc

SEQ ID NO: 18876 - protein, 430 aa, Glycine max
MTSRRGGVSIPSYFGHMPNMGFVMQHPSSPLPSPVLSGYPEGSPGLPGVRNEINLSPASGRNGGIISGWQVQRSFDSAHDPKIVNFLEDLKSGKSRRFELSDITGHIVEFSSDQHGSRFIQQKLESCSVEEKTLVFKEVLPHASKLMTDVFGNYVIQKFFEYGSPEQRRELADRLVGQILPLSLQMYGCRVIQKALEVIELEQKAQLVHELDGNVMRCVRDQNGNHVIQKCIESIPTKKISFILSAFRGQVATLSMHPYGCRVMQRVLEHCTDESQCQFIVDEILESVCALAQDQYGNYVTQHVLERGKPQERSQIINKLSGHIVQLSQHKFASNVVEKCLEYGDTTERELLVAEIFGHDEKCDNLLTMMKDQFANYVVQKVIDICSENQRAMLLSHVRIHAHALKKYTYGKHIVARLEHQFGENQTFSS

SEQ ID NO: 18877 - protein, 414 aa, Glycine max
MPNMGFVMQHPSSPLPSPVLSGYPEGSPGLPGVRNEINLSPASGRNGGIISGWQVQRSFDSAHDPKIVNFLEDLKSGKSRRFELSDITGHIVEFSSDQHGSRFIQQKLESCSVEEKTLVFKEVLPHASKLMTDVFGNYVIQKFFEYGSPEQRRELADRLVGQILPLSLQMYGCRVIQKALEVIELEQKAQLVHELDGNVMRCVRDQNGNHVIQKCIESIPTKKISFILSAFRGQVATLSMHPYGCRVMQRVLEHCTDESQCQFIVDEILESVCALAQDQYGNYVTQHVLERGKPQERSQIINKLSGHIVQLSQHKFASNVVEKCLEYGDTTERELLVAEIFGHDEKCDNLLTMMKDQFANYVVQKVIDICSENQRAMLLSHVRIHAHALKKYTYGKHIVARLEHQFGENQTFSS

SEQ ID NO: 18878 - protein, 411 aa, Glycine max
MGFVMQHPSSPLPSPVLSGYPEGSPGLPGVRNEINLSPASGRNGGIISGWQVQRSFDSAHDPKIVNFLEDLKSGKSRRFELSDITGHIVEFSSDQHGSRFIQQKLESCSVEEKTLVFKEVLPHASKLMTDVFGNYVIQKFFEYGSPEQRRELADRLVGQILPLSLQMYGCRVIQKALEVIELEQKAQLVHELDGNVMRCVRDQNGNHVIQKCIESIPTKKISFILSAFRGQVATLSMHPYGCRVMQRVLEHCTDESQCQFIVDEILESVCALAQDQYGNYVTQHVLERGKPQERSQIINKLSGHIVQLSQHKFASNVVEKCLEYGDTTERELLVAEIFGHDEKCDNLLTMMKDQFANYVVQKVIDICSENQRAMLLSHVRIHAHALKKYTYGKHIVARLEHQFGENQTFSS

SEQ ID NO: 18879 - DNA, 1384 bp, Glycine max
aaaaactttaagctttgaacacagatttggttattctctatttgtgtgctcagtatggtgggaatcttttcgttgattacagggagaccgggatgtagtggattcggatcttcctcaactgctgaacaggttatcgaaggaattgatgccagcaacctcactgcaatcatcacaggaggagccagtggcatagggttggagacagcacgtgttctggcaattcgaaaggcccatgtcataattgctgccagaaacatggagtctgcaaaggaagcgaaacaactcatacttgaggaagacgagtcagctcgtgtggacataatgaagctcgacctatgctcagtgaagtctgtcggaacctttgtggacaacttcattgctcttggtgttcctcttaacatcttaatgtgctttctttaaccctctccctctctctctctctctcattctcaatgtgggttcatttcatttaaagatccaattgaattactttgtccccatttcccgtatcccctgagacatgtgatagagaaaaactagtactaacaagaaaaaaataatgtgttcaaaagttgctactaatgacattgttgatctttggtttcagaaacaacgcgggagtcatgttctgcccttatcagcaaacggaagatgggattgagatgcagtttgcaaccaatcatcttggtcattttctcttgacgaaacttcttcttgacaagatgaaacaaaccgcaaaagacactggaattgagggcaggatcataaatctttcatcaatagctcatgtctacacttacgaagaaggaattcgatttgataacatcaatgatgaagatggatactctgacaagaaggcctatggacagtccaagttagccaacatattacacacaaacgagctttctcgtcgcttacaggcagaaggtgttaacatcacggccaactcagtccacccaggggtgataatgactcctctcatgagacactcttctttacttatgaattttctgaagatgtttacctttttcgcatggaagaacatccctcagggagcagccacaacgtgctatgtcgctctacacccaagcttgaaaggggtaacggggaagtactttcgggattgtaatgagtgtcaaccaagtacacatgcttcaaacgaactcttaggaaggaaactgtgggattttagcaacaagatgattaattcactttcaaaagcttgattgattgcactatagtattaattagtaccaaagcctcgtcttcctcatatatatcagtgtatcaaaactcgttaattatgcttaatatacccatccaccctacagttataatcataagttctatatatgagggaggatatatcattatttctcaaaag

SEQ ID NO: 18880 - protein, 214 aa, Glycine max
MTLLIFGFRNNAGVMFCPYQQTEDGIEMQFATNHLGHFLLTKLLLDKMKQTAKDTGIEGRIINLSSIAHVYTYEEGIRFDNINDEDGYSDKKAYGQSKLANILHTNELSRRLQAEGVNITANSVHPGVIMTPLMRHSSLLMNFLKMFTFFAWKNIPQGAATTCYVALHPSLKGVTGKYFRDCNECQPSTHASNELLGRKLWDFSNKMINSLSKA

SEQ ID NO: 18881 - protein, 200 aa, Glycine max
MFCPYQQTEDGIEMQFATNHLGHFLLTKLLLDKMKQTAKDTGIEGRIINLSSIAHVYTYEEGIRFDNINDEDGYSDKKAYGQSKLANILHTNELSRRLQAEGVNITANSVHPGVIMTPLMRHSSLLMNFLKMFTFFAWKNIPQGAATTCYVALHPSLKGVTGKYFRDCNECQPSTHASNELLGRKLWDFSNKMINSLSKA

SEQ ID NO: 18882 - protein, 187 aa, Glycine max
MQFATNHLGHFLLTKLLLDKMKQTAKDTGIEGRIINLSSIAHVYTYEEGIRFDNINDEDGYSDKKAYGQSKLANILHTNELSRRLQAEGVNITANSVHPGVIMTPLMRHSSLLMNFLKMFTFFAWKNIPQGAATTCYVALHPSLKGVTGKYFRDCNECQPSTHASNELLGRKLWDFSNKMINSLSKA

SEQ ID NO: 18883 - DNA, 1189 bp, Glycine max
gacataattcaacatgatactggtgatgtctataatggacactactaccatagccattatgatactgaaagtaaccaaatacaaaatgatgagatcattgcacgggctcttcaagaagaattttcccggctagatattgctgagtgttcaggatattcacagacagatgaagaacagttccatgcttctgagcctacatgtgattggaataacacatcgatgatgaactactgttcaggtcatgattatgcctacaatggagttggtgacatagaaccttctagttcatcatgttgtagtccctgtgaagtagaggaaagctcattggagcttacagacaattatccacttgatggtgaaatagggaggagactgagccagatggttccaattcctcatgttccaaaaattaatggagaaattccctcaatagatgaagccacttcagatcatcaaaggcttctggatagattgcagttatatgactttgtggagcatatggtacaaggtgatggtaattgtcagttccgtgcattgtctgatcaattgtataacacacctgatcaccacaagtatgtgagacgacaagttgtgaacaagctgaagtctcatccagagatttatgagggatatgttcccatggaatatgccgaatatttggagaagatgtctaagagtggtgaatggggggatcatgtcacccttcaagcagctgcagattcgtatggcgtgagaatatttgtgatgacttctttcaaggatacgtgttgcatagaaatacttcctcattttgagaagccaaaaggagtgattttccttagtttttgggcagaggtgcattacaactccatctatcctcaaggagatataccttcaagtgagtcgagaaagaagaaaaggtggtggaactttgggactaagcattaatagtgtggctgccatagaacctgaacatgtacccaaaaatttggtgcctctgcattttggactgtgtatcaaaattcatccaagagtcagccaacagccaataaggatgctttcaacttagcagggatatcaaacctttgaggtgctatagaatagcccttaatttttatattcccatttctttgccggttatttttgtatgaataatctgattttcctttttattaattataatgtggcgaggcagctacatcccaatgac

SEQ ID NO: 18884 - protein, 308 aa, Glycine max
DIIQHDTGDVYNGHYYHSHYDTESNQIQNDEIIARALQEEFSRLDIAECSGYSQTDEEQFHASEPTCDWNNTSMMNYCSGHDYAYNGVGDIEPSSSSCCSPCEVEESSLELTDNYPLDGEIGRRLSQMVPIPHVPKINGEIPSIDEATSDHQRLLDRLQLYDFVEHMVQGDGNCQFRALSDQLYNTPDHHKYVRRQVVNKLKSHPEIYEGYVPMEYAEYLEKMSKSGEWGDHVTLQAAADSYGVRIFVMTSFKDTCCIEILPHFEKPKGVIFLSFWAEVHYNSIYPQGDIPSSESRKKKRWWNFGTKH

SEQ ID NO: 18885 - protein, 235 aa, Glycine max
MMNYCSGHDYAYNGVGDIEPSSSSCCSPCEVEESSLELTDNYPLDGEIGRRLSQMVPIPHVPKINGEIPSIDEATSDHQRLLDRLQLYDFVEHMVQGDGNCQFRALSDQLYNTPDHHKYVRRQVVNKLKSHPEIYEGYVPMEYAEYLEKMSKSGEWGDHVTLQAAADSYGVRIFVMTSFKDTCCIEILPHFEKPKGVIFLSFWAEVHYNSIYPQGDIPSSESRKKKRWWNFGTKH

SEQ ID NO: 18886 - protein, 234 aa, Glycine max
MNYCSGHDYAYNGVGDIEPSSSSCCSPCEVEESSLELTDNYPLDGEIGRRLSQMVPIPHVPKINGEIPSIDEATSDHQRLLDRLQLYDFVEHMVQGDGNCQFRALSDQLYNTPDHHKYVRRQVVNKLKSHPEIYEGYVPMEYAEYLEKMSKSGEWGDHVTLQAAADSYGVRIFVMTSFKDTCCIEILPHFEKPKGVIFLSFWAEVHYNSIYPQGDIPSSESRKKKRWWNFGTKH

SEQ ID NO: 18887 - DNA, 1455 bp, Glycine max
taagaaggattaatggatgccaaataagaaaccacaaatatcccctgattataaaaaacatatttttaaatctgttttagccaattttagtttcaaggaataaaataaaataattttttttatatatataataagattcaaaatgaataattattagatgtaacaactaaaatataaaaattgtacggatataaagattaaataagtaattaaatcaataaatataaaagtatatctaatgaaacatgagaagtaagaaaatgttaaacatatatatcttagccttaaccatatacaattctatatggttaaaactattatagttaactttaactttaaccatttattaaactatacaattgaagtgtacttgtcttccatctcgtttgtgctttccctgcatgtagggtccaaattagtagtaaatgttagtagtatttaatgattttgttttacattaagtaattttatgtggggtgtgagaaaatacagaaacagatattggaaccggcgataaaaggaacggttaatgtgttgaaggcggcgaaggaagcaggggtggagcgcgtggtggcgacttcatcgatttcgtcgattatgccaagtcctaattggccagctgataagattaagggagaagagtgttggacggaccttgaatactgcaagcaaaaggggttgtattatcccattgcaaagactctagcagagaaagcgggttgggactttgcgaaggagacaggttttgatgttgtcatgataaaccctggtacagcattgggccctctgcttcctccaagaatcaattcaagcatggctgtgcttgttagtgttctcaaagggggcaaagagacctacgaggacttctttatgggaacggctcacttcaaagacatagcattggcacatattttggcacttgagaacaagaaagcagcaggaaggcacttgtgtgtggaatctattcgtcactttagtgatcttgtggacaaggttgctgagttataccctgaatacgatgtggctaagttgccaaaggatacccaaccagggttgttgagagcaagtggaaaggatgcatcaaagaagctgattgatttaggtctagaattcactcctgttgagcaaatcatcaaggatgcagtggagagtttgaagagcaggggctatgtctaatttctctgctactgcagaggaactgagtgcactgttacaagtggtggtggcgttaatattattgttctgccattgctttgactcattgttcatgccatttatgtttttacctatggtcttgtgttgtgcacttgtgcgtgtaactgtattctaaaataagggtcacttggatcagtggttgtaacgatatcaatgttttgcgagagttttaatttactcttgcagttattagtgaaagattgagcggtctcatcttcattgctcagtttaatcatcaag

SEQ ID NO: 18888 - protein, 192 aa, Glycine max
MPSPNWPADKIKGEECWTDLEYCKQKGLYYPIAKTLAEKAGWDFAKETGFDVVMINPGTALGPLLPPRINSSMAVLVSVLKGGKETYEDFFMGTAHFKDIALAHILALENKKAAGRHLCVESIRHFSDLVDKVAELYPEYDVAKLPKDTQPGLLRASGKDASKKLIDLGLEFTPVEQIIKDAVESLKSRGYV

SEQ ID NO: 18889 - protein, 139 aa, Glycine max
MINPGTALGPLLPPRINSSMAVLVSVLKGGKETYEDFFMGTAHFKDIALAHILALENKKAAGRHLCVESIRHFSDLVDKVAELYPEYDVAKLPKDTQPGLLRASGKDASKKLIDLGLEFTPVEQIIKDAVESLKSRGYV

SEQ ID NO: 18890 - protein, 120 aa, Glycine max
MAVLVSVLKGGKETYEDFFMGTAHFKDIALAHILALENKKAAGRHLCVESIRHFSDLVDKVAELYPEYDVAKLPKDTQPGLLRASGKDASKKLIDLGLEFTPVEQIIKDAVESLKSRGYV

SEQ ID NO: 18891 - DNA, 923 bp, Glycine max
attcagagttgcatcgactgaaacccctaggaaaaaccccagtttctctctttcactagttccgttcaagttctaaccaagcactcacagtacttttgcttctctcgaagatgtctctacgagtgctgaaccctaacgccgaagtgctgaacaaatcggcggcacttcacatgaacatcaatgccgccaagggtttgcaagatgtcctcaaaaccaacctcggtcccaaaggaaccatcaaaatgctcgttggtggtgctggtgatatcaagcttaccaaagatggcaacactctcttgaaagagatgcaaatccaaaacccgacggcgattatgattgctagaacggctgtggcgcaggatgatgctagtggtgatggcaccacttctactgtcatcttcattggcgagcttatgaaacaatcggagcgttacattgatgaaggtatgcatcctcgtgtgttggttgatggttttgatattgcaaagcgagcaactctgcaattccttgaaaagtttaagactcctgttgtgatgggtggtgagcctgataaagagattctcaagatggtagcaagaacaaccgtccggactaagttgtacgaatcacttgcagatcaattgacagatataattgttgatgcagttttatgtattcagaagcctgaggaagaaattgatctgtttatggtggagatcatgcatatgcgacacaaatttgatgttgacacacgcttggttgagggtattgtccttgatcatggttctaggcaccctgacatgaagcgacgtgcagaaaactgctatatcttgacatgtaatgtatctttggagtatgagaagagtgaagtaaactcaggctttttctactcaagtgcggaacagagagaagctatggttgcagctgaaagacgacaggttgac

SEQ ID NO: 18892 - protein, 271 aa, Glycine max
MSLRVLNPNAEVLNKSAALHMNINAAKGLQDVLKTNLGPKGTIKMLVGGAGDIKLTKDGNTLLKEMQIQNPTAIMIARTAVAQDDASGDGTTSTVIFIGELMKQSERYIDEGMHPRVLVDGFDIAKRATLQFLEKFKTPVVMGGEPDKEILKMVARTTVRTKLYESLADQLTDIIVDAVLCIQKPEEEIDLFMVEIMHMRHKFDVDTRLVEGIVLDHGSRHPDMKRRAENCYILTCNVSLEYEKSEVNSGFFYSSAEQREAMVAAERRQVD

SEQ ID NO: 18893 - protein, 251 aa, Glycine max
MNINAAKGLQDVLKTNLGPKGTIKMLVGGAGDIKLTKDGNTLLKEMQIQNPTAIMIARTAVAQDDASGDGTTSTVIFIGELMKQSERYIDEGMHPRVLVDGFDIAKRATLQFLEKFKTPVVMGGEPDKEILKMVARTTVRTKLYESLADQLTDIIVDAVLCIQKPEEEIDLFMVEIMHMRHKFDVDTRLVEGIVLDHGSRHPDMKRRAENCYILTCNVSLEYEKSEVNSGFFYSSAEQREAMVAAERRQVD

SEQ ID NO: 18894 - protein, 227 aa, Glycine max
MLVGGAGDIKLTKDGNTLLKEMQIQNPTAIMIARTAVAQDDASGDGTTSTVIFIGELMKQSERYIDEGMHPRVLVDGFDIAKRATLQFLEKFKTPVVMGGEPDKEILKMVARTTVRTKLYESLADQLTDIIVDAVLCIQKPEEEIDLFMVEIMHMRHKFDVDTRLVEGIVLDHGSRHPDMKRRAENCYILTCNVSLEYEKSEVNSGFFYSSAEQREAMVAAERRQVD

SEQ ID NO: 18895 - DNA, 1609 bp, Glycine max
tcaacaatcctcctcttattaccctcaacacctctcccttgacctctccaaagaaaaagatcttataactcctcttaaagatgttaatcctcactctactgcatctcagaccagcatcaaaaagctcggactcttgctagatccacataaggaccgctccctagcggcccaggtcatgacaagcacgacgacagggagctctatgcatgcgtcccctaagagccttttggaagtgtcaaagaaattcagcaaactgaaatctacaaatgcaaccaatacttcaggggaattcacattgataagtcccaaagatcttgtaagaaaggcaatgtcgaagctgaaaacaaaggagaataataatacaaagcaggagatgcagaggacagcaagtgcaacatccaagaatttcaggaaatcattgagtctgagatttactccacagttaactgataaaaaagatgaaaatctcaagacattgtctccaacttttgaagagagcgttccattaacaaggactacaagtgcatcaaataaagagaaggcagctaaattacgtcggatgaagaagatttataacgatgatttgttaagactgagcagatcaaatacatacagttccccacaggatagcatgcatttatggacagagaatgggactcctaataagtctttatcaggaggaatgtggtcagtgatggtgagtatgccgaatagcacgacaaataagcagtcaaagcagtattttgggacaataggacatatggaacatttagagaagcaaaaaagaagtggaagtaaaggagaaaaaagtcataagaaagtgggatcattagatcatttggatgttcgaccaaaagaatacaagacatcattaagaacaagagggaatattcaaggtcagaaatcagttgaaatgagaaaatatcgcacagagcaaaaagcagtatcaatgtcatttaatcatagtcgtgttggttcacaattcactataaataatgatgctgttggaagaccaaatagtccgttgttgaatcataatgggattgtacaagaagaatcacatgatacagaggtcttgctaacagatgaagggacattaagtatggaacaaagagatgcaaaagatttaaaaggcaaaggaggatcaataaatgagattaaaaattggaccaataatctggcatttgatgaagaagaaaaggaaagaaaagcaacggaagcagcaaataatgtgaaacatgcacaagaaacaatgttggaaagattgagagatgcattaggaagtgaagagtttgtaaagagagaagattatgaaagagttgtccaagaaaagagagaattagaagaatatgctgaagcagtaagagaagaaaatgagaaactcagagcgttttttatggaattaaagaattctggttggggacaagatggtagtcaaggtttaaaggagttagtagtgaagcaacagaaagagttggatgtattgaaaagaagagaaggagcagtgaagaatgtattgaaaatgatatatcaaacagggatagatgtgaatgaatttatgggaggaaatgaaggcaatgatgagcaattatttacagagacacaatat

SEQ ID NO: 18896 - protein, 536 aa, Glycine max
QQSSSYYPQHLSLDLSKEKDLITPLKDVNPHSTASQTSIKKLGLLLDPHKDRSLAAQVMTSTTTGSSMHASPKSLLEVSKKFSKLKSTNATNTSGEFTLISPKDLVRKAMSKLKTKENNNTKQEMQRTASATSKNFRKSLSLRFTPQLTDKKDENLKTLSPTFEESVPLTRTTSASNKEKAAKLRRMKKIYNDDLLRLSRSNTYSSPQDSMHLWTENGTPNKSLSGGMWSVMVSMPNSTTNKQSKQYFGTIGHMEHLEKQKRSGSKGEKSHKKVGSLDHLDVRPKEYKTSLRTRGNIQGQKSVEMRKYRTEQKAVSMSFNHSRVGSQFTINNDAVGRPNSPLLNHNGIVQEESHDTEVLLTDEGTLSMEQRDAKDLKGKGGSINEIKNWTNNLAFDEEEKERKATEAANNVKHAQETMLERLRDALGSEEFVKREDYERVVQEKRELEEYAEAVREENEKLRAFFMELKNSGWGQDGSQGLKELVVKQQKELDVLKRREGAVKNVLKMIYQTGIDVNEFMGGNEGNDEQLFTETQY

SEQ ID NO: 18897 - protein, 478 aa, Glycine max
MTSTTTGSSMHASPKSLLEVSKKFSKLKSTNATNTSGEFTLISPKDLVRKAMSKLKTKENNNTKQEMQRTASATSKNFRKSLSLRFTPQLTDKKDENLKTLSPTFEESVPLTRTTSASNKEKAAKLRRMKKIYNDDLLRLSRSNTYSSPQDSMHLWTENGTPNKSLSGGMWSVMVSMPNSTTNKQSKQYFGTIGHMEHLEKQKRSGSKGEKSHKKVGSLDHLDVRPKEYKTSLRTRGNIQGQKSVEMRKYRTEQKAVSMSFNHSRVGSQFTINNDAVGRPNSPLLNHNGIVQEESHDTEVLLTDEGTLSMEQRDAKDLKGKGGSINEIKNWTNNLAFDEEEKERKATEAANNVKHAQETMLERLRDALGSEEFVKREDYERVVQEKRELEEYAEAVREENEKLRAFFMELKNSGWGQDGSQGLKELVVKQQKELDVLKRREGAVKNVLKMIYQTGIDVNEFMGGNEGNDEQLFTETQY

SEQ ID NO: 18898 - protein, 469 aa, Glycine max
MHASPKSLLEVSKKFSKLKSTNATNTSGEFTLISPKDLVRKAMSKLKTKENNNTKQEMQRTASATSKNFRKSLSLRFTPQLTDKKDENLKTLSPTFEESVPLTRTTSASNKEKAAKLRRMKKIYNDDLLRLSRSNTYSSPQDSMHLWTENGTPNKSLSGGMWSVMVSMPNSTTNKQSKQYFGTIGHMEHLEKQKRSGSKGEKSHKKVGSLDHLDVRPKEYKTSLRTRGNIQGQKSVEMRKYRTEQKAVSMSFNHSRVGSQFTINNDAVGRPNSPLLNHNGIVQEESHDTEVLLTDEGTLSMEQRDAKDLKGKGGSINEIKNWTNNLAFDEEEKERKATEAANNVKHAQETMLERLRDALGSEEFVKREDYERVVQEKRELEEYAEAVREENEKLRAFFMELKNSGWGQDGSQGLKELVVKQQKELDVLKRREGAVKNVLKMIYQTGIDVNEFMGGNEGNDEQLFTETQY

SEQ ID NO: 18899 - DNA, 1141 bp, Glycine max
aagaaatagtgggagatctataaagtaacggaaactggtgacacagtttagagagagagagaaacaaagcaaaagccatttggatcctctcttctcttctttgatctccgttacccttttcgttttctcaacacagagagagaaagagagagagtctttcggagttcgtttgcgtgtgttgtgtgatcagtcaccgatggcagcaccacctgcgagggcacgtgccgattacgattacctcatcaagcttcttcttattggcgatagcggtgtcggaaagagttgtctgcttttgcgattttctgatggttccttcacaaccagttttatcaccaccattggcattgattttaagataagaaccattgaacttgatggcaaacgcattaagttacaaatctgggatactgctggtcaggagcgatttcgaactattaccacagcttattaccgtggagccatgggcatattgcttgtttatgatgttacggatgaagcatctttcaacaatattaggaattggattcgcaacattgaacaacatgcttctgacaatgtaaacaagatacttgtgggtaacaaggctgatatggatgaaagtaaaaggggtcttttttgtcctctaggctgtgcctacctccaaaggtcaagcccttgctgatgagtatggtatcaagttttttgaaaccagtgcgaagacaaacatgaatgtggaggaggttttcttttcaatagcaagagatatcaagcaaaggcttgcagacacagattctaaggctgaacctcagactatcaagattaaccaacccgaccaggcagccaccgggggtctagctgctcaaaaatcggcttgctgtggttcatgaaacaaataacagatcagaatctgcagttagagggtgcagattcaacacttgccctcatatgggtgctatagttattttgatgacatttaaaagtgggagcatgtatttgtccttgtatttcccaactgcaaagactatgttttgaagatagtgctttaaattttttgcttacttagttgtcggatttgttgtgattaattcgtttgctccattctctcctctttcatttgtactcctactcttaaaagaaaatctttcggaagtttcgattcaag

SEQ ID NO: 18900 - protein, 154 aa, Glycine max
MAAPPARARADYDYLIKLLLIGDSGVGKSCLLLRFSDGSFTTSFITTIGIDFKIRTIELDGKRIKLQIWDTAGQERFRTITTAYYRGAMGILLVYDVTDEASFNNIRNWIRNIEQHASDNVNKILVGNKADMDESKRGLFCPLGCAYLQRSSPC

SEQ ID NO: 18901 - DNA, 1109 bp, Glycine max
gaaactgagcatctcattaagggataatttagtgaatatgtattttatcctcttaataaaaatgtctttttgtctgaatttttatatcaacaggtatggttacaaagatgttcggaaagaaaatcaccagacttttgagcagctgctgattgagagcctagagaagtttatacgtcgtgaggctcaggagaggtcactggagagtgatggggatggtgatactggttcagaggatgagtaccctaattctagggttctcatagctcccaatgggagcgtttactcacttggtgttcctcttcttgctggttttaaggatacaagcaaccccgttttagaagaaagcacattagacgtgataagcccggtatccactgatcccctggtgtttgatgctgagcagagccttgagagtgagttatcttttattcataaggctaaagaatctggtgttgtgtatcttcttggtcatggggatataagagcaaggaaggagtcgtggtttatcaagaagttagttataaactatttttatgcctttttgagaaagaactgcagaagggggatcacaactttaagtgtaccacactcacatttgatgcaagttagcatgacatacatggtttgaaaatcaatcaattttgcagcccaaataaaacgagtggcaattctcttgaaagctacagtttgatagcaatgaagggtccctggaaaggtcttattttggattgctcaatctgaaatgttcgatcctttctagccattttggatctccaaattgtttattgtccttccagcgcgagaatccggaagtagtcctgatgtttgttgtcgttgtggattcaccatctgcatatatgggattagaaaaaggctgataacaaagagaaaatgttaaaaactaacatccctccctatgcatacaatgcacatttgcgaatgtgtcaaattcaacttaaacgcaagaaccatggacatcgagtattgtacagtggcatgccattgcccttagttttcttattctatcacctttatttgttgtttaccttcccaactctgactaggcattttcttgattgaaacacaaatgagatcatatcttttttttc

SEQ ID NO: 18902 - protein, 208 aa, Glycine max
KLSISLRDNLVNMYFILLIKMSFCLNFYINRYGYKDVRKENHQTFEQLLIESLEKFIRREAQERSLESDGDGDTGSEDEYPNSRVLIAPNGSVYSLGVPLLAGFKDTSNPVLEESTLDVISPVSTDPLVFDAEQSLESELSFIHKAKESGVVYLLGHGDIRARKESWFIKKLVINYFYAFLRKNCRRGITTLSVPHSHLMQVSMTYMV

SEQ ID NO: 18903 - protein, 196 aa, Glycine max
MYFILLIKMSFCLNFYINRYGYKDVRKENHQTFEQLLIESLEKFIRREAQERSLESDGDGDTGSEDEYPNSRVLIAPNGSVYSLGVPLLAGFKDTSNPVLEESTLDVISPVSTDPLVFDAEQSLESELSFIHKAKESGVVYLLGHGDIRARKESWFIKKLVINYFYAFLRKNCRRGITTLSVPHSHLMQVSMTYMV

SEQ ID NO: 18904 - protein, 188 aa, Glycine max
MSFCLNFYINRYGYKDVRKENHQTFEQLLIESLEKFIRREAQERSLESDGDGDTGSEDEYPNSRVLIAPNGSVYSLGVPLLAGFKDTSNPVLEESTLDVISPVSTDPLVFDAEQSLESELSFIHKAKESGVVYLLGHGDIRARKESWFIKKLVINYFYAFLRKNCRRGITTLSVPHSHLMQVSMTYMV

SEQ ID NO: 18905 - DNA, 1374 bp, Glycine max
gagccattcttttccaccacaagataagaaaaaagaaaaaatgtttgcagggaaaggggctgtttggttctccagagcggtggcgttggcagcaatcgcggtggtagcttgcgttggccttacacaggcccaacccgaggccaggttcaactgcaacagcgcgaacatccccacgtgtcgcgcgctcataagctactctcacccgaacaccaccaccctcggcgacatccaaaagctcttcaacgtgaaacacatcctcgacatcgtgggagcgaacaacctcccaagcaacgccacaaaaacatacgcggtgggccccaacgaggttgtgaaggtccctttcccgtgcaggtgcagcaacaacacgggactctcggaccgtgttccgctgtacaggatcaagaagggggacacgctgtactacatcgcgacgacgacgttcgcgggtctgatgaagtggccgcagatccaggtggccaataacatagccaacgcgaataatatcaccaccggggacatgctttatattccgctgccgtgtagctgcgacgaggtgggtgggaagagtgtggtgcactatgcgcatcttgtggcgccgcagagcaccgtggaggggattgcggaggagtttggtaccactcagcagatactgctcaaccttaatggaatttctgaccccaaaaatcttcaggcagggcagattctcgatgttcccctccaagcttgttcctcgaatgtgaaaaatgattcattggactatcccttgcttgtcccaaatgctacttacgcctatactgcccatgaatgcgtcaaatgcaagtgtgactccagtaacaatttcatattacaatgtgagccatcccaactcaaaccaaccaactggtctgtttgcccctctatggaatgctcagccaacgtcttgattggcaaaaccatttcctcagattcctgcaatcgcacaacctgcgcctatactggttatagattccacaatatctctgcagaagctgtaactgagaacacttgtgctgtgccgccgactccgagtggttcaggaggatcaactggttctgattcaggagcgtcaaggagcaccttgcaaggcttgttttggagtaatcttttcattgtcattcactttgtcctctttcttgtctatgttttgtagtaaaatagaataccctgcacttccgcagctattttttataatagattagtccactctgtaatttgctgagttcagatagattggttcgtgttgtgagtgttgcaataactgaaccttttgtgtttttcctttgcaatatttgtatcttaaataaataaatatgttccgaagaataagagtgatgtctaatctattttaatgtgatc

SEQ ID NO: 18906 - protein, 388 aa, Glycine max
SHSFPPQDKKKEKMFAGKGAVWFSRAVALAAIAVVACVGLTQAQPEARFNCNSANIPTCRALISYSHPNTTTLGDIQKLFNVKHILDIVGANNLPSNATKTYAVGPNEVVKVPFPCRCSNNTGLSDRVPLYRIKKGDTLYYIATTTFAGLMKWPQIQVANNIANANNITTGDMLYIPLPCSCDEVGGKSVVHYAHLVAPQSTVEGIAEEFGTTQQILLNLNGISDPKNLQAGQILDVPLQACSSNVKNDSLDYPLLVPNATYAYTAHECVKCKCDSSNNFILQCEPSQLKPTNWSVCPSMECSANVLIGKTISSDSCNRTTCAYTGYRFHNISAEAVTENTCAVPPTPSGSGGSTGSDSGASRSTLQGLFWSNLFIVIHFVLFLVYVL

SEQ ID NO: 18907 - protein, 375 aa, Glycine max
MFAGKGAVWFSRAVALAAIAVVACVGLTQAQPEARFNCNSANIPTCRALISYSHPNTTTLGDIQKLFNVKHILDIVGANNLPSNATKTYAVGPNEVVKVPFPCRCSNNTGLSDRVPLYRIKKGDTLYYIATTTFAGLMKWPQIQVANNIANANNITTGDMLYIPLPCSCDEVGGKSVVHYAHLVAPQSTVEGIAEEFGTTQQILLNLNGISDPKNLQAGQILDVPLQACSSNVKNDSLDYPLLVPNATYAYTAHECVKCKCDSSNNFILQCEPSQLKPTNWSVCPSMECSANVLIGKTISSDSCNRTTCAYTGYRFHNISAEAVTENTCAVPPTPSGSGGSTGSDSGASRSTLQGLFWSNLFIVIHFVLFLVYVL

SEQ ID NO: 18908 - protein, 238 aa, Glycine max
MKWPQIQVANNIANANNITTGDMLYIPLPCSCDEVGGKSVVHYAHLVAPQSTVEGIAEEFGTTQQILLNLNGISDPKNLQAGQILDVPLQACSSNVKNDSLDYPLLVPNATYAYTAHECVKCKCDSSNNFILQCEPSQLKPTNWSVCPSMECSANVLIGKTISSDSCNRTTCAYTGYRFHNISAEAVTENTCAVPPTPSGSGGSTGSDSGASRSTLQGLFWSNLFIVIHFVLFLVYVL

SEQ ID NO: 18909 - DNA, 916 bp, Glycine max
gatttttgaaaatggtaccatcccagtttcagattcatttccaaaactatcagatttgaacattgactattgcaaggatatggtggaattacctactgggatctgtgatattaccccactaaagaagctcagtattactaattgccacaagcttagttctctgccccaaaacattggaaagttgttgaatttggaactcctgaacctaagttcctgcactgatttggaagagataccagattctattgtaaaactttctaagctaagacttcttgacctctcaaactgcataagcctttcaattttaccagaggacattggtgatctatgcaatctcaggaatctcaatatgacaagctgtgcaaggtgtgaattgccgtactcagtaaccaatcttgagaatttaaaagtggtggtatgtgatgaagagacagctgcttcatgggaagcatttgaagctatgcttccaaatctgaagttagaggttcctcgagttgaggttaacttaaactggcttcattcaattagctcttaagacatgtcctgcttcatggaaagcatttgaagctatgctttcccaatctcaagtttgaggttcctcaagttgatgttaactgaagctggtttcattcaatttgctcctatgacctctttctataaaaatgttagaccaatgatcgtaactgtttcatgtgaaataatcttgtttaaaatagggataataaatgtgtattcaagttgctgtagtagtatttgcatgtcgtgcaaacagtactatgctacttgaaagaagttggtgattttatgtgttgtgtgttgtcacgattggacatcttagcataatgatgccaacaaaataattgaactatgataacttcaaaagtttgtttttatgaagtaggttttcttatcttcg

SEQ ID NO: 18910 - protein, 177 aa, Glycine max
IFENGTIPVSDSFPKLSDLNIDYCKDMVELPTGICDITPLKKLSITNCHKLSSLPQNIGKLLNLELLNLSSCTDLEEIPDSIVKLSKLRLLDLSNCISLSILPEDIGDLCNLRNLNMTSCARCELPYSVTNLENLKVVVCDEETAASWEAFEAMLPNLKLEVPRVEVNLNWLHSISS

SEQ ID NO: 18911 - protein, 151 aa, Glycine max
MVELPTGICDITPLKKLSITNCHKLSSLPQNIGKLLNLELLNLSSCTDLEEIPDSIVKLSKLRLLDLSNCISLSILPEDIGDLCNLRNLNMTSCARCELPYSVTNLENLKVVVCDEETAASWEAFEAMLPNLKLEVPRVEVNLNWLHSISS

SEQ ID NO: 18912 - DNA, 1302 bp, Glycine max
aatctcaatgatggcataaccagtgcatcaaattcaaagatcagcatccccataattgacctcacagtcatccatgatgatcctattttgagagatcatgttgtgggaaaagttagatatgcatgtgagaagtggggcttctttcaggttataaatcatggaattccaactcatgttttggatgagatgatcaaaggaacttgcaggtttcaccaccaagatgcaaaggcgaggaaagagtactacactcgcaaaattatagccccaagcggcatatgaggtggatatcctttggtatatagttgaggttaatttcactgccactgcctacaaatcgaccaaatagcattgaccctgcattgaaaatgtctggtagatttgatagtgaaattgatattggtgttcctgatgaagttggaagacttgaagtccttcgcgtacataccaaaaacatgaagctttcagatgctgttgatctagagagaattgcaaaagatactcatggatatgttgatgctgaccttactgccctttgcactgaagctgctcttcaatgcatcagggagaagatggatgtcattgatttggaagatgagagtattgatgctgaagtgctgaattctatggcagtttcaaatgagcatttccatactgctctgggaacaagcaatccatttgctttacgagaaactgttgttgaggtgcctaaggtcagcggggaggatattggaggccttgagaatgtcaagcgtgagctgcaagagactgttcaatatcctgtggagcacctagaaaaatttgagaagtttggtatgtcaccattaaaaggggttctcttctatggtcctccaggatgtggaaaaactttgttggccaaagcaattgctaatgaatgtcaagctaatttcatcagtgaggggcccagaattgctcactatgtggtttggtgaaagtgaagccaatgttcgagaaatttttgacaaggccagacaatcagctccatgtgtcctctttgatgagcttgattccattgctactcaggtctatttttgtacttcgcatccatgcaggccaggttgaattaaattatgaggctgggttgaaaggaattgtatgattttgttgccaaatctgtagatgatttaaggagataatgttacacgatgtttttcctatgtctaagttggtttttcctagaaatattctaaagtatcatcaacgcatgttgcgtgcacctgggaggctaagacaaactcatcaaaacattgtatctcaagagaatagtgcaccaccatttccatc

SEQ ID NO: 18913 - protein, 194 aa, Glycine max
MSGRFDSEIDIGVPDEVGRLEVLRVHTKNMKLSDAVDLERIAKDTHGYVDADLTALCTEAALQCIREKMDVIDLEDESIDAEVLNSMAVSNEHFHTALGTSNPFALRETVVEVPKVSGEDIGGLENVKRELQETVQYPVEHLEKFEKFGMSPLKGVLFYGPPGCGKTLLAKAIANECQANFISEGPRIAHYVVW

SEQ ID NO: 18914 - protein, 165 aa, Glycine max
MKLSDAVDLERIAKDTHGYVDADLTALCTEAALQCIREKMDVIDLEDESIDAEVLNSMAVSNEHFHTALGTSNPFALRETVVEVPKVSGEDIGGLENVKRELQETVQYPVEHLEKFEKFGMSPLKGVLFYGPPGCGKTLLAKAIANECQANFISEGPRIAHYVVW

SEQ ID NO: 18915 - protein, 126 aa, Glycine max
MDVIDLEDESIDAEVLNSMAVSNEHFHTALGTSNPFALRETVVEVPKVSGEDIGGLENVKRELQETVQYPVEHLEKFEKFGMSPLKGVLFYGPPGCGKTLLAKAIANECQANFISEGPRIAHYVVW

SEQ ID NO: 18916 - DNA, 1300 bp, Glycine max
gttgcatgtgctgcagtttgccagtcttggaggaatatgtgcaaggacatcgttaagagcccagagttttgtggcaaacttacattccctgtgtccttgaagcagcctgggccacgggatggaatcattcaatgttttatcaaaagagataaatctaatttaacataccacctattcctttgtctcagccctgctttgttagttgaaaatggaaaattcctcctttctgctaagaggacaaggagaacaacttacactgagtacgttatttccatggatgctgacaacatctctagatcaagtaacacttacattggaaagctgagatcaaattttcttggtacaaagttcattatatacgatacacagcctccatactcttctgcccatatatgccctcctgggactgggaagacgagccgcagattttattccaaaaaggtctcgcctaaggtcccatctgggagttacaacatagctcaggtaacatatgaattaaatgtgcttgggactcgaggaccaagaaagatgcactgcgttatgcattcaataccagcttcagcactagatgcaggtggcactgttcctggccagccagagcttcttccccgttccctggaggactcgtttcggagcatctcgttttcaaagtctctagatcattctattgagttcagcagttcgcgattttctgagattggggaatcctgcatcgaagatgatgatggcaagatgagacccttggttctgaaaaacaagcctccaagatggcatgaacagttacaatgttggtgccttaatttccgtggacgagtaacagttgcgtctgttaaaaactttcagttgattgctgccacccaaccagctgctggtgcacctacaccatctcaaccagctccaccggagcacgataagatcattcttcagtttggcaaagttgggaaggacatgttcaccatggattatcggtaccctttatctgcattccaagcttttgcaatatgcttgagcagctttgacaccaaattggcttgtgaataagataaatcatgaatcagaagggttataagtgagctaatgaaacaatgatgttgatggtatatttccctttgtttttcttttcttttcctattttcattatcagtatcatgggagtaggcaattgttgttactcagcttttgtatgactaaattgtaaccgtagtgcatctctgatgtaataggattttagagcatttttaacatacaatgttgctatgtttctttctcagttgattctaccaacaaaccatcatttaac

SEQ ID NO: 18917 - protein, 346 aa, Glycine max
VACAAVCQSWRNMCKDIVKSPEFCGKLTFPVSLKQPGPRDGIIQCFIKRDKSNLTYHLFLCLSPALLVENGKFLLSAKRTRRTTYTEYVISMDADNISRSSNTYIGKLRSNFLGTKFIIYDTQPPYSSAHICPPGTGKTSRRFYSKKVSPKVPSGSYNIAQVTYELNVLGTRGPRKMHCVMHSIPASALDAGGTVPGQPELLPRSLEDSFRSISFSKSLDHSIEFSSSRFSEIGESCIEDDDGKMRPLVLKNKPPRWHEQLQCWCLNFRGRVTVASVKNFQLIAATQPAAGAPTPSQPAPPEHDKIILQFGKVGKDMFTMDYRYPLSAFQAFAICLSSFDTKLACE

SEQ ID NO: 18918 - protein, 334 aa, Glycine max
MCKDIVKSPEFCGKLTFPVSLKQPGPRDGIIQCFIKRDKSNLTYHLFLCLSPALLVENGKFLLSAKRTRRTTYTEYVISMDADNISRSSNTYIGKLRSNFLGTKFIIYDTQPPYSSAHICPPGTGKTSRRFYSKKVSPKVPSGSYNIAQVTYELNVLGTRGPRKMHCVMHSIPASALDAGGTVPGQPELLPRSLEDSFRSISFSKSLDHSIEFSSSRFSEIGESCIEDDDGKMRPLVLKNKPPRWHEQLQCWCLNFRGRVTVASVKNFQLIAATQPAAGAPTPSQPAPPEHDKIILQFGKVGKDMFTMDYRYPLSAFQAFAICLSSFDTKLACE

SEQ ID NO: 18919 - protein, 255 aa, Glycine max
MDADNISRSSNTYIGKLRSNFLGTKFIIYDTQPPYSSAHICPPGTGKTSRRFYSKKVSPKVPSGSYNIAQVTYELNVLGTRGPRKMHCVMHSIPASALDAGGTVPGQPELLPRSLEDSFRSISFSKSLDHSIEFSSSRFSEIGESCIEDDDGKMRPLVLKNKPPRWHEQLQCWCLNFRGRVTVASVKNFQLIAATQPAAGAPTPSQPAPPEHDKIILQFGKVGKDMFTMDYRYPLSAFQAFAICLSSFDTKLACE

SEQ ID NO: 18920 - DNA, 1220 bp, Glycine max
aaaaacataagaatgcattcaacgcgttgagttgttgtctggaagagcttatgctgtttgttcgcaattcgcatggaaccatcagtttcagctccaccaaaaccttgggagaaagcagcatcatcatctgggccagcaccttttaaacccccatcagcaggtagcacaagtgatgtagttgaggcttcagggactgcaaaacctggcgaaatagttccagcttccgataagactgcaactgtcaataggaatgctcttgggagaccccttcccacaaggccatgggagcagaataatggaagtaccagctatggaggttatggttccacaatgaattataattctggatatggatcttatggtggagtgggagggttgtatggcggaggaatgtatggcagcagtatgtacaggggaggatatgggggcctctatggttcctctgggatgtatggagggggaatgtataatggtggctttggtggtccaatgggtggttatggtatgggtggtggtggtccttatggagctgaagatcccaataatccgtacggagttccttcatcgcccccaggattttggatttcttttatgcgtgtgatgcaaggtgtggttaacttttttggccggatttcaatgctcatagaccagaacacgcaggctttccatatgttcatgactgcacttcttcagctttttgatcgttctggtgtactgtatggagagctagctagatttgtgttgcggttgcttggaatcagaactaaaccaaagaagattaaccctccaggtccagatggacttccactacctgggcaacacaattcctctgtaaatcagaacttcattgagggaacaaagcctgctccaagtggttcttgggacaatgtatgggaaaatgacgccaaaaaatgatgatgcaaatttgttttgctgatagagcaagtccaaatacaaaccaaggaattgaggaacagatgaagcaatacaagtgaatatactgaagctgtgaaatcgatgcttaatctggaagtttaagttcattattgctttgcttagattgctctgataagagagaacaaactagcaatacagttgccttctaagcatttgttctgaatcttgtaggatgctatttgtatagatagttgtattactttgtatttcaaatgtttcttaatcttttgggggcgacaaattgaaagaagtaaattgagtgg

SEQ ID NO: 18921 - protein, 280 aa, Glycine max
MEPSVSAPPKPWEKAASSSGPAPFKPPSAGSTSDVVEASGTAKPGEIVPASDKTATVNRNALGRPLPTRPWEQNNGSTSYGGYGSTMNYNSGYGSYGGVGGLYGGGMYGSSMYRGGYGGLYGSSGMYGGGMYNGGFGGPMGGYGMGGGGPYGAEDPNNPYGVPSSPPGFWISFMRVMQGVVNFFGRISMLIDQNTQAFHMFMTALLQLFDRSGVLYGELARFVLRLLGIRTKPKKINPPGPDGLPLPGQHNSSVNQNFIEGTKPAPSGSWDNVWENDAKK

SEQ ID NO: 18922 - protein, 194 aa, Glycine max
MNYNSGYGSYGGVGGLYGGGMYGSSMYRGGYGGLYGSSGMYGGGMYNGGFGGPMGGYGMGGGGPYGAEDPNNPYGVPSSPPGFWISFMRVMQGVVNFFGRISMLIDQNTQAFHMFMTALLQLFDRSGVLYGELARFVLRLLGIRTKPKKINPPGPDGLPLPGQHNSSVNQNFIEGTKPAPSGSWDNVWENDAKK

SEQ ID NO: 18923 - protein, 174 aa, Glycine max
MYGSSMYRGGYGGLYGSSGMYGGGMYNGGFGGPMGGYGMGGGGPYGAEDPNNPYGVPSSPPGFWISFMRVMQGVVNFFGRISMLIDQNTQAFHMFMTALLQLFDRSGVLYGELARFVLRLLGIRTKPKKINPPGPDGLPLPGQHNSSVNQNFIEGTKPAPSGSWDNVWENDAKK

SEQ ID NO: 18924 - DNA, 1283 bp, Glycine max
tcaggctacgtggcccccccccctctgactttgacaacacatctttggaaaaagagctccctcatgaagttttgactgaaatcaaatcactccgactcccatttcagccagaatccacacctaatgcaatggaagcggagtccttgaatgaaaagagtatcaggagaatccacaaggcattggactctgatgatgttgagctactgaagcttcttctaaatgagtctagtgtcactctagatgatgcatatgccctgcactatgcttgtgcctatagcgattctaaggttattcaagaagttcttagtctaggcatggctgatattcttcgtagaaattcccgaggatacacagttctccatgtggctgcaaggcgaaaggatccatccattttggtagcactactgaataaaggggcacgtgcatcagataccactccagatggacaaaccgctcttgcaatttgtcagaggttgacaagatgcaaggattatcatgagaaaacagtgcagtgtaaggaatctaacaaggacaggctttgtgttgatgtcctggagagggagatgagaagaaattctatgactgtgaatatgtctgtttcatcacagttaacagctgatgatttgcacatgagactggattaccttgaggatagagttgcatttgctcgactgttgtttcctgctgaggctagggtagccattgagaatgctgaagcagattcatcatcactgtatgcaaattcatcggctttgaaggtcacaaatggcaacccgaaagaagtagatctaaatgaatctccctcggctcgaaccagaaaactccagttaagattgcatgcccttatgaaaacagttgagaatggtaggcgcttctttccccattgctctgaagtgcttgataagtttctggaagacgacgaaatgccagatgttttcttcctagagaagggcagtgaagaagagcagagaatcaaaaaagcacgcttcatggagcttaaagatgatgtgcaaaaggcatttcacaaggatatggctgaaaataaccattctggtttttcatatacggtgtcttcctcttcttcctcaactcgtagggaaggtcttaaccatagagtaaggagaaaatgaagtccatgttcttctatgtagagtgttgcaacttgcaagtagaagccgtggaatatttagaaaaaataagatggaatgttaaattagggggttttgctaatgaacttgggagatttttactagcctgatttagtttcttatagttgttggacc

SEQ ID NO: 18925 - protein, 375 aa, Glycine max
RLRGPPPSDFDNTSLEKELPHEVLTEIKSLRLPFQPESTPNAMEAESLNEKSIRRIHKALDSDDVELLKLLLNESSVTLDDAYALHYACAYSDSKVIQEVLSLGMADILRRNSRGYTVLHVAARRKDPSILVALLNKGARASDTTPDGQTALAICQRLTRCKDYHEKTVQCKESNKDRLCVDVLEREMRRNSMTVNMSVSSQLTADDLHMRLDYLEDRVAFARLLFPAEARVAIENAEADSSSLYANSSALKVTNGNPKEVDLNESPSARTRKLQLRLHALMKTVENGRRFFPHCSEVLDKFLEDDEMPDVFFLEKGSEEEQRIKKARFMELKDDVQKAFHKDMAENNHSGFSYTVSSSSSSTRREGLNHRVRRK

SEQ ID NO: 18926 - protein, 333 aa, Glycine max
MEAESLNEKSIRRIHKALDSDDVELLKLLLNESSVTLDDAYALHYACAYSDSKVIQEVLSLGMADILRRNSRGYTVLHVAARRKDPSILVALLNKGARASDTTPDGQTALAICQRLTRCKDYHEKTVQCKESNKDRLCVDVLEREMRRNSMTVNMSVSSQLTADDLHMRLDYLEDRVAFARLLFPAEARVAIENAEADSSSLYANSSALKVTNGNPKEVDLNESPSARTRKLQLRLHALMKTVENGRRFFPHCSEVLDKFLEDDEMPDVFFLEKGSEEEQRIKKARFMELKDDVQKAFHKDMAENNHSGFSYTVSSSSSSTRREGLNHRVRRK

SEQ ID NO: 18927 - protein, 271 aa, Glycine max
MADILRRNSRGYTVLHVAARRKDPSILVALLNKGARASDTTPDGQTALAICQRLTRCKDYHEKTVQCKESNKDRLCVDVLEREMRRNSMTVNMSVSSQLTADDLHMRLDYLEDRVAFARLLFPAEARVAIENAEADSSSLYANSSALKVTNGNPKEVDLNESPSARTRKLQLRLHALMKTVENGRRFFPHCSEVLDKFLEDDEMPDVFFLEKGSEEEQRIKKARFMELKDDVQKAFHKDMAENNHSGFSYTVSSSSSSTRREGLNHRVRRK

SEQ ID NO: 18928 - DNA, 1448 bp, Glycine max
aggagtatcttcgtgataactcacatgtaaatcctggaattgacctgacagtaactgtgcttaccacaggattttggcctagttataagtcttttgatctcaaccttccttcagagatgatcaggtgcttggaagtttttaagggcttctatgaaacgaggacaaaacacagaaaacttacttggatatactctctgggaacatgccacgtcactggcaagtttgaaacaaaaaacattgaactaattgtgccaacctatccagtaaactgcctttcacccatcaccattcctattttatgttgaaatttgtgccactatggtatttaagatttatgacttcatgctggtggtttaacaagtgtctcttctacttcacaggctgctgccctactgctattcaacaatgctgataggttgagctattcagagattatgactcagctgaacttgggccatgaagatgttgctagattgctccattcactgtcatctgcaaaatataagatacttatcaaggagccaaacaataaagttatatctcaaagtgacatctttgagttcaactacaaatttacggataaaatgagaaggatcaagatccctctaccaccagctgatgaaaggaaaaaggtaattgaagatgttgacaaagatcggcgatatgccattgatgcagcaattgtgcgcattatgaagagtaggaaaattttgggtcatcaacaattagttttggagtgtgttgagcagttgggccgcatgttcaagcctgacatcaaagcaatcaagaagaggattgaagatctcatcactcgggactaccttgaaagggacaaagataacccaaacaccttcaggtatttggcataaatggaagttactaatgtatagagtggccagtgttatagcctgcaaatgagcactagggttgccttaatttgattcttagggaagtacagttgaaagttctgacggttacacaatgctgtaaatgatcgtagtcgattgcttgattcagtaacaccaagagcgagattcttttgtcatacttgacattttaagagctagtttaagatacaacatacgtactggagcgaagcaagatattgtaccaaatacgttgttttcatatatatcttgattactttaatggaaagtgaaggtgggaaagtgaaggtggcacaatgaaagattgaaccttgatattctacctaagtgctacaaattgaggcaagctagtgtggctcatcggccgttgttgatatcaactgctttagcaatatattttctggctttatcctttataatttcggattatctcttctctgtcttctttctttgctcagtagtttagattagtcatttgatcttatgtatctatttaagaaaattatgcatatttcacaacttaattttaggggttattaatatgattgatagaattttctc

SEQ ID NO: 18929 - protein, 144 aa, Glycine max
MTQLNLGHEDVARLLHSLSSAKYKILIKEPNNKVISQSDIFEFNYKFTDKMRRIKIPLPPADERKKVIEDVDKDRRYAIDAAIVRIMKSRKILGHQQLVLECVEQLGRMFKPDIKAIKKRIEDLITRDYLERDKDNPNTFRYLA

SEQ ID NO: 18930 - protein, 100 aa, Glycine max
EYLRDNSHVNPGIDLTVTVLTTGFWPSYKSFDLNLPSEMIRCLEVFKGFYETRTKHRKLTWIYSLGTCHVTGKFETKNIELIVPTYPVNCLSPITIPILC

SEQ ID NO: 18931 - protein, 94 aa, Glycine max
MRRIKIPLPPADERKKVIEDVDKDRRYAIDAAIVRIMKSRKILGHQQLVLECVEQLGRMFKPDIKAIKKRIEDLITRDYLERDKDNPNTFRYLA

SEQ ID NO: 18932 - DNA, 1270 bp, Glycine max
ggttgcatcccaaatggaataagttcagacatgtccatagcgttgaacaaaactaacagcagcaaaatgagcacacccttgttccatgaattcaaaaagcaagcttctttcttcttcaaggagaaaattaagactgctagattagctctaacagatgtcacccctgcagaactgatgacagaagaggcaacaagtggaaatccatgggccccagatgccagaactctcagatcaatttcaagggatgcttttgagctagacgattattggaggattgtggagattctgcataaaaggtttcttaaatttgaaaagaagaattggaggatctcttacaattccctgatcgtgcttgagcacttgttgactcatggaccagagagtgttgcggaggaatttaagagtgacaaagatgtcattagccaaatgaaaggttttcagtatattgatgacactgggtttaattggggcctaactgtgagaaagaaatctgagaggataatgaaactgctggaaaaagggactcttctcaaggaagagagaaaaaatgctagaaggttatctagagggattgaaggtttcggaagtttctctcatcggtcaactccggcacaaggtgttctacgtgagaaatcattgccaaccacacttaagagatatgactcagacttaaacaaccatgaagatcaggaaaaccattcctcttgttcaaacaatgttgtgaatgtggacacagtggctgtcaaatctcctagccatcaaggtgaaacttttaagtcattgggtagtgtggaagccaaggaataccaggatgatgatcttggcaacaatcaaatgcttccgaaatctgaaacaagttctaaagaaaacatggagcctagcaaggaggagttccatctatggaacttgaatggggagtccaaagcacttttggattgtggtgaagaggattccaagcttggaatcatcagaacagaagatgatcaccccttcagttcagcagaaatgcatgccactgcctctttgctttcggcttgctagagacggaaatactagtatactacaagggtgttgaagcaatttgaagatttaaatgaacccaccaagttcaagttgttagcaaatattgcattttcaattcagaagagcatagtctaaagaacgtcttatggtacatgtattcatatttgatggatatgggcaaccattatgttactgctagaatttcccctctatcacggtttgttactcaacaaagagaaattttgtc

SEQ ID NO: 18933 - protein, 346 aa, Glycine max
GCIPNGISSDMSIALNKTNSSKMSTPLFHEFKKQASFFFKEKIKTARLALTDVTPAELMTEEATSGNPWAPDARTLRSISRDAFELDDYWRIVEILHKRFLKFEKKNWRISYNSLIVLEHLLTHGPESVAEEFKSDKDVISQMKGFQYIDDTGFNWGLTVRKKSERIMKLLEKGTLLKEERKNARRLSRGIEGFGSFSHRSTPAQGVLREKSLPTTLKRYDSDLNNHEDQENHSSCSNNVVNVDTVAVKSPSHQGETFKSLGSVEAKEYQDDDLGNNQMLPKSETSSKENMEPSKEEFHLWNLNGESKALLDCGEEDSKLGIIRTEDDHPFSSAEMHATASLLSAC

SEQ ID NO: 18934 - protein, 336 aa, Glycine max
MSIALNKTNSSKMSTPLFHEFKKQASFFFKEKIKTARLALTDVTPAELMTEEATSGNPWAPDARTLRSISRDAFELDDYWRIVEILHKRFLKFEKKNWRISYNSLIVLEHLLTHGPESVAEEFKSDKDVISQMKGFQYIDDTGFNWGLTVRKKSERIMKLLEKGTLLKEERKNARRLSRGIEGFGSFSHRSTPAQGVLREKSLPTTLKRYDSDLNNHEDQENHSSCSNNVVNVDTVAVKSPSHQGETFKSLGSVEAKEYQDDDLGNNQMLPKSETSSKENMEPSKEEFHLWNLNGESKALLDCGEEDSKLGIIRTEDDHPFSSAEMHATASLLSAC

SEQ ID NO: 18935 - protein, 324 aa, Glycine max
MSTPLFHEFKKQASFFFKEKIKTARLALTDVTPAELMTEEATSGNPWAPDARTLRSISRDAFELDDYWRIVEILHKRFLKFEKKNWRISYNSLIVLEHLLTHGPESVAEEFKSDKDVISQMKGFQYIDDTGFNWGLTVRKKSERIMKLLEKGTLLKEERKNARRLSRGIEGFGSFSHRSTPAQGVLREKSLPTTLKRYDSDLNNHEDQENHSSCSNNVVNVDTVAVKSPSHQGETFKSLGSVEAKEYQDDDLGNNQMLPKSETSSKENMEPSKEEFHLWNLNGESKALLDCGEEDSKLGIIRTEDDHPFSSAEMHATASLLSAC

SEQ ID NO: 18936 - DNA, 1029 bp, Glycine max
agcttatgccagaaaaatatcgatgttttattttatttcatttcttggttgtagttgaatcctctcactttgccaaaaaatcaaacaacataaccttaaattttcttgagggattgagttgttctgcattaagttctcagcacattctagccactgcataccatagcccgttctagattgtaacaaacccaactccctataataatctatgtgtggtccaccaagtgtggtccgtacttactctttcatgactgactttggtgcagacagtatgctcacaacaactaacatattagggagttgggcatctttatatttagttcatgactcttatgctttgatcaggttgtacattcatgcttaattatatgataattgggatatggtttgttcactaccatagtaataaggtgtagttatgtatattaattgatagttgttcaaatttatgttataccaagctaatgcattgagtaacactgcactgagtctagtgttgaaactcaggtagacaaatccactatgcctgcaaatacaaaggatgcattatatcaaagcttgcctcctaatataaaattagctctacgttccaaattaccatccctccgtgctgtagaagagataagtgtagcctatatcacatatgagatgcataaaaaattacattggttggttcccatggccattaacacatccaaagcacataagagatttggttggctaggggagtgggcatactcagggtatgaagtaaaaaagaagactggtgtaatgtggattgagacattctaccatgcagatagagagaaagtggaacattgtattcttgaacttctcttatggcttcatcgcttggccatcagaagtaaggctcacagtgatgctattgctggctaagtaaggtctgccacttgcgaagaaaatggaatgataaaactgaatttggtctcttttgattcaaccttaataaaggaaataattgcttaattagctctctaaataaatctcttgatttaagggattgcccgt

SEQ ID NO: 18937 - protein, 124 aa, Glycine max
MPANTKDALYQSLPPNIKLALRSKLPSLRAVEEISVAYITYEMHKKLHWLVPMAINTSKAHKRFGWLGEWAYSGYEVKKKTGVMWIETFYHADREKVEHCILELLLWLHRLAIRSKAHSDAIAG

SEQ ID NO: 18938 - protein, 82 aa, Glycine max
MHKKLHWLVPMAINTSKAHKRFGWLGEWAYSGYEVKKKTGVMWIETFYHADREKVEHCILELLLWLHRLAIRSKAHSDAIAG

SEQ ID NO: 18939 - protein, 72 aa, Glycine max
MAINTSKAHKRFGWLGEWAYSGYEVKKKTGVMWIETFYHADREKVEHCILELLLWLHRLAIRSKAHSDAIAG

SEQ ID NO: 18940 - DNA, 1730 bp, Glycine max
gacgaggcagacagtgtggaacaagaggttggaagtagcactgtgtggaaaatcgaggaatcaaaattagggttcaaaatctcattgaggagaaagaagaagaaggatgtggcacgaggcgagaaggtcggagaagaaggtccacgacatgatggacgcggctcggaagagagcgcaacgacgcgccgtttacctcgccaagagacgcggcgatcctcagcaatccattcagctcgtcggctttcctagccgaacctatcgcgacgacgctctctaccaagcctcacaggatcagcagggcctgataccttggaatgggaaacaggatgtattgatagaccgatttgatgggcgtgctctccttgatttcgttcgcgattctagtcacaggcgcgctccggagaagtctgaagaagaagaagagttagaagagtttgttaattttgagcgttatcgggatttaataaagcatcgccgtagaggatgtcgtcactgatgaggaggctttggagcatgtaaatcaagagatggaggccaaggctgctgctccatttacatcagacagatctaatttgttgcagcctgctgcaagcaaaggatcttactcgcaggtcaggttttcttatgatgggaatggaaaagaagaaactcatatttcagatgatgaagataatgataacgaggaagatgaagatgatgaggatgatgaggattttaatagtgatgatagcaatgatgaaggaatggaaataattgcaaaagaatatggggttaaaaggtatggttggcttgtttacatggataagaaggctaaggaggaagaaaaaaggcaaaaagagttgatcaaaggtgatcctgcaattaggaagctgagtcgtaaggaaagaaggaaggcttctcagattgaaagggagagagagagagaagccacacggatatctggaactcgtgtgctgcatcatgacccctaccgggaaacaaggcaaagtcctacatatgaagcctattctcgatctagaaggtcaaggtctagatcgcggtcatactctccgtcgcactcaaggcgttattcatgcagtggtcattctgatgatattcaccgaagcaaaccaaggactcctaaaatagagtacattactgaatttgggggctctggagcagcagcagatgaacccaggcctgaaggattttctccaccacgatctcctacatctcaagttgatttgttaaaccggtcggagcactggacctttaattcttgccaagatagattggacagtcatttctctgggcagcatatctcccatattgttgcctgaggcaattttttgtgctttagaatagatcaggactaggtttgtcggggtaactgccaagaaaggagggagaaggcttcctatttgaagctcattgttccctgaaaagaattttgcatgactaactaactacctgcgagttgcatggaaattttacaattattttatctgatgcctctactgttttgcaggccaacatctagttgcatacttgaggcattgcatgttgatcctgcttctggtgtgtcaattgataaggataagggcactaaagtcttgaaaccatcagtaagtggttcttcagcattagcaaaattaaagactggtggttctggagggcccttaaaacaacaaggggagaagaaagaaactcctcaagaaagacttaaaagaatcatgaacaagcaactaaac

SEQ ID NO: 18941 - protein, 263 aa, Glycine max
MEAKAAAPFTSDRSNLLQPAASKGSYSQVRFSYDGNGKEETHISDDEDNDNEEDEDDEDDEDFNSDDSNDEGMEIIAKEYGVKRYGWLVYMDKKAKEEEKRQKELIKGDPAIRKLSRKERRKASQIEREREREATRISGTRVLHHDPYRETRQSPTYEAYSRSRRSRSRSRSYSPSHSRRYSCSGHSDDIHRSKPRTPKIEYITEFGGSGAAADEPRPEGFSPPRSPTSQVDLLNRSEHWTFNSCQDRLDSHFSGQHISHIVA

SEQ ID NO: 18942 - protein, 191 aa, Glycine max
MEIIAKEYGVKRYGWLVYMDKKAKEEEKRQKELIKGDPAIRKLSRKERRKASQIEREREREATRISGTRVLHHDPYRETRQSPTYEAYSRSRRSRSRSRSYSPSHSRRYSCSGHSDDIHRSKPRTPKIEYITEFGGSGAAADEPRPEGFSPPRSPTSQVDLLNRSEHWTFNSCQDRLDSHFSGQHISHIVA

SEQ ID NO: 18943 - protein, 173 aa, Glycine max
MDKKAKEEEKRQKELIKGDPAIRKLSRKERRKASQIEREREREATRISGTRVLHHDPYRETRQSPTYEAYSRSRRSRSRSRSYSPSHSRRYSCSGHSDDIHRSKPRTPKIEYITEFGGSGAAADEPRPEGFSPPRSPTSQVDLLNRSEHWTFNSCQDRLDSHFSGQHISHIVA

SEQ ID NO: 18944 - DNA, 1126 bp, Glycine max
aattcccccttttggaagatggttccacagtcagtgataacgcaagtctccgattcaagtggcgtgaatgcgatatcaaacgtttcttctggccacggattctacgattggttgttcgaatgtcacgggttctggcacaatgccactctcaacatcccctcgttcctcttcgtcttctacttggcacttcaagccaggcacagcttactcaaactctcccttgcgcgctcctatataatcatttcatataacctttgcctctggctcattactctgctcaatctcgcttggtgctttctccaggcatgggagtgcacgtctgggagaaagttgacatggaacctgttatccttgttcactacttccggaatgctgtttttggaagtgagcttgctggcttttttatttcaaggaaataatgcaggcggcttagatgcaatgaaacgaacttttggtatctcaacgctcgttgttggcttggatatactgttgaaggcaatatatctatttgtatttgggattccattattcgtcgacagcaatgaacatactcatgggaagtggaacttgtgggttgtccacaagctgttgctcactgctgtttatggcttcataatgtttatataccattccggatggaaagaaacgttgcctgcaaaaattgccttttacaagtatgttgcaattatgttcatttttaatgcgattgcgacacttgcttgtggccttgctggaactggtgctgcgtttgctttctggctgtatcgtgtcacggttgtcttctaccatgcattttatcttccttttttgtatacaacattcctagcagacttttttcaggaggaaaatttccatttggaaaatgtgtattattccgagatgaaagatgcaggtttctttgacacggactgggagtgatgatgtatcagctataaattgacattgcctcagtatagtcatcgcagggaaccccgatcaggacatatgtaaataaaataaccatgttagcagatcggaatattattaaaaagatgtttatttttaagcacctcaagtgttataggcatgacgtagtataattcttaattattcagctagatacgagactgaataaaattaacatacg

SEQ ID NO: 18945 - protein, 305 aa, Glycine max
NSPFWKMVPQSVITQVSDSSGVNAISNVSSGHGFYDWLFECHGFWHNATLNIPSFLFVFYLALQARHSLLKLSLARSYIIISYNLCLWLITLLNLAWCFLQAWECTSGRKLTWNLLSLFTTSGMLFLEVSLLAFLFQGNNAGGLDAMKRTFGISTLVVGLDILLKAIYLFVFGIPLFVDSNEHTHGKWNLWVVHKLLLTAVYGFIMFIYHSGWKETLPAKIAFYKYVAIMFIFNAIATLACGLAGTGAAFAFWLYRVTVVFYHAFYLPFLYTTFLADFFQEENFHLENVYYSEMKDAGFFDTDWE

SEQ ID NO: 18946 - protein, 299 aa, Glycine max
MVPQSVITQVSDSSGVNAISNVSSGHGFYDWLFECHGFWHNATLNIPSFLFVFYLALQARHSLLKLSLARSYIIISYNLCLWLITLLNLAWCFLQAWECTSGRKLTWNLLSLFTTSGMLFLEVSLLAFLFQGNNAGGLDAMKRTFGISTLVVGLDILLKAIYLFVFGIPLFVDSNEHTHGKWNLWVVHKLLLTAVYGFIMFIYHSGWKETLPAKIAFYKYVAIMFIFNAIATLACGLAGTGAAFAFWLYRVTVVFYHAFYLPFLYTTFLADFFQEENFHLENVYYSEMKDAGFFDTDWE

SEQ ID NO: 18947 - protein, 182 aa, Glycine max
MLFLEVSLLAFLFQGNNAGGLDAMKRTFGISTLVVGLDILLKAIYLFVFGIPLFVDSNEHTHGKWNLWVVHKLLLTAVYGFIMFIYHSGWKETLPAKIAFYKYVAIMFIFNAIATLACGLAGTGAAFAFWLYRVTVVFYHAFYLPFLYTTFLADFFQEENFHLENVYYSEMKDAGFFDTDWE

SEQ ID NO: 18948 - DNA, 2166 bp, Glycine max
atgccagtcttttagacctcaacctgaagaaagtgatcaaaaaacttttccagacacaaaatcgttggaccctgcattatcttctatggctgcacctaatgctaaacttccccaaagcctcgacagaaatgaaaatgatgataaagaacaaactgaaaatattacaaataatctggatgcatccagatatgttgaggcaaacacagatcagtgcagaaaaatgaagacacatacacacgaactttcaagatcaggggatgctttgctgactgatgctgaaattgatgaccatcttgaacaaaatgccaatgggagatcagaacaagtgattggcaagttagagactgtcgggagtatggttaatacagagctgactgattttgaagatgcacctaaattttcatcacttgaaccttcattgttttgcaatcctcagccaaatgctgaaggctccttgacatctggttatgataagttccatggtggtgataaaggccaatctggatctgagaaatgtgcagaggactcactagaaaacaatgaagttgttcaatcaagccactgccgtaacctcaaaatgaaagcgcctgtgaaatcaaccaagttagttattaaaaagaaacaaatttcaccagacactgaaggttcttgcaaactgaagattgttagttctaaggcagattcaactggtgctagaggtattgtaatatctggaagttcctcctttatggggcctaatctagtcacagaagtaccagaaggtgaagatgacagaaaatttagttctccacagctactgcattcatattctgacaagagaagttatgatcatgtccataaaagggacaagtcatataaaggtaaagtcaatcaagatggttttgaatcttttgattgtgatacggaagaacatacttctgttttcagcaatccacatggtttaggaattggtttgtttgatgttacaagtgatcctatgcgtcaaacacgatctataaggatgaagacaacttctgaggagccaagcacttcaaacagaagaattaaaattcgacagggtcaaagctccaggggcaaacctgaagagggtgtcaatgattctggtacttcaactcgaagggtgtcaaatcaccatgtcaaaaaattgtcatggctgatgttgtcagagcttgaagagggttaccgatatattcctcaacttggtgatgaagttgtgtactttagacagggccatcaagagtacatagagtcatattcattatctgaatcaggtccatggagactatttgtaggactaggtgcttctgaaatttgcaaggttgaagaacttgagtatgcggagctaccaggctctggggatagctgttgtaaacttaaacttagatttgtggatccttcttcgtgtgtgcatggcaaatcatttaaattaactctacctgaattgattaacttcactgactttgttattgagaaaacatggtatgatactgccatgaagagaaattggtcttcaagagataaatgcatggtctggtggagaaatgaagatgggaaaggtggaagttggtgggatggtcggattattcaagtgcaggccaagtctgatgacttccctaacagtccctgggaaaggtatcgggtccagtacaagactgatccaagcgagaatcatctgcatagtccgtgggaactatatgatcctgagatgctgtgggagcatccccacattgatcatgagatcagagataagctgctttcctatttcatcaaattagaccacaggcagaggtttgatatccaagcattgaaccaagtagctgagaggttagagtttgcaaacaggtttcctgccccattctatcctgaactaattcaatcaagattgaagaatgactactatcggagtgtggaaggtgtgaagcatgatataatggtaatgttatcaaatgctgaagaatactttaaaattacaaaaaatgctcagctggtgagcaagatcaggagaatatcagaatggtttagaaggaaacttgaaaggatatagaaagctcaaattgggttttataggcttcttctaacattgttttgcattctttaatccaattttggagaattagttggtgtttaagttggttttataaaatgaaaaaggtcataggtggtggc

SEQ ID NO: 18949 - protein, 680 aa, Glycine max
CQSFRPQPEESDQKTFPDTKSLDPALSSMAAPNAKLPQSLDRNENDDKEQTENITNNLDASRYVEANTDQCRKMKTHTHELSRSGDALLTDAEIDDHLEQNANGRSEQVIGKLETVGSMVNTELTDFEDAPKFSSLEPSLFCNPQPNAEGSLTSGYDKFHGGDKGQSGSEKCAEDSLENNEVVQSSHCRNLKMKAPVKSTKLVIKKKQISPDTEGSCKLKIVSSKADSTGARGIVISGSSSFMGPNLVTEVPEGEDDRKFSSPQLLHSYSDKRSYDHVHKRDKSYKGKVNQDGFESFDCDTEEHTSVFSNPHGLGIGLFDVTSDPMRQTRSIRMKTTSEEPSTSNRRIKIRQGQSSRGKPEEGVNDSGTSTRRVSNHHVKKLSWLMLSELEEGYRYIPQLGDEVVYFRQGHQEYIESYSLSESGPWRLFVGLGASEICKVEELEYAELPGSGDSCCKLKLRFVDPSSCVHGKSFKLTLPELINFTDFVIEKTWYDTAMKRNWSSRDKCMVWWRNEDGKGGSWWDGRIIQVQAKSDDFPNSPWERYRVQYKTDPSENHLHSPWELYDPEMLWEHPHIDHEIRDKLLSYFIKLDHRQRFDIQALNQVAERLEFANRFPAPFYPELIQSRLKNDYYRSVEGVKHDIMVMLSNAEEYFKITKNAQLVSKIRRISEWFRRKLERI

SEQ ID NO: 18950 - protein, 652 aa, Glycine max
MAAPNAKLPQSLDRNENDDKEQTENITNNLDASRYVEANTDQCRKMKTHTHELSRSGDALLTDAEIDDHLEQNANGRSEQVIGKLETVGSMVNTELTDFEDAPKFSSLEPSLFCNPQPNAEGSLTSGYDKFHGGDKGQSGSEKCAEDSLENNEVVQSSHCRNLKMKAPVKSTKLVIKKKQISPDTEGSCKLKIVSSKADSTGARGIVISGSSSFMGPNLVTEVPEGEDDRKFSSPQLLHSYSDKRSYDHVHKRDKSYKGKVNQDGFESFDCDTEEHTSVFSNPHGLGIGLFDVTSDPMRQTRSIRMKTTSEEPSTSNRRIKIRQGQSSRGKPEEGVNDSGTSTRRVSNHHVKKLSWLMLSELEEGYRYIPQLGDEVVYFRQGHQEYIESYSLSESGPWRLFVGLGASEICKVEELEYAELPGSGDSCCKLKLRFVDPSSCVHGKSFKLTLPELINFTDFVIEKTWYDTAMKRNWSSRDKCMVWWRNEDGKGGSWWDGRIIQVQAKSDDFPNSPWERYRVQYKTDPSENHLHSPWELYDPEMLWEHPHIDHEIRDKLLSYFIKLDHRQRFDIQALNQVAERLEFANRFPAPFYPELIQSRLKNDYYRSVEGVKHDIMVMLSNAEEYFKITKNAQLVSKIRRISEWFRRKLERI

SEQ ID NO: 18951 - protein, 607 aa, Glycine max
MKTHTHELSRSGDALLTDAEIDDHLEQNANGRSEQVIGKLETVGSMVNTELTDFEDAPKFSSLEPSLFCNPQPNAEGSLTSGYDKFHGGDKGQSGSEKCAEDSLENNEVVQSSHCRNLKMKAPVKSTKLVIKKKQISPDTEGSCKLKIVSSKADSTGARGIVISGSSSFMGPNLVTEVPEGEDDRKFSSPQLLHSYSDKRSYDHVHKRDKSYKGKVNQDGFESFDCDTEEHTSVFSNPHGLGIGLFDVTSDPMRQTRSIRMKTTSEEPSTSNRRIKIRQGQSSRGKPEEGVNDSGTSTRRVSNHHVKKLSWLMLSELEEGYRYIPQLGDEVVYFRQGHQEYIESYSLSESGPWRLFVGLGASEICKVEELEYAELPGSGDSCCKLKLRFVDPSSCVHGKSFKLTLPELINFTDFVIEKTWYDTAMKRNWSSRDKCMVWWRNEDGKGGSWWDGRIIQVQAKSDDFPNSPWERYRVQYKTDPSENHLHSPWELYDPEMLWEHPHIDHEIRDKLLSYFIKLDHRQRFDIQALNQVAERLEFANRFPAPFYPELIQSRLKNDYYRSVEGVKHDIMVMLSNAEEYFKITKNAQLVSKIRRISEWFRRKLERI

SEQ ID NO: 18952 - DNA, 1177 bp, Glycine max
gaacttaacctaaccagacatcttcctcgcctctgccaggcacatcgtcctacgccacacaaacaccacacagatcgttccttcacatcttaccctaatttgattattccccaatttcatcgaaccaataaattatatataaatatatttttatttttattttttgatgccgataaaaaatgccgccaaagcagcaatcaaaagctgatttagcgaagaagcagaagattgtagaggacaaaaccttcggtctcaagaacaagaacaagagtaaaaacgtccagaagtatgttcagaatttcaagcaatccgtgcagccaaggcccgataccgccaaagtcgatgccaagaaaaagaaggaggaggagaaggccaaggagaaggagctaaatgatttgttcaaaatcgctgttactcaacccaaagtgcctgttggtgttgatcccaagtccatattatgtgagttttataaagtggggcagtgtgccaagggcttcaaatgcaagttctcgcatgatttgaatgttcagaggaaaggggagaagattgacatttacagtgataagcgtgaccaggaaacaatggaggattgggatcaagagaccttggagaaggtggtggagtcaaagaaaactgagtataatcagaataaaccaactgacatagtctgtaaatactttttggatgcagtagaaaagaagcaatatggttggttttgggtctgccccaatggtggtaagaattgccattatagacatgctcttccacctggttatgttttgaaatctcaaatgaaggctttgttagaggaagaaagtgaaaaaatatcaattgaagaggagattgaaaatcagcgtgccaaagtggcaactacaactcctatgactcctgagttattctttgagtggaagaagaagaagatagaagagagagatgccaatatagctgcacaacaggctgagagggctaagaatgatcgcatgagtggtcgggagctatttttgtcaaatgctagcttgtttgtggatgatgcagaagcatatgacgtgtaccagagagaaccagaatcttatgaaactgaagagaatgggagtaggaatgctgcagaagatggtcccagctcctcagcaacagccgctgctgatggtgattatcttgatgacatagatgacgatga

SEQ ID NO: 18953 - protein, 332 aa, Glycine max
MPPKQQSKADLAKKQKIVEDKTFGLKNKNKSKNVQKYVQNFKQSVQPRPDTAKVDAKKKKEEEKAKEKELNDLFKIAVTQPKVPVGVDPKSILCEFYKVGQCAKGFKCKFSHDLNVQRKGEKIDIYSDKRDQETMEDWDQETLEKVVESKKTEYNQNKPTDIVCKYFLDAVEKKQYGWFWVCPNGGKNCHYRHALPPGYVLKSQMKALLEEESEKISIEEEIENQRAKVATTTPMTPELFFEWKKKKIEERDANIAAQQAERAKNDRMSGRELFLSNASLFVDDAEAYDVYQREPESYETEENGSRNAAEDGPSSSATAAADGDYLDDIDDD

SEQ ID NO: 18954 - protein, 198 aa, Glycine max
MEDWDQETLEKVVESKKTEYNQNKPTDIVCKYFLDAVEKKQYGWFWVCPNGGKNCHYRHALPPGYVLKSQMKALLEEESEKISIEEEIENQRAKVATTTPMTPELFFEWKKKKIEERDANIAAQQAERAKNDRMSGRELFLSNASLFVDDAEAYDVYQREPESYETEENGSRNAAEDGPSSSATAAADGDYLDDIDDD

SEQ ID NO: 18955 - DNA, 1140 bp, Glycine max
atttgttttcgaagattatcacttctccgtggagctttttgtgtctccattcttggttcaagaaggggaaatgactgataagaatgggacaaagaaggaaacacttcgtctcgatttggttggtaaatcttcatctcaatataaagatgcagatattctcgtcttcaacactggccactggtggactcatgataaaacttctaaagggcaggactattatcaagaaggtaaccatgtgtattccgaattaaacgttcttgaggcattccgaagagctttaacaacttggagcaggtgggttgatgccaacataaatccatccaagaccacggtcttcttcagaggctattctgcatcccacttcagtggtggacaatggaattcaggtggtcaatgtgatagtgaaactgatccaattgacaacgagaagtacctaaccgagtatccagataagatgaaggttttggagaaggtgctaaagaatatgaaaacccgtgtgacttaccaaaacatcactagaatgacggatttccggaaggatggtcacccctccatatacaggaagcaaaatctatcacctgaggaactaaaatcacctttgagattccaagactgcagccactggtgccttccgggtgttcctgatttatggaatgaaattctctacgctgaacttctgttgagagagtatcggaatcagcatgagcagaagaaagcataggtaaacacataaactaccaaacttctgcctcacttatggtcaatgagttaagctcaaacagatgcagctgctgtatgttccatttttgttcccacgcatgtccaggatggtgaaagaaagaaaaagaaaccatctacagaagaaagtgccttttgcatttattttaaaggttcataaaattaagtgaaccaatataatacagaattaagagatgtgagtaccttgatcctgtgtaataaatttgttcatatggaaaacaaattggtgaggagaggagagaatacgaggatggtgttatttgttattgtaaatcatcccttaccttgcatcttcattttctttcttgcctgaaaggctgattcttggtgtaaatctataatcaattagattttatatattactataatcaaattattgag

SEQ ID NO: 18956 - protein, 239 aa, Glycine max
FVFEDYHFSVELFVSPFLVQEGEMTDKNGTKKETLRLDLVGKSSSQYKDADILVFNTGHWWTHDKTSKGQDYYQEGNHVYSELNVLEAFRRALTTWSRWVDANINPSKTTVFFRGYSASHFSGGQWNSGGQCDSETDPIDNEKYLTEYPDKMKVLEKVLKNMKTRVTYQNITRMTDFRKDGHPSIYRKQNLSPEELKSPLRFQDCSHWCLPGVPDLWNEILYAELLLREYRNQHEQKKA

SEQ ID NO: 18957 - protein, 216 aa, Glycine max
MTDKNGTKKETLRLDLVGKSSSQYKDADILVFNTGHWWTHDKTSKGQDYYQEGNHVYSELNVLEAFRRALTTWSRWVDANINPSKTTVFFRGYSASHFSGGQWNSGGQCDSETDPIDNEKYLTEYPDKMKVLEKVLKNMKTRVTYQNITRMTDFRKDGHPSIYRKQNLSPEELKSPLRFQDCSHWCLPGVPDLWNEILYAELLLREYRNQHEQKKA

SEQ ID NO: 18958 - DNA, 1082 bp, Glycine max
atcttcttctctaagctataagccatatacaccaaatattttttcacttgctctccatcttttttcagttcatcagtggccaggtaggccatgggaagggctccatgttgtgacaaatccaatgtgaaaagagggccttggtctcctgatgaagatgccaccctcaaaaactaccttgagaaacatggcacaggtggtaactggatagctctccccaaaaaagcaggccttaagcgttgtgggaagagctgtcgtctaagatggctaaactatctcaggcctcatattaagcttggaggtttcactgaagaggaagacaaaattatctgcaccctttatgacaccatcggaagcaggtggtcctttatagcagctcaacttcccgggagaacagacaatgatgtgaaaaatcactggaacaccaagctaaagaaaaagttcttggcaggaaacacaagtagtactgctgccacgacaagcaacaacaatgtcactttcagcaatactagttattctgatcaagttaagacccttgtcttggatcatcaaaaactgaactcagctgataattggtttgactactcctacaatgttttggaattggaacaaacaccaattccagttccttttccaatgtctcaggaattagaggcttttaattatactgctgggagtataagttgtagtgcaccaccaccctctaaggaagtttcaatgctttccaatgcagacaatcatacgctatggtttggttatgaccatgcaagtgaagatgatccaaatttgcttgagtttgtgcttgatgatgatctgctgaatcatggatttgtttctcaagacaaaagctgcagccaagttggtccaccatctggctaattaaccaagatcactcattctttctactcgtcaaaaacttgaaaaaaccaaggctacagaaaataaaggtaaaatggaatattgatcaagttattatagtatagtactagtgatgaattatatacctctaaatctaactggtgtttaaatttgtgattaaagtggttggttgaatgtggaattgtgtgagtttctgaattgttttc

SEQ ID NO: 18959 - protein, 261 aa, Glycine max
MGRAPCCDKSNVKRGPWSPDEDATLKNYLEKHGTGGNWIALPKKAGLKRCGKSCRLRWLNYLRPHIKLGGFTEEEDKIICTLYDTIGSRWSFIAAQLPGRTDNDVKNHWNTKLKKKFLAGNTSSTAATTSNNNVTFSNTSYSDQVKTLVLDHQKLNSADNWFDYSYNVLELEQTPIPVPFPMSQELEAFNYTAGSISCSAPPPSKEVSMLSNADNHTLWFGYDHASEDDPNLLEFVLDDDLLNHGFVSQDKSCSQVGPPSG

SEQ ID NO: 18960 - DNA, 1415 bp, Glycine max
gaatccttgaaacaagtggacagcagatcttcaaagaaaaacaaaaaattggaattcaacagtagccgtgtctcacctgctccaaatggtggttcccagtggggagcaatgaatatttctaaatcttttaatcctggttttggatcatcaaagaagtttttttcagcttctgttcctggatctagaattgtttcccgggcaacatccccaatatctagacgacctagtccacctcgttcaactactccaaccccaacactggggggactttcatccccaaagatggttgtggatgatgctaagagaatcaatgataacctcagtcaggaggttgttaaattaagatcgcaggtggaaaacctgactcggaaagcccagcttcaagaagttgagttggaaagaacaactaaacagttgaaagaagcaatagcaattgcaagcgaagaaactgccaaatgcaaagcagcaaaggaagtgatcaagtcactcactgcgcagttgaaggacatggctgagaggctacctgtaggagcatccaggaatgtcagatcgccaccctctcttgcttcctttggcttaaatcctggttccaatgaccttactaatgcttccttcgatcgattgaatatacaagcaacaagcccagaatcagactcaactggatccactaaccagatactttcaaatggatcaagcaccatcaccaaccggagtgcaggtcacattaaacacagtcaatcggatgcaattagcagaaatggtaacaaaacaaaggataatgagactgaatgggttgagcaagatgaacctggtgtatatattactcttacctccctaccaggaggagtaatagatcttaaaagagttcgcttcagtcggaagcggtttagtgagaaacaagcagaacaatggtgggcagagaatcgggcaagagtatatgaacaatacaacgtgcgcatgattgacaagtcgacaattggtgttgggagtgaggacatggctcattgatgtgataatttgtacatgaggagttttaacccgttttggcaggacttgaagcaagaatttgccatcaaatacctttggcttccatccaagattaaaaaaacattaagggaagcagggattggcataataggagagaatagggatttgattgtgattttgtaattccacttttttttccattttgattacattatccattttttccctatatgtagcttgtgtgggggttgagggtgagaaatgtaaattcctagtaggttattggctcttgtttaaagtagctgcaatgtaaatttcataagcaaatgcatttactaatttttcttttacaccagttatataataccttcagccatgggatagatggctttaagtagttaatatagatagactctggcaaatgttac

SEQ ID NO: 18961 - protein, 335 aa, Glycine max
ESLKQVDSRSSKKNKKLEFNSSRVSPAPNGGSQWGAMNISKSFNPGFGSSKKFFSASVPGSRIVSRATSPISRRPSPPRSTTPTPTLGGLSSPKMVVDDAKRINDNLSQEVVKLRSQVENLTRKAQLQEVELERTTKQLKEAIAIASEETAKCKAAKEVIKSLTAQLKDMAERLPVGASRNVRSPPSLASFGLNPGSNDLTNASFDRLNIQATSPESDSTGSTNQILSNGSSTITNRSAGHIKHSQSDAISRNGNKTKDNETEWVEQDEPGVYITLTSLPGGVIDLKRVRFSRKRFSEKQAEQWWAENRARVYEQYNVRMIDKSTIGVGSEDMAH

SEQ ID NO: 18962 - protein, 299 aa, Glycine max
MNISKSFNPGFGSSKKFFSASVPGSRIVSRATSPISRRPSPPRSTTPTPTLGGLSSPKMVVDDAKRINDNLSQEVVKLRSQVENLTRKAQLQEVELERTTKQLKEAIAIASEETAKCKAAKEVIKSLTAQLKDMAERLPVGASRNVRSPPSLASFGLNPGSNDLTNASFDRLNIQATSPESDSTGSTNQILSNGSSTITNRSAGHIKHSQSDAISRNGNKTKDNETEWVEQDEPGVYITLTSLPGGVIDLKRVRFSRKRFSEKQAEQWWAENRARVYEQYNVRMIDKSTIGVGSEDMAH

SEQ ID NO: 18963 - protein, 241 aa, Glycine max
MVVDDAKRINDNLSQEVVKLRSQVENLTRKAQLQEVELERTTKQLKEAIAIASEETAKCKAAKEVIKSLTAQLKDMAERLPVGASRNVRSPPSLASFGLNPGSNDLTNASFDRLNIQATSPESDSTGSTNQILSNGSSTITNRSAGHIKHSQSDAISRNGNKTKDNETEWVEQDEPGVYITLTSLPGGVIDLKRVRFSRKRFSEKQAEQWWAENRARVYEQYNVRMIDKSTIGVGSEDMAH

SEQ ID NO: 18964 - DNA, 1344 bp, Glycine max
attggaagaatgcatcaccgcgttgtgttgtgattgaaaatggagagcgatgttgaagaatctatgcggaagaggcccagaaaatatcctttctccgccgattcatcctctcgcaagcaatttgaacaatattctggacggacatttgcaattatgggggaagtgaattttatgcaagatgatgataatcgtttggagattacccgaactaaatttggaagtttgcttaaaagacatggagatttgacagagcggcttgctagggattctgacaagataatatttgagcgtctacagaaggagtttgaagctgcacgagcttctcaaactgaagagatatgtttagacggggaagagtggaatgatggtctactagctacaataagagagcgggtgcatatggaggcggacagaaaagcaatgcaaggggatgcggacatattagcatgtcccctggaaaaaattacatataaaattggaaacaaggtaatttgctgtttggaaggggcaagaatcggcgtacaatatgagacatcgtttgctggtgaaccttgtgagttttaccattgtgtgctggaaagcaagtcatttcttgaaaagatgactgtccttgaacacacagttccatttttcctgccaatacgagaaatagaaaatgatctccattcatccaatgcaatgaaactcatagatcatgttggagatctattgcaggcttttgtggatagacgggaacaggtcagacttataaaggagctgtatggaaatcagattagagagctgtatcatagccttccctaccatatggtcgaatttgtattagatgattctgattgcaaggtgacagtcagccttagatatgcagatctcatttcggtgcttccaactcgaatttcagtgctagcctggcctatgttcaataaaaatactatgagtaggaaggaagatggactctcgggaagtcattcttccccaattcgcctaacatatgcagaagatgccttacgaaccatgagtttacccgaagcatatgcagagattgtattaaacttaccacaggcgattcggcagacgtatcatcaaaaagccaccgcttagagctttgccctttcagtagcctagatgcatctgtaaaaattcttggtagagatgttaaatattagaaaaacaacttcagaattattacctatttacctagtcaaattgctcaggttgagttcattttgctgtaatattgtcatatagcatttagcatttgtacttcggcctctctggcctcgttattccttcaatacctactccggtgtcttgtatcattaatacaacagggctaggtttacatct

SEQ ID NO: 18965 - protein, 352 aa, Glycine max
MESDVEESMRKRPRKYPFSADSSSRKQFEQYSGRTFAIMGEVNFMQDDDNRLEITRTKFGSLLKRHGDLTERLARDSDKIIFERLQKEFEAARASQTEEICLDGEEWNDGLLATIRERVHMEADRKAMQGDADILACPLEKITYKIGNKVICCLEGARIGVQYETSFAGEPCEFYHCVLESKSFLEKMTVLEHTVPFFLPIREIENDLHSSNAMKLIDHVGDLLQAFVDRREQVRLIKELYGNQIRELYHSLPYHMVEFVLDDSDCKVTVSLRYADLISVLPTRISVLAWPMFNKNTMSRKEDGLSGSHSSPIRLTYAEDALRTMSLPEAYAEIVLNLPQAIRQTYHQKATA

SEQ ID NO: 18966 - protein, 344 aa, Glycine max
MRKRPRKYPFSADSSSRKQFEQYSGRTFAIMGEVNFMQDDDNRLEITRTKFGSLLKRHGDLTERLARDSDKIIFERLQKEFEAARASQTEEICLDGEEWNDGLLATIRERVHMEADRKAMQGDADILACPLEKITYKIGNKVICCLEGARIGVQYETSFAGEPCEFYHCVLESKSFLEKMTVLEHTVPFFLPIREIENDLHSSNAMKLIDHVGDLLQAFVDRREQVRLIKELYGNQIRELYHSLPYHMVEFVLDDSDCKVTVSLRYADLISVLPTRISVLAWPMFNKNTMSRKEDGLSGSHSSPIRLTYAEDALRTMSLPEAYAEIVLNLPQAIRQTYHQKATA

SEQ ID NO: 18967 - protein, 314 aa, Glycine max
MGEVNFMQDDDNRLEITRTKFGSLLKRHGDLTERLARDSDKIIFERLQKEFEAARASQTEEICLDGEEWNDGLLATIRERVHMEADRKAMQGDADILACPLEKITYKIGNKVICCLEGARIGVQYETSFAGEPCEFYHCVLESKSFLEKMTVLEHTVPFFLPIREIENDLHSSNAMKLIDHVGDLLQAFVDRREQVRLIKELYGNQIRELYHSLPYHMVEFVLDDSDCKVTVSLRYADLISVLPTRISVLAWPMFNKNTMSRKEDGLSGSHSSPIRLTYAEDALRTMSLPEAYAEIVLNLPQAIRQTYHQKATA

SEQ ID NO: 18968 - DNA, 1714 bp, Glycine max
gtgcctgtctttactttcacagaagtcatacatttgggacaagagagtcgcagagtattgtttgattctcttgatactaggaagcactatatgtatgaagcaatcaaatctgatgacattgctactcttgtatacacaagtggaactactggaaatccgaaaggtgttatgctaacccatcagaatcttttgcatcagataaaaaacttaggggatattgtacctgctgaagttggggatagatttctaagcatgctgccttcctggcatgcatatgaaagagcttgtgagtatttcattttctcgtgcggtgttgaacaagtatacacaactgtgagaaacttgaaggaggatttgggacattatcaaccacattacttgatttctgttcctttagtttatgaaactttatatagtgggatccagaagcagatatctacaagctcccttgttagaaagcttgttgcactcacattcataagggtcagcttaaggtacatggagtgtaagcgtatttatgagggtaaatgtctaacaaaggatcagaagccaccgtcctacctccattcaattttggactggttatgggcaagagttgttgccacaatattatttccagttcatttactggcgaagatactggtctaccataaaattcattcagctattggaatttcaaaggctggagtaagtggcggtggtagcttatcttctcatgtggatagattttttgaggctattggtgtgaatgtgcagaatggatatggtttaactgaaacttcaccagttattgctgctcgacggcttagttataacgttattgggtctgttggccatccaattaagcatacagaattcaaagtcgtagattctgagactgatgaagttcttccacctggttcaaagggaatattaaaagtcaggggcccacaattgatgaagggatactataagaatccttcagctacaaatcaggtcttagatagggatggctggctgaatactggggatattggttggattgttccccaccattcaactgggcggagtcgtaattccagcggagtaattgttgtggatggccgtgctaaggacactattgtgctttctacaggtgaaaatgttgaaccaggagaacttgaagaagctgccatgaggagtagcctcatacatcaaattgttgttattggccaggataagcgacgtctgggggctgtaattgttcctaacaaagaagaagtcttaaaggcggcaagggaatcgtcaattatagattcgaacagttcagatgccagtcaagaaaaagtgaccagcctaatatataaagaattgaggacatggacttcagaatctccgtttcaaattgggccagtccttctcgtaaatgaccccttcacgattgataatgggctaatgacacccactatgaaaattcgaagggataaagttgtggctcaatacggggaccaaatagagaatctatacaagtaaactcagcagttagtgcttaatgctaatgatatgggttttaccgtatatttgacagtaggaaaatccatattccttttccatctggtgacaattcttttgcttctaacagaatgtaaaatatggtttctttcattaaaagttaatatgccaattcttttgttattatatattctcacaactcacaagaatggaaaatgctattcacttgcatttaatgtgttag

SEQ ID NO: 18969 - protein, 496 aa, Glycine max
VPVFTFTEVIHLGQESRRVLFDSLDTRKHYMYEAIKSDDIATLVYTSGTTGNPKGVMLTHQNLLHQIKNLGDIVPAEVGDRFLSMLPSWHAYERACEYFIFSCGVEQVYTTVRNLKEDLGHYQPHYLISVPLVYETLYSGIQKQISTSSLVRKLVALTFIRVSLRYMECKRIYEGKCLTKDQKPPSYLHSILDWLWARVVATILFPVHLLAKILVYHKIHSAIGISKAGVSGGGSLSSHVDRFFEAIGVNVQNGYGLTETSPVIAARRLSYNVIGSVGHPIKHTEFKVVDSETDEVLPPGSKGILKVRGPQLMKGYYKNPSATNQVLDRDGWLNTGDIGWIVPHHSTGRSRNSSGVIVVDGRAKDTIVLSTGENVEPGELEEAAMRSSLIHQIVVIGQDKRRLGAVIVPNKEEVLKAARESSIIDSNSSDASQEKVTSLIYKELRTWTSESPFQIGPVLLVNDPFTIDNGLMTPTMKIRRDKVVAQYGDQIENLYK

SEQ ID NO: 18970 - protein, 466 aa, Glycine max
MYEAIKSDDIATLVYTSGTTGNPKGVMLTHQNLLHQIKNLGDIVPAEVGDRFLSMLPSWHAYERACEYFIFSCGVEQVYTTVRNLKEDLGHYQPHYLISVPLVYETLYSGIQKQISTSSLVRKLVALTFIRVSLRYMECKRIYEGKCLTKDQKPPSYLHSILDWLWARVVATILFPVHLLAKILVYHKIHSAIGISKAGVSGGGSLSSHVDRFFEAIGVNVQNGYGLTETSPVIAARRLSYNVIGSVGHPIKHTEFKVVDSETDEVLPPGSKGILKVRGPQLMKGYYKNPSATNQVLDRDGWLNTGDIGWIVPHHSTGRSRNSSGVIVVDGRAKDTIVLSTGENVEPGELEEAAMRSSLIHQIVVIGQDKRRLGAVIVPNKEEVLKAARESSIIDSNSSDASQEKVTSLIYKELRTWTSESPFQIGPVLLVNDPFTIDNGLMTPTMKIRRDKVVAQYGDQIENLYK

SEQ ID NO: 18971 - protein, 440 aa, Glycine max
MLTHQNLLHQIKNLGDIVPAEVGDRFLSMLPSWHAYERACEYFIFSCGVEQVYTTVRNLKEDLGHYQPHYLISVPLVYETLYSGIQKQISTSSLVRKLVALTFIRVSLRYMECKRIYEGKCLTKDQKPPSYLHSILDWLWARVVATILFPVHLLAKILVYHKIHSAIGISKAGVSGGGSLSSHVDRFFEAIGVNVQNGYGLTETSPVIAARRLSYNVIGSVGHPIKHTEFKVVDSETDEVLPPGSKGILKVRGPQLMKGYYKNPSATNQVLDRDGWLNTGDIGWIVPHHSTGRSRNSSGVIVVDGRAKDTIVLSTGENVEPGELEEAAMRSSLIHQIVVIGQDKRRLGAVIVPNKEEVLKAARESSIIDSNSSDASQEKVTSLIYKELRTWTSESPFQIGPVLLVNDPFTIDNGLMTPTMKIRRDKVVAQYGDQIENLYK

SEQ ID NO: 18972 - DNA, 764 bp, Glycine max
attcattccaaccattctccaccattcacaatctaagcatcccaaaactaactattgtgctagctacttagttgtgtaagatggcttccaagggaaatgttgcatccacttatgttgcactactcatgtgtctctatttgctttcattcaccatggtgagctctcaaatctcaaccccaccaccaatgccttctcaaaacggtacatgtcctataaatgtacttcgattgggtgtgtgtgccaatgtgttgaacctggtcaatgttacactaggatcaccaccaaccctcccctgttgcaccctcattcagggtttggctgatgttgatgttggtgtttgcctttgcactgccctcagagctaaccttcttggcatcaacttaaacttgccaatttccttgacattgcttctcaatacctgcagagggaacatccctaatatccagtgttcttaaatttatcttctctagtggaatatacatgtggtctatgaaaaaataaactcatcgcctccatccacaattccacatgttgtctctctcatatttcgtatctttttatggtgtttttttttctttcagttcttgttgtactccatgtatttcccctttttagcgctttccatcctaataataatttctcactccttcgacattgttctactatcggacgaaggattactcattagcctctttcattgcattgcatgtgtaagttgttatacaaataaagttatatgattcctaaaaaaaaaaaaaaaaaag

SEQ ID NO: 18973 - protein, 124 aa, Glycine max
MASKGNVASTYVALLMCLYLLSFTMVSSQISTPPPMPSQNGTCPINVLRLGVCANVLNLVNVTLGSPPTLPCCTLIQGLADVDVGVCLCTALRANLLGINLNLPISLTLLLNTCRGNIPNIQCS

SEQ ID NO: 18974 - protein, 109 aa, Glycine max
MCLYLLSFTMVSSQISTPPPMPSQNGTCPINVLRLGVCANVLNLVNVTLGSPPTLPCCTLIQGLADVDVGVCLCTALRANLLGINLNLPISLTLLLNTCRGNIPNIQCS

SEQ ID NO: 18975 - protein, 100 aa, Glycine max
MVSSQISTPPPMPSQNGTCPINVLRLGVCANVLNLVNVTLGSPPTLPCCTLIQGLADVDVGVCLCTALRANLLGINLNLPISLTLLLNTCRGNIPNIQCS

SEQ ID NO: 18976 - DNA, 794 bp, Glycine max
aaaaaagaaaagaaaagaaaaaagagcgatttttccctcaccaaagaagaaccaaaacaatggcggatcaactcaccgatgaacagatctccgagttcaaggaagccttcagcttgttcgataaggacggcgatggttgcatcacaaccaaggagcttggaactgttatgcgttcattggggcaaaacccaactgaggcagaactccaggacatgatcaatgaagtggatgctgatgggaatggtaccattgacttccctgagttcctaaacctcatggctaggaagatgaaggacactgattctgaggaggagctgaaagaggcattccgggttttcgacaaggatcagaatgggttcatctctgctgctgagctccgtcatgtgatgaccaacctcggggagaaactcaccgatgaagaggtcgatgagatgattcgtgaggctgatgttgatggagatggccaaataaactacgaggagttcgttaaggtgatgatggccaagtgagtgatcatcacattatggccacaagaacctaaatgaagaagtgttgattaaaaggaaatgaccaaaaaaacagaggtaaggggaaggacaagggtttgggctgtataacagtgatgtagtagtccttgtcctttcttcttcctacatttatatttgacggtttttgaatccaaccttaaaatgtcaattagtggcaattcctgctactaatggatgtagtggaactgaaccttcttagtttgtctgtattttttccaagaaataaagggttgtaatgttaatgtc

SEQ ID NO: 18977 - protein, 168 aa, Glycine max
KRKEKKKERFFPHQRRTKTMADQLTDEQISEFKEAFSLFDKDGDGCITTKELGTVMRSLGQNPTEAELQDMINEVDADGNGTIDFPEFLNLMARKMKDTDSEEELKEAFRVFDKDQNGFISAAELRHVMTNLGEKLTDEEVDEMIREADVDGDGQINYEEFVKVMMAK

SEQ ID NO: 18978 - protein, 149 aa, Glycine max
MADQLTDEQISEFKEAFSLFDKDGDGCITTKELGTVMRSLGQNPTEAELQDMINEVDADGNGTIDFPEFLNLMARKMKDTDSEEELKEAFRVFDKDQNGFISAAELRHVMTNLGEKLTDEEVDEMIREADVDGDGQINYEEFVKVMMAK

SEQ ID NO: 18979 - protein, 113 aa, Glycine max
MRSLGQNPTEAELQDMINEVDADGNGTIDFPEFLNLMARKMKDTDSEEELKEAFRVFDKDQNGFISAAELRHVMTNLGEKLTDEEVDEMIREADVDGDGQINYEEFVKVMMAK

SEQ ID NO: 18980 - DNA, 1207 bp, Glycine max
gcgccaaagcaaagatgaatgaagcggaggagcaactttgcgaggcggccagaaaaggtgacacggagaaagtgaggtctctcatagactccggcgctgacgtcagccacttcgacggcgagggcctcaatcctctgatgcacgccgcaaagcacggccatgcacccgtcctcaccctcctcctctccgccggcgctccctggaacgctctttccccctccaacctctccgccggcgactacgccatgcaagaaggccacaacgaagccttcgagcttctcgtcaacgccgggattcaagccgaactgatcctgggaacaattgcgaggaaggaaaacaagaacggcgattccggtcacgattacttggaagacagggtgagttttagcgaagacaagcttatggactctgaaagcaaggctgtgatgatggcgtgggagaatccgttgatggaggctcatgccaaagctgtttgttcgggaggtggccacgtactcaatattgggtttggaatggggctggtggattcggccattcagcgatatgcacctgcttcacacaccattgttgaggctcatcctgaggtttatgaacgcatgcttagctccggttggggtcagaaggaaagtgtcaagattgtttttggacgatggcaagatgttctgcctcagcttgaaacatatgatggaatattctttgacacctatggggagtactacgaagatctgagggagttccatcagcatctccccgcattgttgaagcctggtggtatctactcattcttcaacggtctttgtggcagtaatgcatttttccatgttgtttactgcaatttggtatcccttgagcttgagaatttggggtattccacacaattaattccattgccggttaaggattgtttgggagaacaagtttgggaaggtgtgaaacaaagatattggcagctcgatacgtactatcttcctgtctgtcaggccgtagaggaccctgagtgaggcaggaaatggatttcctgcagcttagaaagaactgcaccatgtgcagttaaaatttcaccgtccatgcaagttttttctcttctttatatattaaaattaaaggaataattgaaatctcatgcagttttttttttaactgtagagaatcttaatcccagtgatgtatgattttatttttaatcacatcgtcaaaatattctaac

SEQ ID NO: 18981 - protein, 332 aa, Glycine max
AKAKMNEAEEQLCEAARKGDTEKVRSLIDSGADVSHFDGEGLNPLMHAAKHGHAPVLTLLLSAGAPWNALSPSNLSAGDYAMQEGHNEAFELLVNAGIQAELILGTIARKENKNGDSGHDYLEDRVSFSEDKLMDSESKAVMMAWENPLMEAHAKAVCSGGGHVLNIGFGMGLVDSAIQRYAPASHTIVEAHPEVYERMLSSGWGQKESVKIVFGRWQDVLPQLETYDGIFFDTYGEYYEDLREFHQHLPALLKPGGIYSFFNGLCGSNAFFHVVYCNLVSLELENLGYSTQLIPLPVKDCLGEQVWEGVKQRYWQLDTYYLPVCQAVEDPE

SEQ ID NO: 18982 - protein, 328 aa, Glycine max
MNEAEEQLCEAARKGDTEKVRSLIDSGADVSHFDGEGLNPLMHAAKHGHAPVLTLLLSAGAPWNALSPSNLSAGDYAMQEGHNEAFELLVNAGIQAELILGTIARKENKNGDSGHDYLEDRVSFSEDKLMDSESKAVMMAWENPLMEAHAKAVCSGGGHVLNIGFGMGLVDSAIQRYAPASHTIVEAHPEVYERMLSSGWGQKESVKIVFGRWQDVLPQLETYDGIFFDTYGEYYEDLREFHQHLPALLKPGGIYSFFNGLCGSNAFFHVVYCNLVSLELENLGYSTQLIPLPVKDCLGEQVWEGVKQRYWQLDTYYLPVCQAVEDPE

SEQ ID NO: 18983 - protein, 287 aa, Glycine max
MHAAKHGHAPVLTLLLSAGAPWNALSPSNLSAGDYAMQEGHNEAFELLVNAGIQAELILGTIARKENKNGDSGHDYLEDRVSFSEDKLMDSESKAVMMAWENPLMEAHAKAVCSGGGHVLNIGFGMGLVDSAIQRYAPASHTIVEAHPEVYERMLSSGWGQKESVKIVFGRWQDVLPQLETYDGIFFDTYGEYYEDLREFHQHLPALLKPGGIYSFFNGLCGSNAFFHVVYCNLVSLELENLGYSTQLIPLPVKDCLGEQVWEGVKQRYWQLDTYYLPVCQAVEDPE

SEQ ID NO: 18984 - DNA, 1170 bp, Glycine max
aatatggaaacaaataaagacttctttgttgtggtgaatcaagttaaatctgagttgtcctgtatatgtcggttatttgaatacagaggctatctttgtagacatgcgttgtttgttcttcaatattctggccagtcagtgttcccatctcaatatattttgaaacggtggacaaaagatgcaaaggtcaggaatataatgggagaagaatcggaacacatgctaactagggtgcaacgttacaatgatttatgtcagcgagcactaaaacttagtgaagagggatcattgtctcaagagagttatggtattgcattccatgcgctacatgaagctcacaaaagttgtgtgagtgttaacaattctagtaagagtagtcctacagaagctggcacaccaggggctcatggtcagctttccactgaagaagatacccaaagtagaaatatgggcaagtcaaacaaaaagaagcatccaactaaaaagaaaaaggtgaactctgaagcagaagtgataacagttggggcattagacaacttgcaacaaatggacaaattcagcacaagagcagtaacccttgaaggttattatggcacacagcagagcgtgcaagggatgttgaacttgatgggaccaacacgtgatgattactacgggaatcaacagacacttcaggggctgggaccaataagttcaataccaaccagtcacgatggttattatggtacacatcagggcatgccgggtctggcacaactagattttttgcgaactggtttcacatatggcattcgggatgatcctaacgtgagagcaacacagttgcatgaggatccatctagacatgcatgagtgtcactatcctttataacgagggctggggaaacgagagctataagctgattatctggcgttgagaatggaatacctcgtgcccgtttgaggttacaatggaaaacctccaaaatccagtatttgtaatataatactgttatattaataatattatataggattactgcaattaacctctattataaatattaatagatgttgtaaggctttagcgttcaacctcttttggagattgttgtattatatattttattctttaggctacttgagaaattgtaattatgaaatattagtgatgaagtattcgtatgctcg

SEQ ID NO: 18985 - protein, 283 aa, Glycine max
NMETNKDFFVVVNQVKSELSCICRLFEYRGYLCRHALFVLQYSGQSVFPSQYILKRWTKDAKVRNIMGEESEHMLTRVQRYNDLCQRALKLSEEGSLSQESYGIAFHALHEAHKSCVSVNNSSKSSPTEAGTPGAHGQLSTEEDTQSRNMGKSNKKKHPTKKKKVNSEAEVITVGALDNLQQMDKFSTRAVTLEGYYGTQQSVQGMLNLMGPTRDDYYGNQQTLQGLGPISSIPTSHDGYYGTHQGMPGLAQLDFLRTGFTYGIRDDPNVRATQLHEDPSRHA

SEQ ID NO: 18986 - protein, 282 aa, Glycine max
METNKDFFVVVNQVKSELSCICRLFEYRGYLCRHALFVLQYSGQSVFPSQYILKRWTKDAKVRNIMGEESEHMLTRVQRYNDLCQRALKLSEEGSLSQESYGIAFHALHEAHKSCVSVNNSSKSSPTEAGTPGAHGQLSTEEDTQSRNMGKSNKKKHPTKKKKVNSEAEVITVGALDNLQQMDKFSTRAVTLEGYYGTQQSVQGMLNLMGPTRDDYYGNQQTLQGLGPISSIPTSHDGYYGTHQGMPGLAQLDFLRTGFTYGIRDDPNVRATQLHEDPSRHA

SEQ ID NO: 18987 - protein, 217 aa, Glycine max
MGEESEHMLTRVQRYNDLCQRALKLSEEGSLSQESYGIAFHALHEAHKSCVSVNNSSKSSPTEAGTPGAHGQLSTEEDTQSRNMGKSNKKKHPTKKKKVNSEAEVITVGALDNLQQMDKFSTRAVTLEGYYGTQQSVQGMLNLMGPTRDDYYGNQQTLQGLGPISSIPTSHDGYYGTHQGMPGLAQLDFLRTGFTYGIRDDPNVRATQLHEDPSRHA

SEQ ID NO: 18988 - DNA, 1225 bp, Glycine max
gttgggaatttagggatttgcgtttactgatctcaagtcttccacctcactgtcgtagcgtagtgattgtggggtttctcttctcagttctcatcgtgacgatcttgctgctccgaaaaagggttttcctaacatcgcccattcaatttccgggctgttcagttcgtgaatagactgttgtttgttctaaaaagtagtggatagtaaaaattatcgaacttttttaagagaaaaatgcagagtaaagaagcagttgtggaagatggggaaataaagagtgtgactgctgtagggtctgaaattgatgggtggaccaattttggggatgatgacataatgcaacagcagtatacaattctggctgaggaagccaagaaggttccatttgtgggtgacaaggaaccactgagtagcttagctgctgaatataaattaggcagtcctatcttgctggagaaaataaaggtgcttgatgagcaatatgctgccattcgtcgtactcggggagatggaaactgcttctttcgaagctttatgttttcatatcttgagcatattatggaatgtcaagaccaagcagaaattgatcgtatccaagccaatgttgaaaaaagtagaaaggcgctgcagaccttgggttatgcagacttgacttttgaagatttttttgcgttattccttgagcagctggaatctgttattcaagggaaagagacttccataagtcatgaagagcttgttcttagaagccgagatcagtcaatatctgattatgtcgttatgttcttcagatttgttacctctgctgaaatacaaaagcgtgcagaattttttgaaccattcatactgggcttaactaatacaacagtcgagcagttttgcaaatcatctgttgaaccaatgggtgaagagagcgaccacatgcacattactgccctttcggacgcattgggcattccaatccgtgttgtgtaccttgaccgcagctcatgtgatactggcggtgtcagtgtaaatcatcatgatttcatgccagtggctggtgatctcccaaatgctagttgcagctctgaaaagaacattcctttcatcacgctgctatatcgtcctggtcactatgatatcctctatacaaaatgatgacctttttggggggaaaagacctttgtttgttacttttttggtggtagtgggagccgcaacagctctgcactcagagctgttg

SEQ ID NO: 18989 - protein, 301 aa, Glycine max
MQSKEAVVEDGEIKSVTAVGSEIDGWTNFGDDDIMQQQYTILAEEAKKVPFVGDKEPLSSLAAEYKLGSPILLEKIKVLDEQYAAIRRTRGDGNCFFRSFMFSYLEHIMECQDQAEIDRIQANVEKSRKALQTLGYADLTFEDFFALFLEQLESVIQGKETSISHEELVLRSRDQSISDYVVMFFRFVTSAEIQKRAEFFEPFILGLTNTTVEQFCKSSVEPMGEESDHMHITALSDALGIPIRVVYLDRSSCDTGGVSVNHHDFMPVAGDLPNASCSSEKNIPFITLLYRPGHYDILYTK

SEQ ID NO: 18990 - protein, 267 aa, Glycine max
MQQQYTILAEEAKKVPFVGDKEPLSSLAAEYKLGSPILLEKIKVLDEQYAAIRRTRGDGNCFFRSFMFSYLEHIMECQDQAEIDRIQANVEKSRKALQTLGYADLTFEDFFALFLEQLESVIQGKETSISHEELVLRSRDQSISDYVVMFFRFVTSAEIQKRAEFFEPFILGLTNTTVEQFCKSSVEPMGEESDHMHITALSDALGIPIRVVYLDRSSCDTGGVSVNHHDFMPVAGDLPNASCSSEKNIPFITLLYRPGHYDILYTK

SEQ ID NO: 18991 - protein, 201 aa, Glycine max
MFSYLEHIMECQDQAEIDRIQANVEKSRKALQTLGYADLTFEDFFALFLEQLESVIQGKETSISHEELVLRSRDQSISDYVVMFFRFVTSAEIQKRAEFFEPFILGLTNTTVEQFCKSSVEPMGEESDHMHITALSDALGIPIRVVYLDRSSCDTGGVSVNHHDFMPVAGDLPNASCSSEKNIPFITLLYRPGHYDILYTK

SEQ ID NO: 18992 - DNA, 1575 bp, Glycine max
gaactcaacaacaacccaaagataaaaagcacaacacaagacactgaactcgcactcactgggttttcaaccatggatgcgatacggaagcagctcgatgtgttgatgggagccaaccgtaacggcgacgtccgtgaagtcaatcgcaagtactacgatcgcgacgtctgtcgtctctacctcgtcggtctctgccctcacgaactcttccagttaacgaaaatggatatgggcccttgccctaaggtccactccttgcagctccggaaagaatacgaggaggcgaaagcaaaggggaccgataattatgacagggagttggaggatgtaatagataagcttattggtgagtgtgataggaaaattggcagggctctaaagcggctcgaggacgacgatgcgaaagcggctattgcaatttcggtctctgaagttactcaaacagatgaggtgcttgagttgtcgaagcaaatcaaagagaaattgaaagaagctgatcaatatgatcttgaaggcaagtcagatctcaagattcgagctttagaggttgtagaggaacttagaactaagagagcggacaagcagtctatgcttcttttagatgccttcaacaaagatagggcatctttgcctacacctctgccaaatccaccacctttggcacctcttcctgtagttgctcctgatgctcgaacacaggagatgataaatgaaaagctgaagaaggctgaggatcttggtgagcaaggaatggttgatgaggctcaaaaagcattggaagaggctgaagcacttaagaagcttcctgccaggcaggagccagtgttggattcttcaaagtatacagctgtggatgtgcggattactgatcagaagctacgtgtgtgcgacatttgtggagcatttttgagtgtttatgacagtgatcgccgtttagctgatcattttggaggcaaacttcatttagggtatatgcagattcgtgagaagttagccgaacttcaagaagaaaggaacaagagccgaaagactgatcggcttgatgacaggagatcaaaagaacggagtagggatcgagacagggagtctagtagggaccgtgaacttggtgatagtcgtgaacgagggcgagaccatgatcgtaggagcagagatcatgataggcattatgatagagatcgtggatatgatcgagaccgtgacagagactcagaccgcacccgctcctatgactcaagaagtcgtcggaggtcacgctctagatcccgagagcgatctagagattatgatcgacataggcgtcatgatcgatactagcaattgccatgaatcttatgggtatgagaaaatgtctagtttaggtgggtgttgaacctcatgttgaacaaataattttgcaatttcttctgtgttgaaccgtttctcggatgatggatgtaacttgagcttaggtgtcgctaaattatggtttgatgttgctttgcagacattaaatccaatttgtaatctgccttactttggagcagttcttgctattgtgcttaaaaatagtagtttgattggattgccatttac

SEQ ID NO: 18993 - protein, 438 aa, Glycine max
ELNNNPKIKSTTQDTELALTGFSTMDAIRKQLDVLMGANRNGDVREVNRKYYDRDVCRLYLVGLCPHELFQLTKMDMGPCPKVHSLQLRKEYEEAKAKGTDNYDRELEDVIDKLIGECDRKIGRALKRLEDDDAKAAIAISVSEVTQTDEVLELSKQIKEKLKEADQYDLEGKSDLKIRALEVVEELRTKRADKQSMLLLDAFNKDRASLPTPLPNPPPLAPLPVVAPDARTQEMINEKLKKAEDLGEQGMVDEAQKALEEAEALKKLPARQEPVLDSSKYTAVDVRITDQKLRVCDICGAFLSVYDSDRRLADHFGGKLHLGYMQIREKLAELQEERNKSRKTDRLDDRRSKERSRDRDRESSRDRELGDSRERGRDHDRRSRDHDRHYDRDRGYDRDRDRDSDRTRSYDSRSRRRSRSRSRERSRDYDRHRRHDRY

SEQ ID NO: 18994 - protein, 414 aa, Glycine max
MDAIRKQLDVLMGANRNGDVREVNRKYYDRDVCRLYLVGLCPHELFQLTKMDMGPCPKVHSLQLRKEYEEAKAKGTDNYDRELEDVIDKLIGECDRKIGRALKRLEDDDAKAAIAISVSEVTQTDEVLELSKQIKEKLKEADQYDLEGKSDLKIRALEVVEELRTKRADKQSMLLLDAFNKDRASLPTPLPNPPPLAPLPVVAPDARTQEMINEKLKKAEDLGEQGMVDEAQKALEEAEALKKLPARQEPVLDSSKYTAVDVRITDQKLRVCDICGAFLSVYDSDRRLADHFGGKLHLGYMQIREKLAELQEERNKSRKTDRLDDRRSKERSRDRDRESSRDRELGDSRERGRDHDRRSRDHDRHYDRDRGYDRDRDRDSDRTRSYDSRSRRRSRSRSRERSRDYDRHRRHDRY

SEQ ID NO: 18995 - protein, 403 aa, Glycine max
MGANRNGDVREVNRKYYDRDVCRLYLVGLCPHELFQLTKMDMGPCPKVHSLQLRKEYEEAKAKGTDNYDRELEDVIDKLIGECDRKIGRALKRLEDDDAKAAIAISVSEVTQTDEVLELSKQIKEKLKEADQYDLEGKSDLKIRALEVVEELRTKRADKQSMLLLDAFNKDRASLPTPLPNPPPLAPLPVVAPDARTQEMINEKLKKAEDLGEQGMVDEAQKALEEAEALKKLPARQEPVLDSSKYTAVDVRITDQKLRVCDICGAFLSVYDSDRRLADHFGGKLHLGYMQIREKLAELQEERNKSRKTDRLDDRRSKERSRDRDRESSRDRELGDSRERGRDHDRRSRDHDRHYDRDRGYDRDRDRDSDRTRSYDSRSRRRSRSRSRERSRDYDRHRRHDRY

SEQ ID NO: 18996 - DNA, 1710 bp, Glycine max
atttccagagtctcaagattgcttctggtgttgaacttgaggatggttcaattgaaattattgaagcaacaattgaaagagttcatacgaggcatgaatctattccaattacaccatctattaaatcaccacctagacttgatacctcaccaaacatgggggaggaagtgccacaggatccatcagaacaacaaatattgatgtactgtaacgacatgaatgatggaaggagtcttggtaaaaatgcagacggaattgatcatatgccctccatagagactaaaaacataaagaaacccttagagaggaaacgtggaaaaactgagaaatcaatcagtcttgaagtcttgcaacgttattttgctgggagtctaaaagatgctgcaaagagccttggtgtttgccctaccacaatgaagcgcatctgcaggcagcatgggatatcccgttggccatctcgaaagatcaacaaggttaaccgttccctgtcgaagctcaagcgtgttatagaatctgtccaaggtgctgaaggagcatttggtttgaattctcttagcaaaagtccacttcccattgctgttggttcctttcctgagccttctactccaaacaagttcagccagtcagcctcattaagcattaagccatcagagcctcaggtgaaagagaatgaattgaatgcctccaaagcattagaagcaaacagacaggctggaatggaagatcaattgctgggaggaaggacacagaatcttgagaaagtaattaatgataaaggtgggtacactcgagaggttgggagagaaccaaaaaggactagaactaggaatggctcaagtgaggatagcacaaatcctacttctcatggttcatgccatgacagtcccccaaacgaaagttctcctgtaaaggatatattcattacttccaacaatgatcaatgtgctgggataaagagatcacctgagtcaacactgcagccaactattaatacgccaagccggccaactgcttaccctatgcctgactttgtggccgtagaacttcaagagccatttggagggatgctaatagaggatgctggtagttccaaagacttaagaaatttgtgtcctttagtagccgaggtcattttggaggatatgattccagaagcttgtgggactaatcttccaggtcctgatttgtctcctaagctaagcatgggtactcctaataaagcagtgacaccttttgcagctatgaaagaaatgaagacggtgacaatcaaggcaacatacagagaagatatcattagatttcgagcctcattgacctgtggcattgttgaactgaaagaagaaattgccaaaagattgaagctagaggtgggtacatttgatatcaaatacctggatgatgatcacgaatgggttttgatagcctgtgatgcagacctacaggagtgcatggatgtttcaagatcatcaggaagtaacataatcagggttttggtgcatgacataacttccaatcttggaagctcatgtgagagctcgggggagtgagaagtggctgtatataggttgagtctgtactctaattatgtaggttcttgtggtgtttaggacaataggaaaaagaaaataggttttggttatgatctgctctaattgtaagaaacttgagaagttgagatcagataaaaggagtttgaatctttggtatcat

SEQ ID NO: 18997 - protein, 514 aa, Glycine max
FQSLKIASGVELEDGSIEIIEATIERVHTRHESIPITPSIKSPPRLDTSPNMGEEVPQDPSEQQILMYCNDMNDGRSLGKNADGIDHMPSIETKNIKKPLERKRGKTEKSISLEVLQRYFAGSLKDAAKSLGVCPTTMKRICRQHGISRWPSRKINKVNRSLSKLKRVIESVQGAEGAFGLNSLSKSPLPIAVGSFPEPSTPNKFSQSASLSIKPSEPQVKENELNASKALEANRQAGMEDQLLGGRTQNLEKVINDKGGYTREVGREPKRTRTRNGSSEDSTNPTSHGSCHDSPPNESSPVKDIFITSNNDQCAGIKRSPESTLQPTINTPSRPTAYPMPDFVAVELQEPFGGMLIEDAGSSKDLRNLCPLVAEVILEDMIPEACGTNLPGPDLSPKLSMGTPNKAVTPFAAMKEMKTVTIKATYREDIIRFRASLTCGIVELKEEIAKRLKLEVGTFDIKYLDDDHEWVLIACDADLQECMDVSRSSGSNIIRVLVHDITSNLGSSCESSGE

SEQ ID NO: 18998 - protein, 463 aa, Glycine max
MGEEVPQDPSEQQILMYCNDMNDGRSLGKNADGIDHMPSIETKNIKKPLERKRGKTEKSISLEVLQRYFAGSLKDAAKSLGVCPTTMKRICRQHGISRWPSRKINKVNRSLSKLKRVIESVQGAEGAFGLNSLSKSPLPIAVGSFPEPSTPNKFSQSASLSIKPSEPQVKENELNASKALEANRQAGMEDQLLGGRTQNLEKVINDKGGYTREVGREPKRTRTRNGSSEDSTNPTSHGSCHDSPPNESSPVKDIFITSNNDQCAGIKRSPESTLQPTINTPSRPTAYPMPDFVAVELQEPFGGMLIEDAGSSKDLRNLCPLVAEVILEDMIPEACGTNLPGPDLSPKLSMGTPNKAVTPFAAMKEMKTVTIKATYREDIIRFRASLTCGIVELKEEIAKRLKLEVGTFDIKYLDDDHEWVLIACDADLQECMDVSRSSGSNIIRVLVHDITSNLGSSCESSGE

SEQ ID NO: 18999 - protein, 448 aa, Glycine max
MYCNDMNDGRSLGKNADGIDHMPSIETKNIKKPLERKRGKTEKSISLEVLQRYFAGSLKDAAKSLGVCPTTMKRICRQHGISRWPSRKINKVNRSLSKLKRVIESVQGAEGAFGLNSLSKSPLPIAVGSFPEPSTPNKFSQSASLSIKPSEPQVKENELNASKALEANRQAGMEDQLLGGRTQNLEKVINDKGGYTREVGREPKRTRTRNGSSEDSTNPTSHGSCHDSPPNESSPVKDIFITSNNDQCAGIKRSPESTLQPTINTPSRPTAYPMPDFVAVELQEPFGGMLIEDAGSSKDLRNLCPLVAEVILEDMIPEACGTNLPGPDLSPKLSMGTPNKAVTPFAAMKEMKTVTIKATYREDIIRFRASLTCGIVELKEEIAKRLKLEVGTFDIKYLDDDHEWVLIACDADLQECMDVSRSSGSNIIRVLVHDITSNLGSSCESSGE

SEQ ID NO: 19000 - DNA, 1392 bp, Glycine max
aaacaatttggaactccatgttaatcttcactcaattagattcagaataactttctgtctctcctacatactagcacatctctcatatttgtatgttaactacattcagaaaccatgaaatgtagtttcctggaaggaaaaacaatggaaattttcttagattttgagttgcagacagaactggctgggattctaaaagattatgttggccgggagagtcctctttattttgctgaaaggttgacggagcattacaagaggcctaatggtgaaggacctcacatttatctgaagagggaagatctcaatcacactggggctcacaaaattaataatgctgttgctcaagctttgcttgctaagagattgggcaaaaaacgcattattgctgaaactggagcgggtcagcatggagttgccactgctactgtatgtgctcgatttggtttagaatgcattatttatatgggtgcgcaggatatggaaaggcaggctctcaatgttttcagaatgcgtcttctcggtgctgaggtgagaccagtccattctgggactgctacacttaaggatgcgacatcagaggctataagggactgggtgactaatgtggagacaactcattatattttggggtctgttgctgggccgcatccatatccaatgatggtaagagagtttcatgctgtgattggcaaggagaccagaaagcaagctttggagaagtggggagggaaaccagatgtcttgattgcatgtgttggtggaggttcaaatgccataggacttttcaatgaatttgttgatgacaaagatgtaaggctaattggtgtggaggctgctggatttggcctggacagcggcaagcatgctgcaaccttaacaaaaggagaagttggggttttgcatggagctatgagctatctgctgcaggatgatgatggacaaatagttgagcctcactctattagtgcaggcttggactaccctggtgtgggtccggaacatagctttttgaaagatttagggcgtgctgaatatcatagtatcacagatgaagaagcattggaagcttttaagagagtttcgcgacttgaaggcataattcctgcactggaaacatctcatgcattggcatatctagagaaagtgtgtccaacccttgctaatggagccaaggttgtggttaacttcagtggccggggtgataaggatgttcaaactgctatcaagtacttgaagctttgaaaggatcaaaacttgctgagtgagcttcattttcatacttagagacataattaatacaatttattattagaccaagttaaatagtcatgtatatttgcatcagagaactgttgctattcaatcctcaataaacttagtttatgttac

SEQ ID NO: 19001 - protein, 376 aa, Glycine max
MKCSFLEGKTMEIFLDFELQTELAGILKDYVGRESPLYFAERLTEHYKRPNGEGPHIYLKREDLNHTGAHKINNAVAQALLAKRLGKKRIIAETGAGQHGVATATVCARFGLECIIYMGAQDMERQALNVFRMRLLGAEVRPVHSGTATLKDATSEAIRDWVTNVETTHYILGSVAGPHPYPMMVREFHAVIGKETRKQALEKWGGKPDVLIACVGGGSNAIGLFNEFVDDKDVRLIGVEAAGFGLDSGKHAATLTKGEVGVLHGAMSYLLQDDDGQIVEPHSISAGLDYPGVGPEHSFLKDLGRAEYHSITDEEALEAFKRVSRLEGIIPALETSHALAYLEKVCPTLANGAKVVVNFSGRGDKDVQTAIKYLKL

SEQ ID NO: 19002 - protein, 366 aa, Glycine max
MEIFLDFELQTELAGILKDYVGRESPLYFAERLTEHYKRPNGEGPHIYLKREDLNHTGAHKINNAVAQALLAKRLGKKRIIAETGAGQHGVATATVCARFGLECIIYMGAQDMERQALNVFRMRLLGAEVRPVHSGTATLKDATSEAIRDWVTNVETTHYILGSVAGPHPYPMMVREFHAVIGKETRKQALEKWGGKPDVLIACVGGGSNAIGLFNEFVDDKDVRLIGVEAAGFGLDSGKHAATLTKGEVGVLHGAMSYLLQDDDGQIVEPHSISAGLDYPGVGPEHSFLKDLGRAEYHSITDEEALEAFKRVSRLEGIIPALETSHALAYLEKVCPTLANGAKVVVNFSGRGDKDVQTAIKYLKL

SEQ ID NO: 19003 - protein, 259 aa, Glycine max
MGAQDMERQALNVFRMRLLGAEVRPVHSGTATLKDATSEAIRDWVTNVETTHYILGSVAGPHPYPMMVREFHAVIGKETRKQALEKWGGKPDVLIACVGGGSNAIGLFNEFVDDKDVRLIGVEAAGFGLDSGKHAATLTKGEVGVLHGAMSYLLQDDDGQIVEPHSISAGLDYPGVGPEHSFLKDLGRAEYHSITDEEALEAFKRVSRLEGIIPALETSHALAYLEKVCPTLANGAKVVVNFSGRGDKDVQTAIKYLKL

SEQ ID NO: 19004 - DNA, 1608 bp, Glycine max
gacaatcgaacgggaaaaggcgtcttcataaacgccgcccaaaacttctcatacccttttattcattccattcgtttctagggttttcttttctttgccgagaaaatgagagagtgcatttcgatccacattggccaggccggtatccaggttggaaacgcctgctgggaactctattgccttgaacacggcattcagcccgatggacagatgccgagtgacaagaccgttggcggaggagacgacgccttcaacacatttttcagcgagaccggcgccggaaagcacgtgccccgcgccgtcttcgtggatcttgaacccaccgtgatcgacgaagtccgaaccggtgcgtaccggcagctcttccacccggagcagctgatcagcggcaaggaagacgccgccaacaacttcgcgcgtggccactacaccatcgggaaggagatcgtcgatctctgcctcgacaggatccgaaagctcgccgacaactgcaccggtctccagggtttcctcgtcttcaacgccgtcggtggcggcaccggttctggcttgggctcgcttctcttggagcgtctctccgttgactatggaaaaaagtcaaagctcggtttcaccgtttatccatcccctcaggtttcgacctcggtcgtggaaccctacaacagcgtcctttcaacgcattctctcctcgaacacaccgatgttgctgtgcttctcgacaacgaggcaatctacgacatttgcaggagatctcttgacatcgaacgccctacctacaccaacctgaaccgtctcgtttcccaggtgatatcatccctcactgcctctttgaggtttgatggagcactgaatgttgatgtgactgagtttcaaaccaacttggttccttacccaaggatccatttcatgctttcctcgtatgcccctgttatctctgccgagaaagcataccatgagcagctttccgttgctgagatcaccaacagtgccttcgagccatcctccatgatggcaaagtgtgaccctcgccacggcaagtacatggcgtgttgtttgatgtaccggggcgatgtcgtgcccaaggatgtgaatgctgctgtggccaccatcaagaccaagagaaccatccagtttgtggattggtgccccactgggttcaagtgtggtataaactatcagcctcctactgttgttcctggaggtgaccttgccaaggtgcagagggctgtgtgcatgatttcgaactccactagtgtggctgaagtgttctccaggattgatcataagtttgacctcatgtatgcgaagagggccttcgtgcactggtatgtgggtgaaggtatggaagagggtgagttctcagaggctcgtgaggaccttgctgctcttgagaaggattatgaggaggttggtgccgagtctggtgatggagatgatgatggtgaaggagatgatgattattagagtgtctgaaatatcgtgtgtttgatgtctactttttcgtcttctgtcggacatgtgtggtttttgaatgatgattgttatcaaatatatgtgctatgtatagcacagaagtttctatatatctgttcccttctattaccaatg

SEQ ID NO: 19005 - protein, 452 aa, Glycine max
MRECISIHIGQAGIQVGNACWELYCLEHGIQPDGQMPSDKTVGGGDDAFNTFFSETGAGKHVPRAVFVDLEPTVIDEVRTGAYRQLFHPEQLISGKEDAANNFARGHYTIGKEIVDLCLDRIRKLADNCTGLQGFLVFNAVGGGTGSGLGSLLLERLSVDYGKKSKLGFTVYPSPQVSTSVVEPYNSVLSTHSLLEHTDVAVLLDNEAIYDICRRSLDIERPTYTNLNRLVSQVISSLTASLRFDGALNVDVTEFQTNLVPYPRIHFMLSSYAPVISAEKAYHEQLSVAEITNSAFEPSSMMAKCDPRHGKYMACCLMYRGDVVPKDVNAAVATIKTKRTIQFVDWCPTGFKCGINYQPPTVVPGGDLAKVQRAVCMISNSTSVAEVFSRIDHKFDLMYAKRAFVHWYVGEGMEEGEFSEAREDLAALEKDYEEVGAESGDGDDDGEGDDDY

SEQ ID NO: 19006 - protein, 417 aa, Glycine max
MPSDKTVGGGDDAFNTFFSETGAGKHVPRAVFVDLEPTVIDEVRTGAYRQLFHPEQLISGKEDAANNFARGHYTIGKEIVDLCLDRIRKLADNCTGLQGFLVFNAVGGGTGSGLGSLLLERLSVDYGKKSKLGFTVYPSPQVSTSVVEPYNSVLSTHSLLEHTDVAVLLDNEAIYDICRRSLDIERPTYTNLNRLVSQVISSLTASLRFDGALNVDVTEFQTNLVPYPRIHFMLSSYAPVISAEKAYHEQLSVAEITNSAFEPSSMMAKCDPRHGKYMACCLMYRGDVVPKDVNAAVATIKTKRTIQFVDWCPTGFKCGINYQPPTVVPGGDLAKVQRAVCMISNSTSVAEVFSRIDHKFDLMYAKRAFVHWYVGEGMEEGEFSEAREDLAALEKDYEEVGAESGDGDDDGEGDDDY

SEQ ID NO: 19007 - DNA, 1573 bp, Glycine max
agatgttggtcttggtactcaaggctatgagactgagagttttctcaatctgcccatctggtaggaagtgcgcgaagcgtgttgatagcatatggggtgcttggtttttcttcagtttttactttaagcctgctttgaatgacaagtccaaggccaagattgtcagggacagcaacggtgtctcagggttcgataagtctgatctgaagctggatgttttcatggttcagcacgacatggaaaacatgtacatgtgggttttcaaggagaggccggagaacgcgctgggtaagatgcagctgaggagttacatgaatgggcattctcgccaaggggagcgcccgtttccgtttagtgctgacaagggttttgctcggtcccacaggatgcaacgaaagcattatagaggactatcaaaccctcaatgcgtgcatggcgttgaggttgtttccacacccaatctgatgaccctggatgaggatgatcgaaaaaggtggatagaactcactggccgagacttgaattttacaattccaactgaagcaagtgatttcagttcatggagaaatcttcccgacacggactttgagcttgagaggccacctcccccaatcaagaatggtcctaatgcacacccgaagaagctgcttaatggatctggacttaacggatctggtcttaacggatctggtcttaatggatctggacttcacctatctaaccacagtaatggtgatgggttggacctctctcctgtcagcagcaaaaagaggaaggactttttccctcatgggaatgaagaagaatgttacttggctgttaatcctccatccgatcgtattccagatatagaaatgcacccaactgagccacactggttgaatgacttcagcggggtgataaaaagtgtttatggacctgttacagctgcaaaaactatttatgaggatgaacaaggttacttgattattatcagtctgccctttgtagatcttctaagtgtgaaagtttcatggaggaacactctgactcacggtatcataaaggtttcttgtatgagcacatctcgaaagcctctcatcaagagacatgataggacattcaagcttacagatccatcgtcagagcactgccctcctggagagttcgtccgagaaatccctctttcaacccgaattcctgaagacgccaacatagaagcatactacgatgggccaggatctgtgcttgagatcctggtgccaaaacatcgcgtgggacctgaagagcatgaagtccgtgtttgcctccgccctcatctgggagggaatgatcttaagttaacttgagataataggcacttaaaaaaattgttaggcattccagtatggttcgtatgtcattgtttttctaaccttgtaccatacactgttatttgcaatagaattgtgtgtcttatgtttgtctctagcaattttagctcactgactgccctggttctttttgttccggtgcatctgtatgcttctgattgtaagcagtattgaacagctaattctcatgatttataagaatttaccaaatcatacctttg

SEQ ID NO: 19008 - protein, 441 aa, Glycine max
MLVLVLKAMRLRVFSICPSGRKCAKRVDSIWGAWFFFSFYFKPALNDKSKAKIVRDSNGVSGFDKSDLKLDVFMVQHDMENMYMWVFKERPENALGKMQLRSYMNGHSRQGERPFPFSADKGFARSHRMQRKHYRGLSNPQCVHGVEVVSTPNLMTLDEDDRKRWIELTGRDLNFTIPTEASDFSSWRNLPDTDFELERPPPPIKNGPNAHPKKLLNGSGLNGSGLNGSGLNGSGLHLSNHSNGDGLDLSPVSSKKRKDFFPHGNEEECYLAVNPPSDRIPDIEMHPTEPHWLNDFSGVIKSVYGPVTAAKTIYEDEQGYLIIISLPFVDLLSVKVSWRNTLTHGIIKVSCMSTSRKPLIKRHDRTFKLTDPSSEHCPPGEFVREIPLSTRIPEDANIEAYYDGPGSVLEILVPKHRVGPEEHEVRVCLRPHLGGNDLKLT

SEQ ID NO: 19009 - protein, 433 aa, Glycine max
MRLRVFSICPSGRKCAKRVDSIWGAWFFFSFYFKPALNDKSKAKIVRDSNGVSGFDKSDLKLDVFMVQHDMENMYMWVFKERPENALGKMQLRSYMNGHSRQGERPFPFSADKGFARSHRMQRKHYRGLSNPQCVHGVEVVSTPNLMTLDEDDRKRWIELTGRDLNFTIPTEASDFSSWRNLPDTDFELERPPPPIKNGPNAHPKKLLNGSGLNGSGLNGSGLNGSGLHLSNHSNGDGLDLSPVSSKKRKDFFPHGNEEECYLAVNPPSDRIPDIEMHPTEPHWLNDFSGVIKSVYGPVTAAKTIYEDEQGYLIIISLPFVDLLSVKVSWRNTLTHGIIKVSCMSTSRKPLIKRHDRTFKLTDPSSEHCPPGEFVREIPLSTRIPEDANIEAYYDGPGSVLEILVPKHRVGPEEHEVRVCLRPHLGGNDLKLT

SEQ ID NO: 19010 - protein, 368 aa, Glycine max
MVQHDMENMYMWVFKERPENALGKMQLRSYMNGHSRQGERPFPFSADKGFARSHRMQRKHYRGLSNPQCVHGVEVVSTPNLMTLDEDDRKRWIELTGRDLNFTIPTEASDFSSWRNLPDTDFELERPPPPIKNGPNAHPKKLLNGSGLNGSGLNGSGLNGSGLHLSNHSNGDGLDLSPVSSKKRKDFFPHGNEEECYLAVNPPSDRIPDIEMHPTEPHWLNDFSGVIKSVYGPVTAAKTIYEDEQGYLIIISLPFVDLLSVKVSWRNTLTHGIIKVSCMSTSRKPLIKRHDRTFKLTDPSSEHCPPGEFVREIPLSTRIPEDANIEAYYDGPGSVLEILVPKHRVGPEEHEVRVCLRPHLGGNDLKLT

SEQ ID NO: 19011 - DNA, 675 bp, Glycine max
aatactaaaaatgatattgttgttaagaacaaagagccaaagacaaccaagaaggctcctactaacaacttcccttcaaatgtcaaaagtttgctttcaactggtatttttgatggtgttcaggtgaaatatgtttcgtggtcacgggagaaaagtcttaagggaataataaaaggaactgggtatttgtgttcatgtgacaactgcaaccagtcaaaggctcttaatgcttacgagtttgagcgtcatgctggtgctaagacaaaacatcctaacaatcacatatactttgagaatggaaaaaccgtctatgctgttgttcaagagctgaaaaatactaatcaggatgtgctttttgatgctattcaaaatgtgactggctctaccatcaaccaaaagaactttcgaatatggaaagcatcataccaagctgctactcgggagcttcagcgtatctatggaaaggatgaagtggtcattccttcatgagttccattttcttcttgaaagttcagaacagtggtagatatgtaatctggtcatagtgagtgattggcaggctaatattttaaaagactatttaaaattgaaaagttttagccaatgcttcttgtaggaactcgattgttttatttatggtaatgaagatgtctcttttgtgaaaaaaaaaaaaag

SEQ ID NO: 19012 - protein, 162 aa, Glycine max
NTKNDIVVKNKEPKTTKKAPTNNFPSNVKSLLSTGIFDGVQVKYVSWSREKSLKGIIKGTGYLCSCDNCNQSKALNAYEFERHAGAKTKHPNNHIYFENGKTVYAVVQELKNTNQDVLFDAIQNVTGSTINQKNFRIWKASYQAATRELQRIYGKDEVVIPS

SEQ ID NO: 19013 - DNA, 1201 bp, Glycine max
aggccagcagtttaaggcaaaaacctctacactttcttacacccaatactttgctgagtctttgataaaggaagctgaaaatgacaagaagatagtggccattcacgcagcaatgggtggtggtaccggcctaaattatttccataaaaggtttcccaagcgctgtttcgatgtggggattgctgaacaacatgctgtaacatttgcagctggtttagctgctgaaggcctcaaaccattttgtgccatttattcatcattcttgcaacggggatatgatcaagtagtccatgatgttgatcttcaaaagcttcctgttcgatttgctatggatagagctggtttggttggagcagatggaccaacacattgtggagcatttgatatcgcttacatggcttgcctacccaacatggtggtcatggctccttctgatgaagctgaactcatgcacatggttgcgactgcagcagctatagatgatagaccaagctgctttagatttccaaggggaaatggaattggagccactctgccactcaataacaaaggaacctcacttgagataggaaagggaagaattctggtggaagggagcagagttgccattttgggatatggttctgtggtccaacaatgcagacaagcctcagaaatgcttaaggaactaggcattgatgtgacagttgctgatgctagattttgcaaacctttagatactggtctcattaggctactagctaaagagcatgaaatactcatcacagtggaagagggttctatcggtggttttggatcacatgtatcacaattcctgagcttatcaggtatcctagatgggcctctaaagtggagagcaatgatgcttcctgatagatacattgagcatggatcaccccaagttcagatagaagaagcagggctttcatcaaagcagattgcagccacagtcttgtctcttatggaaaggccaaacgaagctcttctgttcaaataaaaagacaaaatggaacaaggatcttgacctggttccccgaagatgcataaaaaaaatttaagacttttgttggtattgtgctttagaggaagctgtaaataactacactggaattgtcggagtttacatcttgatgctcacatattttggataattggattctcaggtcatcactagtgagtaaagagatgaatttattctgat

SEQ ID NO: 19014 - protein, 331 aa, Glycine max
GQQFKAKTSTLSYTQYFAESLIKEAENDKKIVAIHAAMGGGTGLNYFHKRFPKRCFDVGIAEQHAVTFAAGLAAEGLKPFCAIYSSFLQRGYDQVVHDVDLQKLPVRFAMDRAGLVGADGPTHCGAFDIAYMACLPNMVVMAPSDEAELMHMVATAAAIDDRPSCFRFPRGNGIGATLPLNNKGTSLEIGKGRILVEGSRVAILGYGSVVQQCRQASEMLKELGIDVTVADARFCKPLDTGLIRLLAKEHEILITVEEGSIGGFGSHVSQFLSLSGILDGPLKWRAMMLPDRYIEHGSPQVQIEEAGLSSKQIAATVLSLMERPNEALLFK

SEQ ID NO: 19015 - protein, 294 aa, Glycine max
MGGGTGLNYFHKRFPKRCFDVGIAEQHAVTFAAGLAAEGLKPFCAIYSSFLQRGYDQVVHDVDLQKLPVRFAMDRAGLVGADGPTHCGAFDIAYMACLPNMVVMAPSDEAELMHMVATAAAIDDRPSCFRFPRGNGIGATLPLNNKGTSLEIGKGRILVEGSRVAILGYGSVVQQCRQASEMLKELGIDVTVADARFCKPLDTGLIRLLAKEHEILITVEEGSIGGFGSHVSQFLSLSGILDGPLKWRAMMLPDRYIEHGSPQVQIEEAGLSSKQIAATVLSLMERPNEALLFK

SEQ ID NO: 19016 - protein, 222 aa, Glycine max
MDRAGLVGADGPTHCGAFDIAYMACLPNMVVMAPSDEAELMHMVATAAAIDDRPSCFRFPRGNGIGATLPLNNKGTSLEIGKGRILVEGSRVAILGYGSVVQQCRQASEMLKELGIDVTVADARFCKPLDTGLIRLLAKEHEILITVEEGSIGGFGSHVSQFLSLSGILDGPLKWRAMMLPDRYIEHGSPQVQIEEAGLSSKQIAATVLSLMERPNEALLFK

SEQ ID NO: 19017 - DNA, 2054 bp, Glycine max
aagtctgatttctattttctacactcagagagtgaagcgaacgagtcacgactcagcgatggtgggcccacagtacgattttctggcgaaccctttgggcgtcgtcagatccaccttcgatgccgccgtagcctctgtttccgatccctccgccttcgacgggcgcgactggggcgtcttcccgctcttccaccacttcctctccgaccagtccagtctctctcaggttccacttctgacccctgccaccatcaaatgggtgaagcctaatactctggttcggtttcgcgggatgatacaagacatgctcgggaacgaattttacattggcgcttataaggatggttcggtgtggaggacgaacaagtttatggatgtttctcaatctcttatggcttcttcggtggatatgcgaatctgggaacgtcgactgctttattgtgttccggttccaggactgagtccatggactcaagtttcagttgaagaatttggcgatctatctatggattgcaaatcggagaatagagaaaagcggaggagagaagatggcgagtcttctgatatgcctgtatctggtgatgaggttcagaattccccaaatagtaaaagaatgagagaaggtgaacactcttctgttgcttctcattctcagggagctgcaactgagattgccagctctggtaccagtttggtgtctggtcttgatagcaattcacctccctgtcttgtgaagatatatgattctccagattctgaattgaaactgaatgacatttttgagtttgtgggtatccttacatctgatctagagcttgaagaggacgatgaagattgtgatttatcagatggattttctgaagatcctttgcgtcatctcccacctagcaaggtgccacaccttcattgttttattcagaggaaattagcggttcacgacttccttcagcacaatcctattgtagagccaaggcccaacttggtcagaggaatcagggaagcattgctaaggcatctcacggctgttcttagcaatgatgatttggctactcatttcatgttgctgcatcttctatccaaggtgcatgctagagcagatgatcttgctgtgggaaagctttcattaaatcttacttgttttagcaaagaaaccgtgtctgtatttggaaaaccactaagcgttgctttgaagaacctcctgccattcacattttgcataccccttacagttgaatacttgaattctgtttcacttacgccaaaaaagaattacgatactaatagactggaaactggagtcttacaactagctgaaggttcacacttgattgttgatgagaccaaactagaagctggaactctcaactctgtaggggtagagaatacaaggctactgaaaaatttaatggaattgcaaaaggttgaatatgatttcaagtactataaagtggatatgacaactgatttccaactgctagttttgtcggaggggaaatcaaatatcttgccagccgatgtaattgtaccgttccgaccttctgcaaccagttgctctggagctgtgactgcagaagctttggaggcctggaggtggtatttggccactgtcagacagctatcacacactattgaaccagaaatgcagaaggtgatagaaagtgatctagttgcagcaagacaagcagacaggagcttgagctcccaagatttaagcagattggtaacaatgggccgtctcatgtcattgagctatggtgagaccagcttgtcactagaacattggcaaatggtcaaggaactagaaaggctgcgaagagagaggctataatgaaaaacaccatggaattacaagtggttccaatttgtacaaggttttaaatgagtcaagttatggtgttgacgtcttaaattgtgttgtcggttcaaggaaatgaatgcagttcaaagggtcttggcggttagttgttctgattaccagaattgtcttatgaacagatactcggttccgtaagttgtgcattcagtaaaatgcaatataagaccatttcactaag

SEQ ID NO: 19018 - protein, 608 aa, Glycine max
SLISIFYTQRVKRTSHDSAMVGPQYDFLANPLGVVRSTFDAAVASVSDPSAFDGRDWGVFPLFHHFLSDQSSLSQVPLLTPATIKWVKPNTLVRFRGMIQDMLGNEFYIGAYKDGSVWRTNKFMDVSQSLMASSVDMRIWERRLLYCVPVPGLSPWTQVSVEEFGDLSMDCKSENREKRRREDGESSDMPVSGDEVQNSPNSKRMREGEHSSVASHSQGAATEIASSGTSLVSGLDSNSPPCLVKIYDSPDSELKLNDIFEFVGILTSDLELEEDDEDCDLSDGFSEDPLRHLPPSKVPHLHCFIQRKLAVHDFLQHNPIVEPRPNLVRGIREALLRHLTAVLSNDDLATHFMLLHLLSKVHARADDLAVGKLSLNLTCFSKETVSVFGKPLSVALKNLLPFTFCIPLTVEYLNSVSLTPKKNYDTNRLETGVLQLAEGSHLIVDETKLEAGTLNSVGVENTRLLKNLMELQKVEYDFKYYKVDMTTDFQLLVLSEGKSNILPADVIVPFRPSATSCSGAVTAEALEAWRWYLATVRQLSHTIEPEMQKVIESDLVAARQADRSLSSQDLSRLVTMGRLMSLSYGETSLSLEHWQMVKELERLRRERL

SEQ ID NO: 19019 - protein, 589 aa, Glycine max
MVGPQYDFLANPLGVVRSTFDAAVASVSDPSAFDGRDWGVFPLFHHFLSDQSSLSQVPLLTPATIKWVKPNTLVRFRGMIQDMLGNEFYIGAYKDGSVWRTNKFMDVSQSLMASSVDMRIWERRLLYCVPVPGLSPWTQVSVEEFGDLSMDCKSENREKRRREDGESSDMPVSGDEVQNSPNSKRMREGEHSSVASHSQGAATEIASSGTSLVSGLDSNSPPCLVKIYDSPDSELKLNDIFEFVGILTSDLELEEDDEDCDLSDGFSEDPLRHLPPSKVPHLHCFIQRKLAVHDFLQHNPIVEPRPNLVRGIREALLRHLTAVLSNDDLATHFMLLHLLSKVHARADDLAVGKLSLNLTCFSKETVSVFGKPLSVALKNLLPFTFCIPLTVEYLNSVSLTPKKNYDTNRLETGVLQLAEGSHLIVDETKLEAGTLNSVGVENTRLLKNLMELQKVEYDFKYYKVDMTTDFQLLVLSEGKSNILPADVIVPFRPSATSCSGAVTAEALEAWRWYLATVRQLSHTIEPEMQKVIESDLVAARQADRSLSSQDLSRLVTMGRLMSLSYGETSLSLEHWQMVKELERLRRERL

SEQ ID NO: 19020 - protein, 511 aa, Glycine max
MIQDMLGNEFYIGAYKDGSVWRTNKFMDVSQSLMASSVDMRIWERRLLYCVPVPGLSPWTQVSVEEFGDLSMDCKSENREKRRREDGESSDMPVSGDEVQNSPNSKRMREGEHSSVASHSQGAATEIASSGTSLVSGLDSNSPPCLVKIYDSPDSELKLNDIFEFVGILTSDLELEEDDEDCDLSDGFSEDPLRHLPPSKVPHLHCFIQRKLAVHDFLQHNPIVEPRPNLVRGIREALLRHLTAVLSNDDLATHFMLLHLLSKVHARADDLAVGKLSLNLTCFSKETVSVFGKPLSVALKNLLPFTFCIPLTVEYLNSVSLTPKKNYDTNRLETGVLQLAEGSHLIVDETKLEAGTLNSVGVENTRLLKNLMELQKVEYDFKYYKVDMTTDFQLLVLSEGKSNILPADVIVPFRPSATSCSGAVTAEALEAWRWYLATVRQLSHTIEPEMQKVIESDLVAARQADRSLSSQDLSRLVTMGRLMSLSYGETSLSLEHWQMVKELERLRRERL

SEQ ID NO: 19021 - DNA, 1447 bp, Glycine max
acttcatcttctgttccaacgtttcgtggtacaaattctgcagaagggatgcccgagttatctgaggcagacatgagaaagggaccaacttcgagcagaaatggaagctgggaatgtcttccaaggaatgcgtgaagcaattataacatttcctcccacatacaagtttgaacggcaccaagttggtttggcagggtatgattctggggaaaagaaacgcatccctgcttggtgtgacagaattttgtatcgtgatagctgcacttctttgttgtctgattgcagtttagagtgtcccattgtttcctcagtattacagtatgaagcttgcatggatgtcacagatagtgaccacaagcctgtccgctgcatattttctatagatattgctcgagtagatgaaccaatccggaggcaggagtttggagagattcttgagtcaaatgagaaaattaaatatcttctgaaagaactatgcaagattcctgaaactatcattagtacaaacaacataattcttcaaaaccaggacacattaattttgcgtattacaaataaatgtgcagaaggcaatgctttgtttgaaataatttgtgaaggtcagtctactgttacaggggatcagaaggctactaaccatcagttgagaggttcctttggcttcccaaggtggcttgaggtgagtcctgcaactggtataataagaccagatcaaattgttgaagtatcagtgcatcatgaggaatttcagactctggaagagtttgttgatggcgttgtacaaaattcttggtgcgaagactccagagacaaggaagctattttggttgttaaggtgcatggcaattacactatccagccaagaaatcaccgagtccgtgttcaccactgttattcatccaagaaaaaacctatgattgactctcaaccagatagctccaggcatatccaaggaactgtactacaccgatctgatttccaaccattcagcagttcctgtgatgtggttgaccagctacagaaattgcatagcccttgaatctgcagttaacggagcttgtggtccaacttgtaatcatccagctgattgaactgtacagaaagaaagcgcaaatgcaaggcaaagtagcgagacagttttttacttgatccattatttaatttattgagaatgagcccaattgtaaatgactatgtaccatatcaaccaacacaagctgcaattttaagggaaaatgcagcgacctgtggttactgcagctgaagctgctatagttgattgtgtcgtttggatgatgattgctccctacaaatattctaatattttttactttctattgtctcatttgcctggaattttgtgtaatggaagttcattttgttaaacgacttcctgttatattttaccttagtcaaatagtacgacacattaaaggattggttattg

SEQ ID NO: 19022 - protein, 312 aa, Glycine max
MEAGNVFQGMREAIITFPPTYKFERHQVGLAGYDSGEKKRIPAWCDRILYRDSCTSLLSDCSLECPIVSSVLQYEACMDVTDSDHKPVRCIFSIDIARVDEPIRRQEFGEILESNEKIKYLLKELCKIPETIISTNNIILQNQDTLILRITNKCAEGNALFEIICEGQSTVTGDQKATNHQLRGSFGFPRWLEVSPATGIIRPDQIVEVSVHHEEFQTLEEFVDGVVQNSWCEDSRDKEAILVVKVHGNYTIQPRNHRVRVHHCYSSKKKPMIDSQPDSSRHIQGTVLHRSDFQPFSSSCDVVDQLQKLHSP

SEQ ID NO: 19023 - protein, 303 aa, Glycine max
MREAIITFPPTYKFERHQVGLAGYDSGEKKRIPAWCDRILYRDSCTSLLSDCSLECPIVSSVLQYEACMDVTDSDHKPVRCIFSIDIARVDEPIRRQEFGEILESNEKIKYLLKELCKIPETIISTNNIILQNQDTLILRITNKCAEGNALFEIICEGQSTVTGDQKATNHQLRGSFGFPRWLEVSPATGIIRPDQIVEVSVHHEEFQTLEEFVDGVVQNSWCEDSRDKEAILVVKVHGNYTIQPRNHRVRVHHCYSSKKKPMIDSQPDSSRHIQGTVLHRSDFQPFSSSCDVVDQLQKLHSP

SEQ ID NO: 19024 - protein, 235 aa, Glycine max
MDVTDSDHKPVRCIFSIDIARVDEPIRRQEFGEILESNEKIKYLLKELCKIPETIISTNNIILQNQDTLILRITNKCAEGNALFEIICEGQSTVTGDQKATNHQLRGSFGFPRWLEVSPATGIIRPDQIVEVSVHHEEFQTLEEFVDGVVQNSWCEDSRDKEAILVVKVHGNYTIQPRNHRVRVHHCYSSKKKPMIDSQPDSSRHIQGTVLHRSDFQPFSSSCDVVDQLQKLHSP

SEQ ID NO: 19025 - DNA, 1106 bp, Glycine max
gaatcgacattttctttggatgttaattcaaagttggattgggaagcaatgggaaaagttcttgctcgcgggcacagccgagttcctgtctattctggaaatccaaggaatattattgggcttctactggtcaaaagtcttcttactgtacgaccagaaacagagacacctgtcagtgctgtatccatccggagaattccacgggttccatcagatatgcctctctatgatatactaaatgagttccaaaagggaagtagtcatatggctgctgttgttaaggctaggggaaaaggcaaagaaactccacaaatcattgatgaagagaaaaatgaagaaaacaaaagcattggtggggattcacagttgaccactccgttgctacagaagcaggatgcaaaatcaggaagtgttgttgttgacatagtcaagccttcaaagccttccagcattaataagctgtctgttttgcaacgtagtgatagcacaacaaatggtccctcttcagaaaatattgaagatggtgaagtgattggtattatcactttagaagatgtatttgaagaacttctgcaagaagaaattgttgatgagacagatgaatatgtggatgttcataagagaatacgtgttgctgcagctgcagctgcttcctcagtggcccgagctccatcatcgcgaaggttgactagccagaagggagcaggaatccaaagtaagccagggcaagctccaaagaaatctgcagaggaaaatggattgaactctacaaagcaataaggaaatgcatattagcctgtcgggataatgaacctttaatactgaggggctgtttatgtgtcagcaatatgatgaaaaagaagtcaaggagagttttttagtcatttgatctttatgatgtatcaaattaataactttccttttaggaagggcataaacggatgtattcctatttatataggttattaagccggtgccatgctgcaattttatgttagatccaaaatgtcttttgtttttaccgaaagaaaagtgtgtttgttagtttcttttacccatttctctcaataatctattatttacaaaaaaaaaaaaaaaaaaaagag

SEQ ID NO: 19026 - protein, 259 aa, Glycine max
ESTFSLDVNSKLDWEAMGKVLARGHSRVPVYSGNPRNIIGLLLVKSLLTVRPETETPVSAVSIRRIPRVPSDMPLYDILNEFQKGSSHMAAVVKARGKGKETPQIIDEEKNEENKSIGGDSQLTTPLLQKQDAKSGSVVVDIVKPSKPSSINKLSVLQRSDSTTNGPSSENIEDGEVIGIITLEDVFEELLQEEIVDETDEYVDVHKRIRVAAAAAASSVARAPSSRRLTSQKGAGIQSKPGQAPKKSAEENGLNSTKQ

SEQ ID NO: 19027 - protein, 243 aa, Glycine max
MGKVLARGHSRVPVYSGNPRNIIGLLLVKSLLTVRPETETPVSAVSIRRIPRVPSDMPLYDILNEFQKGSSHMAAVVKARGKGKETPQIIDEEKNEENKSIGGDSQLTTPLLQKQDAKSGSVVVDIVKPSKPSSINKLSVLQRSDSTTNGPSSENIEDGEVIGIITLEDVFEELLQEEIVDETDEYVDVHKRIRVAAAAAASSVARAPSSRRLTSQKGAGIQSKPGQAPKKSAEENGLNSTKQ

SEQ ID NO: 19028 - protein, 187 aa, Glycine max
MPLYDILNEFQKGSSHMAAVVKARGKGKETPQIIDEEKNEENKSIGGDSQLTTPLLQKQDAKSGSVVVDIVKPSKPSSINKLSVLQRSDSTTNGPSSENIEDGEVIGIITLEDVFEELLQEEIVDETDEYVDVHKRIRVAAAAAASSVARAPSSRRLTSQKGAGIQSKPGQAPKKSAEENGLNSTKQ

SEQ ID NO: 19029 - DNA, 2149 bp, Glycine max
gaggaaggttttggtttcggaagatatcaagacacttaccaaggtaacagcttggtcctgtctccgtctcacccctctctgtaaaatctctccgaccgtttcattcagcactcattcgcaggcatcaacctcgtatcctttgtgtgcgaggtctatctgctgagatgtcaaataatccgcaatatccaggcttacagcctcttcggcctcccattgctggttcactggatcctccgcgcaattttgttccgcctatgcctgttcaatttcgccctgctgttcctacacaacagtctcagcagttcatttccatgccttctcaacattaccaacatcaacctgttggtccgggcggtgttcccctgattggtgttggaatacctccccaaaatcaacagccacaattttctcaaccaattcaacagttacccccgagacctagtccgcagttaccacccccatcacaggcaattccaatgccggttgctcgtccaaacatgcacatcccatctgaatcaatgatgcagcagtctgattctcaagcccattctcaagctcctaatgggtacacacctggtttaggtggtccgggaatgccactctcttcgtcatatacgtttgcaccatccacttatggtcaagtgcaggctaattttaattctactggccaattccaacctgttcctcaaattcatgctctcacgggttcttcatcccaaagcattactactggtgcaactcttcagagcaatggtggacaacctttggttacaactgttatgcctttggctaccattgcccagccacagctcactaagaatggccccacagattggattgagcatacctctgctaccggaagaacattttattacaataagaagactaaagtatcaagctgggagaagccttttgaattgatgacgcctattgagagggtagatgcaacaacaaactggaaggagtatactagtcctgatggaagaaagtattactacaacaagatcacaaatgaatccaagtggtcaattcccgaggagctgaagttggcccgtgagcaagttgaaaaagcaattgtcagtggatctcgtcctgaagcattgctgaattcccatcctcaaccctctccgacaccttctgcaactgaagcaacacccaacacagataattcaactttacccagtcaaggagaaccatcaagtcctgtttcagttgctccagttgttactacatctataagtaatccacaatctgagatgccttctggaccatctctgtctacttctgcaaatgctataactggagcaaaagtggacgaacttgaggcacctgtaaatactgtcacaccatcagatacttgtgtgggaagtgataaagctgttgttactgatattaacactgctgtaacaccaatgaatgatgttaacaatgattcagctcaagatactctaggttctgcagacagagttcctgtagaagataaagaagatggtaaaaatgatttgataggagagaaaagtaatgatgtggctgcagaaacaaaggcagttgagccagaacctccagtttatgcaaataagatggaggctaaagatgcattcaaagcactcttggagtctgtaaatgttggatctgactggacttgggatcggtccatgcgtttaataattaatgataaaaggtatggtgccttaaaaacacttgttgaaaggaagcaagctttcaatgagtacttaaatcagaggaaaaaacaagaagccgaagaaaagcgtatgaaacagaaaaaagcccgggaggattttaaaaaaatgttagaagaatccacggacttgacttcatccactagatggagcaaagcagtgtctatatttgaaaatgatgaacgtttcaaggctgttgaacgtgacagagatcgcagggatatgtttgaaagcttcttggaggaacttctaaacaaggaacgagcaaaggtacaggaggaacggaagcgaaatataatggaatacaggaagtttttggaatcttgtgactttataaaggctagtacacagtggcgaaaagttcaagatcgcttagaggctgatgaaagatgttctcgtcttgaaaaaattgatcgcttggaaatattccaggactatttacgtgattt

SEQ ID NO: 19030 - protein, 661 aa, Glycine max
MSNNPQYPGLQPLRPPIAGSLDPPRNFVPPMPVQFRPAVPTQQSQQFISMPSQHYQHQPVGPGGVPLIGVGIPPQNQQPQFSQPIQQLPPRPSPQLPPPSQAIPMPVARPNMHIPSESMMQQSDSQAHSQAPNGYTPGLGGPGMPLSSSYTFAPSTYGQVQANFNSTGQFQPVPQIHALTGSSSQSITTGATLQSNGGQPLVTTVMPLATIAQPQLTKNGPTDWIEHTSATGRTFYYNKKTKVSSWEKPFELMTPIERVDATTNWKEYTSPDGRKYYYNKITNESKWSIPEELKLAREQVEKAIVSGSRPEALLNSHPQPSPTPSATEATPNTDNSTLPSQGEPSSPVSVAPVVTTSISNPQSEMPSGPSLSTSANAITGAKVDELEAPVNTVTPSDTCVGSDKAVVTDINTAVTPMNDVNNDSAQDTLGSADRVPVEDKEDGKNDLIGEKSNDVAAETKAVEPEPPVYANKMEAKDAFKALLESVNVGSDWTWDRSMRLIINDKRYGALKTLVERKQAFNEYLNQRKKQEAEEKRMKQKKAREDFKKMLEESTDLTSSTRWSKAVSIFENDERFKAVERDRDRRDMFESFLEELLNKERAKVQEERKRNIMEYRKFLESCDFIKASTQWRKVQDRLEADERCSRLEKIDRLEIFQDYLRD

SEQ ID NO: 19031 - protein, 631 aa, Glycine max
MPVQFRPAVPTQQSQQFISMPSQHYQHQPVGPGGVPLIGVGIPPQNQQPQFSQPIQQLPPRPSPQLPPPSQAIPMPVARPNMHIPSESMMQQSDSQAHSQAPNGYTPGLGGPGMPLSSSYTFAPSTYGQVQANFNSTGQFQPVPQIHALTGSSSQSITTGATLQSNGGQPLVTTVMPLATIAQPQLTKNGPTDWIEHTSATGRTFYYNKKTKVSSWEKPFELMTPIERVDATTNWKEYTSPDGRKYYYNKITNESKWSIPEELKLAREQVEKAIVSGSRPEALLNSHPQPSPTPSATEATPNTDNSTLPSQGEPSSPVSVAPVVTTSISNPQSEMPSGPSLSTSANAITGAKVDELEAPVNTVTPSDTCVGSDKAVVTDINTAVTPMNDVNNDSAQDTLGSADRVPVEDKEDGKNDLIGEKSNDVAAETKAVEPEPPVYANKMEAKDAFKALLESVNVGSDWTWDRSMRLIINDKRYGALKTLVERKQAFNEYLNQRKKQEAEEKRMKQKKAREDFKKMLEESTDLTSSTRWSKAVSIFENDERFKAVERDRDRRDMFESFLEELLNKERAKVQEERKRNIMEYRKFLESCDFIKASTQWRKVQDRLEADERCSRLEKIDRLEIFQDYLRD

SEQ ID NO: 19032 - protein, 612 aa, Glycine max
MPSQHYQHQPVGPGGVPLIGVGIPPQNQQPQFSQPIQQLPPRPSPQLPPPSQAIPMPVARPNMHIPSESMMQQSDSQAHSQAPNGYTPGLGGPGMPLSSSYTFAPSTYGQVQANFNSTGQFQPVPQIHALTGSSSQSITTGATLQSNGGQPLVTTVMPLATIAQPQLTKNGPTDWIEHTSATGRTFYYNKKTKVSSWEKPFELMTPIERVDATTNWKEYTSPDGRKYYYNKITNESKWSIPEELKLAREQVEKAIVSGSRPEALLNSHPQPSPTPSATEATPNTDNSTLPSQGEPSSPVSVAPVVTTSISNPQSEMPSGPSLSTSANAITGAKVDELEAPVNTVTPSDTCVGSDKAVVTDINTAVTPMNDVNNDSAQDTLGSADRVPVEDKEDGKNDLIGEKSNDVAAETKAVEPEPPVYANKMEAKDAFKALLESVNVGSDWTWDRSMRLIINDKRYGALKTLVERKQAFNEYLNQRKKQEAEEKRMKQKKAREDFKKMLEESTDLTSSTRWSKAVSIFENDERFKAVERDRDRRDMFESFLEELLNKERAKVQEERKRNIMEYRKFLESCDFIKASTQWRKVQDRLEADERCSRLEKIDRLEIFQDYLRD

SEQ ID NO: 19033 - DNA, 1580 bp, Glycine max
acttcacttcagttgactctctctctcctccaccagcccgccatttttctctctctaaaacacaaacacatgacatctccttatgctcctcgccggcgatccagctccgaccaccggaccacgcccggaagagcaccgccctcccccagcttcgcctcttccgagctgagcacctcctccaccgtctccacccaccggaaccccgtctccgccgtcgccaagtccttcgccggaatctttgccggctgcttcgctcggccggatttcgacaactccaagagcctcggggattccgaggagttcaagtcttcttcctctgtatcgaatgcttcaagagctggtagtcagagagggcgtggctcaaatcgaggtatcagcatcagttcatacaacatattgccagcgaaagaaccaggcattgtgaagttcaccatggaggaaatcttccgagtcacaaggaacttctccccttctttcaagattggccaaggtggttttggtgctgtctataaggccaaactcctagatgggactgttgttgcagtaaagcgtgctaagaagagtatgtatgagaagcatttgggggtggagttccaaagcgagatccaaacactatcacgggtggaacatttgaacttggtcaagttctttggatatttggagcaagaggatgaaaggatcattgttgtggagcatgttccaaatggaacccttagagaacatttagattgcattcatggaagcgttctggaccttgctgcacgtctagatatagcaattgatgtttctcatgctatcacctatcttcatatgtatatagatcatcctatcatccatagagacataaaatcttcaaacattcttctcactgaaaattttcgagctaaagtagcagactttggttttgctagacaagcccctgacagtgactctggcatgacacatatttccacccaaataaaaggaacagctggctacttggaccctgaatacctgaaaacttatcaactaactgaaaagagtgacgtgtattcatttggagttttgcttgttgaacttgtcacaggcagacgccccattgaaccaaaatttgaactcagggagcgaatcacggcaaaatgggtgggtattggtattgtgtactatctgccttcattttattcttctagtttgctatttagtagtttttcataatttcatgaaaaccaacaatatcttctatgacactccattttgctcagtagttaagcatcttttcttcatgattacacaatctcaatccattttgttccaagctttagttggtaagaatgatggagaaggcatttgaaaagacttacatgatgcttaataatgctcacaaaatgatgacatttctataagctccttttagcttattttagtaagagtttatcatacatgcattttctgtaaaggtttttacaatgtcaatcaataaaaaattattattattacttttaaggtaattattataaaatttggtaaacttataatacatcacagtttgtgattgaatgatgatataaaagaaaatgctaaccaatgcccttgggtcattg

SEQ ID NO: 19034 - protein, 397 aa, Glycine max
TSLQLTLSLLHQPAIFLSLKHKHMTSPYAPRRRSSSDHRTTPGRAPPSPSFASSELSTSSTVSTHRNPVSAVAKSFAGIFAGCFARPDFDNSKSLGDSEEFKSSSSVSNASRAGSQRGRGSNRGISISSYNILPAKEPGIVKFTMEEIFRVTRNFSPSFKIGQGGFGAVYKAKLLDGTVVAVKRAKKSMYEKHLGVEFQSEIQTLSRVEHLNLVKFFGYLEQEDERIIVVEHVPNGTLREHLDCIHGSVLDLAARLDIAIDVSHAITYLHMYIDHPIIHRDIKSSNILLTENFRAKVADFGFARQAPDSDSGMTHISTQIKGTAGYLDPEYLKTYQLTEKSDVYSFGVLLVELVTGRRPIEPKFELRERITAKWVGIGIVYYLPSFYSSSLLFSSFS

SEQ ID NO: 19035 - protein, 374 aa, Glycine max
MTSPYAPRRRSSSDHRTTPGRAPPSPSFASSELSTSSTVSTHRNPVSAVAKSFAGIFAGCFARPDFDNSKSLGDSEEFKSSSSVSNASRAGSQRGRGSNRGISISSYNILPAKEPGIVKFTMEEIFRVTRNFSPSFKIGQGGFGAVYKAKLLDGTVVAVKRAKKSMYEKHLGVEFQSEIQTLSRVEHLNLVKFFGYLEQEDERIIVVEHVPNGTLREHLDCIHGSVLDLAARLDIAIDVSHAITYLHMYIDHPIIHRDIKSSNILLTENFRAKVADFGFARQAPDSDSGMTHISTQIKGTAGYLDPEYLKTYQLTEKSDVYSFGVLLVELVTGRRPIEPKFELRERITAKWVGIGIVYYLPSFYSSSLLFSSFS

SEQ ID NO: 19036 - protein, 253 aa, Glycine max
MEEIFRVTRNFSPSFKIGQGGFGAVYKAKLLDGTVVAVKRAKKSMYEKHLGVEFQSEIQTLSRVEHLNLVKFFGYLEQEDERIIVVEHVPNGTLREHLDCIHGSVLDLAARLDIAIDVSHAITYLHMYIDHPIIHRDIKSSNILLTENFRAKVADFGFARQAPDSDSGMTHISTQIKGTAGYLDPEYLKTYQLTEKSDVYSFGVLLVELVTGRRPIEPKFELRERITAKWVGIGIVYYLPSFYSSSLLFSSFS

SEQ ID NO: 19037 - DNA, 1396 bp, Glycine max
gagtggatgtgattatctgaattcagtgatgagggtgttgtcgttgagcccctccactttggctttgggtcgccactttctctgcaaaaccacctcacactcccacccttccctttccctcccacgcgccgcttccatctccgccactctcacgcgcccacccattcctcccaattcagatccccgcaggttccccttctcctccctcacctcttccaccaacactcccaacaacaatccctttctctctcactcccaaggtgctggtgctggtgctggcacgttcctttggaaccccgcttccgacaccccttacgccgcgctccacggaggcaaagaccgcgtcgccacggtggtgctgttggggtggcttggagcgaggaccaagcacctcaagaggtacgtcgagtggtacaattcgcgcggcattaacgcactcaccttcgtcgtcgacatcaaggagctgcttcgatttgacctcggccacgtgctcgagacccgaatctctctcctcgccgaccacctcgtttcttgggtgtcccgcgaggaacacgatgggagggaacgctgcctggtttttcacactttcagcaacacgggttggtttgtttatggttacattcttgcccgaatgctgggaagtgaggagctcatggagaagattaaaggatgcattgtggattcgggaggaggagaacctttcaatcctcaggtctgggctgccggtttttctgctgctatattgaagaagcgcatctctttaggacccatagtcgaggtagaaggcaagcttaaatcggagacagaagtcagcttgccaaagattgaacaaaaggaatcttcgacaatcgaaactttggtcttgtcactattagagaagttcttctcatttgttttgcagttgccagatgtgaaccagaggttaacaaggattgtcaatgtgctcatgaaacaccaaccttgtcctcagctttacctgtatagtacagctgacaaagtagttccatatcaatccatagaaacgttaattgaggagcagaggaagatgggaaagagggtaaggtcctttaacttcggcttatctccccacgtggatcattataggacatttccggacctatacttatcacaggtttctgaatttttgaaccaatgttttgccacgagcaaaccgacaacttacaagtcttaagttgcccattgaagtgtaaagtttttgcatagcagtccgaatgaaatttgcttcctttagttttctgagcggaatagcgattcattataacaagtacaaggagagaaatgaacagtggcaacacattacatacaagccattgacataatatattgaattgccgacagtgtctgccaattacacattagaatgattcttttgacg

SEQ ID NO: 19038 - protein, 396 aa, Glycine max
SGCDYLNSVMRVLSLSPSTLALGRHFLCKTTSHSHPSLSLPRAASISATLTRPPIPPNSDPRRFPFSSLTSSTNTPNNNPFLSHSQGAGAGAGTFLWNPASDTPYAALHGGKDRVATVVLLGWLGARTKHLKRYVEWYNSRGINALTFVVDIKELLRFDLGHVLETRISLLADHLVSWVSREEHDGRERCLVFHTFSNTGWFVYGYILARMLGSEELMEKIKGCIVDSGGGEPFNPQVWAAGFSAAILKKRISLGPIVEVEGKLKSETEVSLPKIEQKESSTIETLVLSLLEKFFSFVLQLPDVNQRLTRIVNVLMKHQPCPQLYLYSTADKVVPYQSIETLIEEQRKMGKRVRSFNFGLSPHVDHYRTFPDLYLSQVSEFLNQCFATSKPTTYKS

SEQ ID NO: 19039 - protein, 387 aa, Glycine max
MRVLSLSPSTLALGRHFLCKTTSHSHPSLSLPRAASISATLTRPPIPPNSDPRRFPFSSLTSSTNTPNNNPFLSHSQGAGAGAGTFLWNPASDTPYAALHGGKDRVATVVLLGWLGARTKHLKRYVEWYNSRGINALTFVVDIKELLRFDLGHVLETRISLLADHLVSWVSREEHDGRERCLVFHTFSNTGWFVYGYILARMLGSEELMEKIKGCIVDSGGGEPFNPQVWAAGFSAAILKKRISLGPIVEVEGKLKSETEVSLPKIEQKESSTIETLVLSLLEKFFSFVLQLPDVNQRLTRIVNVLMKHQPCPQLYLYSTADKVVPYQSIETLIEEQRKMGKRVRSFNFGLSPHVDHYRTFPDLYLSQVSEFLNQCFATSKPTTYKS

SEQ ID NO: 19040 - DNA, 1316 bp, Glycine max
attattcaaaagttgcctgtgcttcttcaacccgtggctgcaaatggcaaaaaagtccccctcggacaaagaaaactgatgtgtaatgatgactgtgctaagttagagcggaaaagggttcttgcagatgcttttgagattaccgctccaaatctggattcactccattttggtgagaattcggttgcttctgaattgctggctgacatgttgagacgtgattctaaatgggttttatctgttgaagagagatgcaagtttttagtacttggcaagagcagaggaaatgcacatggtccaaaagtccatgttttctgtcctatgttaaaggacaaaagagatgcagtgagggtgattgctgagagatggaagcttgcagtgaatgcagctggtcgggagccaaagcatttcgtagttgttcatgttaccccaaaatcaagagctcctgctcgtgtgctagggtttaagggtactacaactgtaaatgtaccccttcctccggcatttgatcctttggttgatatggatcctcgacttgttgtctcttttatagacttaccaatggatgcagatattagtgcattggtgttgagatttggtggtgagtgtgaacttgtttggttaaatgacaaaaatgcattggccgtttttaatgaccctgcccgtgctgcaactgcaatgaggaggttggatcatggtacggtttatcagggagctgtggtggtggttgttccaaatgtcggggcatcagtagcatcttcagctaccaatgcctggggaggatctgggacaatgaaaggaggagcactggcagcattaaagagtaatccatggaaaaaggatgttattcaagagccaggttggagagaagatgcttggggtgatgaggagtgggctactggttctgctaatgtcaaattgcctattcagaagaaagaagcccgaatatctgcttcagtaaatccttggagtgtcctaaatcaagaatcgtcttcaagttcatctgttgcagccattaaaattgatggttctaggaaacactctgaaagtagtgttatcacaaagttggagcctcgtgatggtggttcaaatctaggagggcagcctgcaggaaactttgatgctttggaagcttctgatgtagtagatgattgggagaaggcttgtgaatagcaaggagtaaacatttttcattttattttgttgagaaggaggcagattttgactagtgaaatgtctaaggctctttttgtccactagatgtatctcttttcatgttttatccccctgattttaatcaatttcgatgttattct

SEQ ID NO: 19041 - protein, 390 aa, Glycine max
IIQKLPVLLQPVAANGKKVPLGQRKLMCNDDCAKLERKRVLADAFEITAPNLDSLHFGENSVASELLADMLRRDSKWVLSVEERCKFLVLGKSRGNAHGPKVHVFCPMLKDKRDAVRVIAERWKLAVNAAGREPKHFVVVHVTPKSRAPARVLGFKGTTTVNVPLPPAFDPLVDMDPRLVVSFIDLPMDADISALVLRFGGECELVWLNDKNALAVFNDPARAATAMRRLDHGTVYQGAVVVVVPNVGASVASSATNAWGGSGTMKGGALAALKSNPWKKDVIQEPGWREDAWGDEEWATGSANVKLPIQKKEARISASVNPWSVLNQESSSSSSVAAIKIDGSRKHSESSVITKLEPRDGGSNLGGQPAGNFDALEASDVVDDWEKACE

SEQ ID NO: 19042 - protein, 364 aa, Glycine max
MCNDDCAKLERKRVLADAFEITAPNLDSLHFGENSVASELLADMLRRDSKWVLSVEERCKFLVLGKSRGNAHGPKVHVFCPMLKDKRDAVRVIAERWKLAVNAAGREPKHFVVVHVTPKSRAPARVLGFKGTTTVNVPLPPAFDPLVDMDPRLVVSFIDLPMDADISALVLRFGGECELVWLNDKNALAVFNDPARAATAMRRLDHGTVYQGAVVVVVPNVGASVASSATNAWGGSGTMKGGALAALKSNPWKKDVIQEPGWREDAWGDEEWATGSANVKLPIQKKEARISASVNPWSVLNQESSSSSSVAAIKIDGSRKHSESSVITKLEPRDGGSNLGGQPAGNFDALEASDVVDDWEKACE

SEQ ID NO: 19043 - protein, 321 aa, Glycine max
MLRRDSKWVLSVEERCKFLVLGKSRGNAHGPKVHVFCPMLKDKRDAVRVIAERWKLAVNAAGREPKHFVVVHVTPKSRAPARVLGFKGTTTVNVPLPPAFDPLVDMDPRLVVSFIDLPMDADISALVLRFGGECELVWLNDKNALAVFNDPARAATAMRRLDHGTVYQGAVVVVVPNVGASVASSATNAWGGSGTMKGGALAALKSNPWKKDVIQEPGWREDAWGDEEWATGSANVKLPIQKKEARISASVNPWSVLNQESSSSSSVAAIKIDGSRKHSESSVITKLEPRDGGSNLGGQPAGNFDALEASDVVDDWEKACE

SEQ ID NO: 19044 - DNA, 1633 bp, Glycine max
tcttgtatcccaatctttgttgttcctgaactagagtaagatccttttaacattgtttacagattccataattctattttcaatttctattggccttaaaatatatatgttagttctctataatttacccgggcagaaactttctttagcatgcatgcaggtttcaagtgctaatagactctacagagaggtttgcagaagtattagcacagagaataatgcagtggatcagttaaaagaaatagttcatgcagatagacatttggaatataataaagctgagatgaagcatttagaaatgttcaacatggtaaatactcatcatgcaaccactggttataagtgtttgaagttgaaatggaggaaatttggtcacttggctggtcaagttggtggagcaaaaggtatattttgtgggttgtttggacttgaagctgaaaacaccttttggttggatagttcctccacagagaagggaagagcacgcttttcatttatgggaggaaaaggcggatcactttggaagcagttagtgttcagattgtcccatcaaagtgatgggagttcaaaaggaggtggttatttgtcaactgaagattctcaaggttctgctgaaacaatatttttggaagaaggttttcttgattttttgaacagggagcttcaatcatatcgttatgataaaaatgaatatgaaggcttgccatttgattttcacggtggatatattggttacattgggtataacctcaaagttgagtgtggtgtgaaatcgaaccgtcacaaatctaaaactcctgatgcatgctttttctttgctgataatcttgtagctattgaccacaaaaatgatgatgtttatatattggctatacatgaagaaagttcaagtattacacagtggttgaatgacacagaggagaaacttctgagcttaaatggctctgtgagaatggctttggaaagacaaaagtctcttcctttaactttttcctcatgtaaggttggttttgcagctgaaaaatctaaagagcagtacattgaggatgttaagaagtgtctaaactacattaaagatggagaaagctatgagttatgcctcacaactcagataaggaaatcgattgaggaattgaattcccttgaactttatctgcatttgagagaaaggaatccggcaccttatgctgcttggcttaatttttcaaaggtggatctgagtatttgctgttcttctcctgagaggttcctgcagttggataggaagaatatactagaagctaagcccatcaagggaacgatagctcgtggtgctactgaagaggaagatgagcaactaaaatttaaattacagttcagcgaaaaggatcaggctgaaaacctgatgattgttgaccttctaaggaatgaccttggccgtgtttgtgatcctggatctgttcatgtgccacgtctcatggatgtggaatcatatgcaactgttcacacaatggtgagtactattcgtgggaagaagcggtcagatgtcagtgctgtagactgtgtcaaagctgcatttcctggtggttcaatgacaggtgcacctaagttgagatcaatggaacttcttgattctattgaaagttgttctcga

SEQ ID NO: 19045 - protein, 509 aa, Glycine max
MLVLYNLPGQKLSLACMQVSSANRLYREVCRSISTENNAVDQLKEIVHADRHLEYNKAEMKHLEMFNMVNTHHATTGYKCLKLKWRKFGHLAGQVGGAKGIFCGLFGLEAENTFWLDSSSTEKGRARFSFMGGKGGSLWKQLVFRLSHQSDGSSKGGGYLSTEDSQGSAETIFLEEGFLDFLNRELQSYRYDKNEYEGLPFDFHGGYIGYIGYNLKVECGVKSNRHKSKTPDACFFFADNLVAIDHKNDDVYILAIHEESSSITQWLNDTEEKLLSLNGSVRMALERQKSLPLTFSSCKVGFAAEKSKEQYIEDVKKCLNYIKDGESYELCLTTQIRKSIEELNSLELYLHLRERNPAPYAAWLNFSKVDLSICCSSPERFLQLDRKNILEAKPIKGTIARGATEEEDEQLKFKLQFSEKDQAENLMIVDLLRNDLGRVCDPGSVHVPRLMDVESYATVHTMVSTIRGKKRSDVSAVDCVKAAFPGGSMTGAPKLRSMELLDSIESCSR

SEQ ID NO: 19046 - protein, 493 aa, Glycine max
MQVSSANRLYREVCRSISTENNAVDQLKEIVHADRHLEYNKAEMKHLEMFNMVNTHHATTGYKCLKLKWRKFGHLAGQVGGAKGIFCGLFGLEAENTFWLDSSSTEKGRARFSFMGGKGGSLWKQLVFRLSHQSDGSSKGGGYLSTEDSQGSAETIFLEEGFLDFLNRELQSYRYDKNEYEGLPFDFHGGYIGYIGYNLKVECGVKSNRHKSKTPDACFFFADNLVAIDHKNDDVYILAIHEESSSITQWLNDTEEKLLSLNGSVRMALERQKSLPLTFSSCKVGFAAEKSKEQYIEDVKKCLNYIKDGESYELCLTTQIRKSIEELNSLELYLHLRERNPAPYAAWLNFSKVDLSICCSSPERFLQLDRKNILEAKPIKGTIARGATEEEDEQLKFKLQFSEKDQAENLMIVDLLRNDLGRVCDPGSVHVPRLMDVESYATVHTMVSTIRGKKRSDVSAVDCVKAAFPGGSMTGAPKLRSMELLDSIESCSR

SEQ ID NO: 19047 - protein, 450 aa, Glycine max
MKHLEMFNMVNTHHATTGYKCLKLKWRKFGHLAGQVGGAKGIFCGLFGLEAENTFWLDSSSTEKGRARFSFMGGKGGSLWKQLVFRLSHQSDGSSKGGGYLSTEDSQGSAETIFLEEGFLDFLNRELQSYRYDKNEYEGLPFDFHGGYIGYIGYNLKVECGVKSNRHKSKTPDACFFFADNLVAIDHKNDDVYILAIHEESSSITQWLNDTEEKLLSLNGSVRMALERQKSLPLTFSSCKVGFAAEKSKEQYIEDVKKCLNYIKDGESYELCLTTQIRKSIEELNSLELYLHLRERNPAPYAAWLNFSKVDLSICCSSPERFLQLDRKNILEAKPIKGTIARGATEEEDEQLKFKLQFSEKDQAENLMIVDLLRNDLGRVCDPGSVHVPRLMDVESYATVHTMVSTIRGKKRSDVSAVDCVKAAFPGGSMTGAPKLRSMELLDSIESCSR

SEQ ID NO: 19048 - DNA, 1216 bp, Glycine max
gcatactgctacagtgccacataatcattatcatctctcatcagcatctctttcctttccagttttttctctctcttcccgacctgggttttcctggactctagttgttttttgaaggatgttgtgacaatctaattgtgttttacttgatctgcagactggggacctaagattgatgtcgttggattttgtttccttgaccttgcttcaaattatgtaccaccaaaatcgctagtagattggcttgaagagggagaaaaacctatttatgttggatttggtagccttcctttacaagaaccagagaaaataacacgaattataattcaagcactggaagaaacagggcagagaggtgtcatcaacaaaggctggggtggtcttgggtcttaacaaaacaaatctgtgtatttattggacaactgtccacatgattggctgtttccccgatgcactgcagtgttgcaaatctcaggtacatcatgggggtgccggaacaactgccgcgggtcttagagctgaatgtccgacaactattgtaccattctttggggaccagccattttggggagatcgggtgcatgctagaggagtaggtcctgcacccatcccggtggatgagtttacatttgataggctggttgatgccatacgccttatgctgaaaccagaggtgaaaaagcgtgctgttgaacttgctaatgccatgaaaaatgaagatggggtgctaggagcggttaaagccttctataaacattatccgcccgaaaaatcaaagttcgatgacgccaagtccaagcaattagcctccacagccgaacccaaaccagttcataaatatttctctatacgaggatgctttggttgctctaaatcttctggatataaatagctttcttcatgcatcgaccataaaaaaaatgcatacaaaaaaaagctgtcttcatacagcatacttgtccatgtaaccatgttcgttcttttggtctaattctgatatatcagcaattgtgaaaagtaaattgccccggtgattttgttgagtttgagcttcaccagaagcatttctgaaggttccagtatggtccaatttactgtcaagagcttgctactttactttttttcttcttttagtgtaaggtttgtatgataatacccctcaacattaaccagtgttttgtagaatataactaatcatcttctttgcaatatttta

SEQ ID NO: 19049 - protein, 153 aa, Glycine max
MIGCFPDALQCCKSQVHHGGAGTTAAGLRAECPTTIVPFFGDQPFWGDRVHARGVGPAPIPVDEFTFDRLVDAIRLMLKPEVKKRAVELANAMKNEDGVLGAVKAFYKHYPPEKSKFDDAKSKQLASTAEPKPVHKYFSIRGCFGCSKSSGYK

SEQ ID NO: 19050 - protein, 77 aa, Glycine max
MLKPEVKKRAVELANAMKNEDGVLGAVKAFYKHYPPEKSKFDDAKSKQLASTAEPKPVHKYFSIRGCFGCSKSSGYK

SEQ ID NO: 19051 - DNA, 1097 bp, Glycine max
agcctcctcaatttctctctctctctctctctctaacacggagtgatggctgtgcagctgtgggaaaccctgaaggaagccatcgtagcctacactggcttctctccttccaccttcttcacggtgctggcgcttctttttgccgtttactacgtcgtcacgggtctctttggctcctccgacgatcaccatcaccgccaccgccacgtcgaggaggaggaggagatgccgcctctgcgccccccggttcagctcggcgagatcacagcggaggagctcaaggcctacgacggcaccgatcccgagaagcccttgctcatggccatcaaggcccagatctatgatgtctcccagagcaggatgttttatggacctggtggaccttatgccctatttgctggcaaggatgctagcagagccttagcaaagatgtcttttgaagagaaagatctgactggggatatttctggtcttggcccgtttgagcttgatgccttacaagactgggaatataagtttatgagcaagtatgtgaaggttggaactgttaaaagtgaagaagttccagtaactgaaccagagtccattggtgaaccattagaatctacttcccgtgatattgatgctgctgccaagcctactgatactgaagatggcaaattagaaactccagctgttaaaagtgatgaaaccccttcaaatgttgatgccgataaagagtaatggctgagttgtgccacaaatacccctgcagaaaatggagaaaaaaagaacttcatagtaaagactgaccaaatgtaaggcaagttttcgaagatagtctaggccacctcttctgcaccgtgcctttgcttgaatatttagtctcataaataatgaattgccgggtcaatttatgtgtggatccaaaaaaaaggggagtaactttaagttagatcttcttttagaattccgtagtatgtataccatttaaatgcaacagagcaatgacatttggggtcttatcttacttaggctgagtaatgaatgatcttttgtttaattgaataatacgttgctctatggcaagaataaatgaagggtaagtcttttgaacc

SEQ ID NO: 19052 - protein, 225 aa, Glycine max
MAVQLWETLKEAIVAYTGFSPSTFFTVLALLFAVYYVVTGLFGSSDDHHHRHRHVEEEEEMPPLRPPVQLGEITAEELKAYDGTDPEKPLLMAIKAQIYDVSQSRMFYGPGGPYALFAGKDASRALAKMSFEEKDLTGDISGLGPFELDALQDWEYKFMSKYVKVGTVKSEEVPVTEPESIGEPLESTSRDIDAAAKPTDTEDGKLETPAVKSDETPSNVDADKE

SEQ ID NO: 19053 - protein, 165 aa, Glycine max
MPPLRPPVQLGEITAEELKAYDGTDPEKPLLMAIKAQIYDVSQSRMFYGPGGPYALFAGKDASRALAKMSFEEKDLTGDISGLGPFELDALQDWEYKFMSKYVKVGTVKSEEVPVTEPESIGEPLESTSRDIDAAAKPTDTEDGKLETPAVKSDETPSNVDADKE

SEQ ID NO: 19054 - protein, 134 aa, Glycine max
MAIKAQIYDVSQSRMFYGPGGPYALFAGKDASRALAKMSFEEKDLTGDISGLGPFELDALQDWEYKFMSKYVKVGTVKSEEVPVTEPESIGEPLESTSRDIDAAAKPTDTEDGKLETPAVKSDETPSNVDADKE

SEQ ID NO: 19055 - DNA, 1083 bp, Glycine max
acaccaacaaagaacatctgaaaatgatgagaagtcagatcactcaaagggatcaagacctgtagatgatctagttgttgatgaccatgacagaccattacagacttctcagtcgcatactaaagacgttcaagccaaacctctcagtggttctgctaggagttgcactaaagttcacaagaagggcattgcacttggtagatcagtggaccttacaaagtacagtggctatgatgaattagttgccgaattggatcagctgtttgaatttgggggtgaattattgtcaactaaaaaagattggcttatcgtctatactgataatgagggtgatatgatgcttgtaggcgatgatccatggcaggaattctgtgccatggtttgcaaaatttatatctaccctaaagaggagatccagaaaatgagcccaggtacactgagctcgaaaaatgaagagaaccagtcggtgatggctagtgatggtgcagatgcaaaagttgttaaatgtcagccacatcaaaagttcaattcagaaaatggccttgacgcctaatgattagtagattgatttccatagctttcagattctgggatggaaagtaaggaactgtcatgaagccatccatccagttggaaaacataacttgaagatgaaatcgaggctgactgctgcttatcagtgactgcttcaaatcaaatatataagatggcattaaaagagtagtatccgtccaattttggaaatcccggaattagtagtatatgcctgcccagttatacaatccctagtatttaatcaattgtgtttttgagtgaggtgatatagggtgatatcgaccttgcttttttttttttttaaaacaatcccaccttgtagttgttgctgtacatagttgtttctctcccaccctatgaacaacaacccattaatgtaatgaaagtttcgtataccaggtcgcggccttatggttggtatccagtttatttgattttaattttgattcttattcttattaatcataatttgtgagatggtatccattctgcatgatgtattaattaaacttcattcaaattctgcat

SEQ ID NO: 19056 - protein, 183 aa, Glycine max
HQQRTSENDEKSDHSKGSRPVDDLVVDDHDRPLQTSQSHTKDVQAKPLSGSARSCTKVHKKGIALGRSVDLTKYSGYDELVAELDQLFEFGGELLSTKKDWLIVYTDNEGDMMLVGDDPWQEFCAMVCKIYIYPKEEIQKMSPGTLSSKNEENQSVMASDGADAKVVKCQPHQKFNSENGLDA

SEQ ID NO: 19057 - DNA, 1384 bp, Glycine max
cccccccccccccaaatctattgtcagttgaaactgagtagttatcagtggaaagatgagggaagggtgcagcaaagtatgcgtcacaggagctagtggttacatagcttcctctctggtgaagaagctcttggccaagggtcacagcgtccatgcaactctcagagacttgagtttgtatagtattaatattctctctgcacgtatataccatgattaccattcgtgaattttgatttagaattcgcaatagcagagaacgagtcaaaggcgagcctcttaaagagccttccacaatcagaagggaaactggtgctgtttgaagctgatatttacaacccaaatgactttgaccatgcaattgaaggctgtgagtttgtctttcatgttgctactcccatgatccatgatcctggctcccaggtttgcctctcaagtctcaaccatatcactctctttaaaacaacttataatagattttaattttatgagtcatagcagtacaagaatacttctgaagcggcaatggctgcgtcaaaaagcattgccctgtcttgtgtgagagcagggacggtgaagcgtctcatctacaccgcgtctgttgtttctgcttcttctttgaaagaagatgggagtggtttcaaagatgcaatggatgaaacttgctggacccctctaaatgattccttggcatatgtatacccagatgatcctttttataaggactatacttattcaaagacactgtcggagaaacatgtgttgagctacgggaacgatgaaaatggtggaggattggaggtggtaacactcccttgtgggctagtgggaggcgacacccttcaatcttctacacccgttagcggagtagtttgtatcgcacagatcatgcaagatgcaagggcgtacatatcactcaagttcctaaagaaattgctggggaaaattcctcttgtacacattgatgatgtctgtgaagctcatattttctgcatggaaagtacctcgatcagtggaagattcttgtgtgcaagttcatatatttcattagaagagatggctaatcatttcgctcttcattatccagaattcaatgtgaaacaagaatatgaagatgagctgaagaaggatatcaagtgggcctcaacaaagctgtgtgacaaaggatttgtatacaaatatgacgccaagatgatattagatgattgtatcaaatgtgcaagaaggatgggtgatctctagtctccatctacacccatgcttgccatatctgcttgtaatacgatatatagcaggcttctgcctcatttcttctcgttccctatccaaatgttattaccattgtttttgtcattttgttaaaaaataaactcagtttcaaatt

SEQ ID NO: 19058 - protein, 238 aa, Glycine max
MAASKSIALSCVRAGTVKRLIYTASVVSASSLKEDGSGFKDAMDETCWTPLNDSLAYVYPDDPFYKDYTYSKTLSEKHVLSYGNDENGGGLEVVTLPCGLVGGDTLQSSTPVSGVVCIAQIMQDARAYISLKFLKKLLGKIPLVHIDDVCEAHIFCMESTSISGRFLCASSYISLEEMANHFALHYPEFNVKQEYEDELKKDIKWASTKLCDKGFVYKYDAKMILDDCIKCARRMGDL

SEQ ID NO: 19059 - protein, 196 aa, Glycine max
MDETCWTPLNDSLAYVYPDDPFYKDYTYSKTLSEKHVLSYGNDENGGGLEVVTLPCGLVGGDTLQSSTPVSGVVCIAQIMQDARAYISLKFLKKLLGKIPLVHIDDVCEAHIFCMESTSISGRFLCASSYISLEEMANHFALHYPEFNVKQEYEDELKKDIKWASTKLCDKGFVYKYDAKMILDDCIKCARRMGDL

SEQ ID NO: 19060 - DNA, 1726 bp, Glycine max
aatttcctcagagatttgacggcattgacttgcacgatcgatatgccaatcgcaatattgtgttctttgatatcaacatgaaaggtcaggatggtgttcagggcccagtctatgtgggaactggttgttgtttcaataggcaagctttgtatggttatgatcctgttttgactgaggaagatttggaacctaacattattgtaaagagttgttgcggttctagaaagaagggaaagggtggcaataagaagtacagtgacaagaagaaggcgatgggaagaactgaatccactgtacccatatttaatatggaagacatagaggagggtgttgaaggttatgatgatgaaaggacactacttatgtctcaaaagagcttggagaagcgttttggtcagtctccagtttttattgctgccactttcatggagcagggtggcattccaccttcaacgaaccctgcaactcttcttaaggaagcaatccatgttatcagctgtggttacgaagacaagacagaatggggcaaagagattggatggatctatggctctgtgacagaagatatcttgactgggttcaagatgcatgctcgtggttggatttccatctattgcatgccacctcgcccagcatttaagggttctgctcctatcaatctttctgatcgtctcaatcaggtgcttcggtgggccttgggttcaattgagatctttctaagcaggcattgtcccttgtggtatggctacaatgggaagttgaagcctctgatgaggcttgcttatattaacaccattgtctacccgtttacctcaatcccattgattgcttactgtacgcttcctgcattttgtcttctcacaaataaatttattattcctgagataagcaactttgccagtatgtggttcattcttctctttgtctccatttttaccacttcaattcttgagcttaggtggagtggggtcagtatagaagactggtggagaaatgaacagttctgggttatcggtgggacatctgcgcatctctatgctgtgttccaggggcttctaaaagtgcttgctgggatcgatacaaattttactgttacatcgatagcatcggacgaggatggggactttgccgagctttatgtgtttaaatggacatcacttctcatccctcctacaacagtgcttattgtgaatttggttgggattgtggctggtgtatcctatgccataaacagtggttaccagtcttggggtccactatttggcaagctgttctttgctatctgggtcattgcccatctatacccattcttgaagggtctcttgggcaggcaaaatcgtaccccaaccattgttattgtttggtccgttcttcttgcttcaatattctccttgctgtgggtgaggattgatcccttcacctctgactccaacaaattaaccaatggtcaatgtggcatcaactgttagttctcttgtatgattcattttgtgttgttattccctttgcttggagatacacaaggttgctgtcgtgtatatagcaagaattttcagcctatcaaagttgtctggaggattgaacccctgaaatagatgggaatgtaccctctctgtttctattatttatctacatgttccttacaagaatagtcagtagtaatgttgaggtgtatgttatattttttccccacagaatataaatttgttcatgcgaatatttaatg

SEQ ID NO: 19061 - protein, 488 aa, Glycine max
FPQRFDGIDLHDRYANRNIVFFDINMKGQDGVQGPVYVGTGCCFNRQALYGYDPVLTEEDLEPNIIVKSCCGSRKKGKGGNKKYSDKKKAMGRTESTVPIFNMEDIEEGVEGYDDERTLLMSQKSLEKRFGQSPVFIAATFMEQGGIPPSTNPATLLKEAIHVISCGYEDKTEWGKEIGWIYGSVTEDILTGFKMHARGWISIYCMPPRPAFKGSAPINLSDRLNQVLRWALGSIEIFLSRHCPLWYGYNGKLKPLMRLAYINTIVYPFTSIPLIAYCTLPAFCLLTNKFIIPEISNFASMWFILLFVSIFTTSILELRWSGVSIEDWWRNEQFWVIGGTSAHLYAVFQGLLKVLAGIDTNFTVTSIASDEDGDFAELYVFKWTSLLIPPTTVLIVNLVGIVAGVSYAINSGYQSWGPLFGKLFFAIWVIAHLYPFLKGLLGRQNRTPTIVIVWSVLLASIFSLLWVRIDPFTSDSNKLTNGQCGINC

SEQ ID NO: 19062 - protein, 463 aa, Glycine max
MKGQDGVQGPVYVGTGCCFNRQALYGYDPVLTEEDLEPNIIVKSCCGSRKKGKGGNKKYSDKKKAMGRTESTVPIFNMEDIEEGVEGYDDERTLLMSQKSLEKRFGQSPVFIAATFMEQGGIPPSTNPATLLKEAIHVISCGYEDKTEWGKEIGWIYGSVTEDILTGFKMHARGWISIYCMPPRPAFKGSAPINLSDRLNQVLRWALGSIEIFLSRHCPLWYGYNGKLKPLMRLAYINTIVYPFTSIPLIAYCTLPAFCLLTNKFIIPEISNFASMWFILLFVSIFTTSILELRWSGVSIEDWWRNEQFWVIGGTSAHLYAVFQGLLKVLAGIDTNFTVTSIASDEDGDFAELYVFKWTSLLIPPTTVLIVNLVGIVAGVSYAINSGYQSWGPLFGKLFFAIWVIAHLYPFLKGLLGRQNRTPTIVIVWSVLLASIFSLLWVRIDPFTSDSNKLTNGQCGINC

SEQ ID NO: 19063 - protein, 398 aa, Glycine max
MGRTESTVPIFNMEDIEEGVEGYDDERTLLMSQKSLEKRFGQSPVFIAATFMEQGGIPPSTNPATLLKEAIHVISCGYEDKTEWGKEIGWIYGSVTEDILTGFKMHARGWISIYCMPPRPAFKGSAPINLSDRLNQVLRWALGSIEIFLSRHCPLWYGYNGKLKPLMRLAYINTIVYPFTSIPLIAYCTLPAFCLLTNKFIIPEISNFASMWFILLFVSIFTTSILELRWSGVSIEDWWRNEQFWVIGGTSAHLYAVFQGLLKVLAGIDTNFTVTSIASDEDGDFAELYVFKWTSLLIPPTTVLIVNLVGIVAGVSYAINSGYQSWGPLFGKLFFAIWVIAHLYPFLKGLLGRQNRTPTIVIVWSVLLASIFSLLWVRIDPFTSDSNKLTNGQCGINC

SEQ ID NO: 19064 - DNA, 1232 bp, Glycine max
gattttcgcagcgattcggatagcgaaagcaatcccccacccctaattttgatttgtgtcgaggaaaggacaggtcttggaaccctaaccgcacctctctctttcttcccgtgtgcgtcaaagcgaagcaacgcgacacgatggtgttctacttcaaagcgcgccccgaagccggcgatttcaccatcttcatgggccttgacaagtacgagaacgaggaactcatcaaatacggttttcccgaagacatctggttccatgtcgataaaatgtcttcagcccatgtctatgtcaggttgcacaaaggccagaccatcgatgacatgagtgagggtttactggaagactgtgctcagcttgtcaaagcaaattcaattcaaggaaataaagtgaacaatgtcgatgttgtttacacaccctggtctaatttaaagaaaactgcttcaatggatgttggccaagttggttttcacaactcaaaaatggttcgaactgtaagagttgagaagaggataaatgagattgttaacaggctaaacaagacaaaagtggaaaggaaacctgatttgaaagctgagcgagaagcagttaatgcagctgagagagctgagagaaaacaacaactgagagaaaaaaaacgtcgggaggaattgggaaggcttgaaaaggagaaacaaacagagcttaggagctacaagggtttgatggttgcagaaaatatgacatccaacaaacaaattgcatcaggaagcaaatcattacaggaactggaggaggatttcatgtaatcatttattgggttatggacagatgactggtggtcaacttactacctggcagatttatgtttttgattaaccaaccctactttggattttgaagctgcattatcttggttggttgaggaaaccaagtagtgtgtacacaaattgtgattgagggatgccgggtggggaggtgaatcctgataaggtcaatataccttatctacaactataaccttgcttgagacaatggtttttgttatttaatgttctcacagtcgagtcaaaaactggaatttcgtgctatttttatcgtggtcgtttacgctagtcgggttttgaaatttgtttccctctttgaattggtgttcactgcttgcgaaattattggggacattatgtagtgtttatgctacatgcaatgataatactcttgttgggaacattatgtagtgttccctgtttgga

SEQ ID NO: 19065 - protein, 215 aa, Glycine max
MVFYFKARPEAGDFTIFMGLDKYENEELIKYGFPEDIWFHVDKMSSAHVYVRLHKGQTIDDMSEGLLEDCAQLVKANSIQGNKVNNVDVVYTPWSNLKKTASMDVGQVGFHNSKMVRTVRVEKRINEIVNRLNKTKVERKPDLKAEREAVNAAERAERKQQLREKKRREELGRLEKEKQTELRSYKGLMVAENMTSNKQIASGSKSLQELEEDFM

SEQ ID NO: 19066 - protein, 198 aa, Glycine max
MGLDKYENEELIKYGFPEDIWFHVDKMSSAHVYVRLHKGQTIDDMSEGLLEDCAQLVKANSIQGNKVNNVDVVYTPWSNLKKTASMDVGQVGFHNSKMVRTVRVEKRINEIVNRLNKTKVERKPDLKAEREAVNAAERAERKQQLREKKRREELGRLEKEKQTELRSYKGLMVAENMTSNKQIASGSKSLQELEEDFM

SEQ ID NO: 19067 - protein, 172 aa, Glycine max
MSSAHVYVRLHKGQTIDDMSEGLLEDCAQLVKANSIQGNKVNNVDVVYTPWSNLKKTASMDVGQVGFHNSKMVRTVRVEKRINEIVNRLNKTKVERKPDLKAEREAVNAAERAERKQQLREKKRREELGRLEKEKQTELRSYKGLMVAENMTSNKQIASGSKSLQELEEDFM

SEQ ID NO: 19068 - DNA, 1350 bp, Glycine max
tttatttttctttcttctcttcctctgcccttcttggcttggttcttctgttttaagcagctttctcttgttgatcattaatcatgtccgatatttaagacatagggttattgctatggcagtcgtacctgttgagagtattgcctcattgaatagtgatctcctctatgacatattacgacgccttgatggccctacgttggctagtgcagcttgcacttgtgcatcattttcttccatctcaaaagaagagagtttatgggaaaatgtatgttcttctgtgtggccttcaaccaatagggaagatgtcaaaagtttaatatcttctaccggtggattcagaaaattctatgcagattgttttcctcttattataaacaaggaggtaggagagtatcaattgagcagctatcttgagtaccctgatgattggactgaggccaaatattatggggacatgattgaatttgaaagcatctctccatcagattttgtttccattgtggatatcaggtttaaggagaaaccaatctgctccaaagttctatgcggaattccaaacgcaaatggctatgatgagtggttctacaactgtccttttcggattgatcttctgagttgtgcggatagagatgataacaatgatggtgtggttaccctttctgtatctgatggattgccaccaataacatccatggaaagggaaaagaaagatgggaaactatggcaggagcttcgtgatggtctcttgcttagttggatcatagtaaacaagaaaataaagcaatctgctaatcttgcaagttggatctccttagatggacaaagacattggccaacagataaggatttcgtctttcgtttcggatctgttctctctgccaaggacatttttccttctcaagtagtgcagtgcatccttattatgaagtttagagtggttcacactgaagaagagggggttcaaacaactcttaaaacaacagagttgagtatgcagttggaagacatggaaggtgctcatgttaatgggaggaacagtttgcttattcttaaggaagcacttagctgccgaaggagcaaaaactatagtgaagtacttgaatcctgtcttattttctcaaaagtgcaaaataagttgaaagaggagaagattaaaaacgaaagtaggttggacacactttgtatattaagtggcattgttgctgtaatgacattctggtactatgttttctgatatggtatggcgttgttcgttttactggaataagctaatgttgatctagcagatgatcaaatttggcactccccttctgtaacataagattcctaataaagtaactaattgat

SEQ ID NO: 19069 - protein, 411 aa, Glycine max
LFFFLLFLCPSWLGSSVLSSFLLLIINHVRYLRHRVIAMAVVPVESIASLNSDLLYDILRRLDGPTLASAACTCASFSSISKEESLWENVCSSVWPSTNREDVKSLISSTGGFRKFYADCFPLIINKEVGEYQLSSYLEYPDDWTEAKYYGDMIEFESISPSDFVSIVDIRFKEKPICSKVLCGIPNANGYDEWFYNCPFRIDLLSCADRDDNNDGVVTLSVSDGLPPITSMEREKKDGKLWQELRDGLLLSWIIVNKKIKQSANLASWISLDGQRHWPTDKDFVFRFGSVLSAKDIFPSQVVQCILIMKFRVVHTEEEGVQTTLKTTELSMQLEDMEGAHVNGRNSLLILKEALSCRRSKNYSEVLESCLIFSKVQNKLKEEKIKNESRLDTLCILSGIVAVMTFWYYVF

SEQ ID NO: 19070 - protein, 373 aa, Glycine max
MAVVPVESIASLNSDLLYDILRRLDGPTLASAACTCASFSSISKEESLWENVCSSVWPSTNREDVKSLISSTGGFRKFYADCFPLIINKEVGEYQLSSYLEYPDDWTEAKYYGDMIEFESISPSDFVSIVDIRFKEKPICSKVLCGIPNANGYDEWFYNCPFRIDLLSCADRDDNNDGVVTLSVSDGLPPITSMEREKKDGKLWQELRDGLLLSWIIVNKKIKQSANLASWISLDGQRHWPTDKDFVFRFGSVLSAKDIFPSQVVQCILIMKFRVVHTEEEGVQTTLKTTELSMQLEDMEGAHVNGRNSLLILKEALSCRRSKNYSEVLESCLIFSKVQNKLKEEKIKNESRLDTLCILSGIVAVMTFWYYVF

SEQ ID NO: 19071 - protein, 259 aa, Glycine max
MIEFESISPSDFVSIVDIRFKEKPICSKVLCGIPNANGYDEWFYNCPFRIDLLSCADRDDNNDGVVTLSVSDGLPPITSMEREKKDGKLWQELRDGLLLSWIIVNKKIKQSANLASWISLDGQRHWPTDKDFVFRFGSVLSAKDIFPSQVVQCILIMKFRVVHTEEEGVQTTLKTTELSMQLEDMEGAHVNGRNSLLILKEALSCRRSKNYSEVLESCLIFSKVQNKLKEEKIKNESRLDTLCILSGIVAVMTFWYYVF

SEQ ID NO: 19072 - DNA, 1239 bp, Glycine max
agccaatcaaatccattgttttctcttctcctcctccttcaatggattctctgacttccatcaacggcgatttcggcttcgccggcggcaccgatcgcagattcgcgttttcgcgccaagcctccttccaacagcctcacacgccgatagacattccggcgcacggccaccactactggtccgcgcgtgacgataaaccctcctccgcctcgctccaaagatcctctctgtcctccttcgttttctccgttttccgaaacgttaggtccggccacaggtacatgaagaggctctttctcttgatctcgctcaatgtcgcgtactccaccgccgaattgctctttggactcttcaccggtcgcgtaggtttggtgtctgatgcggttcacttgacttttggatgtggtcttcttacattttcgttatttgttatggccgcgtctaggaagaaagccgatcgagagtatacttatgggtataaaaggctagaagtcttgtctgcatttacaaatgccctatttcttttgtttatgtcattctccctagcagttgaggcacttcatgcattcatacaagatgaatcagagcacaagcattacttgattgtttctgcagtgaccaatttatttgtgaatcttgttggtgtatggttcttcagaaactatgctcggattaatcttgcttacagaaatgccgaagatatgaatcaccactctgttttcctgcatgttcttgcagattccattcgcagtgcaggtctgatattggcatcctggttattgtcaatcggggttcagaatgcagaagtcttgtgtttaggacttgtttctgttgcagtttttatgcttgttctgcctctctttagggcaactggtggtatcttgctccaaatggcacctcccagcatcccaactactgctttgaacaaatgcttgagacagatttctgctcgggaagatgtaatggaagtctcccaggctcgtttttgggaattagtgcctggttatgtggttggttcacttataatacaggtaaagaaagggacgaacgatcggccaatactagaatttgtgcatggtctataccatgatttgggtgtacaggacctcacggtgcaaactgatgatgcatgagactatcttaacacttttatgctaatagttattaccaaggattgtatacgcattaatgtcattgtttattactggtggaatagatggttaacgtgatttctcattt

SEQ ID NO: 19073 - protein, 376 aa, Glycine max
PIKSIVFSSPPPSMDSLTSINGDFGFAGGTDRRFAFSRQASFQQPHTPIDIPAHGHHYWSARDDKPSSASLQRSSLSSFVFSVFRNVRSGHRYMKRLFLLISLNVAYSTAELLFGLFTGRVGLVSDAVHLTFGCGLLTFSLFVMAASRKKADREYTYGYKRLEVLSAFTNALFLLFMSFSLAVEALHAFIQDESEHKHYLIVSAVTNLFVNLVGVWFFRNYARINLAYRNAEDMNHHSVFLHVLADSIRSAGLILASWLLSIGVQNAEVLCLGLVSVAVFMLVLPLFRATGGILLQMAPPSIPTTALNKCLRQISAREDVMEVSQARFWELVPGYVVGSLIIQVKKGTNDRPILEFVHGLYHDLGVQDLTVQTDDA

SEQ ID NO: 19074 - protein, 363 aa, Glycine max
MDSLTSINGDFGFAGGTDRRFAFSRQASFQQPHTPIDIPAHGHHYWSARDDKPSSASLQRSSLSSFVFSVFRNVRSGHRYMKRLFLLISLNVAYSTAELLFGLFTGRVGLVSDAVHLTFGCGLLTFSLFVMAASRKKADREYTYGYKRLEVLSAFTNALFLLFMSFSLAVEALHAFIQDESEHKHYLIVSAVTNLFVNLVGVWFFRNYARINLAYRNAEDMNHHSVFLHVLADSIRSAGLILASWLLSIGVQNAEVLCLGLVSVAVFMLVLPLFRATGGILLQMAPPSIPTTALNKCLRQISAREDVMEVSQARFWELVPGYVVGSLIIQVKKGTNDRPILEFVHGLYHDLGVQDLTVQTDDA

SEQ ID NO: 19075 - protein, 283 aa, Glycine max
MKRLFLLISLNVAYSTAELLFGLFTGRVGLVSDAVHLTFGCGLLTFSLFVMAASRKKADREYTYGYKRLEVLSAFTNALFLLFMSFSLAVEALHAFIQDESEHKHYLIVSAVTNLFVNLVGVWFFRNYARINLAYRNAEDMNHHSVFLHVLADSIRSAGLILASWLLSIGVQNAEVLCLGLVSVAVFMLVLPLFRATGGILLQMAPPSIPTTALNKCLRQISAREDVMEVSQARFWELVPGYVVGSLIIQVKKGTNDRPILEFVHGLYHDLGVQDLTVQTDDA

SEQ ID NO: 19076 - DNA, 1217 bp, Glycine max
atactttttgtagagaatattggttggcgagcatggaaccacacaagaagagaaagaggagaaaagaaaagtaaaaaggaaaggaaaggaaggatctttggggaattgggaggcaaggaaagaaagatgcaggattaggtgtgtggatagggagggtccagcgtagcgtactacctggcttctgttctttctacccacgacttttctctcaaaccaaccacatcattcaactattgcactgccaaggtttggacagtgttacgtgcttcacgaaacatgacctctgctcacgaccttactgataatgaagatgatggacagcagcagtcagaatcacaaattcagtccccttctgcaaatggaatttctgatccagatattagtacccagaatgtcaatgtacagtatgcaacacctggccagcttggaactgggcatgcaatggtaccacctgtgtatccatatccagatccttactatagaagcatctttgctccctatgatacacaaccttatcccccgcaagcctatagtggacagccaatggtccatcttcagttaatgggaattcagcaagctggtgttcctctgccaactgatgcagttgaggagcctgtgtttgtcaatgcaaaacaataccacggtatattaagacgtagacaatcccgtgcaaaagctgaatcagaaaataaagttataaggaataggaagccatacttgcatgaatctcgacacaagcatgcactgagaagaccaagaggatgtggtggtcggtttctgaattcaaagaaagacgagaatcagcatgatgatgtgacatcagctgacaaatcacaatccaatatcaatcttaattctaataaaaatgatcaaacctcatcagataggacatcctaaactactgagacgacgataccttagacagtggagatctatattgtatgtcacaagatcaataatacctgccttggatatcccacttttgcttcattctggctttgtacaacactgtaggttgtgtggtaggtagcgttagtatgtcgcatgatgcaggtaaaatgtaaattgaagtgattttatcaaatattgacctttggtaggggagatttttatggtgaacagcatttctttgtatttggtactgtagagaggttagagattggtattttgtttggttggatcgtatttatttaccttgctagtgacagttaaaaaag

SEQ ID NO: 19077 - protein, 206 aa, Glycine max
MTSAHDLTDNEDDGQQQSESQIQSPSANGISDPDISTQNVNVQYATPGQLGTGHAMVPPVYPYPDPYYRSIFAPYDTQPYPPQAYSGQPMVHLQLMGIQQAGVPLPTDAVEEPVFVNAKQYHGILRRRQSRAKAESENKVIRNRKPYLHESRHKHALRRPRGCGGRFLNSKKDENQHDDVTSADKSQSNINLNSNKNDQTSSDRTS

SEQ ID NO: 19078 - protein, 151 aa, Glycine max
MVPPVYPYPDPYYRSIFAPYDTQPYPPQAYSGQPMVHLQLMGIQQAGVPLPTDAVEEPVFVNAKQYHGILRRRQSRAKAESENKVIRNRKPYLHESRHKHALRRPRGCGGRFLNSKKDENQHDDVTSADKSQSNINLNSNKNDQTSSDRTS

SEQ ID NO: 19079 - protein, 117 aa, Glycine max
MVHLQLMGIQQAGVPLPTDAVEEPVFVNAKQYHGILRRRQSRAKAESENKVIRNRKPYLHESRHKHALRRPRGCGGRFLNSKKDENQHDDVTSADKSQSNINLNSNKNDQTSSDRTS

SEQ ID NO: 19080 - DNA, 1731 bp, Glycine max
taaacctcttacactacgtaatactccctttatcaaacctgatatgtctccagacccactaagtggagctttaggtgtttacaagaagaattgaataacttttcccaattactagctaaataatttttatggcatttttcataaaatatccaaatgctgaaactttctccctttggcacatccaatataattcatgcatttcatttcaacattttatcatatatttttcctaagtgattttctttctagtttcaaaagtaaccgaaatgacggatcctcctaaagaacaagaacaccaggaatccatagtttcaccttccacagatgaagctttgacatcttcgaaacgtggaaggtcacgaaaaacaaagcctaccaagttcataattaaccagaaatccaataccccatcaacaccccgaagatctaaaagaataaagcatgtggcagataaaactgccaacaatgttcccgaagtatcttcatccgaggaattattgaagggacgtacagctgaaaattcacaagtagatggcaaagaagtctcttcagatatcgatgccttagtaatctacaaaagaaaaagactacctcgaaggaggtcttctggtcaaataggcaagtccccaaagaaaactgttcctacagagcctccaactgctgcaatttcaagctctactactgcatcacctcctcatcaagatcctcctgcagctgctccagccaatgctgatgcttctcatattgaaaatacaaacactgctgagccagtattgagtaaaagccttgtcgaagaggtcgggaaagtgaaccctgctccagccaatgctcaagaacaaattgcttccagcaagggtcaagaatctccagatcaagttgactcaaaggctgatgaagtctctactgggaacaccccactcgatctagaagccattaacaaaatgattgaagatgaccctttgagtgctattgaaaatattctgacagggaaggtttccatttcttccaagactccacaatctatcactcaggcagaacaaccaaaagttcaaggctcccctgcagatgttctgtctaaagagctaaaagacttaatgcagacctttagcttaggtgattttgttactgactatgaacaaatgtcaaaggtcctacttattcttgaagagttgcagaagaatgagaagtttctttctcatgaacagcaaacattcataaaggccttcagactcttcttcaacaatgctgttactcaccgcaaagaatgtgatatggctagaataaagaaagtcgacttgaaccgagctaaagaagatatccttcgcaaactgcaagaagttaaacatacacaggaacaaatcacaatgtccatttcaaatgccgacaacagggtcaatgaaatatcttcttgtattgaacaacttgaagaacagttatacaaactgaaggaagagagggagacctttcagttggctattaaggaacgggagaaacaaagggagacattgaagaatgatagcatcttatgggctcatcagactaaggacctggtttttgatcttgcagagattgaggccaaagaaaaaatccttggacagcaacttgaagccgacaatgatgcatatgaccaatttaaagcgtcctttcctttttaatttccatttgaacaattgatagttgtaattacactgttatgttcaattcatgtgtggtttagttcatgtatgtttg

SEQ ID NO: 19081 - protein, 462 aa, Glycine max
MTDPPKEQEHQESIVSPSTDEALTSSKRGRSRKTKPTKFIINQKSNTPSTPRRSKRIKHVADKTANNVPEVSSSEELLKGRTAENSQVDGKEVSSDIDALVIYKRKRLPRRRSSGQIGKSPKKTVPTEPPTAAISSSTTASPPHQDPPAAAPANADASHIENTNTAEPVLSKSLVEEVGKVNPAPANAQEQIASSKGQESPDQVDSKADEVSTGNTPLDLEAINKMIEDDPLSAIENILTGKVSISSKTPQSITQAEQPKVQGSPADVLSKELKDLMQTFSLGDFVTDYEQMSKVLLILEELQKNEKFLSHEQQTFIKAFRLFFNNAVTHRKECDMARIKKVDLNRAKEDILRKLQEVKHTQEQITMSISNADNRVNEISSCIEQLEEQLYKLKEERETFQLAIKEREKQRETLKNDSILWAHQTKDLVFDLAEIEAKEKILGQQLEADNDAYDQFKASFPF

SEQ ID NO: 19082 - protein, 237 aa, Glycine max
MIEDDPLSAIENILTGKVSISSKTPQSITQAEQPKVQGSPADVLSKELKDLMQTFSLGDFVTDYEQMSKVLLILEELQKNEKFLSHEQQTFIKAFRLFFNNAVTHRKECDMARIKKVDLNRAKEDILRKLQEVKHTQEQITMSISNADNRVNEISSCIEQLEEQLYKLKEERETFQLAIKEREKQRETLKNDSILWAHQTKDLVFDLAEIEAKEKILGQQLEADNDAYDQFKASFPF

SEQ ID NO: 19083 - DNA, 1214 bp, Glycine max
aatttaagtgaagatacatgcattatgttggcaagtcttcttgacacagaagcgattggtgaagctctcaccataatggaagaactgacagggaattggtatgaaaaagctaacattgcagcttccagtgtgctcacttctgtttcaaagatccttgattcaggtaatgaagagttccaacgaaaagctattaaaataatgtataatttttcatccaatggtcaaatttgtccctacatggtgtctctcgggtgcatccctaaattactgccattttttgaagacagaacccttttgagagacagtatacatatcttgaaaaacctttgtgatactgaagagggtagggttactgttgtagaaacaaaaggatgcatatcttctgttgttgaaatacttgggactggcagtgatgaggaaaaagaacctgcactgattattcttctccctttatgctctcaacgtgtggaatactgtcagttggttgtgtctgaggggattattccttctcttgtcaacatctccaacaaaggaagtgatatggcaaaggcttatgcattagaattactccgtcttttgaaggacgacgagtttcagtatgaagattgttgtgagccaaatctcggtgcctctcaagaacctaacaatcactatcaagaaaagaaatcatcaaagaaaccgtcaattttgaagaaactatcactgttctcaaaatccagttcagttgcaccaaaaaccaaaagatgaaactgaactcccatgcattttgaccttttgtatatatcctccagaacctttttatgtgcttggtaagagacattttgggttgctggatggcagataggatttttagatagggtcttttaatctttgtggtgggtatagtctactacataatcttgcacagtaactgctgactgtataaagtatagttctgttttatggtgtatagttattttgacatgccaagtcaggtatggagaaaatggtagagaagttctcctttttctcctctcctctcctctcctctcaagatgtcaaagggatgtttgatgcctgtgacttggtggtggtcacggattctagttataggaacagccttagttggtaaggcattgagctgcctttctatttgttattgtatattgaacaatatattttgaacagtgatttcaggggagatattttgaatggtttataattacattgttcac

SEQ ID NO: 19084 - protein, 248 aa, Glycine max
NLSEDTCIMLASLLDTEAIGEALTIMEELTGNWYEKANIAASSVLTSVSKILDSGNEEFQRKAIKIMYNFSSNGQICPYMVSLGCIPKLLPFFEDRTLLRDSIHILKNLCDTEEGRVTVVETKGCISSVVEILGTGSDEEKEPALIILLPLCSQRVEYCQLVVSEGIIPSLVNISNKGSDMAKAYALELLRLLKDDEFQYEDCCEPNLGASQEPNNHYQEKKSSKKPSILKKLSLFSKSSSVAPKTKR

SEQ ID NO: 19085 - protein, 240 aa, Glycine max
MLASLLDTEAIGEALTIMEELTGNWYEKANIAASSVLTSVSKILDSGNEEFQRKAIKIMYNFSSNGQICPYMVSLGCIPKLLPFFEDRTLLRDSIHILKNLCDTEEGRVTVVETKGCISSVVEILGTGSDEEKEPALIILLPLCSQRVEYCQLVVSEGIIPSLVNISNKGSDMAKAYALELLRLLKDDEFQYEDCCEPNLGASQEPNNHYQEKKSSKKPSILKKLSLFSKSSSVAPKTKR

SEQ ID NO: 19086 - protein, 223 aa, Glycine max
MEELTGNWYEKANIAASSVLTSVSKILDSGNEEFQRKAIKIMYNFSSNGQICPYMVSLGCIPKLLPFFEDRTLLRDSIHILKNLCDTEEGRVTVVETKGCISSVVEILGTGSDEEKEPALIILLPLCSQRVEYCQLVVSEGIIPSLVNISNKGSDMAKAYALELLRLLKDDEFQYEDCCEPNLGASQEPNNHYQEKKSSKKPSILKKLSLFSKSSSVAPKTKR

SEQ ID NO: 19087 - DNA, 1614 bp, Glycine max
aaattattgagctcctaagagcaaaaggcggtccaatgtcaattgcttccctgccaatggcatactacgataaatataaaaaggtactgcaagcagatggttatttaactgagagtcagaggcatggtaagtctggctatagtttgacaaagcttcttgcacgactgaaaaatagtattcagctaataggcagacctcatgggcagcattcagtggttctggcagaagattctcccacacaaatgcaaaagggagattttgctcgaaatatcagtgcttcataccaaatatatctgacgttcccagctgacagcactttcacagaggatgatgtctcaaactacttcaacacttttggacctgttgcagatgtcagaattccaaaccagcagagaaggatgtttggatttgtgacatttgttcattcagaaactgtcaaaagtgttttggataaggggaatccccattgtgttcggggttctcgggtgcttgtgaaaccttaccgggagaaggcaaaggttaatgaaaggaagtacacagatagaattgagcaccctatttgttattcaccacactatgtagatatggacgctgaacttaactcaattccaagaagttttgggagccatggatccattaggagacacctacaactaattgaacaggaagagcaggagcaagctcttgaacgtcagagaagtcttgcacagctgcattttgcccaaaaatctttcttcagttcacctcattttggcttctccatggatgagtcaaggatttcagatgatcacttcaatttccagccagcagaagaatctttcagttttccactgcatgtcaaatccaggcatacagactccaattactctgatgaggacagcaatgaaggactcaatctcccggacagtccatttgcatttccactagatagatagtgggatgtaaacattcatagtttcagacacatacaagaaatatagagttcaaacagatccaggccaatggtagcagctttcttttgatacataatacagttcttctattgaactatttctcaattagtacagcaatttagtcaaaattccagcaagtacatacacgctgaagaagagacatgggaagaatttcctcttaacaattgggattggtggcattaacagaagtttaatgatacatgtaagaaggttatagtttttaattacagacaggtggcaaaaggtttgaattttagatcgtatagttgggttttattcatgaagtcatcggtggatgaaaagaactaagcgtattattgtacacagttttaattagattgaaggacctcttagaatccgtgtctactcactgtgaaccgctttaataatggttttatagcaagtccactttatatgtattttgtattctttaatgcccaattctctgtcattgtataaaaaactaacgtatcccagtaagcgaaggtacaagaaagggtcattgtactcagtcttacccttgcatatgcaaagcggaaccaacaaggttgtgtcaaagtctgtcactatccttgaaaagttgtgtgaagctctttggagtaagtaatcaaaatgttttcgttggaaacgccttaaaaag

SEQ ID NO: 19088 - protein, 310 aa, Glycine max
IIELLRAKGGPMSIASLPMAYYDKYKKVLQADGYLTESQRHGKSGYSLTKLLARLKNSIQLIGRPHGQHSVVLAEDSPTQMQKGDFARNISASYQIYLTFPADSTFTEDDVSNYFNTFGPVADVRIPNQQRRMFGFVTFVHSETVKSVLDKGNPHCVRGSRVLVKPYREKAKVNERKYTDRIEHPICYSPHYVDMDAELNSIPRSFGSHGSIRRHLQLIEQEEQEQALERQRSLAQLHFAQKSFFSSPHFGFSMDESRISDDHFNFQPAEESFSFPLHVKSRHTDSNYSDEDSNEGLNLPDSPFAFPLDR

SEQ ID NO: 19089 - protein, 299 aa, Glycine max
MSIASLPMAYYDKYKKVLQADGYLTESQRHGKSGYSLTKLLARLKNSIQLIGRPHGQHSVVLAEDSPTQMQKGDFARNISASYQIYLTFPADSTFTEDDVSNYFNTFGPVADVRIPNQQRRMFGFVTFVHSETVKSVLDKGNPHCVRGSRVLVKPYREKAKVNERKYTDRIEHPICYSPHYVDMDAELNSIPRSFGSHGSIRRHLQLIEQEEQEQALERQRSLAQLHFAQKSFFSSPHFGFSMDESRISDDHFNFQPAEESFSFPLHVKSRHTDSNYSDEDSNEGLNLPDSPFAFPLDR

SEQ ID NO: 19090 - protein, 292 aa, Glycine max
MAYYDKYKKVLQADGYLTESQRHGKSGYSLTKLLARLKNSIQLIGRPHGQHSVVLAEDSPTQMQKGDFARNISASYQIYLTFPADSTFTEDDVSNYFNTFGPVADVRIPNQQRRMFGFVTFVHSETVKSVLDKGNPHCVRGSRVLVKPYREKAKVNERKYTDRIEHPICYSPHYVDMDAELNSIPRSFGSHGSIRRHLQLIEQEEQEQALERQRSLAQLHFAQKSFFSSPHFGFSMDESRISDDHFNFQPAEESFSFPLHVKSRHTDSNYSDEDSNEGLNLPDSPFAFPLDR

SEQ ID NO: 19091 - DNA, 1449 bp, Glycine max
aacatagactagtgcggtgcattccctcgtttaccatgctttcctaagagaaagagaaaagtaaaacccctcactactgatagattttcattcctccgaggaaaaaaaaaacatgtcggatgctttgatcaatggattggccggagctggaggagggatcattgctcagctcatcacatacccacttcaaactgtaaacactcgccaacaaaccgagcgtgatccgaagaaagacacgaggagtcaaggggccctcgaacgaatgtgccaggttgtaaaagaagaggggtgggaacggttgtatggaggcttgatgccatcggtagtgggtacagctgcgtctcagggagtttactattatttctatcaaatattcaggaacaaagctgaagcagctgcactacaacaaaagaaaatgggcgttggtgatggatcagttgggatgctctcctctcttgttgttgctgctttatctgggtgtgttaacgtgctcttgacaaatcccatatgggtagttgttacgcgtatgcagacacatagaaaagagtcgaacagaactccagctgatcagggtttgtttgttgccactgagcagccaattctttctgcagttgagcctcttccttatggaactagtcatgtgattcaagaaatctacggtgaagctggaatttggggtttctggaaaggtgtattaccaacattaatcatggtaagcaatccttccatacagttcatgctgtatgaagccatgttggcaaagttaagaaaaagacgtgcttggagtaagaagggtagcaacggggtaactgctttagagatatttcttattggagctttagctaagcttggagctactgttgtaacttatccgatcctagttgtgaaggcaaggctccaagctagacaggataaaactggagacaggagacaccattacaaaggtacatgggatgctattattaaaatgatccgctatgaggggtttaatgggttttacaaaggcatgggcacaaaaatcgtacaaagtgtgctggctgctgctgttttgttcatgatgaaggaagaattagttaggggggttcgtttcttgcttgccaaggatgctgtaaagccaaagaatctgtgattggaggccactagcttgatcaagatttcatgtaccatcttcagttagcaaattagttcaaatggtaggggaattagagtgattcaaacaacatattgaaatatggctttaactgtatcttgattattttcatcaggttagtttccatagaggaaattcatgccaaaaattacacactgggttcattggtttgtttcatgaacaagacagggttgtagatttgaagtatgctgctgaaacaaatattctttttacgaacgaatatcactatctgatttcattggcagctaaagatttagatcaaaatttaattcacgaat

SEQ ID NO: 19092 - protein, 338 aa, Glycine max; identical to SEQ ID NO: 18870

SEQ ID NO: 19093 - protein, 288 aa, Glycine max; identical to SEQ ID NO: 18871

SEQ ID NO: 19094 - protein, 271 aa, Glycine max; identical to SEQ ID NO: 18872

SEQ ID NO: 19095 - DNA, 922 bp, Glycine max
atactttcttcggtgatagaaagcacatagaagagaaagaaagaaaacaaagaggagaaagaaagtagttgaggaagatacaaacaatttttgcagattgttgagaatgcctttcaagaagcctcatcacacctcagacaagaactacataacaggggacgacggaggcaagttcgagatacaacctagaggactcaacattgtgtggggaaatgattctcgatactggaaaattccagaacaaggtcctgcggagctgatccaagtttcatggttggaggtatccggcgtggtaaacttaccaggtgtcaagaaatatagggttgaattcgaagtgagagttaaagacgatgggttcggttggagtggcacggacgtgctagtgatggctaagattgggaaaacgggaaaatatacgtataaggtgacgaaactaaaccctggtgaaaccttgaatattccaaaatcaactgacccacttgagattcaagtgaacaagcaatctgaggaccttcactttggattatatgaagtgtggagcggaaaatggaagggaggccttgaaattgtcagagccctcatcaaacctttaacttaattgcatgcaactcatcataccatatatcgttttcttcatttgccaactttgacaagtggattaattgtttgtggtttaattattattattactttgtatttggcgttgagtactactgtatgatatatagatgataatatgtgtccatgctctgcactagctgagacctggattattccaacttgcaagtgctgtgagaataacagtgtgttctggtcatgcatgcatgctgagagaaacaatgtatgtcggtcttaaaaagttcactgtatttgcataaactatatgtactaaataatggatttacaagtgtgttttttttag

SEQ ID NO: 19096 - protein, 163 aa, Glycine max
MPFKKPHHTSDKNYITGDDGGKFEIQPRGLNIVWGNDSRYWKIPEQGPAELIQVSWLEVSGVVNLPGVKKYRVEFEVRVKDDGFGWSGTDVLVMAKIGKTGKYTYKVTKLNPGETLNIPKSTDPLEIQVNKQSEDLHFGLYEVWSGKWKGGLEIVRALIKPLT

SEQ ID NO: 19097 - DNA, 1155 bp, Glycine max
aaaacaacacaccttcagccacggaatggggagacatgactttgacaaccgcgttttcttgttcgctcgccgctgcttctctctccaccgccgccagtttccgccggaataaatgcaccaccagcaagatttttcattcctcttccacgtgcatgccctctttcttgcatgatcatcactaccactctttcttattgcgagttgccaatgatgctgatagaagtgaagtgtcatctgatactgcaatcaagacatcgtattcagaagccgataagatggttgatggtatggactttggtgagctttgcaatgagtttgagtgcatcagcagtcccttggtagaatccactgcaagacaacttgcacgagatatacttgagctaagggagggaaatcgagcacttggaatctttgctgtttctgtcgcatacaaggatcctattaggagctttaccggtcgtgaaaagtataaaagacgactatgggcaaccggtgcactagacaacccatctgtgactgtgcaggaaatggtgatgctgtcaaccagtgttttaagtatcaagtggacaataagagggaaaccaaaatctgtgttaggaggagatctgataattagagttactttcaaatttactcttaaccaaattagtggccaagtcattgagcatgaagaattctgggacttatcagcttcatctgctagtgctcaggcatttttctggacatcacgtgctctctttgctgctgttgaatctgtcaaagatttgggtgacagtgctaagaatttgagtagtaaaatgtcaaccaaaaaagagaacttggagatgtatccagatccttcaggtgatccaaccaagttcttccagagggacgacagttttcaacaggatgcataccagattgcactactcctggcagttatttatttggtggtacaatttctaaggacaactttgtaaagctagcctgccattttatcaactgaacttgtatgtctttgttctccaagagttatcattataaagtgtgactatcagctcataatcatcaggtgtcatcaggttgttttgtcaaagtaaatatgttcacatttgtaagtgtacctataaactgtgacgtttccttcttttgatgccacaacctcaaaggaccact

SEQ ID NO: 19098 - protein, 318 aa, Glycine max
NNTPSATEWGDMTLTTAFSCSLAAASLSTAASFRRNKCTTSKIFHSSSTCMPSFLHDHHYHSFLLRVANDADRSEVSSDTAIKTSYSEADKMVDGMDFGELCNEFECISSPLVESTARQLARDILELREGNRALGIFAVSVAYKDPIRSFTGREKYKRRLWATGALDNPSVTVQEMVMLSTSVLSIKWTIRGKPKSVLGGDLIIRVTFKFTLNQISGQVIEHEEFWDLSASSASAQAFFWTSRALFAAVESVKDLGDSAKNLSSKMSTKKENLEMYPDPSGDPTKFFQRDDSFQQDAYQIALLLAVIYLVVQFLRTTL

SEQ ID NO: 19099 - protein, 307 aa, Glycine max
MTLTTAFSCSLAAASLSTAASFRRNKCTTSKIFHSSSTCMPSFLHDHHYHSFLLRVANDADRSEVSSDTAIKTSYSEADKMVDGMDFGELCNEFECISSPLVESTARQLARDILELREGNRALGIFAVSVAYKDPIRSFTGREKYKRRLWATGALDNPSVTVQEMVMLSTSVLSIKWTIRGKPKSVLGGDLIIRVTFKFTLNQISGQVIEHEEFWDLSASSASAQAFFWTSRALFAAVESVKDLGDSAKNLSSKMSTKKENLEMYPDPSGDPTKFFQRDDSFQQDAYQIALLLAVIYLVVQFLRTTL

SEQ ID NO: 19100 - protein, 268 aa, Glycine max
MPSFLHDHHYHSFLLRVANDADRSEVSSDTAIKTSYSEADKMVDGMDFGELCNEFECISSPLVESTARQLARDILELREGNRALGIFAVSVAYKDPIRSFTGREKYKRRLWATGALDNPSVTVQEMVMLSTSVLSIKWTIRGKPKSVLGGDLIIRVTFKFTLNQISGQVIEHEEFWDLSASSASAQAFFWTSRALFAAVESVKDLGDSAKNLSSKMSTKKENLEMYPDPSGDPTKFFQRDDSFQQDAYQIALLLAVIYLVVQFLRTTL

SEQ ID NO: 19101 - DNA, 1320 bp, Glycine max
agtaacctacaggacaaaagtaattctccagatgctctggctttgacgggaagtggaattttgaatgacagcaagttgcctcctgagtcagcaatatctccaacatcagagacatgtttaaattcatctgttgatgttgttgatacaactacatccaaggatttaaaaaatgttgaatgcaaggatgagagaatcccagaaccccattgtgaagacaatggatctgatattgtttttgatagtgatgacgattgttttttagacaacattgacttggataccggggagagaagccatgaacagtgcaaaaagagcaagtggctcaggaatttctttgataaattaaatgcactcaccaatgaggagataagttcattagacaggcagtggcattgcccagcatgccaagggggttctggtgctattgattggtacaaagggttgcagccccttttggatcattccagaacaatacaaacaacgagggcaagactgcaccggatgtttgctgaaactttggaggaagagtgtttcaggagaagagctccattaacaacggttggcgaagtccacaatatatgggagggtcttgataagaaagtcaaggatcatgaaatagtttggcccccaatggttattatcatgaatacaagatatgagcaggacgaaagtaataagtttcacctcattgaattcaattgtagtggaatggaatggggaaccaagaactcgtcgattgcttcagtgactatgctgcattgaaggctcgacactcgtatggtccacaagggcaccgagggatgagtgctttaatttttgaggaaaccacggcaggttatctagaagctgtgcggctgcacaagcattttaaagagcaaggaagagatagggaagcttgggattgctgtcaaaatccatttctcccaggtgggaagcgccaactttatggttacttggcttctaaagaagatttggatattttcaacaaacactccggaggaaagacaaaactgaagtttgaaatgagatcatatcaagagatggttgagagaaagataaaacatattaatgatgatagtcggaagcttgactattataagagcatggtagccaaagaacaaatcaaatcacaagtcggtgcagactctttatgtaaatcaagtgagaagttaagcatgacaactgaaaaaaaccgtgttgaccaacaggacaaggagatggatgcactagaaaaaaatttccagagccaaatccaagacattcaacaagccatagctgcaaaggaggataagtttgtgaaattacagctgcaggcaatgc

SEQ ID NO: 19102 - protein, 253 aa, Glycine max
SNLQDKSNSPDALALTGSGILNDSKLPPESAISPTSETCLNSSVDVVDTTTSKDLKNVECKDERIPEPHCEDNGSDIVFDSDDDCFLDNIDLDTGERSHEQCKKSKWLRNFFDKLNALTNEEISSLDRQWHCPACQGGSGAIDWYKGLQPLLDHSRTIQTTRARLHRMFAETLEEECFRRRAPLTTVGEVHNIWEGLDKKVKDHEIVWPPMVIIMNTRYEQDESNKFHLIEFNCSGMEWGTKNSSIASVTMLH

SEQ ID NO: 19103 - protein, 202 aa, Glycine max
MGNQELVDCFSDYAALKARHSYGPQGHRGMSALIFEETTAGYLEAVRLHKHFKEQGRDREAWDCCQNPFLPGGKRQLYGYLASKEDLDIFNKHSGGKTKLKFEMRSYQEMVERKIKHINDDSRKLDYYKSMVAKEQIKSQVGADSLCKSSEKLSMTTEKNRVDQQDKEMDALEKNFQSQIQDIQQAIAAKEDKFVKLQLQAM

SEQ ID NO: 19104 - protein, 173 aa, Glycine max
MSALIFEETTAGYLEAVRLHKHFKEQGRDREAWDCCQNPFLPGGKRQLYGYLASKEDLDIFNKHSGGKTKLKFEMRSYQEMVERKIKHINDDSRKLDYYKSMVAKEQIKSQVGADSLCKSSEKLSMTTEKNRVDQQDKEMDALEKNFQSQIQDIQQAIAAKEDKFVKLQLQAM

SEQ ID NO: 19105 - DNA, 1531 bp, Glycine max
gaataaatagtaactctaatctaacacgctttctctgctgtgtctttgcagtgagtttcattgcaaagctacttttctctgtttggggataaataaaatgggttgcttttcatgtttcgattcgagttccaaggaggatcacaatctccgtcctcagcaccaacccaatcaacctctcccttctcagatttccagattgccctctggagcagacaagttacggtccagaagtaatggaggttccaaaagagaactgcaacagcctcctcccaccgtccaaattgctgctcaaacatttactttccgtgaacttgccgctgcaactaaaaactttagaccagagtcctttgttggggaaggtggttttggaagggtctacaaaggcaggcttgaaaccactgctcagattgttgctgtcaaacagttagacaaaaatggtcttcagggtaatcgggaattccttgtagaggttctcatgctcagtcttctacatcaccctaaccttgtcaatctcattggatactgtgcggatggggatcaacgcctcctcgtttatgaatttatgcctttgggatcattggaagatcaccttcatgatcttccccctgataaggaaccactagattggaacactagaatgaaaattgctgttggtgctgcaaaaggattagaataccttcacgataaggcaaatcctcctgtcatctacagagacttcaagtcatctaacatattacttgatgaaggataccacccaaaactttctgactttggtcttgcgaagcttggtcctgttggtgacaaatcacatgtttctacccgtgtcatgggaacttatggttactgtgctcctgagtatgctatgactggacagctgactgtgaagtctgatgtatatagttttggggtggtcttcttagagctgattactggccgtaaagcaattgacagcacccagccgcagggagaacagaaccttgtcacatgggcacgtccactttttaatgaccgcaggaagttttcaaagttggctgatcccaggctgcaggggcgatttcccatgcggggtctttaccaggctcttgctgtggcatcaatgtgcattcaagaatcagctgcaacgcgtcctctaattggagatgtggtgacagccctctcttatctggccaaccaggcatatgaccccaatggttatagggggtctagtgatgataaaaggaacagagatgataaaggtggaagaatatccaaaaatgatgaagctgggggatctggacgcagatgggacttggaaggatccgagaaagatgactccccacgagaaactgcaaggattttaaacagagatctagatagagaacgagctgtggctgaagccaagatgtggggagagaacttgagacaaaaaagaaaacaaagtttgcagcagggcagtcttgatgcttaattttctgccttgaggctatggaagatggaagaaaatatggggagcttatctagagaaacaactcaaacagccagccatttaggc

SEQ ID NO: 19106 - protein, 449 aa, Glycine max
MGCFSCFDSSSKEDHNLRPQHQPNQPLPSQISRLPSGADKLRSRSNGGSKRELQQPPPTVQIAAQTFTFRELAAATKNFRPESFVGEGGFGRVYKGRLETTAQIVAVKQLDKNGLQGNREFLVEVLMLSLLHHPNLVNLIGYCADGDQRLLVYEFMPLGSLEDHLHDLPPDKEPLDWNTRMKIAVGAAKGLEYLHDKANPPVIYRDFKSSNILLDEGYHPKLSDFGLAKLGPVGDKSHVSTRVMGTYGYCAPEYAMTGQLTVKSDVYSFGVVFLELITGRKAIDSTQPQGEQNLVTWARPLFNDRRKFSKLADPRLQGRFPMRGLYQALAVASMCIQESAATRPLIGDVVTALSYLANQAYDPNGYRGSSDDKRNRDDKGGRISKNDEAGGSGRRWDLEGSEKDDSPRETARILNRDLDRERAVAEAKMWGENLRQKRKQSLQQGSLDA

SEQ ID NO: 19107 - protein, 323 aa, Glycine max
MLSLLHHPNLVNLIGYCADGDQRLLVYEFMPLGSLEDHLHDLPPDKEPLDWNTRMKIAVGAAKGLEYLHDKANPPVIYRDFKSSNILLDEGYHPKLSDFGLAKLGPVGDKSHVSTRVMGTYGYCAPEYAMTGQLTVKSDVYSFGVVFLELITGRKAIDSTQPQGEQNLVTWARPLFNDRRKFSKLADPRLQGRFPMRGLYQALAVASMCIQESAATRPLIGDVVTALSYLANQAYDPNGYRGSSDDKRNRDDKGGRISKNDEAGGSGRRWDLEGSEKDDSPRETARILNRDLDRERAVAEAKMWGENLRQKRKQSLQQGSLDA

SEQ ID NO: 19108 - protein, 294 aa, Glycine max
MPLGSLEDHLHDLPPDKEPLDWNTRMKIAVGAAKGLEYLHDKANPPVIYRDFKSSNILLDEGYHPKLSDFGLAKLGPVGDKSHVSTRVMGTYGYCAPEYAMTGQLTVKSDVYSFGVVFLELITGRKAIDSTQPQGEQNLVTWARPLFNDRRKFSKLADPRLQGRFPMRGLYQALAVASMCIQESAATRPLIGDVVTALSYLANQAYDPNGYRGSSDDKRNRDDKGGRISKNDEAGGSGRRWDLEGSEKDDSPRETARILNRDLDRERAVAEAKMWGENLRQKRKQSLQQGSLDA

SEQ ID NO: 19109 - DNA, 749 bp, Glycine max
tatttttcatgattttaataatcatcgaccaatgtagtctatcaaaatcaacattatcagtcaatttgatttctggcgttaccaaatcagttaactaaattatgaatttgcactttgtgtgtatacaggtattcacacaaccagttttccagcttgtggaaacttgggttgcgaagcgttggcctgaaagcaacttcatgggaaaagaatatcgtgttggcaagttcagattcaatggattcaggatgatatggaggacagtgtacgtgattttcacagcagtggttgctatgatacttcccttcttcaacagcattgtgggtttgcttggagctatttccttctttcctttgacagtgtattttccaacagagatgtatctggtgcaggctaaagtgcccaagttttctctggtctggattggggtcaaaattctaagtggcttctgcttgattgtcactcttgttgctgcagctggatcaatccaaggaatcatcgcagaccttaaaatctatgagcccttcaagtaaatatcctttgtgtagtttagctctttggatgaacaatggtttgtggctaagtttgtggtcattattgatcagttgtttggataaactttctttcaagtgttttcataatatatacttttataatggatcgataagaatgcttttagatcctagaaaaattttaaattgctttttgtcctcaacttctataatcaataatagttttcgtttctgtatttc

SEQ ID NO: 19110 - protein, 142 aa, Glycine max
MNLHFVCIQVFTQPVFQLVETWVAKRWPESNFMGKEYRVGKFRFNGFRMIWRTVYVIFTAVVAMILPFFNSIVGLLGAISFFPLTVYFPTEMYLVQAKVPKFSLVWIGVKILSGFCLIVTLVAAAGSIQGIIADLKIYEPFK

SEQ ID NO: 19111 - protein, 110 aa, Glycine max
MGKEYRVGKFRFNGFRMIWRTVYVIFTAVVAMILPFFNSIVGLLGAISFFPLTVYFPTEMYLVQAKVPKFSLVWIGVKILSGFCLIVTLVAAAGSIQGIIADLKIYEPFK

SEQ ID NO: 19112 - protein, 94 aa, Glycine max
MIWRTVYVIFTAVVAMILPFFNSIVGLLGAISFFPLTVYFPTEMYLVQAKVPKFSLVWIGVKILSGFCLIVTLVAAAGSIQGIIADLKIYEPFK

SEQ ID NO: 19113 - DNA, 1597 bp, Glycine max
gaagaaacaagcttcacttccaccccttaatggcccgaggcaaggcgaagaagaaggaagaaggtgaagacaccgatgtcgcaaacccagaaacgttagagcggaagaggctgaaatccttggccatttccaacaagattctctcggagacccctgcacggagctccgttcacctcaacccttcctccgtcgtggccaagcaccacggcaaagatatcatcaagaagtctcagaggaagagctgcaggtacctcttctcgttccccgggctaattgctcccatcgccggtggcaagatcggtgacctcaaggacttgggcaccaaaaaccccgttctctacctcgatttcccacagggtcaaatgaagttattcgggaccattgtatatccaaagaacagatacttgactctacagttccctaaaggtggaaagagtgtaatgtgtgaggattattttgataacatgattgtattttcggatgcatggtggatcgggaggaaagatgaaaacccagaagaatccaagctggaatttcctaatgaattgtatgagggacaccaagctgagtatgactttaaagggggtgcgggtgcaggtgcagcttctgtagttaatcaaggtgttcccagaaccaacattcaacgtgtagagcaagagtcaccaaagacacccaccgaagatgatttgtcagacaatgaaatcaatttaaaagatacaaaggaattggttccggtccgacattcaacaagaactgcaaaaaaatcatacaaatttgctgaaatttcttccggtgatgattctggtgaaaacagccctgagctttctgatgatgaagagaaagtgatacagaaaaaaactgtagtttttgacctcgatgatgaggatgatgcaccagtagatcaacctgccaagataaatactgagtctgcttctcgatcaaaaagtaaagaagtgtctcaatctgcttcagccagtgcatctactgaagttaagtccagtaatcgtggatcacttgttcaggctactatatccacattattcaagaaagtggaagaaaagacaactccaagaagttcaaggaaatccccatcatcaaaagcttatggccagaagtcacagcctgctggttcaaaaagaaagattgatctggatgaaggatccaagaaaagggcaagaaagaccacggacaaagatcctggtaaaaaaatcaaggcaaaaagcaaggaagacgatgttgaagatggtgatgatgatggtgatgacattgaagaattttcaaatgcttcagaggatgctaatgaaagtgatgaagactggactgcttgagtgtgtaatctaagttgtggctgctagtcacaagaaatgacaaggcagggtcatgcaagtgatgtgattataccctttatctctctctacactaagatagaacgtaacgacttggttttgcataccatgtggttatgatgggaatatgagaatagagataataccatgtggttatgatggagaaagaatgaggaagttgtccaatgtttaccaatccaatcttcatctccaagttgggagtcattaaatgtatacttttaatttcgatt

SEQ ID NO: 19114 - protein, 441 aa, Glycine max
RNKLHFHPLMARGKAKKKEEGEDTDVANPETLERKRLKSLAISNKILSETPARSSVHLNPSSVVAKHHGKDIIKKSQRKSCRYLFSFPGLIAPIAGGKIGDLKDLGTKNPVLYLDFPQGQMKLFGTIVYPKNRYLTLQFPKGGKSVMCEDYFDNMIVFSDAWWIGRKDENPEESKLEFPNELYEGHQAEYDFKGGAGAGAASVVNQGVPRTNIQRVEQESPKTPTEDDLSDNEINLKDTKELVPVRHSTRTAKKSYKFAEISSGDDSGENSPELSDDEEKVIQKKTVVFDLDDEDDAPVDQPAKINTESASRSKSKEVSQSASASASTEVKSSNRGSLVQATISTLFKKVEEKTTPRSSRKSPSSKAYGQKSQPAGSKRKIDLDEGSKKRARKTTDKDPGKKIKAKSKEDDVEDGDDDGDDIEEFSNASEDANESDEDWTA

SEQ ID NO: 19115 - protein, 432 aa, Glycine max
MARGKAKKKEEGEDTDVANPETLERKRLKSLAISNKILSETPARSSVHLNPSSVVAKHHGKDIIKKSQRKSCRYLFSFPGLIAPIAGGKIGDLKDLGTKNPVLYLDFPQGQMKLFGTIVYPKNRYLTLQFPKGGKSVMCEDYFDNMIVFSDAWWIGRKDENPEESKLEFPNELYEGHQAEYDFKGGAGAGAASVVNQGVPRTNIQRVEQESPKTPTEDDLSDNEINLKDTKELVPVRHSTRTAKKSYKFAEISSGDDSGENSPELSDDEEKVIQKKTVVFDLDDEDDAPVDQPAKINTESASRSKSKEVSQSASASASTEVKSSNRGSLVQATISTLFKKVEEKTTPRSSRKSPSSKAYGQKSQPAGSKRKIDLDEGSKKRARKTTDKDPGKKIKAKSKEDDVEDGDDDGDDIEEFSNASEDANESDEDWTA

SEQ ID NO: 19116 - protein, 321 aa, Glycine max
MKLFGTIVYPKNRYLTLQFPKGGKSVMCEDYFDNMIVFSDAWWIGRKDENPEESKLEFPNELYEGHQAEYDFKGGAGAGAASVVNQGVPRTNIQRVEQESPKTPTEDDLSDNEINLKDTKELVPVRHSTRTAKKSYKFAEISSGDDSGENSPELSDDEEKVIQKKTVVFDLDDEDDAPVDQPAKINTESASRSKSKEVSQSASASASTEVKSSNRGSLVQATISTLFKKVEEKTTPRSSRKSPSSKAYGQKSQPAGSKRKIDLDEGSKKRARKTTDKDPGKKIKAKSKEDDVEDGDDDGDDIEEFSNASEDANESDEDWTA

SEQ ID NO: 19117 - DNA, 1246 bp, Glycine max
ttctctgttctctctcatctcatcggatcgatcaagcatcagggagctttgagggttgattctctggtgtagtagcaatcagcacaatagaaaatgttttttgacggatatggatatcatgggacatcatttgagcagatatatcgatgctacccagcttcctttattgaaaagccccaaatcgaaagtggtgacaaaattatcatgcctccatcagcccttgaccgtctagcatctctgcatattgattacccaatgttgtttgaactccgtaatgatgctgccgagcgggtttctcattgtggggttctggagttcattgctgaggaaggcatgatatacatgccatactggatgatggagaacatgcttttacaagagggggacattgtcaaagtgaaaaatgtgacacttccaaaggggacatatgttaagttacagccccacacaaaagactttttggatatttccaatccaaaagctatcttagaaacaacattgaggaatttttcctgcttgactactggagatagcattatggtggcttacaacaacaagaaatattacatagatattatagaaactaagcctgacactgccataagcataattgagactgactgtgaggtggactttgctcctcccttggattacaaggaacctgaaaaacccactgcacccctttctgctgggaaggcagcagtggctgctgaggtgatccctgctgaagatgagcccaagttcaacccattttctggaactgggagacgcttggatggaaaacctttgaattatcagcctcctccagtttcctcttcagggtctaaggaccagaaacctgatgttgtcaatttgcagtcttctacagcttctagttcacaaagtaatgctcgtcaatctcagggcaagcttgtgtttgggtcaaatgctaaccgtactaaagagacaggaaaggcgaaagagtcaaaaccagagccacctaaagagaaagaagagccgaaatttcaacctttttcagggaagaagtattctttacggggttaaattaaaatggccttttacttttaaagcaagttactttgttgatctatgcatggatcgatgtctattgcaaaaacttttatttatttattgtattataagcagtagatagaccagtagatgccacagaaaatacctttgattacttgtgaacgaagctcttgacgagggttgcaatcgtgtctgaatggtaacatgctgtgtg

SEQ ID NO: 19118 - protein, 316 aa, Glycine max
MFFDGYGYHGTSFEQIYRCYPASFIEKPQIESGDKIIMPPSALDRLASLHIDYPMLFELRNDAAERVSHCGVLEFIAEEGMIYMPYWMMENMLLQEGDIVKVKNVTLPKGTYVKLQPHTKDFLDISNPKAILETTLRNFSCLTTGDSIMVAYNNKKYYIDIIETKPDTAISIIETDCEVDFAPPLDYKEPEKPTAPLSAGKAAVAAEVIPAEDEPKFNPFSGTGRRLDGKPLNYQPPPVSSSGSKDQKPDVVNLQSSTASSSQSNARQSQGKLVFGSNANRTKETGKAKESKPEPPKEKEEPKFQPFSGKKYSLRG

SEQ ID NO: 19119 - protein, 279 aa, Glycine max
MPPSALDRLASLHIDYPMLFELRNDAAERVSHCGVLEFIAEEGMIYMPYWMMENMLLQEGDIVKVKNVTLPKGTYVKLQPHTKDFLDISNPKAILETTLRNFSCLTTGDSIMVAYNNKKYYIDIIETKPDTAISIIETDCEVDFAPPLDYKEPEKPTAPLSAGKAAVAAEVIPAEDEPKFNPFSGTGRRLDGKPLNYQPPPVSSSGSKDQKPDVVNLQSSTASSSQSNARQSQGKLVFGSNANRTKETGKAKESKPEPPKEKEEPKFQPFSGKKYSLRG

SEQ ID NO: 19120 - protein, 262 aa, Glycine max
MLFELRNDAAERVSHCGVLEFIAEEGMIYMPYWMMENMLLQEGDIVKVKNVTLPKGTYVKLQPHTKDFLDISNPKAILETTLRNFSCLTTGDSIMVAYNNKKYYIDIIETKPDTAISIIETDCEVDFAPPLDYKEPEKPTAPLSAGKAAVAAEVIPAEDEPKFNPFSGTGRRLDGKPLNYQPPPVSSSGSKDQKPDVVNLQSSTASSSQSNARQSQGKLVFGSNANRTKETGKAKESKPEPPKEKEEPKFQPFSGKKYSLRG

SEQ ID NO: 19121 - DNA, 1780 bp, Glycine max
aaagcagttaccagttgaagaagtagagacaacattgcccactgattcctttgtccaaggtgatactgatcaaaaaccgaagcaacaaacactgcaccatgatgaatcagaagttattgatattgctcagaacatctacacaccagaaattgaactcgaccgaaagttcattgtggttgaggaacctgaacaacctgaaaccaaggacatcggcatagtaaaagaagaacaagcaaaccaccaatcacaagaatcaagcatgcagactgtcattacaagttatacaacagcagagggacacgtcacatcagaaagcaccacaaaattaactgatgatgtcaacatctatgaacagaaaacaataaacgcacgctcaatagaggatttagagaacagggatgcaagtgaaattacagcagagcaagtaagacataccaaacaatcgactgatggggagattccaaagtcagaaaccaaaggtgtgcctgaagataaagccttgcaaacaatacttgacgatgtaacggatggaaatgaagcagttgatcagagccgtcaagaggcgagacagccagaaccaaaatttacagaaaagtttaacgaagaggtgcagacaacaccatatgatactgaggagacttcagaaataaatgccactaatgatactgagaaacaagaaaaggttcaggcatctcacaccaaggagaaactagggattgaggatgatggcatattctatcaagaagaagcaaaagggattgaagaagcaacaaaaatgcagttactggaggaattagtccagacaacattgcccaccgttgcctctgtcgaaggtgatattgatcaaatttcgcagcaacaaacattgcatgatgatgaatcggaagcgattgataatgccaagagctgcatatcagaaattgaacccgacagaaaatctactgctgttgaggaacctgaacaacctgaaaccaagaccaacaccggcataccaatagaagaagaagcagaccatcaatcagaagaatcaagtgtggagagtctgattacaaattatataacagcagaaggacatgtgatatcagaaagcagcacaaaattaagagatgatgttaacgtcaatcaacagaagagtgtagaatcaggcttggttgagtttttagagaacaaggatgcaggtcatatcagagtagaaggaacatattccaaacaattgactgatgcagagatacaaagttcagaaacagaaggtccacaagaggaagaagtccattcaaaattgcctgctgtaactgtacaaggtgaatctgatcaaaacttacagcaacaaacacttgatgatgatgaatcagaagcaatcaataatgccaagagatgcataccagaaaaagaacttgatagaatgtccactgttgttgaggaacctgaaaccaatgccaatgttggcatagtaaaagaagaacaatcagacaaccaatcgcaaggatcaagcatgcaaaatatgattgcaaattatataacagcagaaggacatctggcatcagaaagcaatacaaaattaaattatgatgtgaatgaacagaagatagtagactcacagtcagaagagaatttagagaacaaggatgcaagtaaaatcaccacagaggaagcaacagatgccaaacaattgactgatgttgagatacaaaaattagaaaccgatggtgtgcctgaaaataacgccatgcaaacattacccaacatagcattggtcagagtcgaagaagttcacgatagt

SEQ ID NO: 19122 - protein, 593 aa, Glycine max
KQLPVEEVETTLPTDSFVQGDTDQKPKQQTLHHDESEVIDIAQNIYTPEIELDRKFIVVEEPEQPETKDIGIVKEEQANHQSQESSMQTVITSYTTAEGHVTSESTTKLTDDVNIYEQKTINARSIEDLENRDASEITAEQVRHTKQSTDGEIPKSETKGVPEDKALQTILDDVTDGNEAVDQSRQEARQPEPKFTEKFNEEVQTTPYDTEETSEINATNDTEKQEKVQASHTKEKLGIEDDGIFYQEEAKGIEEATKMQLLEELVQTTLPTVASVEGDIDQISQQQTLHDDESEAIDNAKSCISEIEPDRKSTAVEEPEQPETKTNTGIPIEEEADHQSEESSVESLITNYITAEGHVISESSTKLRDDVNVNQQKSVESGLVEFLENKDAGHIRVEGTYSKQLTDAEIQSSETEGPQEEEVHSKLPAVTVQGESDQNLQQQTLDDDESEAINNAKRCIPEKELDRMSTVVEEPETNANVGIVKEEQSDNQSQGSSMQNMIANYITAEGHLASESNTKLNYDVNEQKIVDSQSEENLENKDASKITTEEATDAKQLTDVEIQKLETDGVPENNAMQTLPNIALVRVEEVHDS

SEQ ID NO: 19123 - protein, 507 aa, Glycine max
MQTVITSYTTAEGHVTSESTTKLTDDVNIYEQKTINARSIEDLENRDASEITAEQVRHTKQSTDGEIPKSETKGVPEDKALQTILDDVTDGNEAVDQSRQEARQPEPKFTEKFNEEVQTTPYDTEETSEINATNDTEKQEKVQASHTKEKLGIEDDGIFYQEEAKGIEEATKMQLLEELVQTTLPTVASVEGDIDQISQQQTLHDDESEAIDNAKSCISEIEPDRKSTAVEEPEQPETKTNTGIPIEEEADHQSEESSVESLITNYITAEGHVISESSTKLRDDVNVNQQKSVESGLVEFLENKDAGHIRVEGTYSKQLTDAEIQSSETEGPQEEEVHSKLPAVTVQGESDQNLQQQTLDDDESEAINNAKRCIPEKELDRMSTVVEEPETNANVGIVKEEQSDNQSQGSSMQNMIANYITAEGHLASESNTKLNYDVNEQKIVDSQSEENLENKDASKITTEEATDAKQLTDVEIQKLETDGVPENNAMQTLPNIALVRVEEVHDS

SEQ ID NO: 19124 - protein, 335 aa, Glycine max
MQLLEELVQTTLPTVASVEGDIDQISQQQTLHDDESEAIDNAKSCISEIEPDRKSTAVEEPEQPETKTNTGIPIEEEADHQSEESSVESLITNYITAEGHVISESSTKLRDDVNVNQQKSVESGLVEFLENKDAGHIRVEGTYSKQLTDAEIQSSETEGPQEEEVHSKLPAVTVQGESDQNLQQQTLDDDESEAINNAKRCIPEKELDRMSTVVEEPETNANVGIVKEEQSDNQSQGSSMQNMIANYITAEGHLASESNTKLNYDVNEQKIVDSQSEENLENKDASKITTEEATDAKQLTDVEIQKLETDGVPENNAMQTLPNIALVRVEEVHDS

SEQ ID NO: 19125 - DNA, 1382 bp, Glycine max
gggtgatcttttggagttgtaggagcccttacaccttgcagagtcatctcaacattcccaagggctcctactacgcaataacgccaagctcgatctcaaattaatatatcatttattcctcttaatcaaatattaaataagaaaagatgggagagatgtcaaacttccaattgggtgtgattggtgcactatttctctcggttgcttcttctgtctccattgtcatctgcaacaaagccttgatgagcaatcttggcttccctttcgccacaacgcttactagttggcatttgatggtcacattttgcacccttcatgcggctcaacgcttgaatctatttgtgtccaaatccgttgacttgaaaacggtcatgctttttggtattctaaatggcatttccattggatttctcaacttgagtcttggctttaattccattggattctaccagatgacaaaacttgcgatcataccattcactgtattattagaaactattttcttaaagaagcagttcagctcgaaaataaaattctctttatccctattacttgtgggagttggcattgcttctatcacagaccttcagctcaattttgtgggaaccattctttcccttctggcaatcataacgacatgtgttggccaaatcctgaccaacacaatacagaagaagcttaacgtctcttccacacagctgctctaccagtctgctccattccaagcagcaattctttttgtttcaggccctcttgtggatcagatgctcaccaagcaaaatgtctttgcctacaaatattctcctgtggtcttggcattcatcatcttgtcttgcttgatagctgtttctgtgaacttcagcacatttctggtcataggcaaaacatctcctgtaacatatcaagtgctaggccacctcaagacatgccttgttctaggatttggctacacattactgcatgaccctttcaccggaaggaacattcttggaatactaattgccgtttttgggatgggtttatactcttatttctgcactgaggagaacaaaaagaaacagttagctagtgatctcccactggcctctcaggtcaaagacaaagatagcttaccacttttggccgggaaaaacgtgggtaatcaaaacgaggaaaatcatgagactaagaaattaagcaaggattctgttatttgaaaggacaggctccatgtctttttaagatttcgtatattttgggtttctttcaatttctaggaaactagtaatgagtgtaaatcaaatttgtttaataagttttctgtaactttaagtcggtgcatttcatttacctaccatatattcattaaactgcaggaggaaattcaaatttcataaaattgc

SEQ ID NO: 19126 - protein, 349 aa, Glycine max
MGEMSNFQLGVIGALFLSVASSVSIVICNKALMSNLGFPFATTLTSWHLMVTFCTLHAAQRLNLFVSKSVDLKTVMLFGILNGISIGFLNLSLGFNSIGFYQMTKLAIIPFTVLLETIFLKKQFSSKIKFSLSLLLVGVGIASITDLQLNFVGTILSLLAIITTCVGQILTNTIQKKLNVSSTQLLYQSAPFQAAILFVSGPLVDQMLTKQNVFAYKYSPVVLAFIILSCLIAVSVNFSTFLVIGKTSPVTYQVLGHLKTCLVLGFGYTLLHDPFTGRNILGILIAVFGMGLYSYFCTEENKKKQLASDLPLASQVKDKDSLPLLAGKNVGNQNEENHETKKLSKDSVI

SEQ ID NO: 19127 - protein, 346 aa, Glycine max
MSNFQLGVIGALFLSVASSVSIVICNKALMSNLGFPFATTLTSWHLMVTFCTLHAAQRLNLFVSKSVDLKTVMLFGILNGISIGFLNLSLGFNSIGFYQMTKLAIIPFTVLLETIFLKKQFSSKIKFSLSLLLVGVGIASITDLQLNFVGTILSLLAIITTCVGQILTNTIQKKLNVSSTQLLYQSAPFQAAILFVSGPLVDQMLTKQNVFAYKYSPVVLAFIILSCLIAVSVNFSTFLVIGKTSPVTYQVLGHLKTCLVLGFGYTLLHDPFTGRNILGILIAVFGMGLYSYFCTEENKKKQLASDLPLASQVKDKDSLPLLAGKNVGNQNEENHETKKLSKDSVI

SEQ ID NO: 19128 - protein, 317 aa, Glycine max
MSNLGFPFATTLTSWHLMVTFCTLHAAQRLNLFVSKSVDLKTVMLFGILNGISIGFLNLSLGFNSIGFYQMTKLAIIPFTVLLETIFLKKQFSSKIKFSLSLLLVGVGIASITDLQLNFVGTILSLLAIITTCVGQILTNTIQKKLNVSSTQLLYQSAPFQAAILFVSGPLVDQMLTKQNVFAYKYSPVVLAFIILSCLIAVSVNFSTFLVIGKTSPVTYQVLGHLKTCLVLGFGYTLLHDPFTGRNILGILIAVFGMGLYSYFCTEENKKKQLASDLPLASQVKDKDSLPLLAGKNVGNQNEENHETKKLSKDSVI

SEQ ID NO: 19129 - DNA, 1333 bp, Glycine max
gagaaatggataacagtagctcagaacagaccgtgcaagatggcaaactctacagaaacctcaattctctcatcgtcgctcatcttcgcgacaacagtctcactcaggctgcaagtgctgttgcttcagcaaccatgactccactgaatgtagaagcccctcctaacaggcttctcgacctggtcgctaagggtcttgcagtggaaaagggcgacatcacaagaggcactggtttcactgctacactgcctctgcctcacacaacagctattgatttcagctctgtgcctgatgtgaaaggttcatcaaagagcttcccaaagcatgaaacgcgacacctttcagaacacaagatgtgctaggtttagtgctgatggaagatttgttgccactggaagtgcagatacatcaataaagttatttgaggtttcgaagatcaagcagatgttgctgccagaggcaaaggatggtcctgtgcggcctgtcatacgaacatattatgatcatatacaaccaataaatgatctggattttcatccacaaggtactatcctgatatctggagctaaagatcaaacaataaagttttttgatatttcaaaaacaaatgcaaagagagcatacagggttatccaggacacacacaatgttcgatctgtatcttttcatccatctggagactttctgctggcaggaactgatcatgcaattccacatttgtatgatataaatacctttcagtgctatctgtcggcaaatatcccagagactagccccagtggagccataaaccagatcagatattcttgtacaggttccatgtatgttacagcatctaaagatggtgctattcggttgtgggatggcatcactgccaattgtgtgcgctcaataactgcagcacatggaacagctgaggctaccagtgcaatttttacaaaagatcaaaggtttgttctctcttgcgggaaggattctaccttaaagctttgggaagttggctctggaagattagtcaaacaatatctgggtgctatacatacccagctaaggtgccaggctatttttaatgagacagaagaatttattctatccatagatgaactgagcaatgagatcgttatctgggatgcgatgacaacagaaaaagtagcaaagtggccttctaatcatgttggtgcaccccgctggcttgaacactcaccaatagagtctgcttttatttcctgtggaactgataggtcagttcggttctggaaggaaactgtataattaatgggaaggaggctgaatgcatttacagactaattaaagttatcacttattgaaagtt

SEQ ID NO: 19130 - protein, 315 aa, Glycine max
MKRDTFQNTRCARFSADGRFVATGSADTSIKLFEVSKIKQMLLPEAKDGPVRPVIRTYYDHIQPINDLDFHPQGTILISGAKDQTIKFFDISKTNAKRAYRVIQDTHNVRSVSFHPSGDFLLAGTDHAIPHLYDINTFQCYLSANIPETSPSGAINQIRYSCTGSMYVTASKDGAIRLWDGITANCVRSITAAHGTAEATSAIFTKDQRFVLSCGKDSTLKLWEVGSGRLVKQYLGAIHTQLRCQAIFNETEEFILSIDELSNEIVIWDAMTTEKVAKWPSNHVGAPRWLEHSPIESAFISCGTDRSVRFWKETV

SEQ ID NO: 19131 - protein, 275 aa, Glycine max
MLLPEAKDGPVRPVIRTYYDHIQPINDLDFHPQGTILISGAKDQTIKFFDISKTNAKRAYRVIQDTHNVRSVSFHPSGDFLLAGTDHAIPHLYDINTFQCYLSANIPETSPSGAINQIRYSCTGSMYVTASKDGAIRLWDGITANCVRSITAAHGTAEATSAIFTKDQRFVLSCGKDSTLKLWEVGSGRLVKQYLGAIHTQLRCQAIFNETEEFILSIDELSNEIVIWDAMTTEKVAKWPSNHVGAPRWLEHSPIESAFISCGTDRSVRFWKETV

SEQ ID NO: 19132 - DNA, 1300 bp, Glycine max
agtgaccagagacagatgatgatggagatggcgaagcgaaacgctgtcgttgcggcactcgcggcgttggtgctactcgcggcgagtgtggcggtggatgctcaggagaactcggacgtgaagacgctggtgaagtacaagcacgggaagaagtactgcgacaaaggatgggaatgtaagggctggtcaatttactgttgtaacctcaccattaccgattatttccagacctaccagttcgagaatctgttctccaagcggaactcgccggtggcgcacgcggtcggattttgggactaccactccttcatcgccgcggccgcgctttttgagccggaagggttcggcaccaccgggaacaagacgatgcagatgatggagatcgccgccttcttcggacacgtcggcagcaagacctcttgtggttatggagtggccactggaggacctttggcctggggtctttgttacaatcatgaaatgagtcctatgcagtcatactgtgatgactacttcaaactcacatacccctgtactcctggtgctgactactatggacgtggagccattcccattttttggaactacaactatggtgctgtcggagaagctttgaagattgacctactaagccatccagaatacatagagcagaatgccacccttgctttccaggctgcaatttggagatggatgacaccaatgaaaaagtcacagccctctgctcatgatgcttttgtcggcagctggaagcctaccaagaatgacactatggagaatcgggttcctggatttggcactacaatgaacattctctatggggatggtgtttgtggacaaggagatgtggactcaatgaacaatattgtttcccattacctgtattatcttgaccttcttggtgttggtcgagaacaggctgggccccatgacatccttacatgcgctgagcaggttcctttcaacccatcttccaaacctgcttcatcatcttaagattattatatttattagcatataatattgttgtgccaatccctttgaaagtgtaagttaataagggttcttgaaattattggtatgcaataactttgaactgtgtggcagtgtgggaattcattatagcattttgttcgttcttgtgtagaagtttaagtcatttgcaatatcatacgtcttgaaaaatttgtatctggtgtatatgtacgttatgggcgattttgttatttttattatatatacattccttggttgcaatgtaaatttgaatatggtcatgtcaaacaaatccactccgagt

SEQ ID NO: 19133 - protein, 331 aa, Glycine max
SDQRQMMMEMAKRNAVVAALAALVLLAASVAVDAQENSDVKTLVKYKHGKKYCDKGWECKGWSIYCCNLTITDYFQTYQFENLFSKRNSPVAHAVGFWDYHSFIAAAALFEPEGFGTTGNKTMQMMEIAAFFGHVGSKTSCGYGVATGGPLAWGLCYNHEMSPMQSYCDDYFKLTYPCTPGADYYGRGAIPIFWNYNYGAVGEALKIDLLSHPEYIEQNATLAFQAAIWRWMTPMKKSQPSAHDAFVGSWKPTKNDTMENRVPGFGTTMNILYGDGVCGQGDVDSMNNIVSHYLYYLDLLGVGREQAGPHDILTCAEQVPFNPSSKPASSS

SEQ ID NO: 19134 - protein, 326 aa, Glycine max
MMMEMAKRNAVVAALAALVLLAASVAVDAQENSDVKTLVKYKHGKKYCDKGWECKGWSIYCCNLTITDYFQTYQFENLFSKRNSPVAHAVGFWDYHSFIAAAALFEPEGFGTTGNKTMQMMEIAAFFGHVGSKTSCGYGVATGGPLAWGLCYNHEMSPMQSYCDDYFKLTYPCTPGADYYGRGAIPIFWNYNYGAVGEALKIDLLSHPEYIEQNATLAFQAAIWRWMTPMKKSQPSAHDAFVGSWKPTKNDTMENRVPGFGTTMNILYGDGVCGQGDVDSMNNIVSHYLYYLDLLGVGREQAGPHDILTCAEQVPFNPSSKPASSS

SEQ ID NO: 19135 - protein, 325 aa, Glycine max
MMEMAKRNAVVAALAALVLLAASVAVDAQENSDVKTLVKYKHGKKYCDKGWECKGWSIYCCNLTITDYFQTYQFENLFSKRNSPVAHAVGFWDYHSFIAAAALFEPEGFGTTGNKTMQMMEIAAFFGHVGSKTSCGYGVATGGPLAWGLCYNHEMSPMQSYCDDYFKLTYPCTPGADYYGRGAIPIFWNYNYGAVGEALKIDLLSHPEYIEQNATLAFQAAIWRWMTPMKKSQPSAHDAFVGSWKPTKNDTMENRVPGFGTTMNILYGDGVCGQGDVDSMNNIVSHYLYYLDLLGVGREQAGPHDILTCAEQVPFNPSSKPASSS

SEQ ID NO: 19136 - DNA, 1356 bp, Glycine max
gattgatcaatcaaagagagagagagagagggaatgggagatcaagtggagggaacggtgcagaacgttctggaacaggagactctgaagtggatcttcgttggtggcaaaggcggcgtcggcaaaacgacatgcagttcaatcctctccattctcctcgccaccgttcgctcctccgtcctcatcatctccaccgaccccgcccacaacctcagcgacgccttccagcagcgtttcaccaaaacccccactctcgtcaatggcttttccaacctctacgccatggaggtggatcctactgttgagcatgaggacatgggtggcgctgatgggatggactccttgttctccgagctcgccggcgcgattcccgggattgatgaggccatgagctttgctgagatgttgaaattggtgcagacaatggattattctgttattgtatttgatactgctcccactggccatacactcagactattgcaattcccatcggttttagaaaagggtcttgcaaaagtgatgtctttgaaaaataaatttggtggtttgtttaatcagatgacccgcatgtttggcatgggtgatgattttggagatgatcaaattcttgggaggcttgaaggcatgaaggatgtaattgaacaagttaataagcaattcaaagatccggacatgacaacctttgtctgtgtgtgcattcctgaattcctttctctatatgaaacagaaagattggttcaggagcttacaaagtttgaaattgacacccacaatatcatcatcaatcaagtaatctttgatgatgaagatgttgaatccaagttacttaaagcaagaatgaaaatgcaacagaaatatctggaccagttttacatgttgtatgatgactttaacattaccaagctgccactgctcccagaagaggttactggggttgaagctctgaaagcattttcaagacattttacatcaccatatcaagccttatgcagtaaaggagatccagtagaacggttggagagtaaagtatcagcattacagcgccagttacacgaggctgaagaagagttggagagactcaaaagtggcaattaggtttgatggtatccattcatgaataatgtcattgtatgcctttttggttcacattattttttagcttaaatttgataaagcatctttttctttgttgggctgccaacacaagtcattccctatatgctttttatttaattattgtcacagtgagctttcttataaccccccaaaaaatattgctgaggttagtctaatttgtttcatgaatattctttacttgtatctttcatattatgagtagaatagtttcttatc

SEQ ID NO: 19137 - protein, 354 aa, Glycine max
MGDQVEGTVQNVLEQETLKWIFVGGKGGVGKTTCSSILSILLATVRSSVLIISTDPAHNLSDAFQQRFTKTPTLVNGFSNLYAMEVDPTVEHEDMGGADGMDSLFSELAGAIPGIDEAMSFAEMLKLVQTMDYSVIVFDTAPTGHTLRLLQFPSVLEKGLAKVMSLKNKFGGLFNQMTRMFGMGDDFGDDQILGRLEGMKDVIEQVNKQFKDPDMTTFVCVCIPEFLSLYETERLVQELTKFEIDTHNIIINQVIFDDEDVESKLLKARMKMQQKYLDQFYMLYDDFNITKLPLLPEEVTGVEALKAFSRHFTSPYQALCSKGDPVERLESKVSALQRQLHEAEEELERLKSGN

SEQ ID NO: 19138 - protein, 271 aa, Glycine max
MEVDPTVEHEDMGGADGMDSLFSELAGAIPGIDEAMSFAEMLKLVQTMDYSVIVFDTAPTGHTLRLLQFPSVLEKGLAKVMSLKNKFGGLFNQMTRMFGMGDDFGDDQILGRLEGMKDVIEQVNKQFKDPDMTTFVCVCIPEFLSLYETERLVQELTKFEIDTHNIIINQVIFDDEDVESKLLKARMKMQQKYLDQFYMLYDDFNITKLPLLPEEVTGVEALKAFSRHFTSPYQALCSKGDPVERLESKVSALQRQLHEAEEELERLKSGN

SEQ ID NO: 19139 - protein, 260 aa, Glycine max
MGGADGMDSLFSELAGAIPGIDEAMSFAEMLKLVQTMDYSVIVFDTAPTGHTLRLLQFPSVLEKGLAKVMSLKNKFGGLFNQMTRMFGMGDDFGDDQILGRLEGMKDVIEQVNKQFKDPDMTTFVCVCIPEFLSLYETERLVQELTKFEIDTHNIIINQVIFDDEDVESKLLKARMKMQQKYLDQFYMLYDDFNITKLPLLPEEVTGVEALKAFSRHFTSPYQALCSKGDPVERLESKVSALQRQLHEAEEELERLKSGN

SEQ ID NO: 19140 - DNA, 1007 bp, Glycine max
caattttttttaattgataaagatggacttgtcacgacagaaaggagcaatctagatccagctgcagttccatttgccaaaaatccaagagatcttgaagggctttcagagggtgctagtataattgaagtggttaagaaggttaagccacatgtgctccttggattgtctggagttggtggtgttttcaacactgaggtgcttaaggcaatgagagaatctgtttcaacaaaacctgctatctttgcaatgtctaatcccaccatgaatgctgagtgcactgctattgaagctttcagtcatgcaggagaaaatatagtgtttgcaagtggaagcccttttgaaaatgtagatcttggaaatggagaagttggccatgtaaatcaagccaacaacatgtacctgtttccagggattggtttggggacacttttatcaggtgctcgtcatataactgatggaatgttgcgagcagcagccgaatgccttgcttcatacatgacagaagatgatgtccggaaaggaatcttgtatccatccattgactgtatacgagatgttacagcagaggttggggctgctgttgtatgtgcagcagttgcagaaaagcaggctgaaggacatggcgatgtagggttcaaagagctagagaacatgtcaaaagaagaaactgtggagtatgtcagaggcaatatgtggtaccctgagtattgccctcttgttcatgaaaaatgaacttttatgaaggctttttgctattgatatctcagttccgcgcaaccaagccctttaatattttgatttctaatcttagcaatttatgactagcaaggttttgatagttgaaggtcaattggtgagaaggggagagagagatatcctcatttgttgcagccgtgaattgtatgtgtaatgccgccctccctttcttttagtgtgtgtttggattagcgtttgtagaattaattcgagatcaacatggttttaagtaaatgtgattttagaat

SEQ ID NO: 19141 - protein, 244 aa, Glycine max
QFFLIDKDGLVTTERSNLDPAAVPFAKNPRDLEGLSEGASIIEVVKKVKPHVLLGLSGVGGVFNTEVLKAMRESVSTKPAIFAMSNPTMNAECTAIEAFSHAGENIVFASGSPFENVDLGNGEVGHVNQANNMYLFPGIGLGTLLSGARHITDGMLRAAAECLASYMTEDDVRKGILYPSIDCIRDVTAEVGAAVVCAAVAEKQAEGHGDVGFKELENMSKEETVEYVRGNMWYPEYCPLVHEK

SEQ ID NO: 19142 - protein, 174 aa, Glycine max
MRESVSTKPAIFAMSNPTMNAECTAIEAFSHAGENIVFASGSPFENVDLGNGEVGHVNQANNMYLFPGIGLGTLLSGARHITDGMLRAAAECLASYMTEDDVRKGILYPSIDCIRDVTAEVGAAVVCAAVAEKQAEGHGDVGFKELENMSKEETVEYVRGNMWYPEYCPLVHEK

SEQ ID NO: 19143 - protein, 161 aa, Glycine max
MSNPTMNAECTAIEAFSHAGENIVFASGSPFENVDLGNGEVGHVNQANNMYLFPGIGLGTLLSGARHITDGMLRAAAECLASYMTEDDVRKGILYPSIDCIRDVTAEVGAAVVCAAVAEKQAEGHGDVGFKELENMSKEETVEYVRGNMWYPEYCPLVHEK

SEQ ID NO: 19144 - DNA, 1359 bp, Glycine max
aacacaaatttcattttatttatttatttgtttattcatttatttttagaaaaagtggagagccatatggaatttgacgagcacgaggaccaagagcaagaagaggaggaggaggaggaggaaatgggattctcagtggcggcggcggcgagttacgactcgctgggaaacgccgcggtgaggtctaaaattagcggcggcgatggtgttgcggccaccgtgaattccggtcgcaaagggacggtgagatacagagaatgtcagaagaaccatgccgtcagcatcggcggccacgccgtcgacggatgctgcgagttcttggctgccggagaggaaggcacgctggaagccgtaatttgcgccgcctgtaactgccaccgcaacttccaccgcaaggagatcgacggcgaaaccagcccttaccagcaccgttcgcagccacagcctcagcctctgcaccctcagtaccaccaccaattctccccttactaccaccgcgcgcccccaccttccgccgccggatatctccaccaccaccttgtaacacctccggtgtcgcagcaccggcccttggctctgccaccgttagcttctggaggagtgttcagtagggaggaagaggacatgtcaaaccccagctccagcggcggcggcggtggtggcggttttagtggcggtggtggtagcgggagtggaacgaagaagaggtttagaacaaaattcacgcaggagcagaaggataagatgctggcatttgcggagaagctagggtggagaattcagaagcatgacgaagctgctgttgaacaattctgcgctgaaacttgcatcaagagacatgtactcaaggtttggatgcacaataacaaacacactcttgctaattctgagcaacattcggctgggaatggatcgaatcacttgaacagcaccacaataattgagaattctcaattctcctgagggatattaacgaaataaagagaaagaactgaagttggcagaagttcatggaagggtttgcaagtgttcatcttatcagtagcatcaggtgatggtgatcgaggagggggagtacgcaatggaagtatgcggatgagcacagagaataaattccaacataaagttgtatttaacgtgagtggaatgcaagtgcaaagctgtttatgttactactttgctgtgttccttcgcattatttgtcgtctttctttcctgtttttcctccctaacaccgccctagtttagttttattatcgtttgtctctctcatattaatgtctcctcttctatttctttgcttctggacacattagacctgaaagatttaatgagtcaaatagattcatcatgatccgt

SEQ ID NO: 19145 - protein, 320 aa, Glycine max
NTNFILFIYLFIHLFLEKVESHMEFDEHEDQEQEEEEEEEEMGFSVAAAASYDSLGNAAVRSKISGGDGVAATVNSGRKGTVRYRECQKNHAVSIGGHAVDGCCEFLAAGEEGTLEAVICAACNCHRNFHRKEIDGETSPYQHRSQPQPQPLHPQYHHQFSPYYHRAPPPSAAGYLHHHLVTPPVSQHRPLALPPLASGGVFSREEEDMSNPSSSGGGGGGGFSGGGGSGSGTKKRFRTKFTQEQKDKMLAFAEKLGWRIQKHDEAAVEQFCAETCIKRHVLKVWMHNNKHTLANSEQHSAGNGSNHLNSTTIIENSQFS

SEQ ID NO: 19146 - protein, 298 aa, Glycine max
MEFDEHEDQEQEEEEEEEEMGFSVAAAASYDSLGNAAVRSKISGGDGVAATVNSGRKGTVRYRECQKNHAVSIGGHAVDGCCEFLAAGEEGTLEAVICAACNCHRNFHRKEIDGETSPYQHRSQPQPQPLHPQYHHQFSPYYHRAPPPSAAGYLHHHLVTPPVSQHRPLALPPLASGGVFSREEEDMSNPSSSGGGGGGGFSGGGGSGSGTKKRFRTKFTQEQKDKMLAFAEKLGWRIQKHDEAAVEQFCAETCIKRHVLKVWMHNNKHTLANSEQHSAGNGSNHLNSTTIIENSQFS

SEQ ID NO: 19147 - protein, 279 aa, Glycine max
MGFSVAAAASYDSLGNAAVRSKISGGDGVAATVNSGRKGTVRYRECQKNHAVSIGGHAVDGCCEFLAAGEEGTLEAVICAACNCHRNFHRKEIDGETSPYQHRSQPQPQPLHPQYHHQFSPYYHRAPPPSAAGYLHHHLVTPPVSQHRPLALPPLASGGVFSREEEDMSNPSSSGGGGGGGFSGGGGSGSGTKKRFRTKFTQEQKDKMLAFAEKLGWRIQKHDEAAVEQFCAETCIKRHVLKVWMHNNKHTLANSEQHSAGNGSNHLNSTTIIENSQFS

SEQ ID NO: 19148 - DNA, 1173 bp, Glycine max
gaagtgcgagattaacagtcgctaacaaacaagttcgttagtgcagtgaagctctccagttcctatgcatagcaacaacggtgattgccttaaagaagccatagtcagaccacctgattgcttatgaaggactcaagcatagagtgtttgaggtctccttgactgatcttcaaggggatgaggatgatgcattcaagaagattaggttgagagctgaagatgtgcaagggaagaatgttctgacaaatttctagggaatggatttcacaacagagttgctgaggtcattggtacgaaaatggcaaactcttattgaagcccatgtggatgtaaagacaactgataattacacattcagaatgttttgcattggatttaccaagagaagagctaaccaggtgaagagaacctgttatgcacaatcaagccagaaactgaacttgaatttgctcctatgatcattgaccctatggtgatatcggcaccagaaactcaatcagcagcagctagcatactagttgcagaaactgaacttgaatttgctgtttgtgactgttgtggactaacagttttatgtgcaccccagcctatatagaaagaatcagacagaggtactttggaaaatgggtttgtgggttgtgtgctgaggctgttaaggatgaaattgtgaggtctgagagggttgtttgcacacaaaaagcaatggctaagcacatgaacttctacaaaaacttcaaggcatcagggcctcatccaaatccgacagtgcacttgatatcagccttgagacagattcttagaaggactttggattctcctagagtaaggtccacaccaaaaagtccaaccaagactcgcacaaaaattcatggttctgtgcttacaacatctgagagctgtttccctacctctctgaagggttgtgatgaagggaatacttgggtaattagttggataaaaatggaagcaggaagcagaaataaggacaaaaaaatataagctgcaaaagtttagatgttcaattgtagttttggccagtacagaacttgcaatatgtttgttagaaaatttgaacataagttggtcaagaattttgcttcactcagaccagttatgtaccttgttttgtatggcatttatttgtttgaaataagaaaaatatgttcttaactg

SEQ ID NO: 19149 - protein, 141 aa, Glycine max
MCTPAYIERIRQRYFGKWVCGLCAEAVKDEIVRSERVVCTQKAMAKHMNFYKNFKASGPHPNPTVHLISALRQILRRTLDSPRVRSTPKSPTKTRTKIHGSVLTTSESCFPTSLKGCDEGNTWVISWIKMEAGSRNKDKKI

SEQ ID NO: 19150 - protein, 98 aa, Glycine max
MAKHMNFYKNFKASGPHPNPTVHLISALRQILRRTLDSPRVRSTPKSPTKTRTKIHGSVLTTSESCFPTSLKGCDEGNTWVISWIKMEAGSRNKDKKI

SEQ ID NO: 19151 - protein, 94 aa, Glycine max
MNFYKNFKASGPHPNPTVHLISALRQILRRTLDSPRVRSTPKSPTKTRTKIHGSVLTTSESCFPTSLKGCDEGNTWVISWIKMEAGSRNKDKKI

SEQ ID NO: 19152 - DNA, 1876 bp, Glycine max
gggtttgaacgaagaaccctaaccatctccgcagcgcaagctgctcattgcaaccctccaaactatcaactgggatcgtaaccgctctctcgccctcgccagatttgattggatcggcttcctgcattcttggactcgggaatttggaccaaaaacagttccccaaatcttgctttttgtcttgttcttgtttctaagtcgttaatgtcagtgcagcgaagtaatctctggcaagttgattgtggcaggggagaggagggttcaaaattgggcagcatataaacttggattacccattttggtggttttccctttgtcattggaaccatggaaattgttgatttgagtgtctaaggtaagtccgaggtatgagtgcagcctatgctgtatctgctttgtaactcaagatttacggaccatggaagccaatggaatcgctcatgatagtagtagcctaggagcggggagaagggataagagagaggtgggagacaaaatggtggaagatttaagtaaatatgcacacagccctgctcacttggcagttgccaggcgcgaccatgcttccctaaggcgcattgtttccgccctacctaggcttgctaaggctggtgaagtccacacagaagcagaatctattgctgctgaacttcaagctgatgaggtatcttcttttattgatcggcgtgacgttcctggcagggagactcctcttcaccttgcagtgcgtctccgggatccagtctctgctgagattttgatggctgctggtgcggattggagtctgcagaatgagcatggttggagtgctctccaagaagcagtgtgcaccagagaggaagcaattgccatgattattgcacggcattatcaacctctggcttgggctaaatggtgtcgtagacttccccgcattgttgcttcagcatctcgaattcgtgatttttatatggagataagttttcattttgagagctctgttattccttttattgggcgaatagctccttcagatacttatcggatttggaagcgtgggtctaatcttcgtgctgatatgacccttgctggttttgatggcttacgcatccagcgatcggaccaaacatttttgttccttggagagggctatgttgcagaggaaggtaatttaactctgccacctggttctttgattgctctttctcataaggagaaggaaatcacaaatgctttggaaggagctggtacacaaccaacagagtctgaagttgcttatgaagtttccttggtgtctcagacaaatatgtatagaccaggtattgatgttactcaggctgagcttgttccccatttaaattggaggcgtcaggagaagactgagatggttgggaattggaaggcaaaagtttatgacatgcttcatgtgatggttagtgtgaagtcaaggcgggttccaggtgctatgacagatgaagaactttttgctgtggaggatggagaaagcatgatgaatggggaaaacaatgatgagtatgatgatgtattgactgcagaggaaagaatgcaattagattctgccctgcatatggggaactctgatgttacttacgaggatgaggaacatggagcctttgatggtcaagaaaatggttctgcagcttcctgtgagacttctgaagccaatggtgtggttaaagaaaagaagagctggtttggttggaacaagaaaagtttgaagagtagcagtgatgatcctgaggattccaaagctgtgaagaaaaattccaggtttggctcagaaggtagcaatcagagatcagctgatcagcaaaagtcagcatctgactttctgagggaggatagtgtagactctaagaagggaaaagataaaaac

SEQ ID NO: 19153 - protein, 486 aa, Glycine max
MEANGIAHDSSSLGAGRRDKREVGDKMVEDLSKYAHSPAHLAVARRDHASLRRIVSALPRLAKAGEVHTEAESIAAELQADEVSSFIDRRDVPGRETPLHLAVRLRDPVSAEILMAAGADWSLQNEHGWSALQEAVCTREEAIAMIIARHYQPLAWAKWCRRLPRIVASASRIRDFYMEISFHFESSVIPFIGRIAPSDTYRIWKRGSNLRADMTLAGFDGLRIQRSDQTFLFLGEGYVAEEGNLTLPPGSLIALSHKEKEITNALEGAGTQPTESEVAYEVSLVSQTNMYRPGIDVTQAELVPHLNWRRQEKTEMVGNWKAKVYDMLHVMVSVKSRRVPGAMTDEELFAVEDGESMMNGENNDEYDDVLTAEERMQLDSALHMGNSDVTYEDEEHGAFDGQENGSAASCETSEANGVVKEKKSWFGWNKKSLKSSSDDPEDSKAVKKNSRFGSEGSNQRSADQQKSASDFLREDSVDSKKGKDKN

SEQ ID NO: 19154 - protein, 460 aa, Glycine max
MVEDLSKYAHSPAHLAVARRDHASLRRIVSALPRLAKAGEVHTEAESIAAELQADEVSSFIDRRDVPGRETPLHLAVRLRDPVSAEILMAAGADWSLQNEHGWSALQEAVCTREEAIAMIIARHYQPLAWAKWCRRLPRIVASASRIRDFYMEISFHFESSVIPFIGRIAPSDTYRIWKRGSNLRADMTLAGFDGLRIQRSDQTFLFLGEGYVAEEGNLTLPPGSLIALSHKEKEITNALEGAGTQPTESEVAYEVSLVSQTNMYRPGIDVTQAELVPHLNWRRQEKTEMVGNWKAKVYDMLHVMVSVKSRRVPGAMTDEELFAVEDGESMMNGENNDEYDDVLTAEERMQLDSALHMGNSDVTYEDEEHGAFDGQENGSAASCETSEANGVVKEKKSWFGWNKKSLKSSSDDPEDSKAVKKNSRFGSEGSNQRSADQQKSASDFLREDSVDSKKGKDKN

SEQ ID NO: 19155 - protein, 372 aa, Glycine max
MAAGADWSLQNEHGWSALQEAVCTREEAIAMIIARHYQPLAWAKWCRRLPRIVASASRIRDFYMEISFHFESSVIPFIGRIAPSDTYRIWKRGSNLRADMTLAGFDGLRIQRSDQTFLFLGEGYVAEEGNLTLPPGSLIALSHKEKEITNALEGAGTQPTESEVAYEVSLVSQTNMYRPGIDVTQAELVPHLNWRRQEKTEMVGNWKAKVYDMLHVMVSVKSRRVPGAMTDEELFAVEDGESMMNGENNDEYDDVLTAEERMQLDSALHMGNSDVTYEDEEHGAFDGQENGSAASCETSEANGVVKEKKSWFGWNKKSLKSSSDDPEDSKAVKKNSRFGSEGSNQRSADQQKSASDFLREDSVDSKKGKDKN

SEQ ID NO: 19156 - DNA, 1075 bp, Glycine max
gtgcttcttctgctgagaagaagctggagagacttcaggaagaggaactagtggagaagccatttgaacggaaacaaatgaaaatcaggttccctgagcgtggaaggagtggaagatctgttgtagcaattcagaacttggaatttggctttgaggataagacacttttcaaaaaggcaaatcttacaattgaaaggggagaaaaaattgccattattggtccaaatggatgtggcaagagtactttactgaaattgattatgggtttggaaaagccaactgggggtgaagttttgctcggggagcataatgtgttacctaactattttgagcagaatcaggctgaggcacttgatctggaaaaaaccgtgcttgagacagtagaggaagctgcagaggactggaggattgatgatattaaagggctccttgggcgttgtaattttaaagctgatatgcttgaccgaaaagtttcactattgagtggcggtgagaaggcacggctggctttttgcaaattcatggtaaaaccatcaactctgcttgtgttggatgaaccaaccaatcacttggatataccttctaaagaaatgctcgaggaggcaataaatgaatacgagggcactgttatcacagtatctcatgaccgatactttataaagcaaatagttaatagagtgatagaaattaaagatggcactatacaggattatgcaggtgattacgattattatttagagaagaatcttgatgctagggaaagagaacttgaacgcgaggcagagcttgatagcaaagctcctaaagtgaaagccaaatctaagatgtccaaggctgagaaagaagcacggaagaaacaaaagatgcaggcctttcaggcagcaaaacagaagtctaaaggcgtgaaaaatgcgaagagatggaattgagtgagccatttcattgttacactaatttaccgccagaaggtgatatagcatattgggttagctatacagcctttgtataatcatgtatctattcactaactcatttacggcaatataaaaggatgattacagcatttgtaattctc

SEQ ID NO: 19157 - protein, 308 aa, Glycine max
ASSAEKKLERLQEEELVEKPFERKQMKIRFPERGRSGRSVVAIQNLEFGFEDKTLFKKANLTIERGEKIAIIGPNGCGKSTLLKLIMGLEKPTGGEVLLGEHNVLPNYFEQNQAEALDLEKTVLETVEEAAEDWRIDDIKGLLGRCNFKADMLDRKVSLLSGGEKARLAFCKFMVKPSTLLVLDEPTNHLDIPSKEMLEEAINEYEGTVITVSHDRYFIKQIVNRVIEIKDGTIQDYAGDYDYYLEKNLDARERELEREAELDSKAPKVKAKSKMSKAEKEARKKQKMQAFQAAKQKSKGVKNAKRWN

SEQ ID NO: 19158 - protein, 283 aa, Glycine max
MKIRFPERGRSGRSVVAIQNLEFGFEDKTLFKKANLTIERGEKIAIIGPNGCGKSTLLKLIMGLEKPTGGEVLLGEHNVLPNYFEQNQAEALDLEKTVLETVEEAAEDWRIDDIKGLLGRCNFKADMLDRKVSLLSGGEKARLAFCKFMVKPSTLLVLDEPTNHLDIPSKEMLEEAINEYEGTVITVSHDRYFIKQIVNRVIEIKDGTIQDYAGDYDYYLEKNLDARERELEREAELDSKAPKVKAKSKMSKAEKEARKKQKMQAFQAAKQKSKGVKNAKRWN

SEQ ID NO: 19159 - protein, 222 aa, Glycine max
MGLEKPTGGEVLLGEHNVLPNYFEQNQAEALDLEKTVLETVEEAAEDWRIDDIKGLLGRCNFKADMLDRKVSLLSGGEKARLAFCKFMVKPSTLLVLDEPTNHLDIPSKEMLEEAINEYEGTVITVSHDRYFIKQIVNRVIEIKDGTIQDYAGDYDYYLEKNLDARERELEREAELDSKAPKVKAKSKMSKAEKEARKKQKMQAFQAAKQKSKGVKNAKRWN

SEQ ID NO: 19160 - DNA, 1101 bp, Glycine max
attttccattttcaattttaatttcctctcaaaccctaaccctaaccctaaccctccccgtcacaaaagaaaaccctctttgtccgatcatcgtcgtcaagatgttggaactccgtctcgtgcaaggctccctcctgaagaaggttttggaatccgtcaaggagctcgtgaacgacgcgaacttcgactgctcctccaccgggttctccctccaggccatggactccagccacgtcgccctcgtcgctctcctcctccgatccgagggcttcgagcactaccgctgcgaccgcaacatctccatgggcatgaacctcaacaacatggccaagatgcttaagtgtgctggtaatgacgacatcatcaccatcaaggccgacgacggcagcgacactgtcactttcatgttcgaaagccctacacaagacaagatttctgattttgaaatgaagctgatggacattgatagtgaacacctkgggattccggaggcagagtatcatgctatggttaagatgccatcctctgagtttgctaggatctgcaaggatctcagtagtattggtgacactgttgtcatttcggttactaaggagggtgtgaagttttccaccaaaggagatattggaactgccaatatagtttgtaggcagaatacttctgtggacaagcctgaagaagcaactgtcattgagatgaatgagcccgtgtccttgacatttgctttgcgatatatgaactcttttacaaaggcaacgccattgtctaacacagttaccattagtctttcaaatgagttgccagttgttgttgagtacaagattgctgagatgggttatgtgcggttctatttggctcccaagatagaagaggatgaagaagatacgaaacctcaagtttaatctacctattagatggttgggttaggatattaggattttaatgtctttgaacttgtagctttcgtcatacatcttctgttgaagatattttaaccgtgtgagcaatgaattcacattttgtggatttcttagatgtgtattggttacctaccaccttattttccctcgatttgattgttaagaacaattcgaaacaaat

SEQ ID NO: 19161 - protein, 299 aa, Glycine max
  misc_feature (159)..(159): Xaa can be any naturally occurring amino acid
FPFSILISSQTLTLTLTLPVTKENPLCPIIVVKMLELRLVQGSLLKKVLESVKELVNDANFDCSSTGFSLQAMDSSHVALVALLLRSEGFEHYRCDRNISMGMNLNNMAKMLKCAGNDDIITIKADDGSDTVTFMFESPTQDKISDFEMKLMDIDSEHXGIPEAEYHAMVKMPSSEFARICKDLSSIGDTVVISVTKEGVKFSTKGDIGTANIVCRQNTSVDKPEEATVIEMNEPVSLTFALRYMNSFTKATPLSNTVTISLSNELPVVVEYKIAEMGYVRFYLAPKIEEDEEDTKPQV

SEQ ID NO: 19162 - protein, 266 aa, Glycine max
  misc_feature (126)..(126): Xaa can be any naturally occurring amino acid
MLELRLVQGSLLKKVLESVKELVNDANFDCSSTGFSLQAMDSSHVALVALLLRSEGFEHYRCDRNISMGMNLNNMAKMLKCAGNDDIITIKADDGSDTVTFMFESPTQDKISDFEMKLMDIDSEHXGIPEAEYHAMVKMPSSEFARICKDLSSIGDTVVISVTKEGVKFSTKGDIGTANIVCRQNTSVDKPEEATVIEMNEPVSLTFALRYMNSFTKATPLSNTVTISLSNELPVVVEYKIAEMGYVRFYLAPKIEEDEEDTKPQV

SEQ ID NO: 19163 - protein, 227 aa, Glycine max
  misc_feature (87)..(87): Xaa can be any naturally occurring amino acid
MDSSHVALVALLLRSEGFEHYRCDRNISMGMNLNNMAKMLKCAGNDDIITIKADDGSDTVTFMFESPTQDKISDFEMKLMDIDSEHXGIPEAEYHAMVKMPSSEFARICKDLSSIGDTVVISVTKEGVKFSTKGDIGTANIVCRQNTSVDKPEEATVIEMNEPVSLTFALRYMNSFTKATPLSNTVTISLSNELPVVVEYKIAEMGYVRFYLAPKIEEDEEDTKPQV

SEQ ID NO: 19164 - DNA, 1048 bp, Glycine max
gatccacacttataaaaaaaaacactccttcattcaaaatcttaatctaccaaaaaattcgctaatctctgacctcttcttcacatcttcctccattaatacccttccctctctctcccatggagttgatctacctactctatctggttccaacgttgtacgcgtgtttcctcatatggaagatgttggacgagagaagggacagggagtgttacatcttaaactaccaatgctacaagccccccaacgacagaatgctcggcaccgagttctgtggcaagcttatcagacgcaccgaaaacctgggccccagcgagtaccgcttcctcctcaaagccatcgtcagctccggcatcggcgaacaaacgtacgccccaagaaacatcttcgagggccgcgaggccactcccacgttgcgcgacagcatcggagaaatggaggagttctttcacgacagcattggaaaactcctcgcgaaatctaacgtctccccctccgagatcgacgtcctcgtcgtcaacatctccatgctcgccaccgtcccttccctctcctctcgaatcatcaaccactacaaaatgcgccacgatgtcaaggtctacaacctcaccggcatgggctgcagcgccagtctcatctcaatggacatagtcaaatgcattttcaagacgcagcgcaacaagctcgcgctgctgatcacttcggagtctttaagtccaaattggtatacgggaagcgacagatccatgattctcgcgaactgtctcttccgttctggcggctgcgcgattcttttgacgaacaaaagatcgttaaaggacaaagccatgctgaggttgaagtgtttggtgagaacgcatcacggtgctagagaagaagcttatggctgctgtacccagcaggaagatgatcaaggaagactcggatttcatcttgggaagactcttcccaaggctgccacccgagccttcgttgataatcttcgagtcatagcacccaagatattacctatccgtgagttgctcaggtttttgttcgtgtccactat

SEQ ID NO: 19165 - protein, 309 aa, Glycine max
MELIYLLYLVPTLYACFLIWKMLDERRDRECYILNYQCYKPPNDRMLGTEFCGKLIRRTENLGPSEYRFLLKAIVSSGIGEQTYAPRNIFEGREATPTLRDSIGEMEEFFHDSIGKLLAKSNVSPSEIDVLVVNISMLATVPSLSSRIINHYKMRHDVKVYNLTGMGCSASLISMDIVKCIFKTQRNKLALLITSESLSPNWYTGSDRSMILANCLFRSGGCAILLTNKRSLKDKAMLRLKCLVRTHHGAREEAYGCCTQQEDDQGRLGFHLGKTLPKAATRAFVDNLRVIAPKILPIRELLRFLFVST

SEQ ID NO: 19166 - protein, 288 aa, Glycine max
MLDERRDRECYILNYQCYKPPNDRMLGTEFCGKLIRRTENLGPSEYRFLLKAIVSSGIGEQTYAPRNIFEGREATPTLRDSIGEMEEFFHDSIGKLLAKSNVSPSEIDVLVVNISMLATVPSLSSRIINHYKMRHDVKVYNLTGMGCSASLISMDIVKCIFKTQRNKLALLITSESLSPNWYTGSDRSMILANCLFRSGGCAILLTNKRSLKDKAMLRLKCLVRTHHGAREEAYGCCTQQEDDQGRLGFHLGKTLPKAATRAFVDNLRVIAPKILPIRELLRFLFVST

SEQ ID NO: 19167 - protein, 264 aa, Glycine max
MLGTEFCGKLIRRTENLGPSEYRFLLKAIVSSGIGEQTYAPRNIFEGREATPTLRDSIGEMEEFFHDSIGKLLAKSNVSPSEIDVLVVNISMLATVPSLSSRIINHYKMRHDVKVYNLTGMGCSASLISMDIVKCIFKTQRNKLALLITSESLSPNWYTGSDRSMILANCLFRSGGCAILLTNKRSLKDKAMLRLKCLVRTHHGAREEAYGCCTQQEDDQGRLGFHLGKTLPKAATRAFVDNLRVIAPKILPIRELLRFLFVST

SEQ ID NO: 19168 - DNA, 917 bp, Glycine max
aatgaagcttctgataataaaacaagtccctggtgtttcaatcaggcacctggacatcaatggttaattcctgtcatgtctccttctgaagggcttgtctacaagccatatcctgggcctggatttatgggaacaatgaatggaggatgcggcgggccattcgggcaagcacctctcggtgctactttcatgaatcctgcctatcaattcccagcttctcatccagtagttggggtttcaccgtttgtccctccagccagtcatgcctacttcccttcctttggcatgccagtagtgaatcaagcaacatcaggatcaactgttgaacaggtgaaccagtttgctgcacaaggttctcatggtcaaaatggtcattcatatatagagggaaccgattttaacactcatcataaccaaagctcatctaacctgccagttctgaagaatggagctacgctacatgttaaaaaatctcaggcgtctaaggagagagggttacaagggagcacaataagcagtcctagtgaaatggcacagggaatcagagcagggaaaatagctgaaggaaatgatgcacattctctttctcttcaagctgttgaaactagacagcaaacacaagtcatcaaagttgtaccacataaccggaaatcagcgacggaatcagcagctagaatttttcaatccattcaagaagagagaaaacaacatgatttagtctagtgctgtttatggaggtggagttatttgagttgattttgtacagtgcgtcaagtcctgtactttgttgttgtttggtaatatgtatcttgctgttttattctactcttcctttatgtcctttttcttacaacatattcgaatgtagatattgttataactacaatggaatgttaaaattgatcaaatttaatatt

SEQ ID NO: 19169 - protein, 240 aa, Glycine max
NEASDNKTSPWCFNQAPGHQWLIPVMSPSEGLVYKPYPGPGFMGTMNGGCGGPFGQAPLGATFMNPAYQFPASHPVVGVSPFVPPASHAYFPSFGMPVVNQATSGSTVEQVNQFAAQGSHGQNGHSYIEGTDFNTHHNQSSSNLPVLKNGATLHVKKSQASKERGLQGSTISSPSEMAQGIRAGKIAEGNDAHSLSLQAVETRQQTQVIKVVPHNRKSATESAARIFQSIQEERKQHDLV

SEQ ID NO: 19170 - protein, 215 aa, Glycine max
MSPSEGLVYKPYPGPGFMGTMNGGCGGPFGQAPLGATFMNPAYQFPASHPVVGVSPFVPPASHAYFPSFGMPVVNQATSGSTVEQVNQFAAQGSHGQNGHSYIEGTDFNTHHNQSSSNLPVLKNGATLHVKKSQASKERGLQGSTISSPSEMAQGIRAGKIAEGNDAHSLSLQAVETRQQTQVIKVVPHNRKSATESAARIFQSIQEERKQHDLV

SEQ ID NO: 19171 - protein, 198 aa, Glycine max
MGTMNGGCGGPFGQAPLGATFMNPAYQFPASHPVVGVSPFVPPASHAYFPSFGMPVVNQATSGSTVEQVNQFAAQGSHGQNGHSYIEGTDFNTHHNQSSSNLPVLKNGATLHVKKSQASKERGLQGSTISSPSEMAQGIRAGKIAEGNDAHSLSLQAVETRQQTQVIKVVPHNRKSATESAARIFQSIQEERKQHDLV

SEQ ID NO: 19172 - DNA, 1063 bp, Glycine max
gaagaagaagggttttaagagagagagagagagagcgaataattaaaaggcccttgccttcacctttggtgtccaaagatattgctagagagaagaactagttgttcaattagcttcttcttcttcttcttcttccacccttcttgtttgagtaaattaagaagcttgagatcagacatgtcgagctgcagcatcgatgttgcgcctgagcaactctgctacatcccctgcaacttctgcaatattgttcttgcggtgagtgttccatgcagtagcctgtttgacattgtgaccgttcgatgtgggcactgcaccaatctatggtccgtgaacatggccgccgcgtttcagtcactgtcatggcaagatgttcagggatctgggcactgcaatccagagtacaggattgacactggctccacgtccaaatgcaacaataggattgcaatgcgtgcgcccaccactcatgtaactgaggaaagggttgtgaacaggcctcccgagaagaggcagcgcgtaccttctgcttataaccagtttataaaggaagagattcagaggatcaaagccaataatcctgatatcagtcatagagaagctttcagtacagctgcaaagaactgggcacattttccccatattcatttcgggctgatgttggagagcaacaaccaagttaagatggagaatgtttctgagaagcatttaatgtcaagggctgcgctattgaataaatgaatgctatcttcatcatatcacaggacttgggtttcatttgaatctgtcaagtaaacaatgtcctgacctaaaaggagttttaaggacaatcatctctttttcttcgttagtgtacttgtcactacttactacttgttcaatggatgcttttcacttaatttgaagcaagaatgctagttttcccttgtcatctttcaataagttctatcttctagctgattcagatgaaagatgaaatatgtatgctactgttttaagctcgatggcgagaacatttatcatcatattttttggtaatactaataaacttttaagttaatttgtt

SEQ ID NO: 19173 - protein, 186 aa, Glycine max
MSSCSIDVAPEQLCYIPCNFCNIVLAVSVPCSSLFDIVTVRCGHCTNLWSVNMAAAFQSLSWQDVQGSGHCNPEYRIDTGSTSKCNNRIAMRAPTTHVTEERVVNRPPEKRQRVPSAYNQFIKEEIQRIKANNPDISHREAFSTAAKNWAHFPHIHFGLMLESNNQVKMENVSEKHLMSRAALLNK

SEQ ID NO: 19174 - protein, 134 aa, Glycine max
MAAAFQSLSWQDVQGSGHCNPEYRIDTGSTSKCNNRIAMRAPTTHVTEERVVNRPPEKRQRVPSAYNQFIKEEIQRIKANNPDISHREAFSTAAKNWAHFPHIHFGLMLESNNQVKMENVSEKHLMSRAALLNK

SEQ ID NO: 19175 - protein, 96 aa, Glycine max
MRAPTTHVTEERVVNRPPEKRQRVPSAYNQFIKEEIQRIKANNPDISHREAFSTAAKNWAHFPHIHFGLMLESNNQVKMENVSEKHLMSRAALLNK

SEQ ID NO: 19176 - DNA, 1099 bp, Glycine max
aattggtgattcatttggcctaaaccactcaactgtttctcaagtaacctggcgatttgtggaatccatggaagaaaggggtcttcatcatctgccatggccttcaacagaagtggaaatgaatgcaatcaaatccaaatttgagaaaatacgtggcttgcctaattgctgcggtgtaattgatgctactaacatcacaatgtgtttaccagcatctgaaccttactgtaatgtgtggcttgatcacaagaagaatcatagcatggtcttgcaagcaatagtggatcctgacatgaggttcagggacatagtcactggttggccgggtaaaatggaggactggttgatatttgagagttcaaatttcaataaactttgtgagaagggtgagaggttgaatggaagcaaattacagctctctgaaggatcagaaataagagaatatatactcggagattcaggctatcgtctattaccttaccttgttgtcccctatgaagggaaagaactctcagaaccaaaagcacagtttaacaagcagcatttggcaacaaggatggtggcacaaagagcactggcaaggctgaaagagatgtggagaatcattcatggaatgatgtggagaccagacaaacaccgtctgccaaggattattctcgtttgctgcgtacttcataacattgttattgacttgaacgatgaagtgcaggatgaactatctttgtctcttgatcatgactcaggttaccatcgactggtttgtggagctgtagacgagaagggagttgcactaagagacagattgtctcactatttggctggaaggttgccttcatgaattctttttgtccatcactagcttttggtcactcaatgaatttactaaattattgaagcttctgagaaaacatatcttatggtatagttgttcctccccaatttctagactgtaaataacttggatgctgcatggcaaggtgaaaattgcaggattaccaaactgtgcttgaagtcgctggtaaattcgcatctacgttctacactggacatagtcttttttactggaataaacgaagttgatgattactttgttagttgc

SEQ ID NO: 19177 - protein, 278 aa, Glycine max
IGDSFGLNHSTVSQVTWRFVESMEERGLHHLPWPSTEVEMNAIKSKFEKIRGLPNCCGVIDATNITMCLPASEPYCNVWLDHKKNHSMVLQAIVDPDMRFRDIVTGWPGKMEDWLIFESSNFNKLCEKGERLNGSKLQLSEGSEIREYILGDSGYRLLPYLVVPYEGKELSEPKAQFNKQHLATRMVAQRALARLKEMWRIIHGMMWRPDKHRLPRIILVCCVLHNIVIDLNDEVQDELSLSLDHDSGYHRLVCGAVDEKGVALRDRLSHYLAGRLPS

SEQ ID NO: 19178 - protein, 256 aa, Glycine max
MEERGLHHLPWPSTEVEMNAIKSKFEKIRGLPNCCGVIDATNITMCLPASEPYCNVWLDHKKNHSMVLQAIVDPDMRFRDIVTGWPGKMEDWLIFESSNFNKLCEKGERLNGSKLQLSEGSEIREYILGDSGYRLLPYLVVPYEGKELSEPKAQFNKQHLATRMVAQRALARLKEMWRIIHGMMWRPDKHRLPRIILVCCVLHNIVIDLNDEVQDELSLSLDHDSGYHRLVCGAVDEKGVALRDRLSHYLAGRLPS

SEQ ID NO: 19179 - protein, 239 aa, Glycine max
MNAIKSKFEKIRGLPNCCGVIDATNITMCLPASEPYCNVWLDHKKNHSMVLQAIVDPDMRFRDIVTGWPGKMEDWLIFESSNFNKLCEKGERLNGSKLQLSEGSEIREYILGDSGYRLLPYLVVPYEGKELSEPKAQFNKQHLATRMVAQRALARLKEMWRIIHGMMWRPDKHRLPRIILVCCVLHNIVIDLNDEVQDELSLSLDHDSGYHRLVCGAVDEKGVALRDRLSHYLAGRLPS

SEQ ID NO: 19180 - DNA, 1360 bp, Glycine max
aaaaacctcgacgcctttcctcgcgccgaggatcacttgttgcagaaaacccaatctggggctctcgtatccgtaattggtttgattataatggccacattgtttgtgcacgagctcggttattatcttacaacttacaccgttcacaagatgtcagtggacttgaagcgaggggaaactcttccaattcatattaacatgacgtttccttctttaccttgtgatgttttgagtgtagacgccattgatatgtcgggcaagcacgaggtggatcttgatacgaacatatggaaacttcgcttgaacagttatggccatataattggcactgaatatatatctgatcttgttgaaaaggaacataccaatcaagagcatgatgataataaagatcatgatcatcatcatgagcattcagaacagaagattcatttgcaaaaccttgatgaatctactgaaaatattatcaagaaagtgaaggaagcattaaaaaatggggaaggatgccgggtttatggtgttttagatgttcaaagggttgctggaaatttccatatttcagtacatggactaaatatatatgttgcacaaatgatcttcgatggagcaaagaatgtgaatgtaagtcatttcatccatgatttatcatttggccccaaatatccaggacttcacaacccacttgatgacacaacaaggattctgcatgataccagtggaacatttaaatattatataaaggtagttccaaccgaatatagatatatctcaaaagaagttctaccaactaatcagttctcagtatcagaatattattcccccattaatcagtttgatcggacctggccagctgtctactttttgtatgatctatcaccaattactgtcactatcaaggaagagcgccgtagttttcttcattttattactcggctttgtgctgtgctaggtggaacctttgctgtgacaggaatgctggaccgttggatgtacagacttcttgaagctttgactaaatcaaagtctaaacggtagatcatgaattcattgcaatttctagcaactactctacgtctccaaccaaggggtttcaggcactgtatggaatttgctgccactaaagattaaaaaatatagtggtggcatagttgaatcaagcattaacttttaagcacgtgatcatacagttccttatattgtctgacatcaatgactaagagatcttaatctcttttcttttggaatgaatattttgggttcggttttgactgtagacagcattgtcttgtctaccacacctgtggaatttactttgtagaactcaaattttgaatatagagatgtagatagattgtctgtt

SEQ ID NO: 19181 - protein, 344 aa, Glycine max
KNLDAFPRAEDHLLQKTQSGALVSVIGLIIMATLFVHELGYYLTTYTVHKMSVDLKRGETLPIHINMTFPSLPCDVLSVDAIDMSGKHEVDLDTNIWKLRLNSYGHIIGTEYISDLVEKEHTNQEHDDNKDHDHHHEHSEQKIHLQNLDESTENIIKKVKEALKNGEGCRVYGVLDVQRVAGNFHISVHGLNIYVAQMIFDGAKNVNVSHFIHDLSFGPKYPGLHNPLDDTTRILHDTSGTFKYYIKVVPTEYRYISKEVLPTNQFSVSEYYSPINQFDRTWPAVYFLYDLSPITVTIKEERRSFLHFITRLCAVLGGTFAVTGMLDRWMYRLLEALTKSKSKR

SEQ ID NO: 19182 - protein, 314 aa, Glycine max
MATLFVHELGYYLTTYTVHKMSVDLKRGETLPIHINMTFPSLPCDVLSVDAIDMSGKHEVDLDTNIWKLRLNSYGHIIGTEYISDLVEKEHTNQEHDDNKDHDHHHEHSEQKIHLQNLDESTENIIKKVKEALKNGEGCRVYGVLDVQRVAGNFHISVHGLNIYVAQMIFDGAKNVNVSHFIHDLSFGPKYPGLHNPLDDTTRILHDTSGTFKYYIKVVPTEYRYISKEVLPTNQFSVSEYYSPINQFDRTWPAVYFLYDLSPITVTIKEERRSFLHFITRLCAVLGGTFAVTGMLDRWMYRLLEALTKSKSKR

SEQ ID NO: 19183 - protein, 294 aa, Glycine max
MSVDLKRGETLPIHINMTFPSLPCDVLSVDAIDMSGKHEVDLDTNIWKLRLNSYGHIIGTEYISDLVEKEHTNQEHDDNKDHDHHHEHSEQKIHLQNLDESTENIIKKVKEALKNGEGCRVYGVLDVQRVAGNFHISVHGLNIYVAQMIFDGAKNVNVSHFIHDLSFGPKYPGLHNPLDDTTRILHDTSGTFKYYIKVVPTEYRYISKEVLPTNQFSVSEYYSPINQFDRTWPAVYFLYDLSPITVTIKEERRSFLHFITRLCAVLGGTFAVTGMLDRWMYRLLEALTKSKSKR

SEQ ID NO: 19184 - DNA, 1281 bp, Glycine max
aaacaagaccatatccgtttccttatttttttcttcaattctcttgtatacagttttggtctgtgatttgttgctttggtgagagagtggatatggacgaacggtacgagactttgaaggagcttggttcagggaacttcggagtggcaaggttggccaaagacaaggagacaggagaacttgttgccatcaaatacatagaaaggggaaaaaagattgatgcgaatgttcaaagggagatagttaaccaccgatctttaaggcatccaaatattatcaggttcaaagaggtatttctgacccctactcatttagctattgtccttgagtatgctgctggtggcgaactcttcgagaggatatgcaatgctggtcgattgagtgaagatgaggcaagatttttctttcagcaactaatatctggagttagctattgtcattccatgcaaatatgtcatagagatctgaaattggaaaacactctactggacggaaatccagctcctagacttaaaatttgtgactttggtttctccaagtctgctttgctgcactctcaacctaaatcaactgttggaactcctgcatacattgctccagaagttttgtcgcgaaaggaatatgatggaaaggttgccgatgtttggtcgtgtggtgtgacactttatgtcatgttagttggagcatacccatttgaagatccagaagatcctaaaaatttcagaaagagtattgggagaattatgagtgttcaatatgccatacccgactacgtacgtgtctctaaggagtgtaggcatcttatatctcgtatttttgttgccaatcctgccaagaggatcaacatctcggagataaaacagcacctttggtttaggaagaacttgccaagagagataattgaggctgaaagaaggggttacgaggaaacacaaaaggaccaaccaagccaaagtgtggaagaaatcatgcagatcattcaagaagcaaggacaaaaatccacactggtgagcaagctggcacaggaacttcggatgttgtgcgtggtgatgaggctaatgaggaagttgatattaatgaccactttgccaaatacctaacccttgattaatttgtggttggctaaattccctctctctctatatatatattgtttaccgaagctagtgtgcattcttcgtgtgtatgatatagagttgaatgagacacaacacttcatcgaatttgaaagttgggctattttgtttatcaattataataagaattaatttttgttgttt

SEQ ID NO: 19185 - protein, 369 aa, Glycine max
TRPYPFPYFFLQFSCIQFWSVICCFGERVDMDERYETLKELGSGNFGVARLAKDKETGELVAIKYIERGKKIDANVQREIVNHRSLRHPNIIRFKEVFLTPTHLAIVLEYAAGGELFERICNAGRLSEDEARFFFQQLISGVSYCHSMQICHRDLKLENTLLDGNPAPRLKICDFGFSKSALLHSQPKSTVGTPAYIAPEVLSRKEYDGKVADVWSCGVTLYVMLVGAYPFEDPEDPKNFRKSIGRIMSVQYAIPDYVRVSKECRHLISRIFVANPAKRINISEIKQHLWFRKNLPREIIEAERRGYEETQKDQPSQSVEEIMQIIQEARTKIHTGEQAGTGTSDVVRGDEANEEVDINDHFAKYLTLD

SEQ ID NO: 19186 - protein, 339 aa, Glycine max
MDERYETLKELGSGNFGVARLAKDKETGELVAIKYIERGKKIDANVQREIVNHRSLRHPNIIRFKEVFLTPTHLAIVLEYAAGGELFERICNAGRLSEDEARFFFQQLISGVSYCHSMQICHRDLKLENTLLDGNPAPRLKICDFGFSKSALLHSQPKSTVGTPAYIAPEVLSRKEYDGKVADVWSCGVTLYVMLVGAYPFEDPEDPKNFRKSIGRIMSVQYAIPDYVRVSKECRHLISRIFVANPAKRINISEIKQHLWFRKNLPREIIEAERRGYEETQKDQPSQSVEEIMQIIQEARTKIHTGEQAGTGTSDVVRGDEANEEVDINDHFAKYLTLD

SEQ ID NO: 19187 - protein, 222 aa, Glycine max
MQICHRDLKLENTLLDGNPAPRLKICDFGFSKSALLHSQPKSTVGTPAYIAPEVLSRKEYDGKVADVWSCGVTLYVMLVGAYPFEDPEDPKNFRKSIGRIMSVQYAIPDYVRVSKECRHLISRIFVANPAKRINISEIKQHLWFRKNLPREIIEAERRGYEETQKDQPSQSVEEIMQIIQEARTKIHTGEQAGTGTSDVVRGDEANEEVDINDHFAKYLTLD

SEQ ID NO: 19188 - DNA, 1178 bp, Glycine max
attaaacttgaaaaggtggagcaagattgcatttcaaaaggttccataagtcaagaaaatctgcccatattagaaaaggctattcacattagaggcaatttgattaatagatgcttggaattgttgccagaagttgagcagcaacaactgaggagcggaaacttgactgaaggtgttgttacttgttgtgcagaagttgaaattcctgacaaatttgatgttccccagattcaggatttcttgtcgaccagtttgttgattccttcatctgcaaattcttccctgacattgcataaagatcatccgactggcttgttgagttcgtcgactttaggaagatcagccaaaataggcatgtctttccctactactggcactgagcttggtaattttggttccttttcatatcatcatgatgggttatttacaaataacgagagggttccaagtcatctaagtaaaattggcaaaaatctaagaaatgataacactccaactccaaggaatcataggatccgtttcatgaatggttcacccctgaagggatttaataggacatcaccaagcaattcccaggaaaataggccagacaaaatcttgcctgaagttgaacaaaatctacattttggccataatcaaactaccagtcctatgtactcctggaaggctacagtcaaccctgttactagatccacacttagctatcctaaagaatttgcaaatgatctctcaaatatatctagtaggaatgtccaatcacataaagatgatagaagttggaacatggggtccactaatgatccaatggatgtttctcagagccttgttgagaagaaattaaataccgaagtaaacatcaatggtggacctagatggagatctgatgatgcaagtgatgaggaagatgatctggatctgggaagagctatggatatagcttattatgcaagtcctccaattcggacgacaagacgaagcagagtttccaggagatgaaaactcaactttttggtgaaaggtttctggaaatttatgggaagaaacaagaaaatacgtatgttaaaagagttgtttttgaaatgagagcttcgcttttttggaactcgggagattttacttgtagttttacgcttgtcgctgttgtgcagctaatattcaatgaagaaaattttagtgtt

SEQ ID NO: 19189 - protein, 331 aa, Glycine max
IKLEKVEQDCISKGSISQENLPILEKAIHIRGNLINRCLELLPEVEQQQLRSGNLTEGVVTCCAEVEIPDKFDVPQIQDFLSTSLLIPSSANSSLTLHKDHPTGLLSSSTLGRSAKIGMSFPTTGTELGNFGSFSYHHDGLFTNNERVPSHLSKIGKNLRNDNTPTPRNHRIRFMNGSPLKGFNRTSPSNSQENRPDKILPEVEQNLHFGHNQTTSPMYSWKATVNPVTRSTLSYPKEFANDLSNISSRNVQSHKDDRSWNMGSTNDPMDVSQSLVEKKLNTEVNINGGPRWRSDDASDEEDDLDLGRAMDIAYYASPPIRTTRRSRVSRR

SEQ ID NO: 19190 - protein, 213 aa, Glycine max
MSFPTTGTELGNFGSFSYHHDGLFTNNERVPSHLSKIGKNLRNDNTPTPRNHRIRFMNGSPLKGFNRTSPSNSQENRPDKILPEVEQNLHFGHNQTTSPMYSWKATVNPVTRSTLSYPKEFANDLSNISSRNVQSHKDDRSWNMGSTNDPMDVSQSLVEKKLNTEVNINGGPRWRSDDASDEEDDLDLGRAMDIAYYASPPIRTTRRSRVSRR

SEQ ID NO: 19191 - DNA, 1124 bp, Glycine max
aaacagattttatttgaacaaatgcaaaaagtcgccctttgtgctctcgtcggtgtagcctctgccacccaacaaaagatggacctcactcctctttgggaagcctggaaatacaaacacgctaaagtttactccgaagtcgaagaagccatcagattcgctattttctccgacaatcaccacaaaattactaaaatgaaccaagaaaacaacgatgtcaagtttgccatcaacaagtttgctgacctcactgccactgaattcaaggccacctatgctggatgtggtctccctgaattcaaccaggaatttgttgaagaaaacacttacgaaccctatacctatggtgatctccctgcttctgttgactggagaagcaaaggcgctgttaccccagttaagaatcaagcacaatgtggctcatgctggaccttctctactactggtgctttggaaggtctttatgaaatcgataatggtcaacttttgtctttctctgaacaacaaattgttgattgtgctactgatgccggacaaggttgcggaggtggctggccctatttggctatagaatatgccattaagtatggtcttgaaactgaagctgattatccttacactggtgctgatggacaatgccattatgatgctagcaaggctcataagattgcttccagctactcctttgttaccacaaagagcactaatgcccttaagactgctttggttaaccaacctgtgtcagttcttattgaagctgatcaatcttcattccaattctatagttctggtgttatctcaactggttgcggcgctcaacttgaccatgctgttttggctgttggttatgataagcaaggagttcttgaagctttcatcgtaaagaactcttggggagctgattggggtgagcaaggttacgtttacatttctactattcaaactttgaatagcggtgctggtgcttgcggtatcctcagtcaacctgttgttcccaataagtaaagggggctagcttaaatatgaaaagtaaagcttaatacaaatttaataagaaactttatatttaactttatgaagattgaagtgaagtataatagtattgctattgcataagataattt

SEQ ID NO: 19192 - protein, 334 aa, Glycine max
KQILFEQMQKVALCALVGVASATQQKMDLTPLWEAWKYKHAKVYSEVEEAIRFAIFSDNHHKITKMNQENNDVKFAINKFADLTATEFKATYAGCGLPEFNQEFVEENTYEPYTYGDLPASVDWRSKGAVTPVKNQAQCGSCWTFSTTGALEGLYEIDNGQLLSFSEQQIVDCATDAGQGCGGGWPYLAIEYAIKYGLETEADYPYTGADGQCHYDASKAHKIASSYSFVTTKSTNALKTALVNQPVSVLIEADQSSFQFYSSGVISTGCGAQLDHAVLAVGYDKQGVLEAFIVKNSWGADWGEQGYVYISTIQTLNSGAGACGILSQPVVPNK

SEQ ID NO: 19193 - protein, 327 aa, Glycine max
MQKVALCALVGVASATQQKMDLTPLWEAWKYKHAKVYSEVEEAIRFAIFSDNHHKITKMNQENNDVKFAINKFADLTATEFKATYAGCGLPEFNQEFVEENTYEPYTYGDLPASVDWRSKGAVTPVKNQAQCGSCWTFSTTGALEGLYEIDNGQLLSFSEQQIVDCATDAGQGCGGGWPYLAIEYAIKYGLETEADYPYTGADGQCHYDASKAHKIASSYSFVTTKSTNALKTALVNQPVSVLIEADQSSFQFYSSGVISTGCGAQLDHAVLAVGYDKQGVLEAFIVKNSWGADWGEQGYVYISTIQTLNSGAGACGILSQPVVPNK

SEQ ID NO: 19194 - protein, 308 aa, Glycine max
MDLTPLWEAWKYKHAKVYSEVEEAIRFAIFSDNHHKITKMNQENNDVKFAINKFADLTATEFKATYAGCGLPEFNQEFVEENTYEPYTYGDLPASVDWRSKGAVTPVKNQAQCGSCWTFSTTGALEGLYEIDNGQLLSFSEQQIVDCATDAGQGCGGGWPYLAIEYAIKYGLETEADYPYTGADGQCHYDASKAHKIASSYSFVTTKSTNALKTALVNQPVSVLIEADQSSFQFYSSGVISTGCGAQLDHAVLAVGYDKQGVLEAFIVKNSWGADWGEQGYVYISTIQTLNSGAGACGILSQPVVPNK

SEQ ID NO: 19195 - DNA, 806 bp, Glycine max
agtaaaatcaaatctgttatttaaatgtatcaaaatttacatgtgaaaatttaaattggtctaagttcattatagtttgtctttgactattatagtcctttatacctttctttaaatgggtatgtactaagttgtggggatgttatcgcatcatcactttccttttttatgaaatttcattaacattaagtttaaaaacttccagccactaggtcacttgatttttcctgctcaatttataggttactcaaatgaagcaggagcatgacaagaggcaagcaagcctcatagctgaacacaacgaacagctaaagcgtacccaactgcaagctgaaaatgaattgagagagaaaacaatgtttatgaggaatgatcatgaagctcagatcaaagcattgaggtgtgaacttgaagatgagtgtcggaagctggaagaggagttgcatcttcaaaaaatccaaagaagacaggcaaagggctttgttgcagttgcagtggaaagtgatgagtgacaagcctaaagaggaccaagaagtgaattcaaaacaggttgacttgtgtttgaatctatttgtctgtgtctgtcttcaaatggatgccatatttgctcattttcatgttgggttacctttggtagtttggtttgacatattacatttatcatttggtaggcacagttggggaaatgagaagacatttgttgtatacctaaatgtgcttctttaatattctttcaacacaagcctgagaattgtgaacttaaatacatagaagggtgatgcaaataaaggcccactggttcacat

SEQ ID NO: 19196 - protein, 103 aa, Glycine max
MSVGSWKRSCIFKKSKEDRQRALLQLQWKVMSDKPKEDQEVNSKQVDLCLNLFVCVCLQMDAIFAHFHVGLPLVVWFDILHLSFGRHSWGNEKTFVVYLNVLL

SEQ ID NO: 19197 - protein, 86 aa, Glycine max
MKQEHDKRQASLIAEHNEQLKRTQLQAENELREKTMFMRNDHEAQIKALRCELEDECRKLEEELHLQKIQRRQAKGFVAVAVESDE

SEQ ID NO: 19198 - protein, 73 aa, Glycine max
MSDKPKEDQEVNSKQVDLCLNLFVCVCLQMDAIFAHFHVGLPLVVWFDILHLSFGRHSWGNEKTFVVYLNVLL

SEQ ID NO: 19199 - DNA, 1362 bp, Glycine max
actctcactggttttctctctccctttctctctctatctctgctctgtgctttttctctctgcagaatttcccaaatttctccactaccctatctcctctgctcctgaaactcgcacattcttcaccagcaatgcacgatcttcaatacgaatgcaatatcgatatttgacatccgagtatcagtgcttgagcgggtgaattggaaaatgctagaggcaatggaaagttcggtcaatggtggcttctcccatttgcagagctgtggagatagcagcgaagaagagttatcggtgcttcctcgtcacaccaaagttgtcgtaaccggaaataaccgcaccaaatcggtgctcgttggtcttcaaggtgtcgttaagaaagccgttggactaggcggatggcattggctggttcttacaaatggtattgaagtgaagctacaaaggaatgcacttagcgtgattgaagcacccactggtaatgaggaagatgatgaccttgagtttgaaaatatgccgtggaatggatcagatatggcatcggacgacacacacaagtcccacaaatcgaggcatagaatgtatagaacaatgggatcatctcacaagaccatgagtaggtccttctctggcgattcacagtcgaaggggtccgtttctatgcctaatgggtccgcgaaggtggacttgagcaaacttgaaatggctgcactgtggagatattggcgacattttaatctagtggatgcggtcccaaacccatcaaaagagcagctagtagacgttgttcagaggcatttcatgtcgcagcaaatcgacgaattgcaggtgattgtgggatttgtccaagctgcaaagaggctttagactgtatgcaattgagatggaatgatgcgagaaatgatatttgaatgaaaagtataattgtctatgctaacaaagataatgtatgtaatatccacttcccttcgtattatgtagcatgttttatcggtgatttttaactttctgttgtagtagtaggttagtagtttgaggttatagaggttcttactcttttgtagccacccggttgtgtagatatatatgacattgcaactggatcatcagggaagtcaccaccatggctttcttttcaacttgattcgatgtattactgactggggaagtgggttttcagagaccttaatgtatatatattttagtttctccctttgattcgtcttagatgaattcaagtgttgtgttgctccgggtggagtagtggatcgttgctaccatctccaagttaaagatactgttcaaatactattgagctaatgctagtgtgcgttcacaaagacaaaaatcactttatcattattc

SEQ ID NO: 19200 - protein, 218 aa, Glycine max
MLEAMESSVNGGFSHLQSCGDSSEEELSVLPRHTKVVVTGNNRTKSVLVGLQGVVKKAVGLGGWHWLVLTNGIEVKLQRNALSVIEAPTGNEEDDDLEFENMPWNGSDMASDDTHKSHKSRHRMYRTMGSSHKTMSRSFSGDSQSKGSVSMPNGSAKVDLSKLEMAALWRYWRHFNLVDAVPNPSKEQLVDVVQRHFMSQQIDELQVIVGFVQAAKRL

SEQ ID NO: 19201 - protein, 214 aa, Glycine max
MESSVNGGFSHLQSCGDSSEEELSVLPRHTKVVVTGNNRTKSVLVGLQGVVKKAVGLGGWHWLVLTNGIEVKLQRNALSVIEAPTGNEEDDDLEFENMPWNGSDMASDDTHKSHKSRHRMYRTMGSSHKTMSRSFSGDSQSKGSVSMPNGSAKVDLSKLEMAALWRYWRHFNLVDAVPNPSKEQLVDVVQRHFMSQQIDELQVIVGFVQAAKRL

SEQ ID NO: 19202 - protein, 117 aa, Glycine max
MPWNGSDMASDDTHKSHKSRHRMYRTMGSSHKTMSRSFSGDSQSKGSVSMPNGSAKVDLSKLEMAALWRYWRHFNLVDAVPNPSKEQLVDVVQRHFMSQQIDELQVIVGFVQAAKRL

SEQ ID NO: 19203 - DNA, 1091 bp, Glycine max
atcaattaattgtgcacgaaataccaattctgtcccaaatattatactaacatattagaagctgtccaattccaatggttccttgtgttaaagcaatggttgcgcttgtcctagcgtttctaatctctttgccttctatggttgcctatgctggcaacatgtaccaagatgttgatgtcacgtggggagatggcagaggcaagattctgaacaatggtcagcttcttactctgtctcttgacagagcctctggctctggctttcagtccaagaatcagtatctatttggcaaaattgacatgcaaatcaaacttgtgcctgcaaattccgctggcacggtcaccgctttttacttacgttcagaagggtcatcttgggatgagatagattttgagttcctgggaaatctgagtggtgatccttacatagttcatactaatgtgtacacacaaggcaagggtaatagggagcaacaattttatctttggtttgacccaactgcagattttcacacctattcctttctctggaatcctacacatgttgtattctatgttgatggaagaccaattagggagttcaagaacttggagggagtgggtgttgaatacccaaagaagcagcctatgaggttatatgccagtctatggaacgctgatgactgggcaacgagaggagggctagtgaagacagattggagtcaagcaccattcactgcttctttcaggaacttcaaagccaatggttgcgtttggtccaatggggtttcttcatgcaactccacctcctcttctgaaaaagcttggctatattctcaacggcttgattccacaaaccagaagaagctaaaatgggtgcacaagaattacatgatttatgattactgcacagaccttaagcgattccctcagggtctccctctcgaatgcacagtccgcaccaagtcataacaaaaatatatgcaaactgctattgtatttgcatgtgtgtgcattccattttcccattacactgcatcgcttctcaatctcattctttatgcaattaatttggatacaaagggcatcgtaatgtaacaattaatgtttatt

SEQ ID NO: 19204 - protein, 291 aa, Glycine max
MVPCVKAMVALVLAFLISLPSMVAYAGNMYQDVDVTWGDGRGKILNNGQLLTLSLDRASGSGFQSKNQYLFGKIDMQIKLVPANSAGTVTAFYLRSEGSSWDEIDFEFLGNLSGDPYIVHTNVYTQGKGNREQQFYLWFDPTADFHTYSFLWNPTHVVFYVDGRPIREFKNLEGVGVEYPKKQPMRLYASLWNADDWATRGGLVKTDWSQAPFTASFRNFKANGCVWSNGVSSCNSTSSSEKAWLYSQRLDSTNQKKLKWVHKNYMIYDYCTDLKRFPQGLPLECTVRTKS

SEQ ID NO: 19205 - protein, 284 aa, Glycine max
MVALVLAFLISLPSMVAYAGNMYQDVDVTWGDGRGKILNNGQLLTLSLDRASGSGFQSKNQYLFGKIDMQIKLVPANSAGTVTAFYLRSEGSSWDEIDFEFLGNLSGDPYIVHTNVYTQGKGNREQQFYLWFDPTADFHTYSFLWNPTHVVFYVDGRPIREFKNLEGVGVEYPKKQPMRLYASLWNADDWATRGGLVKTDWSQAPFTASFRNFKANGCVWSNGVSSCNSTSSSEKAWLYSQRLDSTNQKKLKWVHKNYMIYDYCTDLKRFPQGLPLECTVRTKS

SEQ ID NO: 19206 - protein, 270 aa, Glycine max
MVAYAGNMYQDVDVTWGDGRGKILNNGQLLTLSLDRASGSGFQSKNQYLFGKIDMQIKLVPANSAGTVTAFYLRSEGSSWDEIDFEFLGNLSGDPYIVHTNVYTQGKGNREQQFYLWFDPTADFHTYSFLWNPTHVVFYVDGRPIREFKNLEGVGVEYPKKQPMRLYASLWNADDWATRGGLVKTDWSQAPFTASFRNFKANGCVWSNGVSSCNSTSSSEKAWLYSQRLDSTNQKKLKWVHKNYMIYDYCTDLKRFPQGLPLECTVRTKS

SEQ ID NO: 19207 - DNA, 1829 bp, Glycine max
gaggcatcgaactcaaacattatcggtggacagaaacaccactgaacgaggttgcttgctccgacgccgaaatgaaagccccttcctctcttttcctcaaaggccacgttctcccttcttccatttttctcctcagaaactccaaaggaacacccaatgtgaaaatgcaccccatctggtgcttatgtaaagccattcaaactaattcatatgaaatttccaatggaagctatcatcccactgtgcaacaaacaacagaaaagaagacaatggaaaagctatccaggaaagttgaatctattggggcatttcaaaagttgcccatagtgatgccatctattgacattattggctctgcactcagaaaggcgaggaaggtttctccaacgaaaggaattgccaacattgcgaaaagggagaaaaataagggtgcaaagcaacttgatgcgttgatgaaagaaattgctgttcccttgaggacgtatgtggagaattttcctaacaaaatgcatcttcatccttatgagagatctcttattgagctgacacttggagatggatactacgaaatggtgctacgaaaggtagacagtttaaggaagagggtagtatctgttggaaaggaacatgcttcactttgcgctaagtcttcatcaaagcgagaagcagaggaaaggctgaatgaggggcttaagaaaattgaagagatttttgctcaagaacgaaaagttgttgatgatttgttaggcatagccaagactctcagggcaatgcctgtaattaatttggaaacaccaactctctgccttgttggagctcctaatgtaggcaaatcttctttggtccatgtactctctactggcaagcctgagatttgtaactatcccttcacaacaagaggaattcttatgggtcatattattttaaactttcagaagtttcaggtaacagatactccgggcctgctaaggagacatgatgaggacaggaataatttggaaaagttgactctggctgtcctttcgcacctgccgacagcagttttgtatgtccatgacctttctggggagtgtggcacctcaccttctgatcagttttcaatatacaaagaactcagagaaaggttcaatggacatttatggcttgatgtcgtgtcaaaatctgatttgttgaagacgtctcctgtagtctatgcaacagacgagcctcatccctcccaactcgagcttgaaaagtaccggaaatcaggtcccaatggagctattaacgtatctgtcaaaacacaaggagggctacatgagctaaagcagagagtgcatgaactgcttaatttgcagatggccaagataaatgatataagcaacaaccaggagaagtgaaaggtgtcactccactaagggttgatatcaaacttgtgaagaaacttcctgatcaaatagggaagtctgaaaccttcatgagccagaagcttatctttgtaaaatatgttagcagctctgtggccagcctccaagcaggaaaagaagcaaaggcttcttaattaataccttcaagcaattaagcattggtaggttgagcatacgaaacttccagaaaatgttcagtcacttttagctttgttgaggagatcatgttccacccgtattgggccttcttgaagaaacaataaatgcttgtttatcaacttttcagttcattgattgtcattggcttcaatcatgtgtcttaacttcttaagtccattgtcagaagtcttcataaattggttaatgttaagatctgaattgatattgagatataatgtattgatatattagatatgttcatag

SEQ ID NO: 19208 - protein, 458 aa, Glycine max
GIELKHYRWTETPLNEVACSDAEMKAPSSLFLKGHVLPSSIFLLRNSKGTPNVKMHPIWCLCKAIQTNSYEISNGSYHPTVQQTTEKKTMEKLSRKVESIGAFQKLPIVMPSIDIIGSALRKARKVSPTKGIANIAKREKNKGAKQLDALMKEIAVPLRTYVENFPNKMHLHPYERSLIELTLGDGYYEMVLRKVDSLRKRVVSVGKEHASLCAKSSSKREAEERLNEGLKKIEEIFAQERKVVDDLLGIAKTLRAMPVINLETPTLCLVGAPNVGKSSLVHVLSTGKPEICNYPFTTRGILMGHIILNFQKFQVTDTPGLLRRHDEDRNNLEKLTLAVLSHLPTAVLYVHDLSGECGTSPSDQFSIYKELRERFNGHLWLDVVSKSDLLKTSPVVYATDEPHPSQLELEKYRKSGPNGAINVSVKTQGGLHELKQRVHELLNLQMAKINDISNNQEK

SEQ ID NO: 19209 - protein, 435 aa, Glycine max
MKAPSSLFLKGHVLPSSIFLLRNSKGTPNVKMHPIWCLCKAIQTNSYEISNGSYHPTVQQTTEKKTMEKLSRKVESIGAFQKLPIVMPSIDIIGSALRKARKVSPTKGIANIAKREKNKGAKQLDALMKEIAVPLRTYVENFPNKMHLHPYERSLIELTLGDGYYEMVLRKVDSLRKRVVSVGKEHASLCAKSSSKREAEERLNEGLKKIEEIFAQERKVVDDLLGIAKTLRAMPVINLETPTLCLVGAPNVGKSSLVHVLSTGKPEICNYPFTTRGILMGHIILNFQKFQVTDTPGLLRRHDEDRNNLEKLTLAVLSHLPTAVLYVHDLSGECGTSPSDQFSIYKELRERFNGHLWLDVVSKSDLLKTSPVVYATDEPHPSQLELEKYRKSGPNGAINVSVKTQGGLHELKQRVHELLNLQMAKINDISNNQEK

SEQ ID NO: 19210 - protein, 404 aa, Glycine max
MHPIWCLCKAIQTNSYEISNGSYHPTVQQTTEKKTMEKLSRKVESIGAFQKLPIVMPSIDIIGSALRKARKVSPTKGIANIAKREKNKGAKQLDALMKEIAVPLRTYVENFPNKMHLHPYERSLIELTLGDGYYEMVLRKVDSLRKRVVSVGKEHASLCAKSSSKREAEERLNEGLKKIEEIFAQERKVVDDLLGIAKTLRAMPVINLETPTLCLVGAPNVGKSSLVHVLSTGKPEICNYPFTTRGILMGHIILNFQKFQVTDTPGLLRRHDEDRNNLEKLTLAVLSHLPTAVLYVHDLSGECGTSPSDQFSIYKELRERFNGHLWLDVVSKSDLLKTSPVVYATDEPHPSQLELEKYRKSGPNGAINVSVKTQGGLHELKQRVHELLNLQMAKINDISNNQEK

SEQ ID NO: 19211 - DNA, 1126 bp, Glycine max
acatgcgggccaaggtagtggctcagcgtgccccatatcttccaccctttggctattcctaaccattgagtacaacttcacattttagaagaataccccctcttttgctgcatcagaggagttgtaaattaagagcatggctgcacaagctcttgtatcatcatcttctcttaccttctcagcggaggctgcaagacaaagtcttggaccaagatcactccaatctccatttggcttctccagaaaagcctcctttcttgttaaggcagctgctaccccccctgtcaagcaaggatcagacagacctttgtggtttgcatcaaagcaaagtctttcttacttggatggcagccttccgggtgactatggatttgaccctctgggactttcagaccctgaaggaacaggagggttcattgagccgaaatggctagcatatggtgagataatcaatggtcgttatgcaatgttgggtgcagttggtgcaatagcacctgaaattctaggcaaggctggtctgatccctcaggagacagcactcccatggttcagaacgggtgtgttcccacctgcaggaacctacaactactgggcagactcctacacactgttcgtgtttgagatggcactgatgggatttgcagagcacagaagattccaagactgggccaaaccaggctctatgggcaaacaatacttcctaggactagagaagggtcttggaggttctggtgagccagcttatccaggaggacctttcttcaacccactaggctttggtaaggatgagaagtccttgaaggatttgaagctcaaggaagtgaagaatggaaggttggctatgttggcaatcttgggttactttgttcaagctcttgtcacaggtgttggcccataccaaaacctcctagatcatttggctgaccccgtgcacaacaacatcttgaccagtctcaagttccactgaatgtattatatgttattttacatattctttacgttgccaaaactcaactacctttctacctttctatatcatgtggacattttgttccttggtgtggcgctgtaagaaatgacatgtaaaacaactagaaacattcgacatctttcttgtgttaaaaag

SEQ ID NO: 19212 - protein, 276 aa, Glycine max; identical to SEQ ID NO: 16477

SEQ ID NO: 19213 - protein, 166 aa, Glycine max; identical to SEQ ID NO: 16478

SEQ ID NO: 19214 - DNA, 921 bp, Glycine max
gataaatagctgcaaccactttgatcttgactcatacaggtcccttgtagccacttgttctgtcttgaaaatccattttgcttcatttcattcctcacatttatttttcttccatggagaacttgttgggtctgctgagaattcatgttgaaaaaggtgtcaatcttgccatcagggatgtggtgagcagtgacccttatgttgtcatcaaaatgggcaagcagaagctgaagactcgggtagtcaataagaatctaaatcctgaatggaatgatgacttgaccttgtctatctctgaccctcatgctccaattcatctacatgtgtatgacaaggacacatttagcatggatgacaaaatgggggatgcagagtttttcataggtccatttattgaagcagtgaagatgcgcttatcaagtctccccaacaatactatagttacaaaagtgctacctagcagacaaaacagtttagctgaagagagtcacattgtgtggaaggatggcaaagttgtccaaaacatggttcttagactaagaaatgttgagactggggaagtggagctccagttgcattggattgacattcctggttcaaggcatctctagatcacagtccaaagcatggttcttacttcttagacttgccatattgtgaaaattagatttgcagcttcataaaccagcaggcagcagcaccttatgctttaatttctcctatccttttatctctttcgcacaacataaaaactgtttaatacgttggtattgcaattactagtagttaccgaaaaagaatgggagatgtagtttccctagctgtaatttagactttgaattatctgctagtcttgtgtaataatgtacaagaaatgtaacagaaagatgttgcacttaattagaacatccttagttaacg

SEQ ID NO: 19215 - protein, 165 aa, Glycine max
MENLLGLLRIHVEKGVNLAIRDVVSSDPYVVIKMGKQKLKTRVVNKNLNPEWNDDLTLSISDPHAPIHLHVYDKDTFSMDDKMGDAEFFIGPFIEAVKMRLSSLPNNTIVTKVLPSRQNSLAEESHIVWKDGKVVQNMVLRLRNVETGEVELQLHWIDIPGSRHL

SEQ ID NO: 19216 - protein, 132 aa, Glycine max
MGKQKLKTRVVNKNLNPEWNDDLTLSISDPHAPIHLHVYDKDTFSMDDKMGDAEFFIGPFIEAVKMRLSSLPNNTIVTKVLPSRQNSLAEESHIVWKDGKVVQNMVLRLRNVETGEVELQLHWIDIPGSRHL

SEQ ID NO: 19217 - protein, 87 aa, Glycine max
MDDKMGDAEFFIGPFIEAVKMRLSSLPNNTIVTKVLPSRQNSLAEESHIVWKDGKVVQNMVLRLRNVETGEVELQLHWIDIPGSRHL

SEQ ID NO: 19218 - DNA, 1653 bp, Glycine max
gaatatcaagtagatgaaaaccaactaatccgtgcagaaaaagtgccagcttgtagaagatccatcaaacagcaatcaaggcatgttggccaaaataaaaatggtgttcagaggctactgcaaactcgtactcacgaaggtggaagtccttttaatcgtgtttttcctgttagtcctgctccatttccttcagctcccccacctgccccagcaacgccaccagtggttcagaagccagctcctgttgaccgaaataattctgcttctccttctcccctgcctggaccacgatctgcaccgctatataaaagtagctcatcaaagaaccatgtagttgttattttggctggagttatgggtggtgctgtatttcttctcatttcaatcattggcctatatctctgtaaaacaaacaaggtagctactgtaaaaccttgggccacaggattaagcggacagcttcagaacgcatttgtaacaggtgtgccaaagctaaagagatcagagcttgaagcagcatgtgaagattttagtaatgtaattggtacttcatccattggtacagtgtacaaagggactttatctagtggtgttgaaatagctgtggcatctgttgcagcgacatcatccaaagattggtcaaagactttagaagcccaatttaggaacaagatagatacattatcaaaagtgaaccacaagaattttgtaaatcttcttgtacattgtgaagaagatgagcctttcaccagaatggtggtttttgagtatgccccgaatggaacactctttgagcatttacacataaaagaatctgagcacttggattggggaacaagacttagaattgccatgggcatggcttactgcctacaacatatgcaccagttggagcctcctttggtccttagcaacctgaattcttcagctgtccaactcactgatgattatgctgccaaaatctctgatttgagtttcttaaatgaaatagcttcagctgtgataaaatctcctgctagaaaaaacactgacatgacaccagcaagtaacatttacagctttggtgttatattatttgaaatggtaactggcagactcccttattcagtggacaatgatggctcacttgatgactgggcttcacactatttacaaggggatcagcccctcaaagaaatggtggatccgactctagcatccttccaagaagaacaactagaacaagtcgatgctttgattaaatcttgtgtccatcctgatcaaaagcaaagaccaacaatgaaagaagtttgtgtgagattaagagagataacaaaaataacacctgatgcagctgttccaaagctttctccactttggtgggcagagcttgagattgcttctgtaaatgcaagctgaaatcggtaaatcaggttgtaagtatggagttcttaccttcctcatcctttttccatcggtgaaggcacaaaaatgtattcacctgtagattaatacatcttgtgttaattatggaagagaggcaaatcacatgtacataagggagataaaagaatgcgattttttcttttcttttcctgcggtgcttcgtttggttatggtttatgaaattatactaacaaaaaaaagtttcacatcagttaatttcatttgctc

SEQ ID NO: 19219 - protein, 465 aa, Glycine max
EYQVDENQLIRAEKVPACRRSIKQQSRHVGQNKNGVQRLLQTRTHEGGSPFNRVFPVSPAPFPSAPPPAPATPPVVQKPAPVDRNNSASPSPLPGPRSAPLYKSSSSKNHVVVILAGVMGGAVFLLISIIGLYLCKTNKVATVKPWATGLSGQLQNAFVTGVPKLKRSELEAACEDFSNVIGTSSIGTVYKGTLSSGVEIAVASVAATSSKDWSKTLEAQFRNKIDTLSKVNHKNFVNLLVHCEEDEPFTRMVVFEYAPNGTLFEHLHIKESEHLDWGTRLRIAMGMAYCLQHMHQLEPPLVLSNLNSSAVQLTDDYAAKISDLSFLNEIASAVIKSPARKNTDMTPASNIYSFGVILFEMVTGRLPYSVDNDGSLDDWASHYLQGDQPLKEMVDPTLASFQEEQLEQVDALIKSCVHPDQKQRPTMKEVCVRLREITKITPDAAVPKLSPLWWAELEIASVNAS

SEQ ID NO: 19220 - protein, 347 aa, Glycine max
MGGAVFLLISIIGLYLCKTNKVATVKPWATGLSGQLQNAFVTGVPKLKRSELEAACEDFSNVIGTSSIGTVYKGTLSSGVEIAVASVAATSSKDWSKTLEAQFRNKIDTLSKVNHKNFVNLLVHCEEDEPFTRMVVFEYAPNGTLFEHLHIKESEHLDWGTRLRIAMGMAYCLQHMHQLEPPLVLSNLNSSAVQLTDDYAAKISDLSFLNEIASAVIKSPARKNTDMTPASNIYSFGVILFEMVTGRLPYSVDNDGSLDDWASHYLQGDQPLKEMVDPTLASFQEEQLEQVDALIKSCVHPDQKQRPTMKEVCVRLREITKITPDAAVPKLSPLWWAELEIASVNAS

SEQ ID NO: 19221 - DNA, 997 bp, Glycine max
aataaagccactcgccgctctctgcaccctcctctctctctctttggtgctggacaaggacaagtaaccaaaattccaagaagggttcattaatacatggccttagagcactacctttcgcaggaatggaaaaccagccccagcccgagcccgagccccatgacagtgacagaaaaccttgatgggtgttttgattgcaacatctgcttagattttgcacatgaaccagtggtcaccctttgtggccacctatactgctggccctgcatctacaagtggctccatgtccaaagtgcttctcttgcaccagatgagcaccctcaatgccctgtttgcaaggatgacatatgccacaccacaatggttcctctctatggccgtggccagggcatagctcatagtgaccgtgatggaaaggcatcatcctatagaggcagttttataccaccaagaccacctgctttgggtgctcaatctctcatgtcaacatcatctcaaagtgctcaacaacttccatatcgcaacccttatcagaatcagcatttcaaccctcctttgtaccaagatgaggatgaatcatcatcacaaatgctgaatcctggtgccaacatggtggcaccaggattcccccaccttgtggttgggatgtttggagagatgctttatgccagagtctttggcaactcagaaaatttatacaactatccaaattcttatcacctggggggaagtaataataatagccccaggttgagaaggcaagagatgcaagcaaacaaatcattgaacagaatctcaatttttctgttttgttgcttccttctgtgtcttattgtcttctaagcaagtaattggattgttattatctattgtcccattgtataatttgtaaagaaacacgggtgtaagctctgagaacgagatagattgagcaatgttagggtaaaataactggtgttcttcaacatttactgcaatatatcagagctcatttttc

SEQ ID NO: 19222 - protein, 248 aa, Glycine max
MALEHYLSQEWKTSPSPSPSPMTVTENLDGCFDCNICLDFAHEPVVTLCGHLYCWPCIYKWLHVQSASLAPDEHPQCPVCKDDICHTTMVPLYGRGQGIAHSDRDGKASSYRGSFIPPRPPALGAQSLMSTSSQSAQQLPYRNPYQNQHFNPPLYQDEDESSSQMLNPGANMVAPGFPHLVVGMFGEMLYARVFGNSENLYNYPNSYHLGGSNNNSPRLRRQEMQANKSLNRISIFLFCCFLLCLIVF

SEQ ID NO: 19223 - protein, 227 aa, Glycine max
MTVTENLDGCFDCNICLDFAHEPVVTLCGHLYCWPCIYKWLHVQSASLAPDEHPQCPVCKDDICHTTMVPLYGRGQGIAHSDRDGKASSYRGSFIPPRPPALGAQSLMSTSSQSAQQLPYRNPYQNQHFNPPLYQDEDESSSQMLNPGANMVAPGFPHLVVGMFGEMLYARVFGNSENLYNYPNSYHLGGSNNNSPRLRRQEMQANKSLNRISIFLFCCFLLCLIVF

SEQ ID NO: 19224 - protein, 160 aa, Glycine max
MVPLYGRGQGIAHSDRDGKASSYRGSFIPPRPPALGAQSLMSTSSQSAQQLPYRNPYQNQHFNPPLYQDEDESSSQMLNPGANMVAPGFPHLVVGMFGEMLYARVFGNSENLYNYPNSYHLGGSNNNSPRLRRQEMQANKSLNRISIFLFCCFLLCLIVF

SEQ ID NO: 19225 - DNA, 1369 bp, Glycine max
aatcgacacctcccaatggcccatcctcctcaaaaactatgagcgtctcaatgtccgcaccggccactacacccccatcccctccggctactcccccttgaagcgccccctcgccgagtacctcaaatacggcgtcctcaacctcgacaagcccgccaacccttcctcccacgaggtcgtcgcctggatcaagcgcctcctccgcgtcgaaaagaccggccactccggcaccctcgaccccaaggtcaccggcaacctcatcgtctgcatcgaccgcgccactcgcctcgtcaagtcccagcagggcgccggcaaggagtacgtctgcatcgcccgcctccactccgacgtccccgacgtctccaaggtcgcccgcgccctcgaaaccctcaccggcgccgtcttccagcgtccccccttgatttccgccgtcaagcgccagctccggattcggaccatctacgaaagtaagctccttgagtatgaccctgataggcacttggttgttttctggatttcctgtgaggctggcacctatgttaggactatgtgtgtgcacttaggcttgcttcttggtgtgggtagccacatgcaggagcttaggagggtcaggtctgggatcatgggggagaaggataacatggtctccatgcatgatgtcatggatgctcagtgggtttatgataattatagggatgagacttatttgaggagggttgttatgcccttggagattcttctgactagctataagaggcttgttgtcaaggattctgctgtcaatgctatttgttatggtgctaagttcatgattcctgggttgcttaggtttgagaatgatattgatgttggggaggaggttgtgcttatgactaccaagggtgaggctattgctcttgggattgctgagatgactactgctgttatggccacttgtgatcatggggttgtggccaagatcaagagggtggtcatggatagggatacttatcccaggaagtggggcttgggcccgagggcgtccatgaagaagaggcttattagtgaagggaagctcgataagcatgggaagcccaatgagaagaccccccaggagtggcttaggaatttggttttgccaactggtggggatagtgtgattgctggcttggctgctgcgccggaacctgaggatgacaagattcagaagaaagagggagatggggaagggaagaagagaaagaagcatgaaagcacagatagcctcgttgctgttcctgctaagaaggtgaaagtggatgaagtggaagaggttgaaaagcaagaaaaggtgaaggtgaagaaggtagatgaagagactgtggaggttgaagttgagaagaaggagaag

SEQ ID NO: 19226 - protein, 456 aa, Glycine max
IDTSQWPILLKNYERLNVRTGHYTPIPSGYSPLKRPLAEYLKYGVLNLDKPANPSSHEVVAWIKRLLRVEKTGHSGTLDPKVTGNLIVCIDRATRLVKSQQGAGKEYVCIARLHSDVPDVSKVARALETLTGAVFQRPPLISAVKRQLRIRTIYESKLLEYDPDRHLVVFWISCEAGTYVRTMCVHLGLLLGVGSHMQELRRVRSGIMGEKDNMVSMHDVMDAQWVYDNYRDETYLRRVVMPLEILLTSYKRLVVKDSAVNAICYGAKFMIPGLLRFENDIDVGEEVVLMTTKGEAIALGIAEMTTAVMATCDHGVVAKIKRVVMDRDTYPRKWGLGPRASMKKRLISEGKLDKHGKPNEKTPQEWLRNLVLPTGGDSVIAGLAAAPEPEDDKIQKKEGDGEGKKRKKHESTDSLVAVPAKKVKVDEVEEVEKQEKVKVKKVDEETVEVEVEKKEK

SEQ ID NO: 19227 - protein, 274 aa, Glycine max
MCVHLGLLLGVGSHMQELRRVRSGIMGEKDNMVSMHDVMDAQWVYDNYRDETYLRRVVMPLEILLTSYKRLVVKDSAVNAICYGAKFMIPGLLRFENDIDVGEEVVLMTTKGEAIALGIAEMTTAVMATCDHGVVAKIKRVVMDRDTYPRKWGLGPRASMKKRLISEGKLDKHGKPNEKTPQEWLRNLVLPTGGDSVIAGLAAAPEPEDDKIQKKEGDGEGKKRKKHESTDSLVAVPAKKVKVDEVEEVEKQEKVKVKKVDEETVEVEVEKKEK

SEQ ID NO: 19228 - protein, 260 aa, Glycine max
MQELRRVRSGIMGEKDNMVSMHDVMDAQWVYDNYRDETYLRRVVMPLEILLTSYKRLVVKDSAVNAICYGAKFMIPGLLRFENDIDVGEEVVLMTTKGEAIALGIAEMTTAVMATCDHGVVAKIKRVVMDRDTYPRKWGLGPRASMKKRLISEGKLDKHGKPNEKTPQEWLRNLVLPTGGDSVIAGLAAAPEPEDDKIQKKEGDGEGKKRKKHESTDSLVAVPAKKVKVDEVEEVEKQEKVKVKKVDEETVEVEVEKKEK

SEQ ID NO: 19229 - DNA, 1470 bp, Glycine max
atgatgtcaacaagataaatccagcatgtacaacaagagaagaaactgaggagtcagaggatgaagaaaacaacatcgacgatatatccaagaatatagcatcaaacatgtctatcgatgatggtgaaacacttaccaaatccgaaggaaaggccgaggaatccagtgctaaattggacattcaaagttctttgcctgaggtagtgaagccctgtggacgtattaatgcttgcatggccgttggaagagatacattatacatatatggtggcatgatggagattaaagatcaagaaatcactcttgatgatttgtattctttgaaccttagcaaacttgatgaatggaaatgcattataccggtttgttattttttctcaagttgactagctttttacctatacatgcatatgttctataccataggtatcaatcatgaacagtggtatgtagcagctactccaaaaacgctatagtggtatagcccatagcgggatgcccattattttcaaacattttatacagtttatataatttataataaatacatataaatgctcaaaatttaaaaaataaaaataatactaaaaaatattgacatggtcataattaacaaaaacaggttatagatcttagctgttaagcaaacatacaagtaaatagtaacaaaggataccatgtctaactaaagggacagagactgctatgtctcataaaaattggttaagtaaaaaataatttcttagttgttggctgataaaagtctgctactgcaaagttggtgaatgtttgtaccttacccagttccaagagtaaaactaggtctttgaatatgagccatgctgaattgctgatgctgttaatatagcttttgttgattcggcttatttaatctaagaatatattgtgattgtaatttcctacttatatacacatttttaccttatttgctataactttacttggcttttcttcaacccaggcatctgaatctgaatgggtggaagcttcagatgatgatgaagaaaatgaagatgatgatgaagatgaatccgatggtgatagtctgactgatgaggatgaagatgacgaggaagaggaggaggaagaggctcagaatgcatccgttcaggtgggagatgccgttgctttaatcaaaggggtgggaaagaatttgcggaggaaagaaaggagggtacggatagagcagattagagctagtcttggcttgtcagattcacagagaacaccctcgccaggagaatccttgaaggatttctacaggcgtacaaatatgtattggcaaatggcagcccatgaacatactcaacacactggaaaagaactccgcaaggatggttttgatcttgctgaagctcggtacagggagctaaaacctattcttgatgagctggctctattagaagctgagcagaaagcagaggaggccgaaggaccagaaactagtgt

SEQ ID NO: 19230 - protein, 127 aa, Glycine max
DVNKINPACTTREETEESEDEENNIDDISKNIASNMSIDDGETLTKSEGKAEESSAKLDIQSSLPEVVKPCGRINACMAVGRDTLYIYGGMMEIKDQEITLDDLYSLNLSKLDEWKCIIPVCYFFSS

SEQ ID NO: 19231 - protein, 92 aa, Glycine max
MSIDDGETLTKSEGKAEESSAKLDIQSSLPEVVKPCGRINACMAVGRDTLYIYGGMMEIKDQEITLDDLYSLNLSKLDEWKCIIPVCYFFSS

SEQ ID NO: 19232 - DNA, 1132 bp, Glycine max
aaagtgatctagagtcaatggattatgctggaatgtttacaaatacccaatggacttccaatgtgtcttcacatcacaagagacaagcttttgtgatgtatttgcagacgaatccaggaggaatcactatatttggatggacagttgaccggtctctggtcaacaccatatttttccttgaattaagtctggttacctttgttctcggtcagaccctaatctaaggataaaatttgcaaaatgacataaaaaaaaaaaccctttggctttaggtcttcctggttaccaccatcaatttgattgaaagtcctccgcatgccgagccagaatgtcgcatgcacacagtagccatgcagagaagtagagaaacagtgtgtattgtccacccagggactggaccaggcacactactgttaaatgcgaggcctcttcctcaatccccagcaacacagatgtctccaaaattctattcgtcattctcattcctcagtcagcatacttatctccgtggatcttgtgacttctaatttgcacaatatgcaatcaaacaacataccttaaactaataccaccttaaaagatacttgggagttttctgcctactagggctcctcgaagcagtcgttctcaaattgtttcaattcataacctaaggtttgcatcatctcatttgtaatcgaaggatcatagctatagtcatgtctccccctgcgttgaagattccagcctctggacatttgtgacctttataagagcgttcgcatgttgaactcgtatgtgttttgctttggagtagttggaagcaagaaagggtgttgggcactaggaaggacataaaggtttaaattttcaactaggaatatggagagaacctaaggaccaatcgtgttgggtgtgcaagtgccggtggatagtcatattaccgagtaatgttgcttgcaaattctgatctagttagattacagtgattgtttttattattattatttgagatatgcctaaggctgatttcaattgtataatagacaataatagagttgcgtatttcgaatgacaagtttataattattggttggtcgtgcaccaaccctcttttattttcttcacgaaatttataaatttctttttaaac

SEQ ID NO: 19233 - protein, 73 aa, Glycine max
SDLESMDYAGMFTNTQWTSNVSSHHKRQAFVMYLQTNPGGITIFGWTVDRSLVNTIFFLELSLVTFVLGQTLI

SEQ ID NO: 19234 - protein, 68 aa, Glycine max
MDYAGMFTNTQWTSNVSSHHKRQAFVMYLQTNPGGITIFGWTVDRSLVNTIFFLELSLVTFVLGQTLI

SEQ ID NO: 19235 - protein, 63 aa, Glycine max
MFTNTQWTSNVSSHHKRQAFVMYLQTNPGGITIFGWTVDRSLVNTIFFLELSLVTFVLGQTLI

SEQ ID NO: 19236 - DNA, 1239 bp, Glycine max
gacttagttgagtgtgggaagatgagaagtgtgagcctgagaccagagcttcacattccaatttgttcttcaaaccctccatcatgtgtcaaacccatcaaattagtggtagcatcatcgtatgggaaaaatttgaaaaatccaccttccaaatttgcaatcactcttagagagcacagaacaactttggagcatgcggcgaggttgccattactgaaacatgattccggtattgtggtaatgggagcggtgtgtgtggtggggatattggcggtggttctgagcgaggaaaaggccttggctttgggcccagaaggcccacttgtggaagagttttgggacaacgtgaggagatatggactctacgctctcaccgtcagcacaggtgccctttacaccatcttccgccctatagcagaacttctcaagaatcccatttccgcaattttcatccttgctcttttcgggggttcaatcttcattgtttctcaagtcctctctgccatggttggtgtttctgaattttcttacgactttggatactagactacctccaattatattatatgcaaaataaacccctttatttatacgttctcatcttattattaccgcttgctccactgcttccggctagtcggtaaaacccaaaatagtagggattagaaactttcttttacatgttttgtttaggctgtttaagcatggcaacgggcttgaacccgtggagctcaatgtccccattttaacagaaaatccgaagggtcgagtttgggtttttcccacggtgttcgaagtccgatcaggagtcactctcaaatccacccatatatattgaagccctgaaacggatttctcaattttcactctcactcaccaatactactccgccgcttctccgttctcactccccaagacctcaagccagaaccctctcgcacctcccaggccaacattatcgcacctccacgaccaacaacaacaaccttctcgtacttttcactcctccaatgaacatcgtcagcctcgatctcacatttttttcccgtttcacgctcatagcttagtttctccttctgttattttttctttagggttgggattgatttcgaatttgggggtgtaggattgttggtattttctttcaaattttgttaatttaagttgtgatgattcttgttatgcacttggatttggattgatttcttcaatttgtcaatcctatttggttggggtttt

SEQ ID NO: 19237 - protein, 181 aa, Glycine max
DLVECGKMRSVSLRPELHIPICSSNPPSCVKPIKLVVASSYGKNLKNPPSKFAITLREHRTTLEHAARLPLLKHDSGIVVMGAVCVVGILAVVLSEEKALALGPEGPLVEEFWDNVRRYGLYALTVSTGALYTIFRPIAELLKNPISAIFILALFGGSIFIVSQVLSAMVGVSEFSYDFGY

SEQ ID NO: 19238 - protein, 174 aa, Glycine max
MRSVSLRPELHIPICSSNPPSCVKPIKLVVASSYGKNLKNPPSKFAITLREHRTTLEHAARLPLLKHDSGIVVMGAVCVVGILAVVLSEEKALALGPEGPLVEEFWDNVRRYGLYALTVSTGALYTIFRPIAELLKNPISAIFILALFGGSIFIVSQVLSAMVGVSEFSYDFGY

SEQ ID NO: 19239 - protein, 101 aa, Glycine max
MGAVCVVGILAVVLSEEKALALGPEGPLVEEFWDNVRRYGLYALTVSTGALYTIFRPIAELLKNPISAIFILALFGGSIFIVSQVLSAMVGVSEFSYDFGY

SEQ ID NO: 19240 - DNA, 1157 bp, Glycine max
tctctctctcattgctcctctgattcattcacccaatttttttctgtcctcttttcctctcagaggagcctctgagtctgctcaggtgttccttgtcaagagatccttttgtttttgaggtgtgaagggaaagagaaaaaagatgaatcagtgtggttatcagcagaagaaggccttgacaagctgtgaggagatgaggatggaatctgtggtgtgccctaaacctcgaagattgggcctgttgaaccactcaacctttgataaccacatcagacccttgaggccaccctttatcaactaccaatcagaaattgaagattcaggagttggggctgagcttatggacattattctccccaagagatctggggggcaagtggcttcatcaccgccatttttctgtggatctccacctagcagggcttcaaaccctgtgatccaagatgagcaatttggtagtaatggtaatgagagttttggttcattttccttggcacccccttcaccatcttcctcagcaagaggctgtgttaggatgaagtttggtcacaccccagcagcagtgaggattgaaggttttgattgcctcagcagggataggcgcaactgcagcatttctgctgttgcttaattcaattttaaacaaagaaaaagaaaagaaaagaggattaaagaatcaccaaagttctaagagcagaggagatttttggaactgaggagctaatcttaatttcaatcttattgtattatatctatatgtatataccgttgttcatgagttaattaaggtgtcatgtataattgagagaaggtgggaattttatattcttagttttatcctttttgaagaataataaaaaaagggggacacatcaaggagaaaagaaaaacgcaagcaaaaagtcttgttcttctctcttgttaggttttatatgatggggtcttttagattgaaactttcatgtgagtttcatggagagtctgtaacttatatgtaatttgaaactcagctcctccttttgtaattggaatggtggaggaatttgaggatttatctttggaatcttgtaaaatatattttttgtgggtgcccctatttgcaggtgtcgcctattggattatatgaaaagaaatattgttcatactttatacatggc

SEQ ID NO: 19241 - protein, 162 aa, Glycine max
MNQCGYQQKKALTSCEEMRMESVVCPKPRRLGLLNHSTFDNHIRPLRPPFINYQSEIEDSGVGAELMDIILPKRSGGQVASSPPFFCGSPPSRASNPVIQDEQFGSNGNESFGSFSLAPPSPSSSARGCVRMKFGHTPAAVRIEGFDCLSRDRRNCSISAVA

SEQ ID NO: 19242 - protein, 145 aa, Glycine max
MRMESVVCPKPRRLGLLNHSTFDNHIRPLRPPFINYQSEIEDSGVGAELMDIILPKRSGGQVASSPPFFCGSPPSRASNPVIQDEQFGSNGNESFGSFSLAPPSPSSSARGCVRMKFGHTPAAVRIEGFDCLSRDRRNCSISAVA

SEQ ID NO: 19243 - protein, 143 aa, Glycine max
MESVVCPKPRRLGLLNHSTFDNHIRPLRPPFINYQSEIEDSGVGAELMDIILPKRSGGQVASSPPFFCGSPPSRASNPVIQDEQFGSNGNESFGSFSLAPPSPSSSARGCVRMKFGHTPAAVRIEGFDCLSRDRRNCSISAVA

SEQ ID NO: 19244 - DNA, 1665 bp, Glycine max
gttgatttcccggcccctttttgatgcaaaaggaaatgagcagttgaagagatccgtgcaagcaatgattcagagaacattgtccaatatgagaactcctggttatattggtgaagtcatctgtaccaatatcaatactgggaatgttccaccttgcattgtaggaatgagagttcttcctatggaaatgagtgaggtatgggctgtagaagtcgacattgaatattctggaggtgctctattagagattgaaacaaggcttgaagttcgtgaactagagctccatgcagggacagaagactcaaatccacagccaaacaatgctggagctgtcccatcagatcttctagaaggttttaaatattttggagagcaatttaattttgcagaaagaacgaatgatgtacaagagcaaaaagaagatggtgattggaactctgatgtttccaggagctttaagagaactatgtcttccctaaatcaaggatcaagatggaaatctatattaaattctgttgccaaacaggtttcacaggttcctctctctttggcaataagagtcacttctcttagaggaacaatgcgcttgcatataaagccacctccctctgatcgattgtggtatggtttcacatcaatgccagacattgatttcaacttggagtcatctgttggagaacataagataaccagtgcacattttgctttattcctggtcaataggataaagacaggagttcgagaaactttggtgctcccaaattgtgaaagtttatgcattccatggatgttagcagaaaaggatgattgggttcctcgaactgttgctccattcatatggattaaccaagaatatggaaacgagagatccacttcaattgataccaataatcaaccttctggtggagtggaagctagtttggaggttggtgcaagcacctcaagtaatgatccagagcacaaacaacaaaatccagagagtactgaatctagtcaagaagcaactaggacatcatcaaattctctagaacttccattaagttcctctaattcagtaacactagaaagcagccggagtttggaagaacagaatacaccattgttagagaatgacaaacctaaaaaaaccagcgatattaaagaatttaggacatcattgatacagaatgacaaactacttgaaactaatgaacaaaatatagagaataattctgagtcccaatcacaacacagtgtggtgatgccgaaacaaaatcattctgttgaacatgaggatggactgccaaagaaaatggggagaagggaaaggatgcttgatctgggaaagaagatgagcgagaaattggaagagaaaaggcgtcacattgaagaaaagagcaggcacattgttgagaagatgcgaggaccataagaaatataaaccaggtaaatgacagaatgtatatgtgtagtttatgatctgttgatatgtgaaagacaagtactatccatagaacagcagaatgtggggtatccttattgttgcaataaatgagttttatattttctgggtgctcataggatcaaaaattgaaatggaactagataatcttcttgtaattttgccattgccacagggtacgttagaaaattcatttaatattgagttctatagattcatcattc

SEQ ID NO: 19245 - protein, 469 aa, Glycine max
LISRPLFDAKGNEQLKRSVQAMIQRTLSNMRTPGYIGEVICTNINTGNVPPCIVGMRVLPMEMSEVWAVEVDIEYSGGALLEIETRLEVRELELHAGTEDSNPQPNNAGAVPSDLLEGFKYFGEQFNFAERTNDVQEQKEDGDWNSDVSRSFKRTMSSLNQGSRWKSILNSVAKQVSQVPLSLAIRVTSLRGTMRLHIKPPPSDRLWYGFTSMPDIDFNLESSVGEHKITSAHFALFLVNRIKTGVRETLVLPNCESLCIPWMLAEKDDWVPRTVAPFIWINQEYGNERSTSIDTNNQPSGGVEASLEVGASTSSNDPEHKQQNPESTESSQEATRTSSNSLELPLSSSNSVTLESSRSLEEQNTPLLENDKPKKTSDIKEFRTSLIQNDKLLETNEQNIENNSESQSQHSVVMPKQNHSVEHEDGLPKKMGRRERMLDLGKKMSEKLEEKRRHIEEKSRHIVEKMRGP

SEQ ID NO: 19246 - protein, 448 aa, Glycine max
MIQRTLSNMRTPGYIGEVICTNINTGNVPPCIVGMRVLPMEMSEVWAVEVDIEYSGGALLEIETRLEVRELELHAGTEDSNPQPNNAGAVPSDLLEGFKYFGEQFNFAERTNDVQEQKEDGDWNSDVSRSFKRTMSSLNQGSRWKSILNSVAKQVSQVPLSLAIRVTSLRGTMRLHIKPPPSDRLWYGFTSMPDIDFNLESSVGEHKITSAHFALFLVNRIKTGVRETLVLPNCESLCIPWMLAEKDDWVPRTVAPFIWINQEYGNERSTSIDTNNQPSGGVEASLEVGASTSSNDPEHKQQNPESTESSQEATRTSSNSLELPLSSSNSVTLESSRSLEEQNTPLLENDKPKKTSDIKEFRTSLIQNDKLLETNEQNIENNSESQSQHSVVMPKQNHSVEHEDGLPKKMGRRERMLDLGKKMSEKLEEKRRHIEEKSRHIVEKMRGP

SEQ ID NO: 19247 - protein, 440 aa, Glycine max
MRTPGYIGEVICTNINTGNVPPCIVGMRVLPMEMSEVWAVEVDIEYSGGALLEIETRLEVRELELHAGTEDSNPQPNNAGAVPSDLLEGFKYFGEQFNFAERTNDVQEQKEDGDWNSDVSRSFKRTMSSLNQGSRWKSILNSVAKQVSQVPLSLAIRVTSLRGTMRLHIKPPPSDRLWYGFTSMPDIDFNLESSVGEHKITSAHFALFLVNRIKTGVRETLVLPNCESLCIPWMLAEKDDWVPRTVAPFIWINQEYGNERSTSIDTNNQPSGGVEASLEVGASTSSNDPEHKQQNPESTESSQEATRTSSNSLELPLSSSNSVTLESSRSLEEQNTPLLENDKPKKTSDIKEFRTSLIQNDKLLETNEQNIENNSESQSQHSVVMPKQNHSVEHEDGLPKKMGRRERMLDLGKKMSEKLEEKRRHIEEKSRHIVEKMRGP

SEQ ID NO: 19248 - DNA, 1353 bp, Glycine max
ggtctccctcacatcgcacacgctttcgctttctttctctcactgtttctctggagtttgtgatctgagtataaagatggagctgagtagcatcaaagatgcatttgatcgtgtagccaagaagcaaaaattatcctcttccaagtctcaagaagttgttgaccaggtggggtgtgaaattgagcaagcattggcaacaattcagtcatcacatgacccctcagctcctgttgaccagaaatctgttctcacagaacttaagtttaagcttaatgctattggaccacttcaacagttggaaggatcaaataaggaattgaacataagtcttaccaagtatcaaaaactccttgaaaaattgttaaaccctgacatatcaaaggcatacagaaatgtggactttgatactcatattgtcaatcagataattgcaaaccacttttaccatcaaggtttgtttgatcttggagatagcatcataaatgaggctggagagcctgatgcagctgcacttagatctcaatttttggaaatgcatcagattattggagctatgagggagagaaaccttcagcctgctctcacatgggtctctgctaatcgagagaaacttgttcagattggttcaaatcttgagcttaagattcacacgttgcagtttgtagaggtcctgcaaaatggaacacgagctgatgccttaaaatatgcccgaacataccttgctccttttgcttctctcaacaagggtgagttcccaaagcttatgggttgcctcttgtatgcaggaaggctagagagctccccttattctgagctgttgtccccaattcattgggagatgacaactgaagagctcacacggcagttctgcactctcctgggtcagtcctatgagaacccactgagtgtagcagttgcagcaggagttgaggggttgcctacactgttaaagcttgcaaatgtaatggcagcaaagaagcaggagtggcaggaaatgaagcagttgccggtgccggttgaattgggtaaggagtttcagttccattcgatttttgtttgccctgtgagtagggatcaaggaagtgaagaaaatcctccaatgctgctgccatgcttacatgtcctttgcaaacaatcaattatgaagctatcaaaaaacagcacccgaacattcaagtgtccatactgtccagccgaagctactgttgcaaactgcaaacagctgtatttctgatgatgtttatgtattttatctcttccatacatttcatttgtgcaaatacagcatttacagctttctggttgtatataaatattctaaaaatcttttacattttgataagaccaacgagt

SEQ ID NO: 19249 - protein, 410 aa, Glycine max
VSLTSHTLSLSFSHCFSGVCDLSIKMELSSIKDAFDRVAKKQKLSSSKSQEVVDQVGCEIEQALATIQSSHDPSAPVDQKSVLTELKFKLNAIGPLQQLEGSNKELNISLTKYQKLLEKLLNPDISKAYRNVDFDTHIVNQIIANHFYHQGLFDLGDSIINEAGEPDAAALRSQFLEMHQIIGAMRERNLQPALTWVSANREKLVQIGSNLELKIHTLQFVEVLQNGTRADALKYARTYLAPFASLNKGEFPKLMGCLLYAGRLESSPYSELLSPIHWEMTTEELTRQFCTLLGQSYENPLSVAVAAGVEGLPTLLKLANVMAAKKQEWQEMKQLPVPVELGKEFQFHSIFVCPVSRDQGSEENPPMLLPCLHVLCKQSIMKLSKNSTRTFKCPYCPAEATVANCKQLYF

SEQ ID NO: 19250 - protein, 385 aa, Glycine max
MELSSIKDAFDRVAKKQKLSSSKSQEVVDQVGCEIEQALATIQSSHDPSAPVDQKSVLTELKFKLNAIGPLQQLEGSNKELNISLTKYQKLLEKLLNPDISKAYRNVDFDTHIVNQIIANHFYHQGLFDLGDSIINEAGEPDAAALRSQFLEMHQIIGAMRERNLQPALTWVSANREKLVQIGSNLELKIHTLQFVEVLQNGTRADALKYARTYLAPFASLNKGEFPKLMGCLLYAGRLESSPYSELLSPIHWEMTTEELTRQFCTLLGQSYENPLSVAVAAGVEGLPTLLKLANVMAAKKQEWQEMKQLPVPVELGKEFQFHSIFVCPVSRDQGSEENPPMLLPCLHVLCKQSIMKLSKNSTRTFKCPYCPAEATVANCKQLYF

SEQ ID NO: 19251 - protein, 233 aa, Glycine max
MHQIIGAMRERNLQPALTWVSANREKLVQIGSNLELKIHTLQFVEVLQNGTRADALKYARTYLAPFASLNKGEFPKLMGCLLYAGRLESSPYSELLSPIHWEMTTEELTRQFCTLLGQSYENPLSVAVAAGVEGLPTLLKLANVMAAKKQEWQEMKQLPVPVELGKEFQFHSIFVCPVSRDQGSEENPPMLLPCLHVLCKQSIMKLSKNSTRTFKCPYCPAEATVANCKQLYF

SEQ ID NO: 19252 - DNA, 1314 bp, Glycine max
aagaaaaacaaaaccctccttcttgagagagaaagaagaaagatggctccgaatcttgaatgtcgcatgtacgaagcgaagtacccggaggtggacatggcggtgatgatacaggtgaagaacatagcggacatgggggcctacgtgtcgctgctggagtacaacaacatcgagggaatgatcttgttctccgagctctcccgccgtcggattcggagcgtgagcagcctcatcaaggttggacgaatcgagccggtgatggtgctccgtgtcgacaaggaaaagggttacatcgatctcagcaagcgcagggtctccgaagaagacatccaggcctgcgaggagaggtacaacaagagcaagctcgtccactccatcatgcgccacgtcgccgaaaccctcaacatcgatttggaggaactttatattcacattggatggcctttgtatcgcaaatatggtcatgcttttgaggctttcaaaataattgtgactgatcctgatactgttttaagtactctcactcgtgaagttaaggaagttggccctgacgggcaagaggtgactaaggtggtgccagctgtatcagaagaagtgaaggattctcttgtgaagaatattagaagacgaatgaccccccaacccttgaaaattagggcagatattgaaatgaaatgttttcaatttgatggagttcttcacattaaggaggcaatgcataaggctgaagctgcaggaaatgatgactgccccgtcaaaattaaacttgttgctcccccactttatgttcttaccacccagacactggacaaggagcaaggaatattggttctcaacaatgccatagcttcttgcactgaagcaatagaacaacacaagggtaaacttgtggttaaggaggcagctagagcagtgagtgaacgtgatgataaattgcttgctgagcacatggctaagctacgccaagataatgaagaggtcagtggtgatgaagacagtgaggaggaagaagatacaggaatgggcgaggttgatgtggataatggtgccgggataacggactgacaaaaaacttgtaggtatagtaaggcatagatagcagagtacggctttactaattttgtcttttttattattattctttacaaaactgtctttaaatgcggttgtataatacaagcttgaattactttatgttgagatgtcttgtattttattttttgatgtcaagtgatgtcttgtaacttgcgaagcgattttggagtttcttgacgagggtgttcaacccaaactaatgagatttacagttacttc

SEQ ID NO: 19253 - protein, 354 aa, Glycine max
KKNKTLLLERERRKMAPNLECRMYEAKYPEVDMAVMIQVKNIADMGAYVSLLEYNNIEGMILFSELSRRRIRSVSSLIKVGRIEPVMVLRVDKEKGYIDLSKRRVSEEDIQACEERYNKSKLVHSIMRHVAETLNIDLEELYIHIGWPLYRKYGHAFEAFKIIVTDPDTVLSTLTREVKEVGPDGQEVTKVVPAVSEEVKDSLVKNIRRRMTPQPLKIRADIEMKCFQFDGVLHIKEAMHKAEAAGNDDCPVKIKLVAPPLYVLTTQTLDKEQGILVLNNAIASCTEAIEQHKGKLVVKEAARAVSERDDKLLAEHMAKLRQDNEEVSGDEDSEEEEDTGMGEVDVDNGAGITD

SEQ ID NO: 19254 - protein, 340 aa, Glycine max
MAPNLECRMYEAKYPEVDMAVMIQVKNIADMGAYVSLLEYNNIEGMILFSELSRRRIRSVSSLIKVGRIEPVMVLRVDKEKGYIDLSKRRVSEEDIQACEERYNKSKLVHSIMRHVAETLNIDLEELYIHIGWPLYRKYGHAFEAFKIIVTDPDTVLSTLTREVKEVGPDGQEVTKVVPAVSEEVKDSLVKNIRRRMTPQPLKIRADIEMKCFQFDGVLHIKEAMHKAEAAGNDDCPVKIKLVAPPLYVLTTQTLDKEQGILVLNNAIASCTEAIEQHKGKLVVKEAARAVSERDDKLLAEHMAKLRQDNEEVSGDEDSEEEEDTGMGEVDVDNGAGITD

SEQ ID NO: 19255 - protein, 332 aa, Glycine max
MYEAKYPEVDMAVMIQVKNIADMGAYVSLLEYNNIEGMILFSELSRRRIRSVSSLIKVGRIEPVMVLRVDKEKGYIDLSKRRVSEEDIQACEERYNKSKLVHSIMRHVAETLNIDLEELYIHIGWPLYRKYGHAFEAFKIIVTDPDTVLSTLTREVKEVGPDGQEVTKVVPAVSEEVKDSLVKNIRRRMTPQPLKIRADIEMKCFQFDGVLHIKEAMHKAEAAGNDDCPVKIKLVAPPLYVLTTQTLDKEQGILVLNNAIASCTEAIEQHKGKLVVKEAARAVSERDDKLLAEHMAKLRQDNEEVSGDEDSEEEEDTGMGEVDVDNGAGITD

SEQ ID NO: 19256 - DNA, 1436 bp, Glycine max
gaggtttaacagtaggaaccgctacaacacactactatgctagtgaagaattcaaaatcaagcagcacaagaccaagtcattcacttgtagccctcaagaagtgatttctggtggagactacaagcaatccacatattgtcaccttcttcttggcctatacttctctgaccaagttgagtttataacctcagcttttatctacagcatggtgcaagctttcaccacttttgaggaactttggagagaaatttgcaatgacataagagatggaactcttagctcaagaatcaagtcatccaaaatgagaaaggctgctttggatatcttctctccaagcccaaatttggcctcaaagttagaagattcttgcaaggagctagaaggggtggattggtttggtttgattccaaaactttggccaaatgcaaagtatgtttattccataatgacagggtccatgcaaccatatttgaaaaaacttaggcactatgcaaatgggttgcctttggttagtgctgaatatggctcaactgagagctggataggggttaatgttgaccctagtttgccaccagaagatgtaacatttgctgtggttcccactttctcttactttgagttcattccacttcacaggcatgaaaaaaaattgagttcaggaggtgatgatttcatggaagataagccaattccactgtctcagatcaaagttggacaagaatatgaagtagtcctcacaactttcacgggactgtacaggtgcaggttaggggatgtggtggaagtagccagcttccacaatgggatcccaaagttgaactttgtgtgcagaagaaagttaattctgacagtaaatatagacaagaacacagaaaaggaccttcagctagtggtagagagagggtctcatattctgaacaaggcaagtagagctgagctaattgatttcacaagctatgcagatgtctcaaaccaaccgggtcactacgtaatttactgggagatcaaaggagaagttgaggacaatgttcttggtgcatgctgcaacgaaatggacaagtcttttgcggatcatggctatgttgtgtcaaggaaaaccaactcgataggacccttggagctttgcgttttggagagtgggactttcaagaagatcttggacaacttcattgctaatggggcagcacttagccaattcaagacacccaggtgcaccaataatcatgtcatcctcaaaattcttaacacgtgcaccaccaaaaagtttcggagcactgcttacaacaactgttcaaatgaacaatgattgatatgattatatgaatgaatgaacaattattaatcttaattttcgggactctttcaaaattttgtgctgcttaattttcttttacatcatgtaggaatgaaaataaatgttgaatattatattagt

SEQ ID NO: 19257 - protein, 434 aa, Glycine max
GLTVGTATTHYYASEEFKIKQHKTKSFTCSPQEVISGGDYKQSTYCHLLLGLYFSDQVEFITSAFIYSMVQAFTTFEELWREICNDIRDGTLSSRIKSSKMRKAALDIFSPSPNLASKLEDSCKELEGVDWFGLIPKLWPNAKYVYSIMTGSMQPYLKKLRHYANGLPLVSAEYGSTESWIGVNVDPSLPPEDVTFAVVPTFSYFEFIPLHRHEKKLSSGGDDFMEDKPIPLSQIKVGQEYEVVLTTFTGLYRCRLGDVVEVASFHNGIPKLNFVCRRKLILTVNIDKNTEKDLQLVVERGSHILNKASRAELIDFTSYADVSNQPGHYVIYWEIKGEVEDNVLGACCNEMDKSFADHGYVVSRKTNSIGPLELCVLESGTFKKILDNFIANGAALSQFKTPRCTNNHVILKILNTCTTKKFRSTAYNNCSNEQ

SEQ ID NO: 19258 - protein, 366 aa, Glycine max
MVQAFTTFEELWREICNDIRDGTLSSRIKSSKMRKAALDIFSPSPNLASKLEDSCKELEGVDWFGLIPKLWPNAKYVYSIMTGSMQPYLKKLRHYANGLPLVSAEYGSTESWIGVNVDPSLPPEDVTFAVVPTFSYFEFIPLHRHEKKLSSGGDDFMEDKPIPLSQIKVGQEYEVVLTTFTGLYRCRLGDVVEVASFHNGIPKLNFVCRRKLILTVNIDKNTEKDLQLVVERGSHILNKASRAELIDFTSYADVSNQPGHYVIYWEIKGEVEDNVLGACCNEMDKSFADHGYVVSRKTNSIGPLELCVLESGTFKKILDNFIANGAALSQFKTPRCTNNHVILKILNTCTTKKFRSTAYNNCSNEQ

SEQ ID NO: 19259 - protein, 334 aa, Glycine max
MRKAALDIFSPSPNLASKLEDSCKELEGVDWFGLIPKLWPNAKYVYSIMTGSMQPYLKKLRHYANGLPLVSAEYGSTESWIGVNVDPSLPPEDVTFAVVPTFSYFEFIPLHRHEKKLSSGGDDFMEDKPIPLSQIKVGQEYEVVLTTFTGLYRCRLGDVVEVASFHNGIPKLNFVCRRKLILTVNIDKNTEKDLQLVVERGSHILNKASRAELIDFTSYADVSNQPGHYVIYWEIKGEVEDNVLGACCNEMDKSFADHGYVVSRKTNSIGPLELCVLESGTFKKILDNFIANGAALSQFKTPRCTNNHVILKILNTCTTKKFRSTAYNNCSNEQ

SEQ ID NO: 19260 - DNA, 1253 bp, Glycine max
attttctagggttccatttcgatcttcgcaatgcagaagaagctaggattcccaatctccaagagcctcgaccagttcaaatcactatacggttcaatttcggcaacaccgaagccattatcttcgcgtccttccgcggattccgtttcatcggggagtttcgcgaacctcaagctcaccgcagagaaattggtgaaagagcaagcttcggtgaagactgatcttgaaaatgcgaatgctaagctcaagaagtcgcaggagtatgtccatgcattagaagaaaagttgcagaatgcgttgaacgaaaatgctaagctcaaggtcaagcagaaggaagatgagaaaatgtggaagggattggagtctaagttttcttctactaagaccttatgtgatcaacttactgagacgttgcagcagttggctggtttggttcaggacgccgaaaaagataaggaaacattggaatataaactgtcagcaagttcagaagctcttgatagcttgaataaacagatggatggtttgtctttgaagattgattctgcacaggaagcaattagatcccgtgataatgagctagagaagctcaaatttggtacagaagaacgggagaaatttcacagagatgaacagtgcagagttgccaatgttatacaagagaaggatactatgataaggaatttagaagaaatgttaacatctagtagattggctacagagaatttgaattcaaagttggaagaggttcacctacagttaaaagttaaagaagatgaaattatgcatcacttaaccagtcaagagaaattggagaaagaaaataatgatcttcaattgtgcaatgctgggcttgcagaaaagcttgacatgtcacttcaggaaatcaaaaaccttgaagaatcacttcagtcattggctgcacatttgtcaaatttagacaaagaaagcctgaatcttttgaccaagtttgatgaaatgaatttgctctatgcttcttgtttccagttggttcagcaggagagacaaactttctcaaagcatgctcaataccagtatagtgagcttaataataaatttgttgtcttggaattagaaaagaatgcaactcaaatgaaaaatcatgagttaagcaaaactgtggatgaacttcagaaagttcatgaatctactctagcccagcttacggagggctctcgattagctgctgagaaaattcgaagtttggagtcagaagcggaaactttaatctc

SEQ ID NO: 19261 - protein, 407 aa, Glycine max
MQKKLGFPISKSLDQFKSLYGSISATPKPLSSRPSADSVSSGSFANLKLTAEKLVKEQASVKTDLENANAKLKKSQEYVHALEEKLQNALNENAKLKVKQKEDEKMWKGLESKFSSTKTLCDQLTETLQQLAGLVQDAEKDKETLEYKLSASSEALDSLNKQMDGLSLKIDSAQEAIRSRDNELEKLKFGTEEREKFHRDEQCRVANVIQEKDTMIRNLEEMLTSSRLATENLNSKLEEVHLQLKVKEDEIMHHLTSQEKLEKENNDLQLCNAGLAEKLDMSLQEIKNLEESLQSLAAHLSNLDKESLNLLTKFDEMNLLYASCFQLVQQERQTFSKHAQYQYSELNNKFVVLELEKNATQMKNHELSKTVDELQKVHESTLAQLTEGSRLAAEKIRSLESEAETLI

SEQ ID NO: 19262 - protein, 302 aa, Glycine max
MWKGLESKFSSTKTLCDQLTETLQQLAGLVQDAEKDKETLEYKLSASSEALDSLNKQMDGLSLKIDSAQEAIRSRDNELEKLKFGTEEREKFHRDEQCRVANVIQEKDTMIRNLEEMLTSSRLATENLNSKLEEVHLQLKVKEDEIMHHLTSQEKLEKENNDLQLCNAGLAEKLDMSLQEIKNLEESLQSLAAHLSNLDKESLNLLTKFDEMNLLYASCFQLVQQERQTFSKHAQYQYSELNNKFVVLELEKNATQMKNHELSKTVDELQKVHESTLAQLTEGSRLAAEKIRSLESEAETLI

SEQ ID NO: 19263 - protein, 245 aa, Glycine max
MDGLSLKIDSAQEAIRSRDNELEKLKFGTEEREKFHRDEQCRVANVIQEKDTMIRNLEEMLTSSRLATENLNSKLEEVHLQLKVKEDEIMHHLTSQEKLEKENNDLQLCNAGLAEKLDMSLQEIKNLEESLQSLAAHLSNLDKESLNLLTKFDEMNLLYASCFQLVQQERQTFSKHAQYQYSELNNKFVVLELEKNATQMKNHELSKTVDELQKVHESTLAQLTEGSRLAAEKIRSLESEAETLI

SEQ ID NO: 19264 - DNA, 1386 bp, Glycine max
aatttcattcctgttgaggccctaccgggccgcctttgtatatctgtgacctaccgtactgcactatctgatttcaacctagagtgttcagcttcattgccaacaaaaataattactgattatgttggaagccccaatactgaccctttgaggtctttccctgtcttggataagggtgttagtgctacctcctttccactgagaaggaaagaacctccatcttctgtgccacttgatcgtcctcatagctggacatctggcttccataaagcagcaccttttgtacagaatcatccttatgttggctccccgccagtgtatcgaggttctcccaggccatatgattatccatccccacctactgatagttacggcgtcagattgcacaactatcgaatgcagaatcggcaaggatctccaagttacgatgagtatcaactttctcctccattttcaccctcaccatctccatcgcctcctacatacttctgtggtggcaatccaatgcaaactcgcatacgttctgagacagcccctgtaactatacctcattcagtaatgggcaaaagctctagaaatctttctcctaatttttcagatcctagtcgaaattctctgccccctttatcccccagaaggactgatggttcatcacaagagtctccatctggaatcaggtcattcaagaaattagaagcttcaaggactggtcaaaagtttgtcagagatagcaaggaagattcagggaggttctcaggattgttatcctcaagtggctcacctcacattggattttctagaacctcaagtagattatcatttcaggatgagttggatgatggcgacttttcatgtccttttgatgttgatgatgttgatccatcagatgctcaatccagtcagaatgcggatcggaagagtgctgcagagatcacttcaacatcactgccaatggggaaaaaatcacaagatgctgaagttggtgttcttgtgcacatgctcaggacagcgcctccattgcgccaagatccaagttgttattcatcccattcaccaaaggctgaacttgagggaggagttgccactgcttctggattcttcatgcctcgaaagacagcggatgcacttgaagaactcaggggttacaaagagatgagagaccttctttccaagagtggcactaggatcctgaacaaacataaagcttaagcattctaaaatagttgagggaggtgatgctgactaaagagtgttactaattaattacagttatacacaacaagcacttcttttgggaagaagaaagatccaatggatttgtgtacatatcctgactgaatgttggttggctagaaacaccatttttataatgaccaaaattatgcc

SEQ ID NO: 19265 - protein, 402 aa, Glycine max
NFIPVEALPGRLCISVTYRTALSDFNLECSASLPTKIITDYVGSPNTDPLRSFPVLDKGVSATSFPLRRKEPPSSVPLDRPHSWTSGFHKAAPFVQNHPYVGSPPVYRGSPRPYDYPSPPTDSYGVRLHNYRMQNRQGSPSYDEYQLSPPFSPSPSPSPPTYFCGGNPMQTRIRSETAPVTIPHSVMGKSSRNLSPNFSDPSRNSLPPLSPRRTDGSSQESPSGIRSFKKLEASRTGQKFVRDSKEDSGRFSGLLSSSGSPHIGFSRTSSRLSFQDELDDGDFSCPFDVDDVDPSDAQSSQNADRKSAAEITSTSLPMGKKSQDAEVGVLVHMLRTAPPLRQDPSCYSSHSPKAELEGGVATASGFFMPRKTADALEELRGYKEMRDLLSKSGTRILNKHKA

SEQ ID NO: 19266 - protein, 270 aa, Glycine max
MQNRQGSPSYDEYQLSPPFSPSPSPSPPTYFCGGNPMQTRIRSETAPVTIPHSVMGKSSRNLSPNFSDPSRNSLPPLSPRRTDGSSQESPSGIRSFKKLEASRTGQKFVRDSKEDSGRFSGLLSSSGSPHIGFSRTSSRLSFQDELDDGDFSCPFDVDDVDPSDAQSSQNADRKSAAEITSTSLPMGKKSQDAEVGVLVHMLRTAPPLRQDPSCYSSHSPKAELEGGVATASGFFMPRKTADALEELRGYKEMRDLLSKSGTRILNKHKA

SEQ ID NO: 19267 - protein, 234 aa, Glycine max
MQTRIRSETAPVTIPHSVMGKSSRNLSPNFSDPSRNSLPPLSPRRTDGSSQESPSGIRSFKKLEASRTGQKFVRDSKEDSGRFSGLLSSSGSPHIGFSRTSSRLSFQDELDDGDFSCPFDVDDVDPSDAQSSQNADRKSAAEITSTSLPMGKKSQDAEVGVLVHMLRTAPPLRQDPSCYSSHSPKAELEGGVATASGFFMPRKTADALEELRGYKEMRDLLSKSGTRILNKHKA

SEQ ID NO: 19268 - DNA, 1151 bp, Glycine max
aaaaaaacacaccccattacaattctctgtatttcagggttgaaaattcacacgttgaattgaaatttggaaatcgtgacaccaaccctacaccaccatggcctccgtagacaaattttgggcttttgccctcgctcttctcctccttgcctcccctctcctccaagttgctaggtgtcagtcagactccgaagatgtagtggaggctgctgaagaatcaagtgatatcggcattgttggtgatgatgtccaagactttggtgatgggaccttcccttctgctccaggaattgaaacaataagtgtttttccaaaaaatagtgcgagattgataacagctggagaagagacagagctgcttgttggtgttaaaaatgatggggattcaagcttgaatgttattgcgatcaaggctagtgttcaccttccttttgatcaccgtatgctggttcaaaatcttactgcacagggttttaacaatggttctgtaccagcctcagcacaagctactttcccatatttatttgcagtcagtaagttcttgcaggcaggaacttttgaccttgtgggcactattatatacgagatagatgaacatccatatcaaagcaccttttttaatggcactgttgaggttgttgaatctggtgcttttcttagcatggaatccgtttttcttgttactcttggggttgcactccttgtcctcctggggctatggattcatggccaaatacagtacctatctaagaaaacaaagagggctccaaaagttgaagttgggactaagactactgatgcttcaacagatgaatggctacagggaactgcttatactcagtctctgtcaagcaagtcaaagaagaagaagtagataaacaatttctcacgttcagccactcactagactctaccatggatatggaatacagaatcctgtaactgactagggttgagtatgagagaacacgaggaagtagttgtgaaattttggctgaaagatccagctttctgttgtagcttaagaatttttacttttctacatttgaatgaagttgagctttttctaaactaacaaggatttcagttaggaaggatacaacttttgagatgtggcataatttttattagataacgtttgttttactttt

SEQ ID NO: 19269 - protein, 258 aa, Glycine max
MASVDKFWAFALALLLLASPLLQVARCQSDSEDVVEAAEESSDIGIVGDDVQDFGDGTFPSAPGIETISVFPKNSARLITAGEETELLVGVKNDGDSSLNVIAIKASVHLPFDHRMLVQNLTAQGFNNGSVPASAQATFPYLFAVSKFLQAGTFDLVGTIIYEIDEHPYQSTFFNGTVEVVESGAFLSMESVFLVTLGVALLVLLGLWIHGQIQYLSKKTKRAPKVEVGTKTTDASTDEWLQGTAYTQSLSSKSKKKK

SEQ ID NO: 19270 - protein, 143 aa, Glycine max
MLVQNLTAQGFNNGSVPASAQATFPYLFAVSKFLQAGTFDLVGTIIYEIDEHPYQSTFFNGTVEVVESGAFLSMESVFLVTLGVALLVLLGLWIHGQIQYLSKKTKRAPKVEVGTKTTDASTDEWLQGTAYTQSLSSKSKKKK

SEQ ID NO: 19271 - DNA, 1307 bp, Glycine max
attgttttggcctttggttaaagaatccttcatcacattaatcagtccagacagagaactgagagaagaccctcacttcctgtttggctcgacgaagacctcacttcgcccaacctccgtctccggcggcgtctcttatcctaacggctccttccctcaccgtcactgaaacggcgtccctgaactcgcaacactgccctccctctgactctgatttcgttcgaacttcgaactcattcccacttcgcagtcctcgccatgcttcgttgtcggcgactcctcgcagtggcaaacctcaaacgacatagctagagatctacaaactctccctcattgtctggtcctcttcctgctccaaactgaaccgcaaaatttttgtttttttcactgaatacagggtgcgatttgtttccattttccagtcaatcctatactccttaggctattgtaatcttctgctaataaggaggaattattattgggttctgaaaacatgttgaaacaagcaattggcagaatcttcagaaccggtgtttatgcttgtgaaggaaatagagttttgccttggatttatgtgccttcgagctttttccaccatggacaagcgcacatggcacctagaagcttttttggggtagaggatttccttgatgatgacaatagccgaccttacacataccaaaaagggaagaagtcaaagaatccaaataagcacatatcattcaaacaaagaacaattgcctacatggaaccttttacacttgatgtgtttatctcaaagcgctttgtatcggcttcactcactcatagggtaacaagcaaacaggttgcagttgccgggaccaactccaaggacataaaagctgttcttaggtctcgttcagacataccagcatgcatagcaattggtaggattttagctgaaagagcaaaagaagctgatgtttacactggttcttatactccaagggacagggacaagtttgaagggaaaatcagagctgtagttcaatcacttattgacaatgggattgatatcaaggtttatcttgattgagtttagtcactcaagtttgtgggactatcagttaaggtgttgatattttggttgaagcagtaggccccttgtgtgtttgaacatgtccatttagtttggttttgatgataatgggaatatcattattcgaattacagatttggtaatttagttttatgaatgagttatgttgtcgtaattgtagttggttattcgttttaattaatgttaaataacctgtcacaaataatacaatcatatgatattgtac

SEQ ID NO: 19272 - protein, 187 aa, Glycine max; identical to SEQ ID NO: 16633

SEQ ID NO: 19273 - protein, 148 aa, Glycine max; identical to SEQ ID NO: 16634

SEQ ID NO: 19274 - protein, 103 aa, Glycine max; identical to SEQ ID NO: 16635

SEQ ID NO: 19275 - DNA, 1477 bp, Glycine max
aaaaaattgccaccttctacatactgtccgaaagcagcaagttcagtacttcagttcactgcgccttcctctccttttcgatggcaaagggttgctccaacaacacttatgaagaggctagaaaacaaagacttgaagaaaacaaaaagaggtttgaggatttgggaatttcgaggatttcaaaaaacttgactgaaatcgcaagttctgcaaagaagaagctgcgtcatgttcctaaacagaaaacaaagaagacaaatgttgaagtggaacctaggcgatcttctcgtgtgcgaaacccagttcgttcataccgtgaagatgtgaacatagaccttccacccttgcggaagaggtcaaggtcaagttcttcatcatggggaagttacattgcgaggcctctagatgaaatcaaagaagcaacaaaagaggaaagactttgtgctctggaggctgcagaggcaatccaaatcaatttgaactcatcaaatccatcatttatcaagtcaatggttcggtctcatgtttatagctgcttttggttgggtcttccttctaaattttgtgaggaacatctgccaaaaactttacatgacatggttttagaagatgaaaatggctcagaatatgaggctgtttacattggcaacagagctgggcttagtggtggttggagagcatttgcattggatcataaactcgatgatggtgatgcccttgtttttgaattgattgaagcttcaagatttaagatttatattgtaagagcatttccagattcagttgaagaaaagggaaataatattttagaggaagaaggaaatgtgcgtgcaaccaaagcaccaaaagctgcctgtaatcttgaatcggaatgtaagacaaaaaagccaaaacaggctgcagtttatgaaactaaggaatcagagagttctcaggaatatcttctagatagcagcattgacaacgaagtgaaaccacagggagtaaatccaactaataaggaaactaaattttctcagaaaaatacgccaaagaaatctaaatatcctgctactgctgattcaaaagggaaagtgcaaattaaaactgagaaaccaaaggcatctataaagctgtcaaacaatacaaggaagtcgaaagaaggtataaatgaaattggtggttcagacaagttagagaagaatgagtttgttcaggatgctgatagcaagttagagaaagttgaactagttgaagaagcaagaaaatgtgtcacaaaaaagctagaaaaaaccagctccaaatttttcagaaagaaagcataatcttggagctaatgactggtaaattataaaatgtattaagacttgtatggagtatattatggtagtagacaatattttctgttgtggattaatggaagtaaagtgtaagatatgtatttgatttgatatctatcagtatgttagttataatacataaaaaacaatgttttgtt

SEQ ID NO: 19276 - protein, 433 aa, Glycine max
KIATFYILSESSKFSTSVHCAFLSFSMAKGCSNNTYEEARKQRLEENKKRFEDLGISRISKNLTEIASSAKKKLRHVPKQKTKKTNVEVEPRRSSRVRNPVRSYREDVNIDLPPLRKRSRSSSSSWGSYIARPLDEIKEATKEERLCALEAAEAIQINLNSSNPSFIKSMVRSHVYSCFWLGLPSKFCEEHLPKTLHDMVLEDENGSEYEAVYIGNRAGLSGGWRAFALDHKLDDGDALVFELIEASRFKIYIVRAFPDSVEEKGNNILEEEGNVRATKAPKAACNLESECKTKKPKQAAVYETKESESSQEYLLDSSIDNEVKPQGVNPTNKETKFSQKNTPKKSKYPATADSKGKVQIKTEKPKASIKLSNNTRKSKEGINEIGGSDKLEKNEFVQDADSKLEKVELVEEARKCVTKKLEKTSSKFFRKKA

SEQ ID NO: 19277 - protein, 407 aa, Glycine max
MAKGCSNNTYEEARKQRLEENKKRFEDLGISRISKNLTEIASSAKKKLRHVPKQKTKKTNVEVEPRRSSRVRNPVRSYREDVNIDLPPLRKRSRSSSSSWGSYIARPLDEIKEATKEERLCALEAAEAIQINLNSSNPSFIKSMVRSHVYSCFWLGLPSKFCEEHLPKTLHDMVLEDENGSEYEAVYIGNRAGLSGGWRAFALDHKLDDGDALVFELIEASRFKIYIVRAFPDSVEEKGNNILEEEGNVRATKAPKAACNLESECKTKKPKQAAVYETKESESSQEYLLDSSIDNEVKPQGVNPTNKETKFSQKNTPKKSKYPATADSKGKVQIKTEKPKASIKLSNNTRKSKEGINEIGGSDKLEKNEFVQDADSKLEKVELVEEARKCVTKKLEKTSSKFFRKKA

SEQ ID NO: 19278 - protein, 264 aa, Glycine max
MVRSHVYSCFWLGLPSKFCEEHLPKTLHDMVLEDENGSEYEAVYIGNRAGLSGGWRAFALDHKLDDGDALVFELIEASRFKIYIVRAFPDSVEEKGNNILEEEGNVRATKAPKAACNLESECKTKKPKQAAVYETKESESSQEYLLDSSIDNEVKPQGVNPTNKETKFSQKNTPKKSKYPATADSKGKVQIKTEKPKASIKLSNNTRKSKEGINEIGGSDKLEKNEFVQDADSKLEKVELVEEARKCVTKKLEKTSSKFFRKKA

SEQ ID NO: 19279 - DNA, 1338 bp, Glycine max
attctgcctttgattgattattatcttcatatcaaggacaagcttaatagcttatagtttaatgaccattttttttccaaagcttcttctttggttctcctaattaatttcatgcatcccccttaatgaagtgacactccaaaaataccatctttggtgttttacttctttttttttttttttttttgctaattaaattttttaactagatagctctggttgcagccatagatggaatttcccaacgaagcaataccagaagggtgttcacagaagaaaacgggaagggggaaaatagaaatcaagcggatcgagaacacaacgaataggcaagttaccttctgcaaacgccgtaacgggttgctcaagaaggcttatgaattgtctgttctgtgtgatgctgaggttgctcttgttgtcttctcaagccgtggacgcctctatgagtatgccaacaacagtgatttgtttagaagggtgcagatctgtgtaagcgatagaaattatagacgttaaggtgaaacaatatgaagtatgtagcagatgaagagaaagctttagttagggttacaaagatttgcagtgttagaggaacgatcgataggtacaagaaagcatgtgctgcctccacaaatccagaatctgtctctgaagctaatacacagttttatcagcaggaagcgtccaaattaaaacgacaaatcagagacattcagaatctaaacaggcacatccttggtgaagctcttagctctctgagtctgaaggaattaaagaacctggagagtagactgaagaaaggtttaagcagagttagatccagaaagcatgaaactttgtttgccgatatcgagttcatgcaaaagcgggaaatagagctgcaaaaccataataattttctgagagctaagatagctgaacacgagaaagcacaacaacggcaacaggatatgataccgggaaatgtgtgcgagtcaaccatacctccacaatcatatgaccgcaatttcttccctgttaatctcatagattccaataatcaatattcaaatcaagaccagactgctcttcaacttgtctgataaacgatttgaaattatgccgcagcctttcaagtggtgtgggatcccttacatcgtcctatgtttcgtgaaggagagtgcccttagaaactcctctgctaaagttcttacaacggagaacaagagaaaaactaatcagcatttgtaccaatacatcatttgatattgtttatgtatctttcaatatatatagtttctattcagtcctggcatattgtatttttatgttataaatgcttatttcaatatgaacacc

SEQ ID NO: 19280 - protein, 184 aa, Glycine max
MKYVADEEKALVRVTKICSVRGTIDRYKKACAASTNPESVSEANTQFYQQEASKLKRQIRDIQNLNRHILGEALSSLSLKELKNLESRLKKGLSRVRSRKHETLFADIEFMQKREIELQNHNNFLRAKIAEHEKAQQRQQDMIPGNVCESTIPPQSYDRNFFPVNLIDSNNQYSNQDQTALQLV

SEQ ID NO: 19281 - protein, 94 aa, Glycine max
MEFPNEAIPEGCSQKKTGRGKIEIKRIENTTNRQVTFCKRRNGLLKKAYELSVLCDAEVALVVFSSRGRLYEYANNSDLFRRVQICVSDRNYRR

SEQ ID NO: 19282 - DNA, 1191 bp, Glycine max
taacccgcacacactcgtctgcccagaaaaccgaagacgatgactatcctgagggaagtgaaacagggtattctgagtcacctggaaatcctgctaatggccctgcttcacctcctagtgccagctattcagcacctgcgtctgttgcaccggcatcgcctccacctactgcgcctgtgcctgatttacttggtgatttgatgggcacagataatagttctattgttcctcttgatgagccagctacttctactggacctccattgtctattgtacttcccacctcagttggtcatggttttcaaatcagtgcacagctgaccaggcaagatggccaaatattttacagcatgttgtttgagaacaatactcatgttccacttgatggcttcatgattcaatttaacaagaacacatttggtctagcagctgctggacccctccaggttccacaattgcaacctggaacctcaactaggacactccttcctatggttatgttccagaacatgtcccaaggtcctcctagctcacttttgcaggttgctgtaaaaaacaaccaacagcctgtgtggtattttaatgataaattctcattccatgtactttttactgaggatggtagaatggaacgttccgctttcttagagacttggaggtcccttcctgattcaaacgaggtttccaaggacttcccagacattgtgattggcggtgtggaagcgacactggatcgactagctgcatcaaacgtgttctttattgcaaagcgcaagaatgcaaaccaggatgtgttttacttctcagctaagattcctcgagggataccattattaattgaacttaccacaatggccggaaaccctggcgtcaaatgtgcaatcaagacaccaagccctgaaatgtcagcatttttcttcgaagccatcgagactcttctcaggagctaatattaccgctattattatttttttatttatgttgtaattttttcatttaattttgtttatacattgtttttattagcatctttgatagatattttggacaggggttgtgagtccgaatttttttacactatatatagctgtggtcttgtggacagcgttggttggaaggttgggtggtttgtaatattctgctttatttgtaaaaacaatgattacttagatgctattaacattttgtatt

SEQ ID NO: 19283 - protein, 315 aa, Glycine max
TRTHSSAQKTEDDDYPEGSETGYSESPGNPANGPASPPSASYSAPASVAPASPPPTAPVPDLLGDLMGTDNSSIVPLDEPATSTGPPLSIVLPTSVGHGFQISAQLTRQDGQIFYSMLFENNTHVPLDGFMIQFNKNTFGLAAAGPLQVPQLQPGTSTRTLLPMVMFQNMSQGPPSSLLQVAVKNNQQPVWYFNDKFSFHVLFTEDGRMERSAFLETWRSLPDSNEVSKDFPDIVIGGVEATLDRLAASNVFFIAKRKNANQDVFYFSAKIPRGIPLLIELTTMAGNPGVKCAIKTPSPEMSAFFFEAIETLLRS

SEQ ID NO: 19284 - protein, 249 aa, Glycine max
MGTDNSSIVPLDEPATSTGPPLSIVLPTSVGHGFQISAQLTRQDGQIFYSMLFENNTHVPLDGFMIQFNKNTFGLAAAGPLQVPQLQPGTSTRTLLPMVMFQNMSQGPPSSLLQVAVKNNQQPVWYFNDKFSFHVLFTEDGRMERSAFLETWRSLPDSNEVSKDFPDIVIGGVEATLDRLAASNVFFIAKRKNANQDVFYFSAKIPRGIPLLIELTTMAGNPGVKCAIKTPSPEMSAFFFEAIETLLRS

SEQ ID NO: 19285 - protein, 199 aa, Glycine max
MLFENNTHVPLDGFMIQFNKNTFGLAAAGPLQVPQLQPGTSTRTLLPMVMFQNMSQGPPSSLLQVAVKNNQQPVWYFNDKFSFHVLFTEDGRMERSAFLETWRSLPDSNEVSKDFPDIVIGGVEATLDRLAASNVFFIAKRKNANQDVFYFSAKIPRGIPLLIELTTMAGNPGVKCAIKTPSPEMSAFFFEAIETLLRS

SEQ ID NO: 19286 - DNA, 1159 bp, Glycine max
actattattgccacacacaaatcaattaactgaattcttagacagagaaagaggagtagtactagtgataaggtgatcataatagagcataatataagagagtgaaaactcatggaggttggcctcaacaagaaggagaacatggggtttgaggaaactgagctaaggcttggactgcctggaaacgtaggaggcactggcactgaagaagtgctcatcaggaagagaggtttctctgagactgaaactgaaactgaggaggatgagtctgctaccactgtggatttgatgcttaatctttcttctaaggaagctgctgctgctgcagatccaactgataagcacaagactttgcctaaggagaagactcttctgcctgcagatcctgctaagcctccagccaaggcacaggtggtaggttggccacctgtgcggtccttccggaagaacatgttagctgtacaaaagagcgtcggagaagagaacgagaagaacagcagcagccctaatgcaagctttgtcaaagttagcatggatggagcaccttacctccgcaaagtggacttgaagatgtacaagagttaccgagagctctctgattctttaggcaaaatgttcagctccttcaccataggcaattgtgaatcccaaggaatgaaggatttcatgaatgagagcaagctgaatgatcttttgaacagctctgattatgtcccaacctatgaggacaaggatggtgactggatgcttgtcggtgatgtcccatgggagatgtttgttgaatcatgcaagcgtttacgcatcatgaaaggaaaggaggccattggtcttggtcttgcaccaagagccatggcaaaatccaagaacaggagctagactagtcgcacaattcatgacctgccccatcctttgtaattgcggtgcccagttggcttagttactaaagtaaggataattaagctgcagcagacacggatggacattgctaagtggttgaattatagttaatttgtgtcattatggtttgttataatatttcatcaaacaaaacaatgagatgcatgtctaattaagtactaatcatgaacaggaacataatgactctcaatcatgttgttagacttggctttcttatatatcgatctttgcttgttttgtg

SEQ ID NO: 19287 - protein, 254 aa, Glycine max
MEVGLNKKENMGFEETELRLGLPGNVGGTGTEEVLIRKRGFSETETETEEDESATTVDLMLNLSSKEAAAAADPTDKHKTLPKEKTLLPADPAKPPAKAQVVGWPPVRSFRKNMLAVQKSVGEENEKNSSSPNASFVKVSMDGAPYLRKVDLKMYKSYRELSDSLGKMFSSFTIGNCESQGMKDFMNESKLNDLLNSSDYVPTYEDKDGDWMLVGDVPWEMFVESCKRLRIMKGKEAIGLGLAPRAMAKSKNRS

SEQ ID NO: 19288 - protein, 244 aa, Glycine max
MGFEETELRLGLPGNVGGTGTEEVLIRKRGFSETETETEEDESATTVDLMLNLSSKEAAAAADPTDKHKTLPKEKTLLPADPAKPPAKAQVVGWPPVRSFRKNMLAVQKSVGEENEKNSSSPNASFVKVSMDGAPYLRKVDLKMYKSYRELSDSLGKMFSSFTIGNCESQGMKDFMNESKLNDLLNSSDYVPTYEDKDGDWMLVGDVPWEMFVESCKRLRIMKGKEAIGLGLAPRAMAKSKNRS

SEQ ID NO: 19289 - protein, 195 aa, Glycine max
MLNLSSKEAAAAADPTDKHKTLPKEKTLLPADPAKPPAKAQVVGWPPVRSFRKNMLAVQKSVGEENEKNSSSPNASFVKVSMDGAPYLRKVDLKMYKSYRELSDSLGKMFSSFTIGNCESQGMKDFMNESKLNDLLNSSDYVPTYEDKDGDWMLVGDVPWEMFVESCKRLRIMKGKEAIGLGLAPRAMAKSKNRS

SEQ ID NO: 19290 - DNA, 960 bp, Glycine max
gaagtcgaagagaggcttaacaaagcacaaaatgtcctctaatccagtaatactgcagagtgtgaacttgaccaagtatatactggagaccagcgtttatccacgagaagaagagactctcaaagagctaaggaaagccactgcaggccacccttggggctttatgggcgctgctcccgatgcgggtcagctaatgaccttgctcttgaagttgttgaatgctaagaagacaattgaagtgggagtttttactgggtactctcttctcctcactgcacttaccattccagatgatggaaagattatagccctggatccagacagagaagcttatgagataggattaccgttcattaaaaaggctggtgtagagcacaagatcgacttcatagagtctccagctctaccggttcttgataaactcttagaagatccttcaaataaggaaagttttgactttgccttcgttatgccgataaagataactattggaattaccacgagaggcttcttaaactggtaaagattggtgggttaatcatctatgataacactctctggggtggaactgttgcctggcctgaagaggatgttcctgtaccaaaaaggaaactcaggcaggctacactggctttcaacaaagcaattgctgatgattctcgtgttgaaatttctgttgtttcaataggtgatggcttcactatctgcaggcgtgctcattgaacatcatctgccaatgttgtattaagattcaagttaatttcatgtactatgttttcgtgttttatttttctctcttttgggagtggggggtttactaaatttacgtgataacttgtggtataatttgatttacctccgactctggggcctatgccctatggtgtgactctaatgtgaaactgggcgtgtcgctatttatttactagtactaaataaaataaaatgttgtgtctaaag

SEQ ID NO: 19291 - protein, 173 aa, Glycine max
KSKRGLTKHKMSSNPVILQSVNLTKYILETSVYPREEETLKELRKATAGHPWGFMGAAPDAGQLMTLLLKLLNAKKTIEVGVFTGYSLLLTALTIPDDGKIIALDPDREAYEIGLPFIKKAGVEHKIDFIESPALPVLDKLLEDPSNKESFDFAFVMPIKITIGITTRGFLNW

SEQ ID NO: 19292 - protein, 163 aa, Glycine max
MSSNPVILQSVNLTKYILETSVYPREEETLKELRKATAGHPWGFMGAAPDAGQLMTLLLKLLNAKKTIEVGVFTGYSLLLTALTIPDDGKIIALDPDREAYEIGLPFIKKAGVEHKIDFIESPALPVLDKLLEDPSNKESFDFAFVMPIKITIGITTRGFLNW

SEQ ID NO: 19293 - protein, 119 aa, Glycine max
MGAAPDAGQLMTLLLKLLNAKKTIEVGVFTGYSLLLTALTIPDDGKIIALDPDREAYEIGLPFIKKAGVEHKIDFIESPALPVLDKLLEDPSNKESFDFAFVMPIKITIGITTRGFLNW

SEQ ID NO: 19294 - DNA, 1424 bp, Glycine max
gaagacaaagacccaaatccctcaacgtaccgcatggtgatgagcaattgagtgagattagcaatgaaccaaggagtttaagtttccagggggatgaaatttctctgcaatcaaacagtttaactgtcaactcaaagatggatatggaagtcacaagtagtttacaaactgttgaaattgatgacagccaaagcccatctttgaaggctgtgaagcaattgatttcagagacagtgcagaaaaaatcaactccaaggttggatgaggatgagacagttgcagaactagcaacagataccccggaacatccaagtcctatctcagttcttgatggctcagtgtacagagatgacatgccatcccccgtaaagcagatatctgaagattcaaaaggtgaggatgctcaagaatccaaagaaaatgagattaaagatcagtggaaccctgcagatagcctttcatttaactgcactggatccctagagatcaatcgcaagaaattacagaacatagaccaccttgtccagaagcttcgacgactgaactccagtcacgatgaagctagaatcgattacattgcttccctatgtgaaaacacaaatccagaccacagatacatttccgaaatattattagcttcaggtctcttactcagagatctgagttccgagttgctgacatttcaacttcactcgtcgggtcatcccattaaccccgagctattccttgtcttggaacagaccaaagcaagtagtctactttcaaaagaagaaagcagccctggaaaagatgctaacatgaagctaaacaaagagaaatttcacaggaaactcatctttgattctgtgaatgagattcttggtgcaaaattcggctcctcacccgagccatgttttcagcctaacagtaacagactcacaaaaaaaaccttgagtgctcaaaagcttcttaaagaactatgctttgagatcgaaaaaattcaagccaagaagccagaatgctgcttagaagatgatcatgatggtctgaaaaatatgctgtgtgaagatgttatgcatggctcagaaagttggacagattttcatggttacttacctggggttgtgttggatgttgagagactgttatttaaggacttagtagatgaggttgtgattggtgaatcatcaggtttgcgagtcaagccatcggttaggcgcaggaagctatttggaaagtagtttgttcaattcttccctttttctcactgatattagatccatataattttcttgtcatttgcttataaaaaaatttcttgtgtcaaggcatataagtttgcttgttagagctttggttattaattttttttgctaaggtgtaaagaaatttgagttaccatgaatttgtggccatacataatacataaaaaccaaaagttcctt

SEQ ID NO: 19295 - protein, 405 aa, Glycine max
RQRPKSLNVPHGDEQLSEISNEPRSLSFQGDEISLQSNSLTVNSKMDMEVTSSLQTVEIDDSQSPSLKAVKQLISETVQKKSTPRLDEDETVAELATDTPEHPSPISVLDGSVYRDDMPSPVKQISEDSKGEDAQESKENEIKDQWNPADSLSFNCTGSLEINRKKLQNIDHLVQKLRRLNSSHDEARIDYIASLCENTNPDHRYISEILLASGLLLRDLSSELLTFQLHSSGHPINPELFLVLEQTKASSLLSKEESSPGKDANMKLNKEKFHRKLIFDSVNEILGAKFGSSPEPCFQPNSNRLTKKTLSAQKLLKELCFEIEKIQAKKPECCLEDDHDGLKNMLCEDVMHGSESWTDFHGYLPGVVLDVERLLFKDLVDEVVIGESSGLRVKPSVRRRKLFGK

SEQ ID NO: 19296 - protein, 360 aa, Glycine max
MDMEVTSSLQTVEIDDSQSPSLKAVKQLISETVQKKSTPRLDEDETVAELATDTPEHPSPISVLDGSVYRDDMPSPVKQISEDSKGEDAQESKENEIKDQWNPADSLSFNCTGSLEINRKKLQNIDHLVQKLRRLNSSHDEARIDYIASLCENTNPDHRYISEILLASGLLLRDLSSELLTFQLHSSGHPINPELFLVLEQTKASSLLSKEESSPGKDANMKLNKEKFHRKLIFDSVNEILGAKFGSSPEPCFQPNSNRLTKKTLSAQKLLKELCFEIEKIQAKKPECCLEDDHDGLKNMLCEDVMHGSESWTDFHGYLPGVVLDVERLLFKDLVDEVVIGESSGLRVKPSVRRRKLFGK

SEQ ID NO: 19297 - protein, 358 aa, Glycine max
MEVTSSLQTVEIDDSQSPSLKAVKQLISETVQKKSTPRLDEDETVAELATDTPEHPSPISVLDGSVYRDDMPSPVKQISEDSKGEDAQESKENEIKDQWNPADSLSFNCTGSLEINRKKLQNIDHLVQKLRRLNSSHDEARIDYIASLCENTNPDHRYISEILLASGLLLRDLSSELLTFQLHSSGHPINPELFLVLEQTKASSLLSKEESSPGKDANMKLNKEKFHRKLIFDSVNEILGAKFGSSPEPCFQPNSNRLTKKTLSAQKLLKELCFEIEKIQAKKPECCLEDDHDGLKNMLCEDVMHGSESWTDFHGYLPGVVLDVERLLFKDLVDEVVIGESSGLRVKPSVRRRKLFGK

SEQ ID NO: 19298 - DNA, 1208 bp, Glycine max
gggcaaaatcattcttcacttagttaggaaccgaaccatggctataacgttcggtttagtgactcctaactccaacactttgtgtctcactctcaccacaccacccctcatcgccaatcatcgtactactaatgttgtgttctctggtcaaagtgtcttcagctatggacacactaatctttcttattcacaccaaagggcttcttcctttgccactattgtctgttctgctgctaataaaccatcctcttcttctgaaattagctctacagccaagataaggagcgaggttctctctccctttcgttcagttaggatgttcttttatattgcttttgttgcaagtggtgctcttgggggattcatagcaaccacacaactaattggtgcactggctaactcatcaagagcatctgaagtccctgagattctgaagggccttggcatcgaccttgcagcagtgtctttatttgctttcttgtatttcagagagaacaaagcaaagaatgcacaagtggctcgcctatcaagagaggaaagcttatcaaatcttaagctccgtgtggatgagaagaagatcattcctgtgaactcattgagagggattgctcgacttgtcatctgtgctggccctgcatcctttgtaaccgagtcttttaagcgcagtgagcctttcaccgatagtcttttggatagaggggtgcttgttgtgccctttgtaacagatggaaattcacctgctttggagtttgaggagactgaggaacttgccactagaaggaagagactctggcaactggctccagtttacatcaatgagtggtctgagtggttagatgagcaaaagaagttagctggtgtaccttctgattctccagtgtacctatccctacgcttggatggtcgtgttcgtggcagtggtgttggttatcctccttggaatgctttggttgcacaattaccacaggtaaagggaatgtggactggcctactagatggctttgatggtagagtttagaagagcaagtgtttttttctacttctgaaggttgaactctcatacttaccccctcccccacaaaacaaaaagttcttcagcccgttttcttcatattctctttctggttttgtttctaatagtggagattccattaaacttttatgatttgattttaattgtatttattatttattatttattttatttc

SEQ ID NO: 19299 - protein, 338 aa, Glycine max
GKIILHLVRNRTMAITFGLVTPNSNTLCLTLTTPPLIANHRTTNVVFSGQSVFSYGHTNLSYSHQRASSFATIVCSAANKPSSSSEISSTAKIRSEVLSPFRSVRMFFYIAFVASGALGGFIATTQLIGALANSSRASEVPEILKGLGIDLAAVSLFAFLYFRENKAKNAQVARLSREESLSNLKLRVDEKKIIPVNSLRGIARLVICAGPASFVTESFKRSEPFTDSLLDRGVLVVPFVTDGNSPALEFEETEELATRRKRLWQLAPVYINEWSEWLDEQKKLAGVPSDSPVYLSLRLDGRVRGSGVGYPPWNALVAQLPQVKGMWTGLLDGFDGRV

SEQ ID NO: 19300 - protein, 326 aa, Glycine max
MAITFGLVTPNSNTLCLTLTTPPLIANHRTTNVVFSGQSVFSYGHTNLSYSHQRASSFATIVCSAANKPSSSSEISSTAKIRSEVLSPFRSVRMFFYIAFVASGALGGFIATTQLIGALANSSRASEVPEILKGLGIDLAAVSLFAFLYFRENKAKNAQVARLSREESLSNLKLRVDEKKIIPVNSLRGIARLVICAGPASFVTESFKRSEPFTDSLLDRGVLVVPFVTDGNSPALEFEETEELATRRKRLWQLAPVYINEWSEWLDEQKKLAGVPSDSPVYLSLRLDGRVRGSGVGYPPWNALVAQLPQVKGMWTGLLDGFDGRV

SEQ ID NO: 19301 - protein, 233 aa, Glycine max
MFFYIAFVASGALGGFIATTQLIGALANSSRASEVPEILKGLGIDLAAVSLFAFLYFRENKAKNAQVARLSREESLSNLKLRVDEKKIIPVNSLRGIARLVICAGPASFVTESFKRSEPFTDSLLDRGVLVVPFVTDGNSPALEFEETEELATRRKRLWQLAPVYINEWSEWLDEQKKLAGVPSDSPVYLSLRLDGRVRGSGVGYPPWNALVAQLPQVKGMWTGLLDGFDGRV

SEQ ID NO: 19302 - DNA, 1602 bp, Glycine max
gagaacaataggagcatcatggttaggctatggtgctcttctctctcaattacacttttattccaacagctcatcagattgtgcatttcttggagtgtgcaaaccccaacacccccattgccaatcctccctctcccaacatattcccagttgaaatggcaacaaagggagatcataatgtttttccattttggtgtgaacacattcagtgacagagaatggggcactggccaggaaaacccagcaatcttcaatccaacggggctcaacaccacccagtgggccactgtggcagcagatgcaggagtttcattgatgatattaactgcaaaacaccatgatggcttctgcctctggccttccaagtacactgaccattctgtcattagcagccctaggcaaggtggcaagggtgatgtggttcaagactttgtcaatgcagccactgcacaaggaattgatgtaggggtctacctttcaccttgggatagacatgaccctagatatggcaatgatttgctctacaaccaatactacttggctcaactacaagagttgctcaagaaatatccaaatgttagagagatttggttcgatggagcaaagggtgccaatgcaaaaaatatgacgtattacttttcagattggttttccatggtgaaggagctgcagagttccatcaacatcttctctgatgcaggtcctgatgttaggtgggtgggagatgaaacaggttctgcagggtatacatgttggtctaccattaatcgaacctctctatccattggaagtccagacatcattcagtatataaacactggtgatccaaaagggacagattggctaccggcggaatgtgatgtatccattcgaaaaggatggttttggcacaaatcagaatcaccaaaaaagctaagcgagctacttgacatttattacaattcggttgggagaaattgtgtgttacttctcaatgtgcctcctaatacaagtggccttataactgaagttgatgccaatagattgaaagagtttagaagtgcaatcaagacaattttccatcagaatcttgctgaggattgttttgttaaagttagtagccaaagagggggtttcgggccagaaaagatgctagacagtgaccacttgtggtcatactgggccccaagggacgatgatgatgaaaaggaccattgggttgaaatttgggccaaggaagggagattgagattcaatgtggttagaatacaagaggcaattggtcttggtcaaaggatcaaacggcatgaaatctatgtggatggtaaattgatcatcaaagccacaacggttggttataagaggcttcataggcttgatgggggtgaagtgcacgctcgtggtgtgaggataagaattagaaaggcaagaggagtgcctcttatctcttctattggcttgcattatgatcctttctggcactcaaagtttactgtatcctgaagagttaagtaagtttaggtaaaggagcataactgcaataaattaagtagagccttaagaagaatattgaaatattgttctatcagtaaagaacaaaaaataaatttactttaaatttcc

SEQ ID NO: 19303 - protein, 493 aa, Glycine max
ENNRSIMVRLWCSSLSITLLFQQLIRLCISWSVQTPTPPLPILPLPTYSQLKWQQREIIMFFHFGVNTFSDREWGTGQENPAIFNPTGLNTTQWATVAADAGVSLMILTAKHHDGFCLWPSKYTDHSVISSPRQGGKGDVVQDFVNAATAQGIDVGVYLSPWDRHDPRYGNDLLYNQYYLAQLQELLKKYPNVREIWFDGAKGANAKNMTYYFSDWFSMVKELQSSINIFSDAGPDVRWVGDETGSAGYTCWSTINRTSLSIGSPDIIQYINTGDPKGTDWLPAECDVSIRKGWFWHKSESPKKLSELLDIYYNSVGRNCVLLLNVPPNTSGLITEVDANRLKEFRSAIKTIFHQNLAEDCFVKVSSQRGGFGPEKMLDSDHLWSYWAPRDDDDEKDHWVEIWAKEGRLRFNVVRIQEAIGLGQRIKRHEIYVDGKLIIKATTVGYKRLHRLDGGEVHARGVRIRIRKARGVPLISSIGLHYDPFWHSKFTVS

SEQ ID NO: 19304 - protein, 487 aa, Glycine max
MVRLWCSSLSITLLFQQLIRLCISWSVQTPTPPLPILPLPTYSQLKWQQREIIMFFHFGVNTFSDREWGTGQENPAIFNPTGLNTTQWATVAADAGVSLMILTAKHHDGFCLWPSKYTDHSVISSPRQGGKGDVVQDFVNAATAQGIDVGVYLSPWDRHDPRYGNDLLYNQYYLAQLQELLKKYPNVREIWFDGAKGANAKNMTYYFSDWFSMVKELQSSINIFSDAGPDVRWVGDETGSAGYTCWSTINRTSLSIGSPDIIQYINTGDPKGTDWLPAECDVSIRKGWFWHKSESPKKLSELLDIYYNSVGRNCVLLLNVPPNTSGLITEVDANRLKEFRSAIKTIFHQNLAEDCFVKVSSQRGGFGPEKMLDSDHLWSYWAPRDDDDEKDHWVEIWAKEGRLRFNVVRIQEAIGLGQRIKRHEIYVDGKLIIKATTVGYKRLHRLDGGEVHARGVRIRIRKARGVPLISSIGLHYDPFWHSKFTVS

SEQ ID NO: 19305 - protein, 434 aa, Glycine max
MFFHFGVNTFSDREWGTGQENPAIFNPTGLNTTQWATVAADAGVSLMILTAKHHDGFCLWPSKYTDHSVISSPRQGGKGDVVQDFVNAATAQGIDVGVYLSPWDRHDPRYGNDLLYNQYYLAQLQELLKKYPNVREIWFDGAKGANAKNMTYYFSDWFSMVKELQSSINIFSDAGPDVRWVGDETGSAGYTCWSTINRTSLSIGSPDIIQYINTGDPKGTDWLPAECDVSIRKGWFWHKSESPKKLSELLDIYYNSVGRNCVLLLNVPPNTSGLITEVDANRLKEFRSAIKTIFHQNLAEDCFVKVSSQRGGFGPEKMLDSDHLWSYWAPRDDDDEKDHWVEIWAKEGRLRFNVVRIQEAIGLGQRIKRHEIYVDGKLIIKATTVGYKRLHRLDGGEVHARGVRIRIRKARGVPLISSIGLHYDPFWHSKFTVS

SEQ ID NO: 19306 - DNA, 1326 bp, Glycine max
aattactatttttcactttctcctttcaatatgaggaaccccactcacaagtcccctgaggttgaaaatgatggtgattttaaagttcatctgttctcttcatcatccgagttgcttgaaaagcttcatgaaaaatggagttcagtggagaaaccaccatacccagctatttattctagtatttatggaggtatcatacttgatccagcaatgatggtaatccccattgatgatcacatggttcacagagggcatggtgtgtttgatacagctattgttctagatggatacctctatgagttggatgttcaccttgacagattcctaagttcagcctccaaagcaaagatatcctctcccttttctcgatcagtgcttcacagcattctaatacaactaactgcagcatcaaaatgcaagaagggaactctaagatactggctcagtgcaggtcctggagatttcttgctatcatcagcaggatgtccaacatctgcattctatgcagtagtcattgaccaagatatttcccaatgcaaagagggagttaaagtgattacttccaacataccaatgaagccttctctatttgccacagccaaaaatgtgaactatcttccaaatgtcctttcagtaatggaagctgaagagaaaggagcatcttcttctatatgggttgatgaggaaggttatattgctgaaggtccaaatgtgaatgttgctttcataactcaagacaaggaacttgtcatgcctccttttgataacatcttacatggttgcactgcaaaaaggctccttgaactggcacccaagttggttgatcaagggcttctgaaaggtgtagcaactaaaaaactaactgtggaggaagctaaagctgctgctgaaatgatgtatgtaggaagcacgcttcctctgttgcctatcatcgtttgggatgatcaacccattggcaatggaagggtgggagaattaacaatgttactttcggatatgctttgggatgatatggtagctggccctggcacacagaggatacctgttccttatgttgagtaaacctacaaagtcatcaaattacaggctgggaacaactttcttacttttctatgtcatgttcctaggagttctccttgcaaagatttatcaagaggtttctctttgtatttgctttttgtatttcaagtgtgaacactgaacaagtccttaagtgaagcaccaggtgtttcctgcaacacaaaatttacgtagcagataaatagtccttgaactgtttcacgttgttgtattgatataataataataatgaagactcttcatgct

SEQ ID NO: 19307 - protein, 353 aa, Glycine max
NYYFSLSPFNMRNPTHKSPEVENDGDFKVHLFSSSSELLEKLHEKWSSVEKPPYPAIYSSIYGGIILDPAMMVIPIDDHMVHRGHGVFDTAIVLDGYLYELDVHLDRFLSSASKAKISSPFSRSVLHSILIQLTAASKCKKGTLRYWLSAGPGDFLLSSAGCPTSAFYAVVIDQDISQCKEGVKVITSNIPMKPSLFATAKNVNYLPNVLSVMEAEEKGASSSIWVDEEGYIAEGPNVNVAFITQDKELVMPPFDNILHGCTAKRLLELAPKLVDQGLLKGVATKKLTVEEAKAAAEMMYVGSTLPLLPIIVWDDQPIGNGRVGELTMLLSDMLWDDMVAGPGTQRIPVPYVE

SEQ ID NO: 19308 - protein, 343 aa, Glycine max
MRNPTHKSPEVENDGDFKVHLFSSSSELLEKLHEKWSSVEKPPYPAIYSSIYGGIILDPAMMVIPIDDHMVHRGHGVFDTAIVLDGYLYELDVHLDRFLSSASKAKISSPFSRSVLHSILIQLTAASKCKKGTLRYWLSAGPGDFLLSSAGCPTSAFYAVVIDQDISQCKEGVKVITSNIPMKPSLFATAKNVNYLPNVLSVMEAEEKGASSSIWVDEEGYIAEGPNVNVAFITQDKELVMPPFDNILHGCTAKRLLELAPKLVDQGLLKGVATKKLTVEEAKAAAEMMYVGSTLPLLPIIVWDDQPIGNGRVGELTMLLSDMLWDDMVAGPGTQRIPVPYVE

SEQ ID NO: 19309 - protein, 283 aa, Glycine max
MMVIPIDDHMVHRGHGVFDTAIVLDGYLYELDVHLDRFLSSASKAKISSPFSRSVLHSILIQLTAASKCKKGTLRYWLSAGPGDFLLSSAGCPTSAFYAVVIDQDISQCKEGVKVITSNIPMKPSLFATAKNVNYLPNVLSVMEAEEKGASSSIWVDEEGYIAEGPNVNVAFITQDKELVMPPFDNILHGCTAKRLLELAPKLVDQGLLKGVATKKLTVEEAKAAAEMMYVGSTLPLLPIIVWDDQPIGNGRVGELTMLLSDMLWDDMVAGPGTQRIPVPYVE

SEQ ID NO: 19310 - DNA, 1354 bp, Glycine max
gtattttttgttcatataataacttattttgctgagcctttttttccccttttacttgttacaatggctagatttttcaagaccctatattaattatttattgccacttgttttcttgtgtttcagctggtttcatcatctattcaaatagcttccagcataatattttgaatttgactgctaaggaaagaccccatttttctgagttgtaaagtgacttatatttttttgagctgagaggaatatttggaatcaaggattgtgtgcttggttgaccagacttgctatctcagcaattgatgtgagatccacggggcgaaaaaagaagcaacttggccttatattattcatcagatgtctgcattctggagctgaggaaatgggtccttgcatctcaacaagcagtaggagtacttgtagcagcaagagcaatggagatatggtctctccatcttgcttagaaattggatgctgtggccaaaagagaacaaggagaacattctctgatcatgttatttctctccaccatttaccatccttacctagcagaattttctccaatggaaagagccgcggttcgtgcatatttacacagcagggccgcaagggtattaatcaggatgccatgattgtgtgggaagatttcatgtccgaagatactatcttttgtggtgtctttgatggccatggtccacacggtcatctagtcgcgcgcaaagtgagggatgcattgccaattaagctaatttcatctttgcattctaatgaatctaagcgaaatgggtcaggtaaaacttgcttcaaagggaatgtaaaacctgatagtggagaatctgagaaggattgctctgcggaggataaactgaactcaacatggagggaagctttcatgaaggcatacaaggctatggacaaagagctcaggtctcatccgaatctggattgcttctgtagtgggagcactgctgtgactatagtgaagcagggttcaaatctgttcatgggctatatcggggattctcgagcaatcatgggatccaaggatagcaatgactccatggtggctattcagttgactgttgatttaaagcctgatttgccaagggaagcagagagaattaagaagtgcagaggtagggtatttgctttgcaagatgagcctgaagtgcctagggtgtggttgccttttgatgatgtgccgggattagccatggctagagcatttggtgatttctgcttgaaggagtatggtgtgatttctatacctgaattttctcaccggcagcttacagacagagatcagttcattgttcttgcctcagatggggtgtgggatgttttaagcaacgaggag

SEQ ID NO: 19311 - protein, 325 aa, Glycine max
MGPCISTSSRSTCSSKSNGDMVSPSCLEIGCCGQKRTRRTFSDHVISLHHLPSLPSRIFSNGKSRGSCIFTQQGRKGINQDAMIVWEDFMSEDTIFCGVFDGHGPHGHLVARKVRDALPIKLISSLHSNESKRNGSGKTCFKGNVKPDSGESEKDCSAEDKLNSTWREAFMKAYKAMDKELRSHPNLDCFCSGSTAVTIVKQGSNLFMGYIGDSRAIMGSKDSNDSMVAIQLTVDLKPDLPREAERIKKCRGRVFALQDEPEVPRVWLPFDDVPGLAMARAFGDFCLKEYGVISIPEFSHRQLTDRDQFIVLASDGVWDVLSNEE

SEQ ID NO: 19312 - protein, 305 aa, Glycine max
MVSPSCLEIGCCGQKRTRRTFSDHVISLHHLPSLPSRIFSNGKSRGSCIFTQQGRKGINQDAMIVWEDFMSEDTIFCGVFDGHGPHGHLVARKVRDALPIKLISSLHSNESKRNGSGKTCFKGNVKPDSGESEKDCSAEDKLNSTWREAFMKAYKAMDKELRSHPNLDCFCSGSTAVTIVKQGSNLFMGYIGDSRAIMGSKDSNDSMVAIQLTVDLKPDLPREAERIKKCRGRVFALQDEPEVPRVWLPFDDVPGLAMARAFGDFCLKEYGVISIPEFSHRQLTDRDQFIVLASDGVWDVLSNEE

SEQ ID NO: 19313 - protein, 243 aa, Glycine max
MIVWEDFMSEDTIFCGVFDGHGPHGHLVARKVRDALPIKLISSLHSNESKRNGSGKTCFKGNVKPDSGESEKDCSAEDKLNSTWREAFMKAYKAMDKELRSHPNLDCFCSGSTAVTIVKQGSNLFMGYIGDSRAIMGSKDSNDSMVAIQLTVDLKPDLPREAERIKKCRGRVFALQDEPEVPRVWLPFDDVPGLAMARAFGDFCLKEYGVISIPEFSHRQLTDRDQFIVLASDGVWDVLSNEE

SEQ ID NO: 19314 - DNA, 1086 bp, Glycine max
atagagagaaggattcagactctggaagcttcctttggccggagaagaagacggtgtcgtttgagacttgggggagaggagaatgacagagttgagcagcagagaggtggaatacataaggagacaccacagcaaggcagcagaggacaatcagtgtgcctctgctctcgttaagcacataagggccccacttcctctcgtaattccctttgcatcattaagtaattaagtaattattatattattaattactttatgatttgtaggtgtggtcgttggtgaggagatttgatgagccgcagaagtataaaccgtttgtgagcaggtgcgtggtgaggggaaaccttgagattgggagtttgagagaggttgatgttaagtccggccttccagcgactactagtactgaaagattagagattcttgatgacaatcatcatatacttagcgtcaggattattggcggtgatcatagacttaggaactactcgtctatcatgtccctccacccagaaattgttgatggaaggccaggtaccctggtaattgaatcatttgtggtggacatacctgaaggcaacaccaaggatgagacctgctacttcgttgaagcattgatcaaatgcaatctcaaatcacttgctgatgtctcagaaggccttactttgcaggaccacactgaaccaattgatcgaaaatacgagttattgatcacaagaggctgagaatttggctgccatggatgaagctttcccaactttggaggcatagaagacggaatgccaaatggcaatggtgctttattctctgttatatatgattgcttttgctcgtttctctctttagtggtagttaaaaagaatagaatgttttagacaaatgtctgaatcagtgcaggaaaaggtgactgcatgttatgttctttctgtatataggtgttggtcaaagttggtccgtaaaattgtttccattggtcagtactcagttgtaatttctggttgcagtaaatttttagcaaataacagaggtttcttcttaaatgagtactattatattataaataatatctcgacagcttatgtaaag

SEQ ID NO: 19315 - protein, 75 aa, Glycine max
MSLHPEIVDGRPGTLVIESFVVDIPEGNTKDETCYFVEALIKCNLKSLADVSEGLTLQDHTEPIDRKYELLITRG

SEQ ID NO: 19316 - protein, 69 aa, Glycine max
MSESVQEKVTACYVLSVYRCWSKLVRKIVSIGQYSVVISGCSKFLANNRGFFLNEYYYIINNISTAYVK

SEQ ID NO: 19317 - protein, 57 aa, Glycine max
IERRIQTLEASFGRRRRRCRLRLGGEENDRVEQQRGGIHKETPQQGSRGQSVCLCSR

SEQ ID NO: 19318 - DNA, 2119 bp, Glycine max
tcagaagccctcattgagaaatttcaattccagatgtctgattataaaattgtggtgacttctagggttgcatttcctaaatatggcaccccatatgttttaaaaccacttgctcatgaagatgcaatgaccctattccgacatcatgctctcttggaaaaaagcagttcacatattcctgacaaagaaattgtccaaaaggtgcttattttgctttctgacattgggagtaatctgtaccagtcctttgtgtctgaagccattgttgatttagagagtacaaagttgtgttttgactcctcaaaccaatattatggttgtgagatattgcaagggtttaccgcttgccgttaaagtgattggtagatcactcagtcatcggcctattgagatgtggcaaaagatggtggaggaattgtcacaaggtcattctatacttgattctaatattgaattacttacatgcttccaaaagctcttgcatgttttggaagataatcccaacaacaaggagtgcttcatggacttggggttatttcctgaagaccaaagaattcctcttcctgttcttattgatatatgggcagtgttatatggatttgatgatgacggcatagaagcaatggacatcataaataaattagactccatgaatctggttaatgtcttagtagcaaggaaaaattcaagtgactcagacaattactactacaataaccactacgtcatcctccatgatcttctaagagagcttgcaatctatcaaaacaacctggaaccaattgaaaagagaaaaagactgattaatgacataaatgaatccgaggagaagcaacaaggcatgatagcccgcttattgtcaaaattttgcagatgcagtgttaaacagacactccaacaggtccccgcccgcacattgtctatatcagctgatgaaacaaacacttcatatcagtcccacatacaaccatccctagctgaagttctggttttaaatcttcaaactaagaagtattcctttccagagtacatagagaaaatgagtgaactaaaagttcttatcatgacaaattatggttttcatccgtgtgaactagacaatttcaaactactcagctctgtatcaaacctgagaagaatcagactagagcggatttctgttcctcacttaggggcattgaaaaatcttggaaagttatccctctacatgtgtagtaacataagtcaggcttttgaaaatggtaccatcacagttttggattcatttccaaaactatcagatttgaacattgactattgcaaggatatggtgaaattgcctactgggatctgtgatattgtctcactaaagaagctcagtattaccaattgtcacaagcttagttctctgccccaagaaattggacagttgttgaatttggaactcctgaacataagttcctgtactgatttggaagagataccagattctattgtaaaactttctaagctaagacttcttgacctctcaaactgcataagcctttcaagtttaccagaggacattggtgatctatgtaatctcaggaatctcaatatgacaagctgtgcaaggtgtgaattgccatactcagtaaccaatcttgagaatttgaaggtggtggtatgtgatgaagagacagctgcttcatgggaagcattcgaagctatgcttccaaatctgaagttagaggttcctcgagtcgaggttaacttaaactggcttcattctattagctcctaagacatgacctggttcatgggaagcatttgaaactatgattccaaatctaaagtttgaggttcctcgagttgatgttaactgaagctggtttcgttcaatttgctcctatgacctctttctataaatgttagaccaatggccgtgactgtttcatgtgtaataatcttgtttaaaatatggataataatgtgtattcaagttgctgtagtagtatttgcatgtttagtgtaaacagtactatgttacttgaaagaagttggcgattttatttgttgtatgtgttgtcatgagtgaacatcttagcatgatgatgtccacaaaataattgaactatggtaagttaaaaagtttgttttc

SEQ ID NO: 19319 - protein, 482 aa, Glycine max
MVVRYCKGLPLAVKVIGRSLSHRPIEMWQKMVEELSQGHSILDSNIELLTCFQKLLHVLEDNPNNKECFMDLGLFPEDQRIPLPVLIDIWAVLYGFDDDGIEAMDIINKLDSMNLVNVLVARKNSSDSDNYYYNNHYVILHDLLRELAIYQNNLEPIEKRKRLINDINESEEKQQGMIARLLSKFCRCSVKQTLQQVPARTLSISADETNTSYQSHIQPSLAEVLVLNLQTKKYSFPEYIEKMSELKVLIMTNYGFHPCELDNFKLLSSVSNLRRIRLERISVPHLGALKNLGKLSLYMCSNISQAFENGTITVLDSFPKLSDLNIDYCKDMVKLPTGICDIVSLKKLSITNCHKLSSLPQEIGQLLNLELLNISSCTDLEEIPDSIVKLSKLRLLDLSNCISLSSLPEDIGDLCNLRNLNMTSCARCELPYSVTNLENLKVVVCDEETAASWEAFEAMLPNLKLEVPRVEVNLNWLHSISS

SEQ ID NO: 19320 - protein, 456 aa, Glycine max; identical to SEQ ID NO: 17970

SEQ ID NO: 19321 - protein, 452 aa, Glycine max
MVEELSQGHSILDSNIELLTCFQKLLHVLEDNPNNKECFMDLGLFPEDQRIPLPVLIDIWAVLYGFDDDGIEAMDIINKLDSMNLVNVLVARKNSSDSDNYYYNNHYVILHDLLRELAIYQNNLEPIEKRKRLINDINESEEKQQGMIARLLSKFCRCSVKQTLQQVPARTLSISADETNTSYQSHIQPSLAEVLVLNLQTKKYSFPEYIEKMSELKVLIMTNYGFHPCELDNFKLLSSVSNLRRIRLERISVPHLGALKNLGKLSLYMCSNISQAFENGTITVLDSFPKLSDLNIDYCKDMVKLPTGICDIVSLKKLSITNCHKLSSLPQEIGQLLNLELLNISSCTDLEEIPDSIVKLSKLRLLDLSNCISLSSLPEDIGDLCNLRNLNMTSCARCELPYSVTNLENLKVVVCDEETAASWEAFEAMLPNLKLEVPRVEVNLNWLHSISS

SEQ ID NO: 19322 - DNA, 794 bp, Glycine max
aaacgtggaacacacctgacacctgatccgcgagcgagggtttgtgaagatgacgacgattcgcaggttttgctgcaacgatcttcttcgctttgccgccgtcaatctcgaccatctcaccgaaacattcaacatgtccttctacatgacctatcttgcaagatggcctgactatttccacgttgccgaaggccctggaaatcgaatcatgggttacattatgggtaaagttgaggggcaaggagaatcttggcatggccatgtaactgcggtgaccgttgctccagagtatcgaaggcagcagttagccaaaaaacttatgaatctgctggaagacatcagtgacaatattgataaggctttttttgttgatctctttgtgagagcgtcaaatgcaccagccatcaagatgtatgaaaagcttggctatgtgatttatcgacgagtgctacgctactattctggggaagaagatggtttggatatgaggaaggcattgtctcgtgatgttgaaaagaagtccatcatccctcttaaacggccggtcactcctgatgaattagagtatgactaagtctgcgtttcatgcaacagagttgcatgagcttattgtgtctcaaagtaaaccatgttgtgcttgataggctgtcaagttgaaaggagttgaacatattatgttggaacttcgaaggtttagtaaatgaaaaatgatcctagaagataatcttgctagtaaaatgaaaaatcttgtcttgtatccaatatgttataattaaatatcacttgcgcgtgtt

SEQ ID NO: 19323 - protein, 174 aa, Glycine max
MTTIRRFCCNDLLRFAAVNLDHLTETFNMSFYMTYLARWPDYFHVAEGPGNRIMGYIMGKVEGQGESWHGHVTAVTVAPEYRRQQLAKKLMNLLEDISDNIDKAFFVDLFVRASNAPAIKMYEKLGYVIYRRVLRYYSGEEDGLDMRKALSRDVEKKSIIPLKRPVTPDELEYD

SEQ ID NO: 19324 - protein, 146 aa, Glycine max
MSFYMTYLARWPDYFHVAEGPGNRIMGYIMGKVEGQGESWHGHVTAVTVAPEYRRQQLAKKLMNLLEDISDNIDKAFFVDLFVRASNAPAIKMYEKLGYVIYRRVLRYYSGEEDGLDMRKALSRDVEKKSIIPLKRPVTPDELEYD

SEQ ID NO: 19325 - protein, 142 aa, Glycine max
MTYLARWPDYFHVAEGPGNRIMGYIMGKVEGQGESWHGHVTAVTVAPEYRRQQLAKKLMNLLEDISDNIDKAFFVDLFVRASNAPAIKMYEKLGYVIYRRVLRYYSGEEDGLDMRKALSRDVEKKSIIPLKRPVTPDELEYD

SEQ ID NO: 19326 - DNA, 1513 bp, Glycine max
aagcactttcgttcccgatactcatactcggaacaccaactcccatcttcgccttcgggttagggttagggttagggaattagggcttcgaacttcgacgcaatgtcgtccattaacccctcacgagctaccgctccctccgccttcgccacgcgccggccgtgggaggagttcttcgcgctccactcgttcacgcgcccctacaccctcggcgagaccacgctccgcgtgaagcgcaacctcggccacttccgcgtgaactacgccatggtcgtgctcctcttcgtgttccttagcctcctctggttccctatctccctcgtcgtcttcctcgccgtcttcgccgcgtggttcttcctctactttttccgcgatggccccatcgtcgtgctccgccgcgagcttgacgaccgcctcgtcctcgcggcgctctccgccgtcaccgtcgccgggcttgtccttaccggcgtctggctcaacgttgtggtggcgttgctcttcgcggcggcggcggtggcgctgcatgcggcgcttcggaacaccgaggatttgtacgtggatgaattggaagtttctgatggaggtttggtttcggttgttggtggtagccctacgaaacgaacagggtacgctagaatatagtaatagttagttatgagatataactgattttcgttttcgtttaatcgttttttgtgttactcgcattgcatatatttgaagaaaatagaggttcgagttttaggttttggtttcgcggaaatatgaattgtgtccatatgatagatttacataccgtgttgttagcttggaattggaatagatttcttgcttgttgcttggccccttcttcttatgtttttagaatctcttgtaaattctaagataggttgaagcattcaatttgtgtatttagagttccaattcaatgtattgtctggcttgatatgctttggtatttgtaataggtttagcaatggtgggtaagatttgttttattttatatcaagtgtaaatgaagaggtaaccattttggttattcatttgtggtttcatatgcatttcagtttgctatcctactaccctctttttttttttagtagattaatatcatgatcaaattaagaacgttatataatataatgttgtgctttttggagtggcttgggttgctgttgtctgaatatctgattttgttgaattagacttgcttgtgttatgctactaagtgttgcagatccttttgtagcctgctgtgaatcaattactgagacttgtaactgtacaacatttgagagaattgaatagagaaccatggaatgccaattcatcattctcttatgtttagctgcaattagctgacacctaagttagttaatgttagctacctctttttagttagtcagttggccatttgggttgattgggatctgatctctcaaaacatgtgtataagaacagattgtaaaccacatgcaatcagactctgactattgaaactcttccctctttt

SEQ ID NO: 19327 - protein, 179 aa, Glycine max
MSSINPSRATAPSAFATRRPWEEFFALHSFTRPYTLGETTLRVKRNLGHFRVNYAMVVLLFVFLSLLWFPISLVVFLAVFAAWFFLYFFRDGPIVVLRRELDDRLVLAALSAVTVAGLVLTGVWLNVVVALLFAAAAVALHAALRNTEDLYVDELEVSDGGLVSVVGGSPTKRTGYARI

SEQ ID NO: 19328 - protein, 124 aa, Glycine max
MVVLLFVFLSLLWFPISLVVFLAVFAAWFFLYFFRDGPIVVLRRELDDRLVLAALSAVTVAGLVLTGVWLNVVVALLFAAAAVALHAALRNTEDLYVDELEVSDGGLVSVVGGSPTKRTGYARI

SEQ ID NO: 19329 - protein, 92 aa, Glycine max
MAPSSCSAASLTTASSSRRSPPSPSPGLSLPASGSTLWWRCSSRRRRWRCMRRFGTPRICTWMNWKFLMEVWFRLLVVALRNEQGTLEYSNS

SEQ ID NO: 19330 - DNA, 1824 bp, Glycine max
gattctgtgccagcatcaaacgacaaggaaatggataggagagattccatctctttgtctagtacagttaaaggaaaagagccgagcattagagaccgtccagcctgtcccttttttattaaggatttaactaaatcaatagtttctgctggaaaatctttgcagctgatgcgacatgtacctgattgctcagtgaattgtagcaaaggaagcaattatgagattggaaataccaaatgtttaaactatggtttatatccttctcaaagaatgactgggttaacgttgcccgaagttttttctgtatcactagttggacttgttggccatggcgattatgtttgtaagtacttttggcaagacaactggtatgaatctgtatctgtttcatccaatgtatctcatgtaaatgaggaaaaagcagataatgacaatactgaaaaattaattgctccaccttactcagaaaagacatggtataagttcttgattgatacattatttcagaaaagatcagctgatttgaagctaaaatacaaagacataaataatgacacaagagagctgagaggggctagagttattgatgacgaagtgctcctcttgaggtcatacatagaaaatccagttattactgtatgtcaaaaaaacctaggaaagcatggggatgccctgaaaacattgagtttatctcgaaaatttagcttgccttcattaaatgatgagggtttaagaaaggctatatttggtggagaaagtgcagcattttctgatagtgaaggaacgaactatacttttggctttcactttggtgaatctgaataccttcgctcacaggatgacagaaagctgttagaaatgttgtttccttttcccactattttgccttcatttcaggatgatcttcctgtgtcagagctcttgccttttcagagaaacagcagtcttatttcaagagttcttcgttggatgcaaaatgttgacctaagaattactccacttcctctggttattatgcagtactgcctaaccgtctacattcagaaacaggtggattatattggagtgaatatgttgttaaagttgatgaacgaatggagattcatggatgagcttgcagtgttgcgagctatatacttgctaggttcaggtgatttgctgcaacactttttgactgtaattttcaataagttggataagggtgaagcatgggatgatgattttgagttaaacaccatattacaggtagatttacttgatgttgttcaactgttattttatgctatgctatttgctctggtagacttttttggttctactctatttagattccgtctaacttctgctgcaatttattcttcaagttagactaggaagttgcttctaaggtctaatttcttagattaaattatgtttaaatttattctatgatttgaggattaatggaatgggttatcatttaatgcttgatatatgacagttcgtaagatcttcggctaattctatccagagagtaaatttatatagtgtcataatgtgttagccaactagaaaggacctcagcacctgatgcgtacaaatagtactcgcacaagggaaaacataccctatgcagtagtagcagtggactaaaagtccagatatcgaacccaaaggaccagttggggagcaattaagatttaaattaattaaaggatagacgtgatcaattgtttattatgaagtaagaatcaaagcaggaaaatttagtgtgaaaacaataattatagtgcagcctagaattgtgacttttatgtaccatttttccccaatcgtaattccaac

SEQ ID NO: 19331 - protein, 455 aa, Glycine max
DSVPASNDKEMDRRDSISLSSTVKGKEPSIRDRPACPFFIKDLTKSIVSAGKSLQLMRHVPDCSVNCSKGSNYEIGNTKCLNYGLYPSQRMTGLTLPEVFSVSLVGLVGHGDYVCKYFWQDNWYESVSVSSNVSHVNEEKADNDNTEKLIAPPYSEKTWYKFLIDTLFQKRSADLKLKYKDINNDTRELRGARVIDDEVLLLRSYIENPVITVCQKNLGKHGDALKTLSLSRKFSLPSLNDEGLRKAIFGGESAAFSDSEGTNYTFGFHFGESEYLRSQDDRKLLEMLFPFPTILPSFQDDLPVSELLPFQRNSSLISRVLRWMQNVDLRITPLPLVIMQYCLTVYIQKQVDYIGVNMLLKLMNEWRFMDELAVLRAIYLLGSGDLLQHFLTVIFNKLDKGEAWDDDFELNTILQVDLLDVVQLLFYAMLFALVDFFGSTLFRFRLTSAAIYSSS

SEQ ID NO: 19332 - protein, 445 aa, Glycine max
MDRRDSISLSSTVKGKEPSIRDRPACPFFIKDLTKSIVSAGKSLQLMRHVPDCSVNCSKGSNYEIGNTKCLNYGLYPSQRMTGLTLPEVFSVSLVGLVGHGDYVCKYFWQDNWYESVSVSSNVSHVNEEKADNDNTEKLIAPPYSEKTWYKFLIDTLFQKRSADLKLKYKDINNDTRELRGARVIDDEVLLLRSYIENPVITVCQKNLGKHGDALKTLSLSRKFSLPSLNDEGLRKAIFGGESAAFSDSEGTNYTFGFHFGESEYLRSQDDRKLLEMLFPFPTILPSFQDDLPVSELLPFQRNSSLISRVLRWMQNVDLRITPLPLVIMQYCLTVYIQKQVDYIGVNMLLKLMNEWRFMDELAVLRAIYLLGSGDLLQHFLTVIFNKLDKGEAWDDDFELNTILQVDLLDVVQLLFYAMLFALVDFFGSTLFRFRLTSAAIYSSS

SEQ ID NO: 19333 - protein, 399 aa, Glycine max
MRHVPDCSVNCSKGSNYEIGNTKCLNYGLYPSQRMTGLTLPEVFSVSLVGLVGHGDYVCKYFWQDNWYESVSVSSNVSHVNEEKADNDNTEKLIAPPYSEKTWYKFLIDTLFQKRSADLKLKYKDINNDTRELRGARVIDDEVLLLRSYIENPVITVCQKNLGKHGDALKTLSLSRKFSLPSLNDEGLRKAIFGGESAAFSDSEGTNYTFGFHFGESEYLRSQDDRKLLEMLFPFPTILPSFQDDLPVSELLPFQRNSSLISRVLRWMQNVDLRITPLPLVIMQYCLTVYIQKQVDYIGVNMLLKLMNEWRFMDELAVLRAIYLLGSGDLLQHFLTVIFNKLDKGEAWDDDFELNTILQVDLLDVVQLLFYAMLFALVDFFGSTLFRFRLTSAAIYSSS

SEQ ID NO: 19334 - DNA, 1190 bp, Glycine max
acgttgtcatcaaatcaaaacacatcacttcacttcacttcccttctctctctcttcgacgtacatttccatcttattagggtttctttccatggattccgattcttggatttccacgcgcatgtcgtcctcttcacgccgctatcattcgcgatctgatctgtacgtggaggagagtgaagggagcgatgatttcagggcggagtttctgtgccctttctgcgccgaggattacgacgtcgtttccctctgttgccacattgacgaccaccaccctatccaagccaaaaacggggtgtgtcccatttgtgggaagaaggtgggattggatctcgttggacatattactacgcaacatgggaacttcttgagggtgcagcgtaaaaggagggtcaggaaagtaggctctggttcaacaatgtctatattgagaaaagagttacgagaaggagccttgcactcccttcttggaggttcttcatacttagcttcctgcaattctgagcctgatcctctgttatcatcttttatgtttaacccagctgtaactgatgattctgcgagtgcaaaacctccttctgttgaagatgctctagtaaaagaaagttcaaaagacgatttcttggaaagaaaacctcaacagttacagctgtcagaagaagatcaagtagagaaggctcggaggtttgaattcgtgcaaggacttctgatgtccaccattcttgatgatatgttatgactgcatctgtagctcatatgccattattgtattaggagctggagctataagcaagagaaagatagagttatgcaaaatgatacgaagtggtagtagctgcatcggataaaatatgcaatttgtctatagttatgttcataaaatgcaacctttttttatatcctgcttgtgttctatgttagttccaaataatcaatggaaataaaattcgtttcacgagcatgggaacagcagaattcgtagaccatttttctgttttttttaggtttgtcttctagaatttagtcgatgacccatgtatataaaaagtgtgagagtgctcgagtgttgtcaatttgagctagtcttctgcaccaattggttgaattttcgtatggagcttgacgagaagagttgttgttgggaccaagtataagttcgttattagttaaatgtttcaaaatatctgatc

SEQ ID NO: 19335 - protein, 245 aa, Glycine max
RCHQIKTHHFTSLPFSLSSTYISILLGFLSMDSDSWISTRMSSSSRRYHSRSDLYVEESEGSDDFRAEFLCPFCAEDYDVVSLCCHIDDHHPIQAKNGVCPICGKKVGLDLVGHITTQHGNFLRVQRKRRVRKVGSGSTMSILRKELREGALHSLLGGSSYLASCNSEPDPLLSSFMFNPAVTDDSASAKPPSVEDALVKESSKDDFLERKPQQLQLSEEDQVEKARRFEFVQGLLMSTILDDML

SEQ ID NO: 19336 - protein, 215 aa, Glycine max
MDSDSWISTRMSSSSRRYHSRSDLYVEESEGSDDFRAEFLCPFCAEDYDVVSLCCHIDDHHPIQAKNGVCPICGKKVGLDLVGHITTQHGNFLRVQRKRRVRKVGSGSTMSILRKELREGALHSLLGGSSYLASCNSEPDPLLSSFMFNPAVTDDSASAKPPSVEDALVKESSKDDFLERKPQQLQLSEEDQVEKARRFEFVQGLLMSTILDDML

SEQ ID NO: 19337 - protein, 205 aa, Glycine max
MSSSSRRYHSRSDLYVEESEGSDDFRAEFLCPFCAEDYDVVSLCCHIDDHHPIQAKNGVCPICGKKVGLDLVGHITTQHGNFLRVQRKRRVRKVGSGSTMSILRKELREGALHSLLGGSSYLASCNSEPDPLLSSFMFNPAVTDDSASAKPPSVEDALVKESSKDDFLERKPQQLQLSEEDQVEKARRFEFVQGLLMSTILDDML

SEQ ID NO: 19338 - DNA, 1265 bp, Glycine max
aatgaattctcgttaaaaatattaaccatgtaggaaaaataattgcttgatatggttattatttataatatattagtttaaataaccactcctagtggttattgtcccttgatggtaaatgtttttatcaagagttctgtttctgaaattctcccttttattatatggttctttttacagggttgcttgtgctataaattctgattaactgatccttgttaactcaatgctgtcatcattcatcaggaagatacacagacctttcacatagtttccttgtgctgtctgcttaagatatgacaaaatttcagtttcctattacagggctcgagtttggttgtaagctcttatgatggtgaagacatacttgtatcatttggaggatacaatggacattacaataatgaggtctatgtccttaaaccaagccacaaatcaaccttgcaatcaaaactaatagaaaaccccattccatacagtgtttctggtgcgcataatgccgcaaatgctacccgagatctggattctgaagcaggccacaaagggattatcaaggaacttgtcatggacagtgttgattcaataaaatcaaaaggtgatgttataacagttctaaaggtcgagaaagaagatttggaatcatcgctctacaaagagaagttgcaaactcttcaactaaagcaagagctttcagaaactaaaactcgtaactctgatctttgcaaggaactccaatcaatacgtggtcagcttgcttctgagcagtcaaggtgtttcaaacttgaggtggaggttgctgaattaagtcagaagctccagacaattgggacactacagaaggaacttgagctcctgcagcggcaaaaagctgcatccgagctggctgccctgaatgcaaagcaaaagcagggttcaggtggtgtatggggttggcttgctggtgctcctccccctacccagaaagaagatgatgggtgatcgcgtgattaaactaactggattaccatgctgcatttagtttcattagcccatttttacatccaatacacttattttttttattcaattctttttttggtgaagggaataaaatttagctttctgtttaggaaaaaccccccgtaggggtcttgcaattgcagtaatacatatttcacatattctgtaattttatttacttgttcaggacagtgcatgttgttgttcccgccaatttgctgatttgtttcgaatccactattgaatgaaaagataagtattcttcc

SEQ ID NO: 19339 - protein, 137 aa, Glycine max
MDSVDSIKSKGDVITVLKVEKEDLESSLYKEKLQTLQLKQELSETKTRNSDLCKELQSIRGQLASEQSRCFKLEVEVAELSQKLQTIGTLQKELELLQRQKAASELAALNAKQKQGSGGVWGWLAGAPPPTQKEDDG

SEQ ID NO: 19340 - DNA, 1128 bp, Glycine max
atcattcgaattgaaacagcatccagcctttgtttccccctctatcgcgatgtacatcaaggagatttgtctggaagggttcaaatcctacgcgacccgcaccgtggttccgggcttcgaccctttcttcaacgccatcaccggcttgaacggttccggcaagtctaacatcctggactccatctgcttcgtcctcggaatcaccaacctgcagcaggtcagggcttccaacctccaggaactcgtctacaagcagggccaggctggcatcaccaaggccaccgtctccgtcgtcttcgacaactccaacagctccagaagccctctcggatacgaaggacactctgagatcacagtaacaagacagattgtggtaggggggaggaacaagtatttgatcaatgggaagcttgcgcagcctagtcaagttcagaacctttttcattcagtgcagctaaatgttaataatccacatttccttattatgcaaggacgcatcactaaggtattaaatatgaaaccaccagagatattgtctatgcttgaggaagcagcagggacgagaatgtatgagacaaagaaagaggctgctcttaaaacacttgagaagaagcagagtaaggttgatgagattaacaagcttcttgaccaggagatactgcctgctctggagaagttaaggaaagaaaagacacagtacatgcaatgggctaatggcaatgcagagttagataggttgagaagattttgtattgcttatgagtatgttcaagcggagaggattaaagacaatgctgcttctgaggtggaagaagtgaaagccaagatagctgagattgatgacattgctaagacaaatcagggggaaattaaggaaatggagaccaaaatagctcagttgactgctgaaaaggaagcaagcatgggtggagaaatgaaatctctgtcagagaaggtagatgcactttcccagaatcttgtgagggaaacgtctgtactaaataataaagaagacactttgaggagtgaagaagccaacaaagcaaatcttgttaaaaatattgaagaattgaagcattctgtagaagagaagtcctctgctgttaaaaaggctgaagagggggcagc

SEQ ID NO: 19341 - protein, 375 aa, Glycine max
SFELKQHPAFVSPSIAMYIKEICLEGFKSYATRTVVPGFDPFFNAITGLNGSGKSNILDSICFVLGITNLQQVRASNLQELVYKQGQAGITKATVSVVFDNSNSSRSPLGYEGHSEITVTRQIVVGGRNKYLINGKLAQPSQVQNLFHSVQLNVNNPHFLIMQGRITKVLNMKPPEILSMLEEAAGTRMYETKKEAALKTLEKKQSKVDEINKLLDQEILPALEKLRKEKTQYMQWANGNAELDRLRRFCIAYEYVQAERIKDNAASEVEEVKAKIAEIDDIAKTNQGEIKEMETKIAQLTAEKEASMGGEMKSLSEKVDALSQNLVRETSVLNNKEDTLRSEEANKANLVKNIEELKHSVEEKSSAVKKAEEGA

SEQ ID NO: 19342 - protein, 359 aa, Glycine max
MYIKEICLEGFKSYATRTVVPGFDPFFNAITGLNGSGKSNILDSICFVLGITNLQQVRASNLQELVYKQGQAGITKATVSVVFDNSNSSRSPLGYEGHSEITVTRQIVVGGRNKYLINGKLAQPSQVQNLFHSVQLNVNNPHFLIMQGRITKVLNMKPPEILSMLEEAAGTRMYETKKEAALKTLEKKQSKVDEINKLLDQEILPALEKLRKEKTQYMQWANGNAELDRLRRFCIAYEYVQAERIKDNAASEVEEVKAKIAEIDDIAKTNQGEIKEMETKIAQLTAEKEASMGGEMKSLSEKVDALSQNLVRETSVLNNKEDTLRSEEANKANLVKNIEELKHSVEEKSSAVKKAEEGA

SEQ ID NO: 19343 - protein, 214 aa, Glycine max
MQGRITKVLNMKPPEILSMLEEAAGTRMYETKKEAALKTLEKKQSKVDEINKLLDQEILPALEKLRKEKTQYMQWANGNAELDRLRRFCIAYEYVQAERIKDNAASEVEEVKAKIAEIDDIAKTNQGEIKEMETKIAQLTAEKEASMGGEMKSLSEKVDALSQNLVRETSVLNNKEDTLRSEEANKANLVKNIEELKHSVEEKSSAVKKAEEGA

SEQ ID NO: 19344 - DNA, 1323 bp, Glycine max
aggaacattttttgctcataatggtgaaattccttcccctctccctattgcttgtttgaagaacaccaacatgaacttctcctcctccatgcctaatttgcctcaagttaaggcacttgtccaagcctattctccattcatgtacttgcatcctgatgaagagttccaacctgcttccaccaagtggtatttcacaaatggggcattgcttgttaagaaaggagaagagtccaaacctgtgccaatagaccctacaggttctaaccttcctcagggtggcaacaatgatggtgagtattggttggaccttccttctgacaaagccaacaaggaaagggtgaaaaagggtgatttcaagagttgccaagcctatgttcatgccaaacccatgtttggtggaacattcactgaccttgtcatgtgggttttctacccattcaatgggcctggaacagccaaagtagggctcatagatattccactagggaaaataggagaacatattggagactgggagcatgtgacactaagagtaagcaatttcgatggagaactaaaaaaggtgtatctctcacaacatagcaatggtcaatgggttgaagcttctcagctcgagttccaaagtgggaacaaatcagtgtgctattcctccttgaatggccatgccatttatccaaaagcaggacttgtcatgcaaggccttgatgggattggaataaagaatgaaactaagaagagtgagaaggtgattgacatgggtgttggttttgaagttgtttctggtgagtatttggggtcagcaattgtagaaccaccttggttaaactttttgaggcaatggggtccaaaaatcacttatgacattgcaaaggagctggacaatttggcgaaggtgttccctgctttggaagcccttgaagatggtttgccaaatgagttgttgggacaggagggacccacaggacctaagctcaaaagaaattggcaaggtgatgaggtttgaaatggaagacttggtgaatggtggcattattgacaccatgcaattaaaaaaggagactttaatttggttggtctgcactatctgttttgtatttttatagggttcacaacaaacatgtatttcttaataataactgacaaagttgtttcttgtttgtatttgcatgccagctttttcgggtgttcccacaacattaaaaagcatgtgatattgctcttcaaatagtaggtagatggaggacagaagaaaattgaaaagatttttgtgtgcacttggcttataatgattatttttcccaaagatataaatattttatcact

SEQ ID NO: 19345 - protein, 333 aa, Glycine max
GTFFAHNGEIPSPLPIACLKNTNMNFSSSMPNLPQVKALVQAYSPFMYLHPDEEFQPASTKWYFTNGALLVKKGEESKPVPIDPTGSNLPQGGNNDGEYWLDLPSDKANKERVKKGDFKSCQAYVHAKPMFGGTFTDLVMWVFYPFNGPGTAKVGLIDIPLGKIGEHIGDWEHVTLRVSNFDGELKKVYLSQHSNGQWVEASQLEFQSGNKSVCYSSLNGHAIYPKAGLVMQGLDGIGIKNETKKSEKVIDMGVGFEVVSGEYLGSAIVEPPWLNFLRQWGPKITYDIAKELDNLAKVFPALEALEDGLPNELLGQEGPTGPKLKRNWQGDEV

SEQ ID NO: 19346 - protein, 310 aa, Glycine max
MNFSSSMPNLPQVKALVQAYSPFMYLHPDEEFQPASTKWYFTNGALLVKKGEESKPVPIDPTGSNLPQGGNNDGEYWLDLPSDKANKERVKKGDFKSCQAYVHAKPMFGGTFTDLVMWVFYPFNGPGTAKVGLIDIPLGKIGEHIGDWEHVTLRVSNFDGELKKVYLSQHSNGQWVEASQLEFQSGNKSVCYSSLNGHAIYPKAGLVMQGLDGIGIKNETKKSEKVIDMGVGFEVVSGEYLGSAIVEPPWLNFLRQWGPKITYDIAKELDNLAKVFPALEALEDGLPNELLGQEGPTGPKLKRNWQGDEV

SEQ ID NO: 19347 - protein, 304 aa, Glycine max
MPNLPQVKALVQAYSPFMYLHPDEEFQPASTKWYFTNGALLVKKGEESKPVPIDPTGSNLPQGGNNDGEYWLDLPSDKANKERVKKGDFKSCQAYVHAKPMFGGTFTDLVMWVFYPFNGPGTAKVGLIDIPLGKIGEHIGDWEHVTLRVSNFDGELKKVYLSQHSNGQWVEASQLEFQSGNKSVCYSSLNGHAIYPKAGLVMQGLDGIGIKNETKKSEKVIDMGVGFEVVSGEYLGSAIVEPPWLNFLRQWGPKITYDIAKELDNLAKVFPALEALEDGLPNELLGQEGPTGPKLKRNWQGDEV

SEQ ID NO: 19348 - DNA, 1899 bp, Glycine max
gactgctttccaaaatgcccactttttttcttccaacgctcctcctccttctcatagccttcgccacctctgtctccggccgccgtgacctcgtcggagactttctccggctgccctccgaaactgataacgacgacaacttcaagggcacccggtgggccgtcctcctcgccggttccaatggttactggaattacagacatcaggctgatgtttgtcacgcctatcaaatattgaggaaaggtggtctgaaagaagaaaatattattgtttttatgtatgatgacattgcattcaatggggaaaacccaaggcctggagtcatcattaacaaaccagatggaggtgatgtttataaaggagttccaaaggattacaccggcgaagatgttactgttgataacttttttgctgctttacttggaaataagtcagcactgactggtggcagtgggaaggttgtggacagtggtcctgatgatcatatatttgtatactatactgaccatggaggtcctggggtgctcgggatgcctgctggtccttacttatacgcggatgatctgattgaagtcttgaagaaaaagcatgcttctggaacatataaaaacctagtattttatctggaggcatgtgaatctgggagtatctttgaaggtcttcttcctgaagatatcaatatttatgcaaccactgcttccaatgcagaagaaagtagttggggaacatattgccccggggagtatcctagtcctcccccagaatatacaacctgtttgggtgacttgtacagtgttgcttggatggaagacagtgacagacacaatttgcgaacagaaactctgcaccaacaatataaattggttaaagagaggactatatctggagattcatactatggctctcacgtgatgcagtatggtgatgtagggcttagcagagatgttctcttccattatttgggtacagatcctgctaatgataatttcacttttgtggatgaaaactccttatggtcaccttcaaaaccagtcaaccaacgtgatgctgatctcatccatttttgggataagttccgcaaagctcctgagggttctctcaggaaaaatacagctcagaaacaagttttggaagcaatgtctcacagaatgcatgtagacaacagtgtaaaactgattgggaagcttttatttggcattgaaaagggtccagaagtactcaacgctgttagaccggctggatcggcacttgttgatgactggcactgcctgaaaaccatggtgaggacttttgagacacattgtggatccttgtctcaatacgggatgaaacacatgaggtcctttgcaaacatctgcaatgtagggataaagaatgaacaaatggctgaggcttcagcacaagcttgtgtcagtattccttccaatccctggagttctctgcaaaggggtttcagtgcataataactccctgtaatgtgcactagtaaagaccaaagtatgattattgttacattatgttacatggttgtacttgtatatacatatcttgtcccacctttgtaaatacaattgggacactactaggattgggaagaagggtctttacatttatagtttggcaaatagatattgcaactacctttgtataattctatttctgaagaagcaattacaatttacaagggatggtgccatttacggcataaggattaaggagggataaagggaccaattgctttggaatatccactcattacaatgcatgtatgacaacacatagtaatatgatgtgtgtttttattcagtgggcaactggcagatcgggttttccctggtcacttttgtataattattccggaagaatttatgatgccaaaattattgtttaatattaaag

SEQ ID NO: 19349 - protein, 486 aa, Glycine max
LLSKMPTFFLPTLLLLLIAFATSVSGRRDLVGDFLRLPSETDNDDNFKGTRWAVLLAGSNGYWNYRHQADVCHAYQILRKGGLKEENIIVFMYDDIAFNGENPRPGVIINKPDGGDVYKGVPKDYTGEDVTVDNFFAALLGNKSALTGGSGKVVDSGPDDHIFVYYTDHGGPGVLGMPAGPYLYADDLIEVLKKKHASGTYKNLVFYLEACESGSIFEGLLPEDINIYATTASNAEESSWGTYCPGEYPSPPPEYTTCLGDLYSVAWMEDSDRHNLRTETLHQQYKLVKERTISGDSYYGSHVMQYGDVGLSRDVLFHYLGTDPANDNFTFVDENSLWSPSKPVNQRDADLIHFWDKFRKAPEGSLRKNTAQKQVLEAMSHRMHVDNSVKLIGKLLFGIEKGPEVLNAVRPAGSALVDDWHCLKTMVRTFETHCGSLSQYGMKHMRSFANICNVGIKNEQMAEASAQACVSIPSNPWSSLQRGFSA

SEQ ID NO: 19350 - protein, 482 aa, Glycine max
MPTFFLPTLLLLLIAFATSVSGRRDLVGDFLRLPSETDNDDNFKGTRWAVLLAGSNGYWNYRHQADVCHAYQILRKGGLKEENIIVFMYDDIAFNGENPRPGVIINKPDGGDVYKGVPKDYTGEDVTVDNFFAALLGNKSALTGGSGKVVDSGPDDHIFVYYTDHGGPGVLGMPAGPYLYADDLIEVLKKKHASGTYKNLVFYLEACESGSIFEGLLPEDINIYATTASNAEESSWGTYCPGEYPSPPPEYTTCLGDLYSVAWMEDSDRHNLRTETLHQQYKLVKERTISGDSYYGSHVMQYGDVGLSRDVLFHYLGTDPANDNFTFVDENSLWSPSKPVNQRDADLIHFWDKFRKAPEGSLRKNTAQKQVLEAMSHRMHVDNSVKLIGKLLFGIEKGPEVLNAVRPAGSALVDDWHCLKTMVRTFETHCGSLSQYGMKHMRSFANICNVGIKNEQMAEASAQACVSIPSNPWSSLQRGFSA

SEQ ID NO: 19351 - protein, 395 aa, Glycine max
MYDDIAFNGENPRPGVIINKPDGGDVYKGVPKDYTGEDVTVDNFFAALLGNKSALTGGSGKVVDSGPDDHIFVYYTDHGGPGVLGMPAGPYLYADDLIEVLKKKHASGTYKNLVFYLEACESGSIFEGLLPEDINIYATTASNAEESSWGTYCPGEYPSPPPEYTTCLGDLYSVAWMEDSDRHNLRTETLHQQYKLVKERTISGDSYYGSHVMQYGDVGLSRDVLFHYLGTDPANDNFTFVDENSLWSPSKPVNQRDADLIHFWDKFRKAPEGSLRKNTAQKQVLEAMSHRMHVDNSVKLIGKLLFGIEKGPEVLNAVRPAGSALVDDWHCLKTMVRTFETHCGSLSQYGMKHMRSFANICNVGIKNEQMAEASAQACVSIPSNPWSSLQRGFSA

SEQ ID NO: 19352 - DNA, 1897 bp, Glycine max
gattacatattgaaaagtcaatctaacaagtactccaccctaaaggaaaagctttctagttgcttgtcatctaatatggttcgcagatggtttgtttttgaatggttttatagtgcaattgattatccatggtttgccaaaagggaattcatggagtacttaaatcatgttggactagggaatatcccaaggttaactcgtgtcgagtggagtgtcataaaaagttcccttggcaaaccccgcaggttttctgaacactttctatgtgaagaaaggcaaaaacttgaacagtatcgggaatcagtgaggaaacattacactgaactgcggactggtattagggatggacttccaacagatttagccaaaccattatatgttggacaacatgtaattgctcttcatccaaaaacaagagagattcatgatggtagtgtgcttaccgttgactatgacaagtgcaggattcagtttgaccgtcctgaattaggtgttgaatttgtaatggacattgattgcatgcctttgaattcatcagataatatgccagaagctctgaggaggcatattggttccccaatatcctctttcatgaataaagagccacaaattagtggaaattcaaattttggggggtgcgaaatgaatcattcctcacccgtgaaggcaaaggttgctaccgttgataatctctgtgcacaagcaggttgtgctcaaccatgtaaagtaacacaccatcaagctaaggaagctgacatacaggcagtttctgaactaaagcatgctctagataaaaaggagacattgttgatggagcttcgaagtgcaaatagcgacatattggaaaacaaaaatggcatagactgcttaaaagattctgaggttttcaagaagcattatgcgacggtttctgatgctatgctacaactgaggcaacgcaatacttacagaggaaactctctgccatcctggatgaagccacaagcaagtttcaatgttcatgatgatcttcccagtatgttggatagttctctgacacaagagttagggtcaactgttgttcaagttattaaaggatccaggctaagggcacatgcaatggtagatgctgcatttcaggcattgtctttggcaaaggaaggtgaagatgctttcataaagattgggcaagcattggattctataaatcatcagcagttagcctcccagtctaggttacccgtgatcaggtctcaagagcaagtgaacgcgaatggcagtttttatcatcttaatcattcaactagcggtgtatcagaacctatacttaatgatccatcgcttccaaaaccacataattgttctgacaaatttgatactgaacttccatcagatcttatcacttcgtgtgttgctacattaatcatgattcagacttgtactgaacggcaataccctccagctgatgtggctcagatattagattctgccgttaccagtctgcatccatgctgttctcaaaaccttcctatttatagagaaattcaaatgtgcatgggaagaatcaaaacgcagatgttagctctcatccctacttgacttacatcttttcttctgcagatctctctctaatgtagctgctgctgtacatatgatgctgaagctgaactattagttcagaacttcagatcacatacgggctcgtcgcctaccttgtaatgtctttattgagaggtacaataatttatttcttttactccacaccgatagggtcaaacggtggtattagaaatcatgtaattcactaccgtgtctttttttatctttggtgtcaaatggtggtacttaataaaaatgattatttaatattttgatgattcaaaaattaataaaaagcactaaaggttattttttgttt

SEQ ID NO: 19353 - protein, 525 aa, Glycine max
DYILKSQSNKYSTLKEKLSSCLSSNMVRRWFVFEWFYSAIDYPWFAKREFMEYLNHVGLGNIPRLTRVEWSVIKSSLGKPRRFSEHFLCEERQKLEQYRESVRKHYTELRTGIRDGLPTDLAKPLYVGQHVIALHPKTREIHDGSVLTVDYDKCRIQFDRPELGVEFVMDIDCMPLNSSDNMPEALRRHIGSPISSFMNKEPQISGNSNFGGCEMNHSSPVKAKVATVDNLCAQAGCAQPCKVTHHQAKEADIQAVSELKHALDKKETLLMELRSANSDILENKNGIDCLKDSEVFKKHYATVSDAMLQLRQRNTYRGNSLPSWMKPQASFNVHDDLPSMLDSSLTQELGSTVVQVIKGSRLRAHAMVDAAFQALSLAKEGEDAFIKIGQALDSINHQQLASQSRLPVIRSQEQVNANGSFYHLNHSTSGVSEPILNDPSLPKPHNCSDKFDTELPSDLITSCVATLIMIQTCTERQYPPADVAQILDSAVTSLHPCCSQNLPIYREIQMCMGRIKTQMLALIPT

SEQ ID NO: 19354 - protein, 500 aa, Glycine max
MVRRWFVFEWFYSAIDYPWFAKREFMEYLNHVGLGNIPRLTRVEWSVIKSSLGKPRRFSEHFLCEERQKLEQYRESVRKHYTELRTGIRDGLPTDLAKPLYVGQHVIALHPKTREIHDGSVLTVDYDKCRIQFDRPELGVEFVMDIDCMPLNSSDNMPEALRRHIGSPISSFMNKEPQISGNSNFGGCEMNHSSPVKAKVATVDNLCAQAGCAQPCKVTHHQAKEADIQAVSELKHALDKKETLLMELRSANSDILENKNGIDCLKDSEVFKKHYATVSDAMLQLRQRNTYRGNSLPSWMKPQASFNVHDDLPSMLDSSLTQELGSTVVQVIKGSRLRAHAMVDAAFQALSLAKEGEDAFIKIGQALDSINHQQLASQSRLPVIRSQEQVNANGSFYHLNHSTSGVSEPILNDPSLPKPHNCSDKFDTELPSDLITSCVATLIMIQTCTERQYPPADVAQILDSAVTSLHPCCSQNLPIYREIQMCMGRIKTQMLALIPT

SEQ ID NO: 19355 - protein, 475 aa, Glycine max
MEYLNHVGLGNIPRLTRVEWSVIKSSLGKPRRFSEHFLCEERQKLEQYRESVRKHYTELRTGIRDGLPTDLAKPLYVGQHVIALHPKTREIHDGSVLTVDYDKCRIQFDRPELGVEFVMDIDCMPLNSSDNMPEALRRHIGSPISSFMNKEPQISGNSNFGGCEMNHSSPVKAKVATVDNLCAQAGCAQPCKVTHHQAKEADIQAVSELKHALDKKETLLMELRSANSDILENKNGIDCLKDSEVFKKHYATVSDAMLQLRQRNTYRGNSLPSWMKPQASFNVHDDLPSMLDSSLTQELGSTVVQVIKGSRLRAHAMVDAAFQALSLAKEGEDAFIKIGQALDSINHQQLASQSRLPVIRSQEQVNANGSFYHLNHSTSGVSEPILNDPSLPKPHNCSDKFDTELPSDLITSCVATLIMIQTCTERQYPPADVAQILDSAVTSLHPCCSQNLPIYREIQMCMGRIKTQMLALIPT

SEQ ID NO: 19356 - DNA, 1158 bp, Glycine max
aagtgaaaaggcaaagacatggtagaggttcttctacgagcatcacctcctccacctcactcttcttatctgagacaatgcaggacagtgtcaggaaggacattggtgaagtgctcgttggaagtcccaagtaaggttctgacaaagcatgtcttatctgggcttgctgcttccttgatatttatttctccagcaaatcagactattgcagcagatctatctcgtgcaccaaataatatatgccaacttgccagtgccagtgagaacgcagttacttcaccatttgagaatgaaaaaggttcaaatctaatgatgatgagaggaatgacagccaaggactttgaccctgtaagatattcaggaagatggttcgaagttgcttcacttaaacgtggatttgcaggacaaggccaagaagactgtcattgcactcagggtgtatatacatttgatagggaagcaccatctatccaagttgataccttttgtgttcatggaggccctaatggatttataactggaattagaggaagggttcaatgtctttcagaagaagatttggggaaaactgagacacagctagagaagcaggaaatgatcaaagaaaaatgctatctccgctttcctacactgccattcattcccaaggaaccttatgatgtgattgctacagattatgacaatttttctcttgtttcaggagctaaggatcaaagttttattcagatatactcaaggacacctaaccctggacctgaatttatagagaagtacaagtcttaccttgcaaactatggatatgatcctagcaaaattaaagatacgcctcaggattgtgaagtaatgtccaatagtcagttggcagctatgatgtctatgtctggaatgcagcaggcacttacaaaccaatttcctgatctaggactcaacgcccctattgagcttaatcctttcacaagtgtatttgacactttgaagaagcttcttgagctttattttaagcagtaactgttatacatgtactcttgtaacgaatagctagctattcttgatagcagcctgtgtctgtgtgtaatatgtaagtataaactacctgtatctggtgaaatcctgtgtatatggtgttttatttttacatgaatgtttgctctggttagt

SEQ ID NO: 19357 - protein, 329 aa, Glycine max
MVEVLLRASPPPPHSSYLRQCRTVSGRTLVKCSLEVPSKVLTKHVLSGLAASLIFISPANQTIAADLSRAPNNICQLASASENAVTSPFENEKGSNLMMMRGMTAKDFDPVRYSGRWFEVASLKRGFAGQGQEDCHCTQGVYTFDREAPSIQVDTFCVHGGPNGFITGIRGRVQCLSEEDLGKTETQLEKQEMIKEKCYLRFPTLPFIPKEPYDVIATDYDNFSLVSGAKDQSFIQIYSRTPNPGPEFIEKYKSYLANYGYDPSKIKDTPQDCEVMSNSQLAAMMSMSGMQQALTNQFPDLGLNAPIELNPFTSVFDTLKKLLELYFKQ

SEQ ID NO: 19358 - protein, 232 aa, Glycine max
MMMRGMTAKDFDPVRYSGRWFEVASLKRGFAGQGQEDCHCTQGVYTFDREAPSIQVDTFCVHGGPNGFITGIRGRVQCLSEEDLGKTETQLEKQEMIKEKCYLRFPTLPFIPKEPYDVIATDYDNFSLVSGAKDQSFIQIYSRTPNPGPEFIEKYKSYLANYGYDPSKIKDTPQDCEVMSNSQLAAMMSMSGMQQALTNQFPDLGLNAPIELNPFTSVFDTLKKLLELYFKQ

SEQ ID NO: 19359 - protein, 231 aa, Glycine max
MMRGMTAKDFDPVRYSGRWFEVASLKRGFAGQGQEDCHCTQGVYTFDREAPSIQVDTFCVHGGPNGFITGIRGRVQCLSEEDLGKTETQLEKQEMIKEKCYLRFPTLPFIPKEPYDVIATDYDNFSLVSGAKDQSFIQIYSRTPNPGPEFIEKYKSYLANYGYDPSKIKDTPQDCEVMSNSQLAAMMSMSGMQQALTNQFPDLGLNAPIELNPFTSVFDTLKKLLELYFKQ

SEQ ID NO: 19360 - DNA, 1577 bp, Glycine max
aagtggtcacttagaatcctttgtcaagattccaacaataaagtttaccaagcttttcatcaatggagaattcctagattctgtttcaggaaaaacgtttgagaccgttgacccaagaacagaggaagtgattgctgaaatagcagaggctaacaaagaagatgttgatattgctgtgaaggccgcacgtgaagcatttgattgtggtccatggccacgcatgcccggtgctgaaagagcaaagattatgctgaaatggtcagagctaattgaacagaacgcagaagaaatagcagcattggacaccattgatgggggaaagctattcagttggtgtaaggctgtggatgttcctgaagcatccaacatcctacgttactatgttggcgctgctgataaaattcatggagatgtgttcaaaacatctcgtgacctccacttgtattctctgatggaacctgttggtgttgttggacacattatcccttggaatttccctaccgtcatgttcttcgccaaggttgccccggccttggctgctggctgcaccatggtcatcaagcctgctgagcaaacacctctctcatcactcttttatgctcatcttgctaggctggctggtatcccagatggagtgctgaatgtagtacccggatttggctcaattgcaggggctgcaataagttcacatatggacattgatgcggtcagttttacaggttcaacagaaacaggtcgtaaaataatgcaggctgcggccttgagcaatttgaaaccagtttcactcgaattaggaggaaagtcaccagttttgatttttgatgatgctgatgtagacaaagctgttgaccttgctctctttggcatcctacataacaagggagaaatctgtgttgcattctccagagtttatgtccaggaagggatttatgatgaatttgagaagaaggtagtggagaaggctaaaacttgggtagtgggagacccctttgatcctaaagttcagcaaggaccccaaactagtaaggctcaatatgataaaattatttcctatattgagcatggaaagagtgaaggagccacactgttgactgggggtaagccagcgggcaacaagggatactacattgagcctaccatttttgtcaatgttaaggaggacatgctaattgcacaagaggaaatatttggacctgtgatgacactttccaagttcaagaccattgaggatgcaattaagaaagccaacaattccaaatatggcctagcagcagggattgtgaccaagaacttggatattgcaaacactgtatcaaggtccatccgtgcaggcatcatttggatcaattgcttctttgcctttgatattgactgcccttttggagggtataagatgagtggatttggaagagattatggactggaagcacttcataagtttctcaaagttaagtctgttgcaactcctatttacgattctccttggctttgaaacttcattctccgagggtgtttgtaaacactaaacatatacatcatttggatcaactacttaatacaatgttttttttttctcc

SEQ ID NO: 19361 - protein, 496 aa, Glycine max
SGHLESFVKIPTIKFTKLFINGEFLDSVSGKTFETVDPRTEEVIAEIAEANKEDVDIAVKAAREAFDCGPWPRMPGAERAKIMLKWSELIEQNAEEIAALDTIDGGKLFSWCKAVDVPEASNILRYYVGAADKIHGDVFKTSRDLHLYSLMEPVGVVGHIIPWNFPTVMFFAKVAPALAAGCTMVIKPAEQTPLSSLFYAHLARLAGIPDGVLNVVPGFGSIAGAAISSHMDIDAVSFTGSTETGRKIMQAAALSNLKPVSLELGGKSPVLIFDDADVDKAVDLALFGILHNKGEICVAFSRVYVQEGIYDEFEKKVVEKAKTWVVGDPFDPKVQQGPQTSKAQYDKIISYIEHGKSEGATLLTGGKPAGNKGYYIEPTIFVNVKEDMLIAQEEIFGPVMTLSKFKTIEDAIKKANNSKYGLAAGIVTKNLDIANTVSRSIRAGIIWINCFFAFDIDCPFGGYKMSGFGRDYGLEALHKFLKVKSVATPIYDSPWL

SEQ ID NO: 19362 - protein, 423 aa, Glycine max
MPGAERAKIMLKWSELIEQNAEEIAALDTIDGGKLFSWCKAVDVPEASNILRYYVGAADKIHGDVFKTSRDLHLYSLMEPVGVVGHIIPWNFPTVMFFAKVAPALAAGCTMVIKPAEQTPLSSLFYAHLARLAGIPDGVLNVVPGFGSIAGAAISSHMDIDAVSFTGSTETGRKIMQAAALSNLKPVSLELGGKSPVLIFDDADVDKAVDLALFGILHNKGEICVAFSRVYVQEGIYDEFEKKVVEKAKTWVVGDPFDPKVQQGPQTSKAQYDKIISYIEHGKSEGATLLTGGKPAGNKGYYIEPTIFVNVKEDMLIAQEEIFGPVMTLSKFKTIEDAIKKANNSKYGLAAGIVTKNLDIANTVSRSIRAGIIWINCFFAFDIDCPFGGYKMSGFGRDYGLEALHKFLKVKSVATPIYDSPWL

SEQ ID NO: 19363 - protein, 414 aa, Glycine max
MLKWSELIEQNAEEIAALDTIDGGKLFSWCKAVDVPEASNILRYYVGAADKIHGDVFKTSRDLHLYSLMEPVGVVGHIIPWNFPTVMFFAKVAPALAAGCTMVIKPAEQTPLSSLFYAHLARLAGIPDGVLNVVPGFGSIAGAAISSHMDIDAVSFTGSTETGRKIMQAAALSNLKPVSLELGGKSPVLIFDDADVDKAVDLALFGILHNKGEICVAFSRVYVQEGIYDEFEKKVVEKAKTWVVGDPFDPKVQQGPQTSKAQYDKIISYIEHGKSEGATLLTGGKPAGNKGYYIEPTIFVNVKEDMLIAQEEIFGPVMTLSKFKTIEDAIKKANNSKYGLAAGIVTKNLDIANTVSRSIRAGIIWINCFFAFDIDCPFGGYKMSGFGRDYGLEALHKFLKVKSVATPIYDSPWL

SEQ ID NO: 19364 - DNA, 622 bp, Glycine max
attttgatttgtcagttttattggtttgctgaatagaagtaggattagaaatcatgaggatcaatagccaatgatattttgtaagtgataggaactactggacctgggggaggcagttgggactcaaagccgaggtctttcccaagaacttattgatatgcttccaacctcaaagtacaaatttggtagtttattcaagagaaaaaattctgggaaaaggtgtgtaatttgtcagatgacatacagaagaggtgaccagcaaatgaaattgccatgcagccatgtctatcatggtgaatgcatcaccaagtggcttagcattaacaagaaatgtcctgtttgcaacactgaggtttttggcgaggaatcaacgcattagcatcaaggtggcaaaagaggatcctttttgctctattaatttttgcttctcatccaactcaccctctccctcccattctcttttttaagttttaattttttacacgtaggtaggtgtagtatgaagaactatggcagctctcacacaatatatgttttgtttactagaaacaacctattggagtcgcatcttcttgtggttaatgtgtgattttgtgtgtattcatgcaatatatattctctt

SEQ ID NO: 19365 - protein, 73 aa, Glycine max
MLPTSKYKFGSLFKRKNSGKRCVICQMTYRRGDQQMKLPCSHVYHGECITKWLSINKKCPVCNTEVFGEESTH

SEQ ID NO: 19366 - protein, 61 aa, Glycine max
MSIMVNASPSGLALTRNVLFATLRFLARNQRISIKVAKEDPFCSINFCFSSNSPSPSHSLF

SEQ ID NO: 19367 - protein, 58 aa, Glycine max
MVNASPSGLALTRNVLFATLRFLARNQRISIKVAKEDPFCSINFCFSSNSPSPSHSLF

SEQ ID NO: 19368 - DNA, 1393 bp, Glycine max
aacacaacaacacacgttgtacagtgtgatgcccaaaccgagaccacttcgaaagagcgaaacgcagtgttagcattgttcctcaacaaaaaaaaaaaaaaaagaagaaaaaagactcagttgtgtatcgttgcagctctactagctagggtttcgcaagtgcgatcgaagaagaacgatggcgatggctgctgctctgcgtcgcgaaggaaggcgtttgacccaaccaatcaacgccctccgttcctctctcatctctcaagaccaatcccctcatggcgcgcgcttcatttccactcaagtggtgagaaaccgaatgaagagtgtgaggaatatccagaagatcaccaaggccatgaagatggttgccgcatccaagctgagagccgttcagaccagagctgaaaattcccgcggcctctggcagccgttcaccgctcttctcggcgacaatcccagtgctgatgttaagaaaaacgttgttgttaccatctcttcggacaaaggtctttgtggtggaatcaattccacgtctgtcaagataagcagggttttgtacaaattgaattctgggcctgataaagagacaaaatatgtcatattgggagagaaggctaaagctcaattgttgcgtgactcaaggaaacacattgtgctcagccttactgaattgcagaaaaatcccctgaattacactcaggtgtctgtcttggcagatgacattctaaagaatgtggagtatgacgcattaaggattgttttcaacaaatttcattctgttgtacaatttttgccaacagtgtcaactgtactgtctcctgaggttattgagagagaggctgaatcaggaggaaagctcggggaattggattcatatgagattgaaggtggcgaaacaaaagctgaaattcttcagaatctggctgagttccagttttcttgtgtgatgtacaatgccgtgttggagaatgcctgtagtgagcaaggagcaagaatgtctgcaatggacagctctagcaggaatgctggggatatgcttgatcgtctcacgctcacctataacagaactcgtcaagcatcaatcaccactgaattgatagagattatctctggagcttcagcactggaaggctaattgcaggagagcaatatgtaattattcagcagtctcccataccttcgcatagcgaagagcctctgggcaatggggtacgaagtttttttataatatcgttgtgttcttttgaaatttgttggtgccacatttttttgatcttacctcgactcctgtaataagtgttccaaggtcaaacccatgatgaggattttcctagttgaggctagatatttctggaattatgtttttgaattaaagatggagtctgtctttttt

SEQ ID NO: 19369 - protein, 318 aa, Glycine max
MAMAAALRREGRRLTQPINALRSSLISQDQSPHGARFISTQVVRNRMKSVRNIQKITKAMKMVAASKLRAVQTRAENSRGLWQPFTALLGDNPSADVKKNVVVTISSDKGLCGGINSTSVKISRVLYKLNSGPDKETKYVILGEKAKAQLLRDSRKHIVLSLTELQKNPLNYTQVSVLADDILKNVEYDALRIVFNKFHSVVQFLPTVSTVLSPEVIEREAESGGKLGELDSYEIEGGETKAEILQNLAEFQFSCVMYNAVLENACSEQGARMSAMDSSSRNAGDMLDRLTLTYNRTRQASITTELIEIISGASALEG

SEQ ID NO: 19370 - protein, 316 aa, Glycine max
MAAALRREGRRLTQPINALRSSLISQDQSPHGARFISTQVVRNRMKSVRNIQKITKAMKMVAASKLRAVQTRAENSRGLWQPFTALLGDNPSADVKKNVVVTISSDKGLCGGINSTSVKISRVLYKLNSGPDKETKYVILGEKAKAQLLRDSRKHIVLSLTELQKNPLNYTQVSVLADDILKNVEYDALRIVFNKFHSVVQFLPTVSTVLSPEVIEREAESGGKLGELDSYEIEGGETKAEILQNLAEFQFSCVMYNAVLENACSEQGARMSAMDSSSRNAGDMLDRLTLTYNRTRQASITTELIEIISGASALEG

SEQ ID NO: 19371 - protein, 272 aa, Glycine max
MKSVRNIQKITKAMKMVAASKLRAVQTRAENSRGLWQPFTALLGDNPSADVKKNVVVTISSDKGLCGGINSTSVKISRVLYKLNSGPDKETKYVILGEKAKAQLLRDSRKHIVLSLTELQKNPLNYTQVSVLADDILKNVEYDALRIVFNKFHSVVQFLPTVSTVLSPEVIEREAESGGKLGELDSYEIEGGETKAEILQNLAEFQFSCVMYNAVLENACSEQGARMSAMDSSSRNAGDMLDRLTLTYNRTRQASITTELIEIISGASALEG

SEQ ID NO: 19372 - DNA, 1243 bp, Glycine max
atccaacctcttaacaattcgcatggtttcgtacccacacaactgaactcacacaaacttctccaccacaccgacaacctcgccggaaaattcctcgccgtttccggttaccggcgatggcctcggcgacgtcgtttttgggcctcggtcttcgcccctccgtcccaatttgcgccaacagaaacaacggcattcgattctctcagtttcaagtctcctttggctttcgtgagaactccacttccctcaagactttgaattcaacaccgttgaagaaaagagaagctttctcaaatgggtcttcgagaacgcgaagaaacccgttgttctctgttcgctgcacagtttcatcaagtggaaagattacacaacaggaattcacggaaatggcatggcaagcaattatctcggcaccagaagtggctaaggagaacaagcatcagattgtggagactgagcacttgatgaaagcattgttggagcaaaagaatggacttgctcgccggatcttttctaaggttggggtagataatactcggcttctagaggccactgataagcacattcagcggcaacccaaggttgtaggggaatctgctggttcaatgctagggcgtgatttggaggcattgattcagagagccagggacttcaagaaagaatatggggactcatttgtgtcggttgagcactttgttcttggttttgcccaagataaacgatttgggaagatattgtttagagattttcaaatatctcagcaagctctaaaatctgccatagaatccataaggggacgccagtcagttattgaccaagatcctgaaggaaagtatgaagccttggaaaagtatgggaaagatttgacggcaatggctaaagcaggaaaacttgacccagtcataggaagagatgatgaaatacgcaggtgcattcagattctctccaggaggacaaagaacaatcctgttctaattggggagcctggtgttggaaagactgcaatctctgaagggctgctactgttatctgtttcctgaatttcatgtgtgacctgtttcatacatacaagaatggcacctgtgatggtgtgaaacaaaatataaaaattatttgaacacgacagttcaattttttgttaatatttttaagaaacaaatgatagttgtttcaaatattacattctgtatgaaagtataatatgtcaaaatagaaattccataaaagtaggaagtaagtttag

SEQ ID NO: 19373 - protein, 307 aa, Glycine max
MASATSFLGLGLRPSVPICANRNNGIRFSQFQVSFGFRENSTSLKTLNSTPLKKREAFSNGSSRTRRNPLFSVRCTVSSSGKITQQEFTEMAWQAIISAPEVAKENKHQIVETEHLMKALLEQKNGLARRIFSKVGVDNTRLLEATDKHIQRQPKVVGESAGSMLGRDLEALIQRARDFKKEYGDSFVSVEHFVLGFAQDKRFGKILFRDFQISQQALKSAIESIRGRQSVIDQDPEGKYEALEKYGKDLTAMAKAGKLDPVIGRDDEIRRCIQILSRRTKNNPVLIGEPGVGKTAISEGLLLLSVS

SEQ ID NO: 19374 - protein, 217 aa, Glycine max
MAWQAIISAPEVAKENKHQIVETEHLMKALLEQKNGLARRIFSKVGVDNTRLLEATDKHIQRQPKVVGESAGSMLGRDLEALIQRARDFKKEYGDSFVSVEHFVLGFAQDKRFGKILFRDFQISQQALKSAIESIRGRQSVIDQDPEGKYEALEKYGKDLTAMAKAGKLDPVIGRDDEIRRCIQILSRRTKNNPVLIGEPGVGKTAISEGLLLLSVS

SEQ ID NO: 19375 - protein, 191 aa, Glycine max
MKALLEQKNGLARRIFSKVGVDNTRLLEATDKHIQRQPKVVGESAGSMLGRDLEALIQRARDFKKEYGDSFVSVEHFVLGFAQDKRFGKILFRDFQISQQALKSAIESIRGRQSVIDQDPEGKYEALEKYGKDLTAMAKAGKLDPVIGRDDEIRRCIQILSRRTKNNPVLIGEPGVGKTAISEGLLLLSVS

SEQ ID NO: 19376 - DNA, 1700 bp, Glycine max
aaaaccctgctagtgttgttccgttgagataaacataaacctgagtgagtgaggctaagggagaaagctagaactaaaaatgtcatcagcttctaagctcacactgtacggaatcggaaccgcactgttccgcacccgtcgaactgcacctgtaagtgtaactccctttctcttcttcaaacccattcccttacctcggccgccgcgcttcctcctcctccgcgattcctcttcctcctccgccgccgccgcagaaatcctaccctccgttgaccacccctggccggaatgggtctccttcgtcgaccgcttgagcaccaaaggctacctccccaaaccctcctcttcttccgatgacaccgtaagcctttacaccaacatgaactctctcaaggacgcttgtctcagcttctcgcgtgaccgttacgaccttttcaagttgctgcctacgcacgatatccaagcagtagttgagggtgggtgccctaatcttctccgtaaagctgttaattcggccaagagactgagagcacacctgcaattagatgaaggggatgtttgtggtgcttgcaatctacgaagctcttgtgatagagcttatgtgattctaaaggattttgaaactgatgctcgaactattgatatagttcgaatacttttgttctacgcactagatccactagtgctttctagtggagacaaaccaccaggccgagaagttattgaatcatccgccagaaaacttctctctcagctaattgagttgagtgagtcccctgctccagcccctgcttctgctcgttcaaagcctactgcacaggatgctgtgggagaaggccaatctctaagtgttacgactaatcaattgtttaaagatgctgagatgaagaaaggtgactggatgtgtccaaaatgcaatttcatgaacttttctagaaatacgcaatgcctgaattgtaacgaagacaagcctaaggatattaacccatctactgttcaaatgaagccaggagattggacctgtcctgaatgcaattttttaaattttgccagaaacacacgatgtctaaaatgcaaaacagcggggccgacaaaggaagccaatactaatgaagttgaaaggaaaaaaggagattggacttgcccacaatgtgggttcatgaattatgctaggaacacgaaatgtttgcgttgtcctgagacaaggcctaagaaacatcctggtgactggaattgtcccgggtgtgggttcatgaattttggtagtaaaatgaagtgcttgcactgtcaagagccaaacccaagttccaagaaatataacggggattggagttgtcccaaatgtgatttctacaattatgcaagaaatatggcttgcctgaagtgcaatactgaacgccctaaagaacaaccaaccgttgactatgatggccatgaatggagacgatcaaattgattaaaaaaaaaccgccatcgagggaggtcacaattttggtcttggctgtaacaaatattttgattgcatatgaattaattctccaattaatggtgctgagtgcttcttaacttaattagagatactttaaagttatttgattgcatatgaatttgtgttttaatttaatcatgtacagatctaaaagcaaatttacagagattgaatcttgtgaatgttatagctttattttgcttctgattcc

SEQ ID NO: 19377 - protein, 458 aa, Glycine max
MSSASKLTLYGIGTALFRTRRTAPVSVTPFLFFKPIPLPRPPRFLLLRDSSSSSAAAAEILPSVDHPWPEWVSFVDRLSTKGYLPKPSSSSDDTVSLYTNMNSLKDACLSFSRDRYDLFKLLPTHDIQAVVEGGCPNLLRKAVNSAKRLRAHLQLDEGDVCGACNLRSSCDRAYVILKDFETDARTIDIVRILLFYALDPLVLSSGDKPPGREVIESSARKLLSQLIELSESPAPAPASARSKPTAQDAVGEGQSLSVTTNQLFKDAEMKKGDWMCPKCNFMNFSRNTQCLNCNEDKPKDINPSTVQMKPGDWTCPECNFLNFARNTRCLKCKTAGPTKEANTNEVERKKGDWTCPQCGFMNYARNTKCLRCPETRPKKHPGDWNCPGCGFMNFGSKMKCLHCQEPNPSSKKYNGDWSCPKCDFYNYARNMACLKCNTERPKEQPTVDYDGHEWRRSN

SEQ ID NO: 19378 - protein, 358 aa, Glycine max
MNSLKDACLSFSRDRYDLFKLLPTHDIQAVVEGGCPNLLRKAVNSAKRLRAHLQLDEGDVCGACNLRSSCDRAYVILKDFETDARTIDIVRILLFYALDPLVLSSGDKPPGREVIESSARKLLSQLIELSESPAPAPASARSKPTAQDAVGEGQSLSVTTNQLFKDAEMKKGDWMCPKCNFMNFSRNTQCLNCNEDKPKDINPSTVQMKPGDWTCPECNFLNFARNTRCLKCKTAGPTKEANTNEVERKKGDWTCPQCGFMNYARNTKCLRCPETRPKKHPGDWNCPGCGFMNFGSKMKCLHCQEPNPSSKKYNGDWSCPKCDFYNYARNMACLKCNTERPKEQPTVDYDGHEWRRSN

SEQ ID NO: 19379 - DNA, 1089 bp, Glycine max
tgtaccagaatattggctaacggaaggtgggcagagtgctactggtgcattattggatcatataattgaaaaccatgctgcttctgcacgccttgcaaatcaagctgctacccaaagtaagattttttcttcaacaagtctgattttgagaaatgtcttaacaagactacttctctatgtaatatttcagagatttcattgtttgagcttctgaacaagatgttggaaacaatgatagttgagctgaacctatcctttattgctgccttgactgaagatgtacatgttcttcctgacttccatgggaataggtcacccattgcagatttaaaagcaaaaggagtcatctatggtttgacacttgacacaagtgacaaacagttggctcttctttacctggctactgtgcagggcattgcatatggcacacgtcacattgtagagcattgcaatgctcatggtcacaaaataaacacactacttgcatgtggcggcctttcaaagaatcctatcttcatgcaggaacatgctgatattattggttgccctataattcttccaagggaaagtgaatctgtgctcttgggtgctgctattctgggtgccgttgctacaagaaaatatcatagccttagcgaggccatgaaagccctgaatgcagctggccaggtcattcatccatctaaggatccaaaggtaaaaaagtaccatgatgccaaatacaagatcttccgtggcctttatgaacagcagttctcatatcgttctacgatggcccaagccttgtcatagctttgcagaatgttttgactcaaactgtcaattgcagttaggtgctccttgcgaagattgtatattcatgcttcaagaattaaagtcattgggatggagaaagaaattatggcctgaatacgaatactgccattttgacgaagatcggttttcaatttgggtggcaggttagacattgaacatcagagatacaaggaaaaataatcaccaatactatggttaaaattcttatagaaattttatgtacaggctcactggcatcttattttctcccttgaacgccttgcgcacacttat

SEQ ID NO: 19380 - protein, 190 aa, Glycine max
MLETMIVELNLSFIAALTEDVHVLPDFHGNRSPIADLKAKGVIYGLTLDTSDKQLALLYLATVQGIAYGTRHIVEHCNAHGHKINTLLACGGLSKNPIFMQEHADIIGCPIILPRESESVLLGAAILGAVATRKYHSLSEAMKALNAAGQVIHPSKDPKVKKYHDAKYKIFRGLYEQQFSYRSTMAQALS

SEQ ID NO: 19381 - protein, 186 aa, Glycine max
MIVELNLSFIAALTEDVHVLPDFHGNRSPIADLKAKGVIYGLTLDTSDKQLALLYLATVQGIAYGTRHIVEHCNAHGHKINTLLACGGLSKNPIFMQEHADIIGCPIILPRESESVLLGAAILGAVATRKYHSLSEAMKALNAAGQVIHPSKDPKVKKYHDAKYKIFRGLYEQQFSYRSTMAQALS

SEQ ID NO: 19382 - DNA, 1155 bp, Glycine max
agtttattttttctctctttgatcaaattcccttcccatggtctctctctcttcaattaattccatttagctttccccaaatcccaaaccctttttcgcttagatcccaatccaattgggttatggacatggcttccagtccccgcactgtagaagagatcttcaaggattacagcgccagaagaacctctgttattcgcgctctcactcacgacgttgatgaattttacggcctctgtgatccagataaggataacctgtgcctctatggacatccaaatgaggcctgggaagtaactctgccagcggaggaagttccgccagagctcccggagccggctcttggaatcaattttgctagggatggcatgaaccgcagggactggctttctctggttgctgtccacagtgattcatggttggtttctgtggccttttaccttggggctcgtcttaaccgcaatgaaaggaaacgattatttagcttgatcaatgatcttccatctgtttttgaagttgtgactgacaggaaaccagttaaggacaagccaactgcggatagtggaagcaagtctaggggaagtgccaagagatctagcgatgggcaagttaaaagcaacccaaagtttgtagatgagggttatgaggaggatgaagatgagcataatgaaacactttgtggaagctgcggcggaaattacaacgctgatgagttttggatttgctgtgacatatgtgagaggtggttccatgggaagtgtgttaagattacccctgcaaaggctgagagcataaagcaatataaatgtccatcatgcagcctgaggcggggcaggccttagactgaaagaggcgatggaatgggtacatgtgaggtgagtgttgtttcatggctgacaagatactgtaattttgttacatcacttacagaagttaatgtaatgggcatagtatcgatgctcaagggcaaatttatcagggattaagtttgtttttccagatgaaccattggtgcatgccacagggtatagaatagaacatgacaaattttaattttatgattagtttatatttagtagaatatttgcttgaactttaaatattgtaatttttttatttttaacattgtttaagaaaacaaaccttttcaacaag

SEQ ID NO: 19383 - protein, 279 aa, Glycine max
FIFSLFDQIPFPWSLSLQLIPFSFPQIPNPFSLRSQSNWVMDMASSPRTVEEIFKDYSARRTSVIRALTHDVDEFYGLCDPDKDNLCLYGHPNEAWEVTLPAEEVPPELPEPALGINFARDGMNRRDWLSLVAVHSDSWLVSVAFYLGARLNRNERKRLFSLINDLPSVFEVVTDRKPVKDKPTADSGSKSRGSAKRSSDGQVKSNPKFVDEGYEEDEDEHNETLCGSCGGNYNADEFWICCDICERWFHGKCVKITPAKAESIKQYKCPSCSLRRGRP

SEQ ID NO: 19384 - protein, 239 aa, Glycine max
MDMASSPRTVEEIFKDYSARRTSVIRALTHDVDEFYGLCDPDKDNLCLYGHPNEAWEVTLPAEEVPPELPEPALGINFARDGMNRRDWLSLVAVHSDSWLVSVAFYLGARLNRNERKRLFSLINDLPSVFEVVTDRKPVKDKPTADSGSKSRGSAKRSSDGQVKSNPKFVDEGYEEDEDEHNETLCGSCGGNYNADEFWICCDICERWFHGKCVKITPAKAESIKQYKCPSCSLRRGRP

SEQ ID NO: 19385 - protein, 237 aa, Glycine max
MASSPRTVEEIFKDYSARRTSVIRALTHDVDEFYGLCDPDKDNLCLYGHPNEAWEVTLPAEEVPPELPEPALGINFARDGMNRRDWLSLVAVHSDSWLVSVAFYLGARLNRNERKRLFSLINDLPSVFEVVTDRKPVKDKPTADSGSKSRGSAKRSSDGQVKSNPKFVDEGYEEDEDEHNETLCGSCGGNYNADEFWICCDICERWFHGKCVKITPAKAESIKQYKCPSCSLRRGRP

SEQ ID NO: 19386 - DNA, 1114 bp, Glycine max
ttattgcttttgagaaattaaaaggaaaagcaaccatgattttgagcagttttgagcatgactttgttgaagaagaaagtgccactgagcctagagactcctccaacaagcttttggtgggacaacctccaaattcattacaaggaaatacagtttggaatgctaaaataatcttgatgaatggacttagtaggtctgcgttggaggagctgtcatctgataaaattgtagatgatcgcattcctcatttttgcaatttccttagatttgcggttcttaagaaggatcattctttcatggcagttggtggtccatgggaacctgttgatgggggtgatccatctattgacaataactctttaatcaaaactgccctcagatatgcaaaggatgttattcaacttgacttgcagaattgtcaacattggaatccttttcttgagttacattatgatagaattggcaaagatggtttctttagccacaaggaaatcactgttctttatgttcctgatttgtctgactgcctcccttcgttggatgaatggcgtgacaagtggcttgcccacaagaaagctgtggctgaaaaagagcgtcaactttctttgaaaaaagagaaatcaagagataacaaggaagtatctaaagataaatcagataaaaggaaggattctactccatcaggaaagtcagatgtaaagaaaaaagagaaagataataatactgttaaggaagaaattgaaggaaagactggagtgaataacaataaaatcactaaaaatgaaggttctgacatgggtgaagaaggcaagagtgctgagaaaaagacgggggtaactgtcactggtcaaaccacaggtggtgtgaagtctgtgaaaaagaagattataaagagggttgtgaaacagaaagttgccactaaggcaaaggctactgccatcaaacaaacagacaaatcaggtgaaaaggatgttgctgagaaagtgacatccaatgttactgatcaggatggaaaatctcctactggggttgaaactcctgtaaaaaacttagttgctgaggatatgtctattgggaaaattgatagtgaagagggcaaagataaagaaataaa

SEQ ID NO: 19387 - protein, 370 aa, Glycine max
IAFEKLKGKATMILSSFEHDFVEEESATEPRDSSNKLLVGQPPNSLQGNTVWNAKIILMNGLSRSALEELSSDKIVDDRIPHFCNFLRFAVLKKDHSFMAVGGPWEPVDGGDPSIDNNSLIKTALRYAKDVIQLDLQNCQHWNPFLELHYDRIGKDGFFSHKEITVLYVPDLSDCLPSLDEWRDKWLAHKKAVAEKERQLSLKKEKSRDNKEVSKDKSDKRKDSTPSGKSDVKKKEKDNNTVKEEIEGKTGVNNNKITKNEGSDMGEEGKSAEKKTGVTVTGQTTGGVKSVKKKIIKRVVKQKVATKAKATAIKQTDKSGEKDVAEKVTSNVTDQDGKSPTGVETPVKNLVAEDMSIGKIDSEEGKDKEI

SEQ ID NO: 19388 - protein, 359 aa, Glycine max
MILSSFEHDFVEEESATEPRDSSNKLLVGQPPNSLQGNTVWNAKIILMNGLSRSALEELSSDKIVDDRIPHFCNFLRFAVLKKDHSFMAVGGPWEPVDGGDPSIDNNSLIKTALRYAKDVIQLDLQNCQHWNPFLELHYDRIGKDGFFSHKEITVLYVPDLSDCLPSLDEWRDKWLAHKKAVAEKERQLSLKKEKSRDNKEVSKDKSDKRKDSTPSGKSDVKKKEKDNNTVKEEIEGKTGVNNNKITKNEGSDMGEEGKSAEKKTGVTVTGQTTGGVKSVKKKIIKRVVKQKVATKAKATAIKQTDKSGEKDVAEKVTSNVTDQDGKSPTGVETPVKNLVAEDMSIGKIDSEEGKDKEI

SEQ ID NO: 19389 - protein, 312 aa, Glycine max
MNGLSRSALEELSSDKIVDDRIPHFCNFLRFAVLKKDHSFMAVGGPWEPVDGGDPSIDNNSLIKTALRYAKDVIQLDLQNCQHWNPFLELHYDRIGKDGFFSHKEITVLYVPDLSDCLPSLDEWRDKWLAHKKAVAEKERQLSLKKEKSRDNKEVSKDKSDKRKDSTPSGKSDVKKKEKDNNTVKEEIEGKTGVNNNKITKNEGSDMGEEGKSAEKKTGVTVTGQTTGGVKSVKKKIIKRVVKQKVATKAKATAIKQTDKSGEKDVAEKVTSNVTDQDGKSPTGVETPVKNLVAEDMSIGKIDSEEGKDKEI

SEQ ID NO: 19390 - DNA, 1686 bp, Glycine max
ctggtagtgtgctccgttgagataaacctgagtgagagtgaggcgaagggggagaaagctaaaactaaaaaatgtcatcttctaagctcacactgtacggaatcggaaccgcactcttccgcacccgtagaactgcacccgtaactgtaactccccactctccctttctcttcttcaaacccattcccttcccgccgtgcttcctccgcccggattcctcttcctcctcctccttctccgcagctgcagccgccgcagaaaccctaccctccgtcgaccacccctggccggaatgggtctccttcgtcgaccgcttgaacaccaaaggctacctccccaaaacctcctcttccgacgacaccgtaagcctttacgccaacatgaactctctcaaggacgcttgtctcagcttcgcgcgtgaccgttacgaccttttcaatttgctgcctacaaatgatatccaagcagtggttgagggtgggtgccctaatcttctccgtaaagctgttaattcagctaagaggctgagagcacacctgcaattagatgaaggggatgattttgaaactgatgcccgaactgttgatatagttcgaatacttttgttctacgcactagatccacttgtgctttctggaggagacaaaccaccgggccgggaagttattgaatcatctgtcagaaaacttctctctcagctaattgagttgagtgagtcccctgctcctgcccctgctcctgctcgttcaaagcctactgcacaggatggtgtggtagaaggccaatctctaagtgttacgactaatcaattgtttaaagatgttgagatgaagaaaggtgactggatgtgtccaaaatgcaatttcatgaacttttctagaaatacacaatgcctgaattgtaaggaagacaagcctaaggatattaacccgtttactgttcaaatgaagccaggagattggacctgtcctgaatgcaattatttaaattttgccagaaacagactatgtctagaatgcaaaatagaggggccggcgaaggaagctaataccattgaagttgaaaggaaaaaaggagattggacttgcccacaatgtgggttcatgaattatgctaggaacacgaaatgtttgcgttgtcctgagacaaggcctaagaaacatcctggggactggaattgtcccgggtgtgggttcatgaattttgctagtaaaatgaagtgtttgcattgtcaagagccaaacccaagttccaagaaatatagtggggattggagttgccccaaatgcgatttctacaattatgcaagaaatatggcttgcctgaagtgcaatgctgaacgccctaaagaacaaccaaccgttgactatgaggaccatgaatggagacgatcaaactgattaggggaaaaaacgccatcgggctatatcatatagggaggtcacaattgtgctggtgggctgtaacaaatattttgttattgatgcattctctgcccatttttctttctcaatcttccaattaatggtgctaagtgcttcttcacttattggaaatggtacaaaaacgataattagagatactttaaagttatttgattgcatatgaatgtgttttaatataatcatgtacagatctaaaagtaaatttacagagattgaatcttgtgaatgttgttatagcttt

SEQ ID NO: 19391 - protein, 442 aa, Glycine max
MSSSKLTLYGIGTALFRTRRTAPVTVTPHSPFLFFKPIPFPPCFLRPDSSSSSSFSAAAAAAETLPSVDHPWPEWVSFVDRLNTKGYLPKTSSSDDTVSLYANMNSLKDACLSFARDRYDLFNLLPTNDIQAVVEGGCPNLLRKAVNSAKRLRAHLQLDEGDDFETDARTVDIVRILLFYALDPLVLSGGDKPPGREVIESSVRKLLSQLIELSESPAPAPAPARSKPTAQDGVVEGQSLSVTTNQLFKDVEMKKGDWMCPKCNFMNFSRNTQCLNCKEDKPKDINPFTVQMKPGDWTCPECNYLNFARNRLCLECKIEGPAKEANTIEVERKKGDWTCPQCGFMNYARNTKCLRCPETRPKKHPGDWNCPGCGFMNFASKMKCLHCQEPNPSSKKYSGDWSCPKCDFYNYARNMACLKCNAERPKEQPTVDYEDHEWRRSN

SEQ ID NO: 19392 - protein, 339 aa, Glycine max
MNSLKDACLSFARDRYDLFNLLPTNDIQAVVEGGCPNLLRKAVNSAKRLRAHLQLDEGDDFETDARTVDIVRILLFYALDPLVLSGGDKPPGREVIESSVRKLLSQLIELSESPAPAPAPARSKPTAQDGVVEGQSLSVTTNQLFKDVEMKKGDWMCPKCNFMNFSRNTQCLNCKEDKPKDINPFTVQMKPGDWTCPECNYLNFARNRLCLECKIEGPAKEANTIEVERKKGDWTCPQCGFMNYARNTKCLRCPETRPKKHPGDWNCPGCGFMNFASKMKCLHCQEPNPSSKKYSGDWSCPKCDFYNYARNMACLKCNAERPKEQPTVDYEDHEWRRSN

SEQ ID NO: 19393 - DNA, 1080 bp, Glycine max
gccagatccaaattcaaaatctcacgctccacgaacctcactctcgtcaaccctaacctacctaatcagtccaaattccactcttcaaattccgaagccacacataatggcttctcgctaccacagcagcaccaacaaaaaagtgggtcccgaagaagcttctctcgacaagcgtcgccggatcctcggagctgacaagatggaccgacagcagggtggtagggtcagaacgccgttttccgttgtcaccaacaacgcagcaacgagtgacgccgccgaaggcgccgccgtcgtcgtcgatttcacgaaggatgaggtggagacgttgctcaatgagaagaaggggaatacttatgataataagaaaaagattgagcagatgacggatcttattaagcgccttaagctctgcgttcggtggtttaagaggattgaagaagggtatgtgcaagaaaaggaaaaacttcggtttgagctggaggctgctgagaagaagtgcactgatactgagactgagatgaagagtaagattgaggagttggaagagactgtatctgatttgaggaagacaatttcttctctagaagagagaattgtgaaggaagaatcagataagttggaagcaattaattcttatggtaaagaaaaggaagccagaactgaagctgagaaagttctggatgagaaatcagctgagcttgagaaagttcgggatgagaaatcagttgctgtgaagaaggccatttcaaatgaggacttgtacaagcgatcacaagagtataatgtgagcctgcagcagtacaatagtcgtcttcagtcagatcttgaaactgctaatgaggcccataaacgacttgaatcagagaaagcaaccattgttgagagccttagcaatgtaagaggccacaataaggcattgcaggatcaattggtatctcttaaagtttcacaagacgaggctataaagcagaaagaaattttaggaaatgagctcaaatgccttcgtgaagagttaaaacaaattagagatgatcgtgatcaccaattgggtcaagtaaatgctttaactggagaaatagc

SEQ ID NO: 19394 - protein, 359 aa, Glycine max
PDPNSKSHAPRTSLSSTLTYLISPNSTLQIPKPHIMASRYHSSTNKKVGPEEASLDKRRRILGADKMDRQQGGRVRTPFSVVTNNAATSDAAEGAAVVVDFTKDEVETLLNEKKGNTYDNKKKIEQMTDLIKRLKLCVRWFKRIEEGYVQEKEKLRFELEAAEKKCTDTETEMKSKIEELEETVSDLRKTISSLEERIVKEESDKLEAINSYGKEKEARTEAEKVLDEKSAELEKVRDEKSVAVKKAISNEDLYKRSQEYNVSLQQYNSRLQSDLETANEAHKRLESEKATIVESLSNVRGHNKALQDQLVSLKVSQDEAIKQKEILGNELKCLREELKQIRDDRDHQLGQVNALTGEI

SEQ ID NO: 19395 - protein, 324 aa, Glycine max
MASRYHSSTNKKVGPEEASLDKRRRILGADKMDRQQGGRVRTPFSVVTNNAATSDAAEGAAVVVDFTKDEVETLLNEKKGNTYDNKKKIEQMTDLIKRLKLCVRWFKRIEEGYVQEKEKLRFELEAAEKKCTDTETEMKSKIEELEETVSDLRKTISSLEERIVKEESDKLEAINSYGKEKEARTEAEKVLDEKSAELEKVRDEKSVAVKKAISNEDLYKRSQEYNVSLQQYNSRLQSDLETANEAHKRLESEKATIVESLSNVRGHNKALQDQLVSLKVSQDEAIKQKEILGNELKCLREELKQIRDDRDHQLGQVNALTGEI

SEQ ID NO: 19396 - protein, 293 aa, Glycine max
MDRQQGGRVRTPFSVVTNNAATSDAAEGAAVVVDFTKDEVETLLNEKKGNTYDNKKKIEQMTDLIKRLKLCVRWFKRIEEGYVQEKEKLRFELEAAEKKCTDTETEMKSKIEELEETVSDLRKTISSLEERIVKEESDKLEAINSYGKEKEARTEAEKVLDEKSAELEKVRDEKSVAVKKAISNEDLYKRSQEYNVSLQQYNSRLQSDLETANEAHKRLESEKATIVESLSNVRGHNKALQDQLVSLKVSQDEAIKQKEILGNELKCLREELKQIRDDRDHQLGQVNALTGEI

SEQ ID NO: 19397 - DNA, 1816 bp, Glycine max
aacttacattcctcttgagctgtgttctttggtatcacttcaacgttatacaaaagcactatccacacttcaaaggtcttcattggtggagaagtccaggcagaagccacaagagaggatgagggtcttgtctgatgcacttaaaagtagcaattatggttctgaaccaatgctacgcaattgtggaatctctataagccccaactttactgaagttgagggtcgggttttacaagctccacggttgaaatttggtaatggggaggacttcaatcctagaaatgggaggtggaacttcaataacaagaaaattgtcaagccaactaaaatagaaagatgggctgtggttaacttctctgcacgctgtgatatacgagggcttgtgagggatctcattaagtgtggtggaatgaaaggcattgtgatagatcagccgtttgatgtgtttgaagaaaatggtcagtttaggcgtgcaccgccagtggttcgagttgagaagatgtttgagttggtccagtcaaaacttcctggggctcctcagtttcttctttgtctgcttcctgagaggaaaaattctgatctttatggtccatggaagaagaagaatcttgctgagtttggaattgtgactcagtgtatagctccgacaagggtcaatgaccaatatttgactaatgttctgttgaaaatcaatgctaagcttggtggtctgaactcaatgttaggcgttgagcattctccttctattcctattgtttctagagcgccaaccatcattattggcatggatgtgtctcatggttcgccagggcaaacagatattccttcaattgctgcggtggtcagctctagagaatggcctctaatatcaaagtatagggccagcgtccgtacgcagtctccaaagatggaaatgattgataatttgttcaagaaagtttccgacaaggaggatgaaggcataatgagggagcttctacttgatttctatacaagttctggaaatagaaagcccgataatataatcatattcagggatggtgttagtgagtcccagttcaatcaagttttgaacattgaacttgatcaaattatcgaggcttgcaagtttttagatgaaaagtggaatcccaagtttttggtgattgttgctcaaaagaaccatcatactaaattctttcaacctggagctcctgacaatgttcctcctggaacggtaattgataacaaaatttgtcatcctcggaattatgatttctacatgtgtgcacatgctggaatgattggtactagcaggcctacacactaccatgttctgttagacgagattggcttttcacctgatgatctacaggagcttgtgcattcattatcatatgtgtatcagaggagcacaactgccatttctgtcgttgctccaatatgctatgctcatctggctgcaactcagatgggtcaatttatgaaatttgaggacaaatctgagacatcttcaagtcatggtggttctggtatacctgctcctcccgtccctcagttgccaagattgcaggacaaagtttcgagctcaatgttcttttgttgaaggatctgtttctagggataggcgatgactgataacagtgctgtttataagaccttcataggatagtttttttgtggaaacagttgaactatgggcgccaatggtgtaggtaaggattattatacatgtaagcaggcattttgctcatgcctttacatgtgtttagtcttttactattttgaatagtgttgcgaagtctttcgctattttgaagattgttaaggtttatgc

SEQ ID NO: 19398 - protein, 527 aa, Glycine max
TYIPLELCSLVSLQRYTKALSTLQRSSLVEKSRQKPQERMRVLSDALKSSNYGSEPMLRNCGISISPNFTEVEGRVLQAPRLKFGNGEDFNPRNGRWNFNNKKIVKPTKIERWAVVNFSARCDIRGLVRDLIKCGGMKGIVIDQPFDVFEENGQFRRAPPVVRVEKMFELVQSKLPGAPQFLLCLLPERKNSDLYGPWKKKNLAEFGIVTQCIAPTRVNDQYLTNVLLKINAKLGGLNSMLGVEHSPSIPIVSRAPTIIIGMDVSHGSPGQTDIPSIAAVVSSREWPLISKYRASVRTQSPKMEMIDNLFKKVSDKEDEGIMRELLLDFYTSSGNRKPDNIIIFRDGVSESQFNQVLNIELDQIIEACKFLDEKWNPKFLVIVAQKNHHTKFFQPGAPDNVPPGTVIDNKICHPRNYDFYMCAHAGMIGTSRPTHYHVLLDEIGFSPDDLQELVHSLSYVYQRSTTAISVVAPICYAHLAATQMGQFMKFEDKSETSSSHGGSGIPAPPVPQLPRLQDKVSSSMFFC

SEQ ID NO: 19399 - protein, 488 aa, Glycine max
MRVLSDALKSSNYGSEPMLRNCGISISPNFTEVEGRVLQAPRLKFGNGEDFNPRNGRWNFNNKKIVKPTKIERWAVVNFSARCDIRGLVRDLIKCGGMKGIVIDQPFDVFEENGQFRRAPPVVRVEKMFELVQSKLPGAPQFLLCLLPERKNSDLYGPWKKKNLAEFGIVTQCIAPTRVNDQYLTNVLLKINAKLGGLNSMLGVEHSPSIPIVSRAPTIIIGMDVSHGSPGQTDIPSIAAVVSSREWPLISKYRASVRTQSPKMEMIDNLFKKVSDKEDEGIMRELLLDFYTSSGNRKPDNIIIFRDGVSESQFNQVLNIELDQIIEACKFLDEKWNPKFLVIVAQKNHHTKFFQPGAPDNVPPGTVIDNKICHPRNYDFYMCAHAGMIGTSRPTHYHVLLDEIGFSPDDLQELVHSLSYVYQRSTTAISVVAPICYAHLAATQMGQFMKFEDKSETSSSHGGSGIPAPPVPQLPRLQDKVSSSMFFC

SEQ ID NO: 19400 - protein, 471 aa, Glycine max
MLRNCGISISPNFTEVEGRVLQAPRLKFGNGEDFNPRNGRWNFNNKKIVKPTKIERWAVVNFSARCDIRGLVRDLIKCGGMKGIVIDQPFDVFEENGQFRRAPPVVRVEKMFELVQSKLPGAPQFLLCLLPERKNSDLYGPWKKKNLAEFGIVTQCIAPTRVNDQYLTNVLLKINAKLGGLNSMLGVEHSPSIPIVSRAPTIIIGMDVSHGSPGQTDIPSIAAVVSSREWPLISKYRASVRTQSPKMEMIDNLFKKVSDKEDEGIMRELLLDFYTSSGNRKPDNIIIFRDGVSESQFNQVLNIELDQIIEACKFLDEKWNPKFLVIVAQKNHHTKFFQPGAPDNVPPGTVIDNKICHPRNYDFYMCAHAGMIGTSRPTHYHVLLDEIGFSPDDLQELVHSLSYVYQRSTTAISVVAPICYAHLAATQMGQFMKFEDKSETSSSHGGSGIPAPPVPQLPRLQDKVSSSMFFC

SEQ ID NO: 19401 - DNA, 1174 bp, Glycine max
agctaggtcgcagaaaatgccttccccactcacaaaacgaaacttttgatttccttaggcgcgtcattgtcatggagttagcagtgtgttaaacacaccagagggtgatagcagggagaaaaagacagagtgtgtaagaaagagaagagagagaaatgggaaggggaagagtggagttgaagagaattgagaacaagatcaacaggcaagtgacctttgcaaaacgaaggaacgggcttttgaagaaagcttacgagctttccgttctttgtgatgccgaggttgctctcatcatcttctccaatagaggaaaactgtacgagttctgcagcagttcaagcatgctcaaaacgctagagaggtaccagaaatgtaactatggtgcgcctgaggctaatgtgtctacacgggaagccttggagttaatcagtcaacaggagtacttgaagctgaaggcacgttatgaggccctacaacggtcccagaggaaccttatgggagaagatcttggtcctttaagcagcaaagagctcgagtctcttgaaaggcagctagattcgtccttgaagcaaataagatcaaccaggacccagttcatgttggatcagctctctgatcttcaacgtaaggaacacttgctaagtgaggctaacaggtctctcagacaaaggcagttggaagggtatcaaataaatccactccaactgaatcccggagttgaagagatgggatatggcaggcatccagctcaaactcatggtgaagccctctttcaacaaatggagtgtgagccaacgttacaaattgggtatcagcctgatccagtatcagtggtgacagcaggcccaagcatgagcaattacatggcaggatggttaccatagtttgcgtttcctgcataagatccactgcaccagcacatttgccgttccaattttatttgaaaacgaaaaaaaaaagaaggaagaaaatggctttggatgtaatgaagctgtaagtgtctgccgtgtatgaagtaggaacaaagttaagcagtgttgtttgtgtgtgctagctctttcataaaactgcacttctttgcttcggttactgtttcttcccttttaataagagtattgatgtcattaatgaactacatggttattttatatgctaccgtcagtgattttgaaag

SEQ ID NO: 19402 - protein, 242 aa, Glycine max
MGRGRVELKRIENKINRQVTFAKRRNGLLKKAYELSVLCDAEVALIIFSNRGKLYEFCSSSSMLKTLERYQKCNYGAPEANVSTREALELISQQEYLKLKARYEALQRSQRNLMGEDLGPLSSKELESLERQLDSSLKQIRSTRTQFMLDQLSDLQRKEHLLSEANRSLRQRQLEGYQINPLQLNPGVEEMGYGRHPAQTHGEALFQQMECEPTLQIGYQPDPVSVVTAGPSMSNYMAGWLP

SEQ ID NO: 19403 - protein, 180 aa, Glycine max
MLKTLERYQKCNYGAPEANVSTREALELISQQEYLKLKARYEALQRSQRNLMGEDLGPLSSKELESLERQLDSSLKQIRSTRTQFMLDQLSDLQRKEHLLSEANRSLRQRQLEGYQINPLQLNPGVEEMGYGRHPAQTHGEALFQQMECEPTLQIGYQPDPVSVVTAGPSMSNYMAGWLP

SEQ ID NO: 19404 - protein, 129 aa, Glycine max
MGEDLGPLSSKELESLERQLDSSLKQIRSTRTQFMLDQLSDLQRKEHLLSEANRSLRQRQLEGYQINPLQLNPGVEEMGYGRHPAQTHGEALFQQMECEPTLQIGYQPDPVSVVTAGPSMSNYMAGWLP

SEQ ID NO: 19405 - DNA, 1403 bp, Glycine max
ttcactcactctatcgccgcacccaaaacaccttgttttgtgttgtgtctttctttcgttcttctctcaacaatggatttccacaccctctcaaggaagcagctccaggccctctgcaagaagaacaagattcccgctaacatcaccaacgttgccatggctgacgctctcgctgctctcaaccaagttgaaggattggatgatttttttaatccaagtgagggtgatgttggaaccccaagtgttaatcaccgtacggttgtcagaacctcaactcaaaggaaagcagcgatagaagaagcagaaggtttgaaggtgaagacctcgacccggcgggttagagttgcagaagaagtagttgagcaggagaacaaggatgccaatgccccaccaatcactcctgctgccagtaggagaagggctactgcggtttctactcgcagaaagaaagaagttgagatggtagaagaagatgctggtgttcaaggaaaccctaaaacacctgctgcagtagctcccgtgagtaggagaagagctactagccgttcagtttgcaccaccaagattgagacccccggtgcccatggtacttcagtgtataacacgaggagatccgttagattgttggagaaggacttgtctaagatgagcttgctcgacactgaagacactactggacttgtcaagattgatggtgatgtttctcaagattcgagtaatgtctctcaccaactagaagaagactcgtctggtaatgaaaagggggatagtttgcagatggaatcaactgtggtttcgggggatactcgggagttggaagtttgctctcttgagaaaaacactgaatatgaatgccaatcacgtgatttagattcagatgtgaaattagtttctgtgacagaaatagatatgctggttgagccacatggtcctaatgaagctggatcggagaaagttaattgcttggagttggaggctgaaccaaatgcttcggatgaagcaggatctgagtccttacctgtacttgaggaatcctatgattcttctgagctggaaactcaaaataattttcctttggaggcatccgaagatgcttttccggaggttactatcggccaagatattgctgctgtgactgttgtggtacctgatgacgtttcagaggatgttactcatcaaaaggttgctgcctcgcttcctatgcaatctgagtgcattgtggatgataaagtcagctacgagggtgatgttaaagaagacaagaacaatgagccacgagaagaggatgaaccatatgattcaaatttgaaactggaaggaagtatcgacacatgtgacaaatctgatgatgcagatgctcctatggaggttgcccaccaagatactgttgtggtggctgatga

SEQ ID NO: 19406 - protein, 467 aa, Glycine max
FTHSIAAPKTPCFVLCLSFVLLSTMDFHTLSRKQLQALCKKNKIPANITNVAMADALAALNQVEGLDDFFNPSEGDVGTPSVNHRTVVRTSTQRKAAIEEAEGLKVKTSTRRVRVAEEVVEQENKDANAPPITPAASRRRATAVSTRRKKEVEMVEEDAGVQGNPKTPAAVAPVSRRRATSRSVCTTKIETPGAHGTSVYNTRRSVRLLEKDLSKMSLLDTEDTTGLVKIDGDVSQDSSNVSHQLEEDSSGNEKGDSLQMESTVVSGDTRELEVCSLEKNTEYECQSRDLDSDVKLVSVTEIDMLVEPHGPNEAGSEKVNCLELEAEPNASDEAGSESLPVLEESYDSSELETQNNFPLEASEDAFPEVTIGQDIAAVTVVVPDDVSEDVTHQKVAASLPMQSECIVDDKVSYEGDVKEDKNNEPREEDEPYDSNLKLEGSIDTCDKSDDADAPMEVAHQDTVVVAD

SEQ ID NO: 19407 - protein, 443 aa, Glycine max
MDFHTLSRKQLQALCKKNKIPANITNVAMADALAALNQVEGLDDFFNPSEGDVGTPSVNHRTVVRTSTQRKAAIEEAEGLKVKTSTRRVRVAEEVVEQENKDANAPPITPAASRRRATAVSTRRKKEVEMVEEDAGVQGNPKTPAAVAPVSRRRATSRSVCTTKIETPGAHGTSVYNTRRSVRLLEKDLSKMSLLDTEDTTGLVKIDGDVSQDSSNVSHQLEEDSSGNEKGDSLQMESTVVSGDTRELEVCSLEKNTEYECQSRDLDSDVKLVSVTEIDMLVEPHGPNEAGSEKVNCLELEAEPNASDEAGSESLPVLEESYDSSELETQNNFPLEASEDAFPEVTIGQDIAAVTVVVPDDVSEDVTHQKVAASLPMQSECIVDDKVSYEGDVKEDKNNEPREEDEPYDSNLKLEGSIDTCDKSDDADAPMEVAHQDTVVVAD

SEQ ID NO: 19408 - protein, 415 aa, Glycine max
MADALAALNQVEGLDDFFNPSEGDVGTPSVNHRTVVRTSTQRKAAIEEAEGLKVKTSTRRVRVAEEVVEQENKDANAPPITPAASRRRATAVSTRRKKEVEMVEEDAGVQGNPKTPAAVAPVSRRRATSRSVCTTKIETPGAHGTSVYNTRRSVRLLEKDLSKMSLLDTEDTTGLVKIDGDVSQDSSNVSHQLEEDSSGNEKGDSLQMESTVVSGDTRELEVCSLEKNTEYECQSRDLDSDVKLVSVTEIDMLVEPHGPNEAGSEKVNCLELEAEPNASDEAGSESLPVLEESYDSSELETQNNFPLEASEDAFPEVTIGQDIAAVTVVVPDDVSEDVTHQKVAASLPMQSECIVDDKVSYEGDVKEDKNNEPREEDEPYDSNLKLEGSIDTCDKSDDADAPMEVAHQDTVVVAD

SEQ ID NO: 19409 - DNA, 1645 bp, Glycine max
aaatgaaagaactgttgaagatgagaggccattgtctatggctgcaagtgaattagttcagctaagacaacgacacactgtctctggtttaagggagggttttcgttcaagattagaaaatattgttcgtggtcaagcaggcaccagtcctgataccacatcaaatagtaatgcaagtgaaacaagaggcgatgagagccaagcaaacagtctggtagatggccaacaagaaaattatgaacaacagcagattaggagcctggaaactgatgtgcgtcagttgcctaatcgaacaggaactttggagagtagcacaagtgagagtattagttggcaagaagctagtaatcaaggggggaattggcaggaacaaattgctgaagaagggggaggaaactggcgacagagtccattcaatcagacaagagatggaagggcagtcggtgattggccacaggaaactcccagaaatttagctggggaagatcctcatccccgggaagctcaaagaatttggcatgatggtaacactagggaaactgttggtaattggtccgaaggaccttctggagctacaaggaatcgccgtggggttcctataagaaggttcaatagatttcatccacctgatgatgataatgtatacagtatggagcttagagaacttctgagcaggagaagtgtttctaaccttcttcgtagtggtttccgtgaaagtctggaccaactaatacagtcatatgtggaaaggcaaggtcgtgcaccaattgactgggatttgcatcagaacttaccagcatcaactcctgcctctcctgaacaggacccagaccagcagggtgaggaacgagatgagggtcaacatgaaaccattaacagaccttcactggtgttgccttctccaccagtacctccaccacaacctctgtggcaccaagatttgcatcaaactggatggtctcgccatagcatgcatcgttctgaaattgagtgggagataatgaatgatttaagatcagacatggcaagacttcagcaaggcatgaatcacatgcagaggatgttggaggcctgcatggatatgcaactggagttgcagcgctctgtcagacaggaagtatctgctgctctaaaccgctcaggtggtgagaatggatcgagtgctgagacatctgatgatgggtctaaatgggggcatgtgaagaaaggaacttgctgtgtttgttgtgataaccatatcgattctcttttgtatagatgtgggcacatgtgcacttgttcaaaatgtgccaatgagttaattcgtggtggtggtaaatgtcctttatgccgagcaccaattcttgaggtggtccgagcatattccatactgtaaaaaggaaattaagaggacatagagaagaaaaaaaagtctcaggaagttgatctcaattctaaaggtgtcgaggttcttatttataagtgtttagtagatgcctttgtttttctgattatatggaactccacgaattgtataattggattagcaaatggcgctgttgattcatcattcttacgtaaataaatagttgccctgattattctttgaaaaaaaaatttcgttgaaaattccaagcttgtatatgaataaaaactgaattccccg

SEQ ID NO: 19410 - protein, 457 aa, Glycine max
NERTVEDERPLSMAASELVQLRQRHTVSGLREGFRSRLENIVRGQAGTSPDTTSNSNASETRGDESQANSLVDGQQENYEQQQIRSLETDVRQLPNRTGTLESSTSESISWQEASNQGGNWQEQIAEEGGGNWRQSPFNQTRDGRAVGDWPQETPRNLAGEDPHPREAQRIWHDGNTRETVGNWSEGPSGATRNRRGVPIRRFNRFHPPDDDNVYSMELRELLSRRSVSNLLRSGFRESLDQLIQSYVERQGRAPIDWDLHQNLPASTPASPEQDPDQQGEERDEGQHETINRPSLVLPSPPVPPPQPLWHQDLHQTGWSRHSMHRSEIEWEIMNDLRSDMARLQQGMNHMQRMLEACMDMQLELQRSVRQEVSAALNRSGGENGSSAETSDDGSKWGHVKKGTCCVCCDNHIDSLLYRCGHMCTCSKCANELIRGGGKCPLCRAPILEVVRAYSIL

SEQ ID NO: 19411 - protein, 445 aa, Glycine max
MAASELVQLRQRHTVSGLREGFRSRLENIVRGQAGTSPDTTSNSNASETRGDESQANSLVDGQQENYEQQQIRSLETDVRQLPNRTGTLESSTSESISWQEASNQGGNWQEQIAEEGGGNWRQSPFNQTRDGRAVGDWPQETPRNLAGEDPHPREAQRIWHDGNTRETVGNWSEGPSGATRNRRGVPIRRFNRFHPPDDDNVYSMELRELLSRRSVSNLLRSGFRESLDQLIQSYVERQGRAPIDWDLHQNLPASTPASPEQDPDQQGEERDEGQHETINRPSLVLPSPPVPPPQPLWHQDLHQTGWSRHSMHRSEIEWEIMNDLRSDMARLQQGMNHMQRMLEACMDMQLELQRSVRQEVSAALNRSGGENGSSAETSDDGSKWGHVKKGTCCVCCDNHIDSLLYRCGHMCTCSKCANELIRGGGKCPLCRAPILEVVRAYSIL

SEQ ID NO: 19412 - protein, 241 aa, Glycine max
MELRELLSRRSVSNLLRSGFRESLDQLIQSYVERQGRAPIDWDLHQNLPASTPASPEQDPDQQGEERDEGQHETINRPSLVLPSPPVPPPQPLWHQDLHQTGWSRHSMHRSEIEWEIMNDLRSDMARLQQGMNHMQRMLEACMDMQLELQRSVRQEVSAALNRSGGENGSSAETSDDGSKWGHVKKGTCCVCCDNHIDSLLYRCGHMCTCSKCANELIRGGGKCPLCRAPILEVVRAYSIL

SEQ ID NO: 19413 - DNA, 1419 bp, Glycine max
atttattggacccgtcgtgaaccgtgtttggatatacggctctatcaaattcataaaactaaaatcctaacttgataatgacataaaccttgtggtgtcatacatgttgcctagaaacatgatcgttgaagaacaagccaagaaaaggaaaatgtttatatattttgtttgcttgtcaaaaacagaattatttttttttcttcttaaaatattaaagtaaaattaattcaatttaaaaataaaaaagtgctgatcttgtaaaaaaaaactcaccttcgttgtctcccttctttctcttctccattaaaagcttctaacagttttactagaagtagtttatgatttggcatatccaaacccaattccatcgtgatataagctttgttcaaatcacatgcaaaagagaggaagatattataaaatttgatattcatctggcagtttgaaggcattctgtgtttcatatgttttagcaatagtaaattacaaaaattaggtctgcctatgcttactgaattgtaaattttgtaggagcattgtttggtgacacattaattatacagtgcagagtgtacacaatgagtttgtttagttcttcaaagatattatgtttataccattctcaagccctaagtgttctggctttattgctaaatacaaactaagatttgagaacaagtgaagtttatttaaataatcatcacagctctctgcttctggagacagtggaatgcctgaagtggtagctgatcctcaaggtgaagtttccaagatattccaaaatctaggagtatgtgttgttcagcagtgtgccaaaatacgccaacaagtttcaactgcggtcacctatgataaatcaatcaaggcaatcaaagtgaaggtaccagattcaaaggaagaattctttctgcatcctgcaacagtgagacggaatgatcgctctgctcaaagtgtggatgaatggacgggggagcagaaattgcagtacggtgatgttcctgaagatattgaacctgaagaaattcgaccaatgggaaattatgcagtttcaataacttggcctgatgggtttagtcagattgctccttatgatcaattgcagatgattgaacggctagttgatgtttttgaaccaagtgtacaagcatgatgaaaaaaaaacgtcagatgggttgtactgatgtaggtgttggtatatggcaaaaatcatatatacatgtatgatagcctcaattcatagtccttcaacaagtaggggatattagaagtttgatagagcattctgcaaaggtataggttggccttgagattcactgcaatcctcaacttttttccttggtttttgttgtcccattgggtacaaagcttttatttctcaactgtgaacagaagtgtattatatatgtgtcattttcattc

SEQ ID NO: 19414 - protein, 139 aa, Glycine max
MPEVVADPQGEVSKIFQNLGVCVVQQCAKIRQQVSTAVTYDKSIKAIKVKVPDSKEEFFLHPATVRRNDRSAQSVDEWTGEQKLQYGDVPEDIEPEEIRPMGNYAVSITWPDGFSQIAPYDQLQMIERLVDVFEPSVQA

SEQ ID NO: 19415 - DNA, 1347 bp, Glycine max
gaatgaagcgattattgattagtacaaaaaaaaaaaaaaaaaagagaattttggggagcactcatcaaccatggtgatgttgtttgcacacacagattcagtagtcactcactagttctcggagaaaaccaagtgtcagtaataactaacaagcaaaacagaaaagaatacggattcgattcggagagatcaaccatgaagaacgaccacaacaacaacaacaacaacagcgccgagcatagcaaagacactaccgttggaatcctagattcccgattcaaccagaccctcagaaatgttcaagggttactcaagggtcgtaacattcctggtaaaatattattgagccagagggttgaatctcccgattacacaagcttatcctcaccgacttatataaggagctcctcatacagtgaaactggcacaagtgaccagacatctgagacggtagaggaggaagttcacagtacaagtaaaccatttggtattcccaatgacaataagttaaaaatatcagcatccaatgtagagagctcatccgaagaagtccggaaatcttccatgggtgcaagagctacagattctgcaagagttatgaagttcactaaggtgctttcagagacaatggttaaattagagaaattgcgtgaattttcttggagtggtgttccagattatatgcgtcctacagtgtggagacttctcttgggatatgcaccacctaattcagatagaagggagggagttttgaaaaggaagcgccttgagtatcttgactgtgtttctcagtattatgatattcctgatacagaacgctcggatgatgagatcaatatgcttcgccagattgctgttgattgtccaagaactgtacctgaagtttcattctttcaacaacagcaagttcagaaatcattggagcgtattctgtacacatgggccattcggcatcctgcaagtggatatgttcaggggataaatgatcttgttacgccatttttagttgttttcctatcagaatacttggaagggggcatagataattggtcaatgtctgatttatcttcagatgaaatctctaatatagaggccgactgctattggtgcttgtcaaagttgcttgatggtatgcaagaccattatacgtttgcccaaccaggaattcaaaggcttgtttttaagttgaaggaattggtcaggaggattgatggtaacttttttctcttaccgaacctcagttttaggaaaatataactacatttggctaaattattctctcactctatattaatgctctctcttatttcacattgtggagataccgagagattaggataaaattgc

SEQ ID NO: 19416 - protein, 353 aa, Glycine max
MKNDHNNNNNNSAEHSKDTTVGILDSRFNQTLRNVQGLLKGRNIPGKILLSQRVESPDYTSLSSPTYIRSSSYSETGTSDQTSETVEEEVHSTSKPFGIPNDNKLKISASNVESSSEEVRKSSMGARATDSARVMKFTKVLSETMVKLEKLREFSWSGVPDYMRPTVWRLLLGYAPPNSDRREGVLKRKRLEYLDCVSQYYDIPDTERSDDEINMLRQIAVDCPRTVPEVSFFQQQQVQKSLERILYTWAIRHPASGYVQGINDLVTPFLVVFLSEYLEGGIDNWSMSDLSSDEISNIEADCYWCLSKLLDGMQDHYTFAQPGIQRLVFKLKELVRRIDGNFFLLPNLSFRKI

SEQ ID NO: 19417 - protein, 230 aa, Glycine max
MGARATDSARVMKFTKVLSETMVKLEKLREFSWSGVPDYMRPTVWRLLLGYAPPNSDRREGVLKRKRLEYLDCVSQYYDIPDTERSDDEINMLRQIAVDCPRTVPEVSFFQQQQVQKSLERILYTWAIRHPASGYVQGINDLVTPFLVVFLSEYLEGGIDNWSMSDLSSDEISNIEADCYWCLSKLLDGMQDHYTFAQPGIQRLVFKLKELVRRIDGNFFLLPNLSFRKI

SEQ ID NO: 19418 - protein, 219 aa, Glycine max
MKFTKVLSETMVKLEKLREFSWSGVPDYMRPTVWRLLLGYAPPNSDRREGVLKRKRLEYLDCVSQYYDIPDTERSDDEINMLRQIAVDCPRTVPEVSFFQQQQVQKSLERILYTWAIRHPASGYVQGINDLVTPFLVVFLSEYLEGGIDNWSMSDLSSDEISNIEADCYWCLSKLLDGMQDHYTFAQPGIQRLVFKLKELVRRIDGNFFLLPNLSFRKI

SEQ ID NO: 19419 - DNA, 1214 bp, Glycine max
aaaaaatcatcaaagctcaaacccccctctctctactcaaactaaccactctgtttctcttgctctacttttaccctgtttccagtggaacaaatcttcatccaaattaggttttgttttggagaaatgtatgcagagactggtcttttcttcccatatttgcacaacgtctctcacggccttcatcagcttgaggagtactgcaaaacccagaagtccaatgcttcaatggatgaccttgttcagtcttctgccatgtcagagtatgatttggcagctgagggagatctgttcaaagctcctgaacctattattgaagagccaatcatggacatgtcagcggccatctcaatgatgtcttgtggggaagatgtctcgtcacagggactaaagtccactgatattgatattcttcaaaatgatcagtttctgagtgaggtgttctatgaatgtgaaaaggatctcttagaaaaggcagcaatagagtcaccattctctgagattctggaaatcaaggttccttttctgaacattgatgagaacacaattcaagaaaacaagccatttactgacatgcaattagcaaagagtgtcagctcaggaagtttgagctcaatggactggatgcgtggagctgcaatgaagcctgctttcattgatatctctgcaatagatttcaatgcagattatggcatgcggagatcatttagtgaaggagatataaagactcttggtaatggtaacatgaacatcgtccaatcaccccttgagaggccccttcttatcagcaactgcaccagtgaggaacgcttccaaaagctctccagatacaggaataagaagacaaagaggaattttgggaggaaaatcaagtatgcttgcaggaaggcacttgctgacagtcagccaagaatccgtggaagatttgcaaggactgaagaatctgatgtcaagagggaatgaatgacttaaaactgatttagtaggaagaaaatagagttgagtagctatatctgatcaagctatatggaaaaactcagcagtaatatgtgattagaacttatgtggggagtctctgtttgtttgagcagatatttgctgaataaaccaggcctcaaacttcttaggctagttcatctcttatctattgtattaacgtctctatagacggaaataaccttccagatatgtaaatagttttgttgaataatgga

SEQ ID NO: 19420 - protein, 278 aa, Glycine max
MYAETGLFFPYLHNVSHGLHQLEEYCKTQKSNASMDDLVQSSAMSEYDLAAEGDLFKAPEPIIEEPIMDMSAAISMMSCGEDVSSQGLKSTDIDILQNDQFLSEVFYECEKDLLEKAAIESPFSEILEIKVPFLNIDENTIQENKPFTDMQLAKSVSSGSLSSMDWMRGAAMKPAFIDISAIDFNADYGMRRSFSEGDIKTLGNGNMNIVQSPLERPLLISNCTSEERFQKLSRYRNKKTKRNFGRKIKYACRKALADSQPRIRGRFARTEESDVKRE

SEQ ID NO: 19421 - protein, 244 aa, Glycine max
MDDLVQSSAMSEYDLAAEGDLFKAPEPIIEEPIMDMSAAISMMSCGEDVSSQGLKSTDIDILQNDQFLSEVFYECEKDLLEKAAIESPFSEILEIKVPFLNIDENTIQENKPFTDMQLAKSVSSGSLSSMDWMRGAAMKPAFIDISAIDFNADYGMRRSFSEGDIKTLGNGNMNIVQSPLERPLLISNCTSEERFQKLSRYRNKKTKRNFGRKIKYACRKALADSQPRIRGRFARTEESDVKRE

SEQ ID NO: 19422 - protein, 235 aa, Glycine max
MSEYDLAAEGDLFKAPEPIIEEPIMDMSAAISMMSCGEDVSSQGLKSTDIDILQNDQFLSEVFYECEKDLLEKAAIESPFSEILEIKVPFLNIDENTIQENKPFTDMQLAKSVSSGSLSSMDWMRGAAMKPAFIDISAIDFNADYGMRRSFSEGDIKTLGNGNMNIVQSPLERPLLISNCTSEERFQKLSRYRNKKTKRNFGRKIKYACRKALADSQPRIRGRFARTEESDVKRE

SEQ ID NO: 19423 - DNA, 1046 bp, Glycine max
agatgagggaaacatctgtggaattattctgcatatgcttacatattttagtatgtgactgttgttctttggtacatttgggttcatatgcaggtagagtgactccacagagtgtggtttacagttttggaactctgctgctagatctcttgagtggcacttgacctgattcgtggcaaaaactttttgatgttgatggattctgccttagagggtcacttttcaaaggatgacggaactgagttggttcgtttggcttctcgttgtttacaatatgaagctcgtgagaggccaaatgcaaagtctcttgttgcatctctcatgtcacttcagaatgaaacagaggtcccctcatatgttctaatgggtctccggcaagaaactgcatccttaacaaagcaattacattgacaccttttggtgaagcatgtttgagactggatcttactgcaatacatgaaatattagagaagactggttacaaggatgatgaaggaattgccaatgagctttcctttcaattgtggaccagccaaatgcaggagaccttgaatttgaagaagcatggagatactgcttttagagctaaggactttatcactgccattgactgctacactcaattcatagatggagggaccatggtgtcacccacagtgtatgcaatacgctgcttatctttattgatgaatgacatggcacaagaagctcttggggatgcaatgcaagcccaagtggtatctccagagtggcctactgctttgtatcttcatgcagcttgtcttttcagcctcggaatggaaaatgatgcacaagagactctcaaagatgggactaacatggaaggcagaaaaaacaaaaactgaaaattttgtatagatttttccttgtcttttgttgtcttaagcattatttaatttcatgccctttaaagtctttgttaggctttgcctccaatttcctctgtcatgatttttatattttttggctttctgtaatgcccgggacaaaatacagtaactgatttgaaaaaaaaaaaaaaaaag

SEQ ID NO: 19424 - protein, 109 aa, Glycine max
MQETLNLKKHGDTAFRAKDFITAIDCYTQFIDGGTMVSPTVYAIRCLSLLMNDMAQEALGDAMQAQVVSPEWPTALYLHAACLFSLGMENDAQETLKDGTNMEGRKNKN

SEQ ID NO: 19425 - protein, 74 aa, Glycine max
MVSPTVYAIRCLSLLMNDMAQEALGDAMQAQVVSPEWPTALYLHAACLFSLGMENDAQETLKDGTNMEGRKNKN

SEQ ID NO: 19426 - protein, 73 aa, Glycine max
MLMDSALEGHFSKDDGTELVRLASRCLQYEARERPNAKSLVASLMSLQNETEVPSYVLMGLRQETASLTKQLH

SEQ ID NO: 19427 - DNA, 1709 bp, Glycine max
ttctttgttctgtcaccatgcttttggacagaaatcaattccaatgggtgctaatgtgagtttggtgaagcaggttgtggccgagtgtggaaggcttccactggctctgaaggtgattggagcttctttgcgagaccagaatgaaatgttttggttgagtgttaaaagcaggctctctcaaggccaaagcattggtgaatcctatgaaatccatctgattgatagaatggcaattagtactaactacctgccagaaaagatcaaggagtgcttcttggacctgtgttcttttcctgaggatagaaaaattcctctggaagttttaatcaatatgtgggttgaaattcatgacatcaatgaaacggaagcatatgccattgtggttgagctttcaaacaagaatcttctcaccttagtaaaagaagcacgtgccgggggcatgtatagcagttgctttgagatttctgtcactcaacatgatatattgagggaccttgttcttcatttgtgcaaccgtggcagcattcatcaacaccgaaggctagttatggctaaacgaaaagaaaatggactacttcccaaagaatggtctagatacaaggaccaaccctttgaagcacagattgtttcaatcaacacaggggcaatgaccaaaatggactggtttgagctggattttcccaaggctgaagtgttgatcattaatttcacatccagtgattactttttacctcccttcatcaataaaatgccaaatttgagggcattgataataataaactacagcacctcatatgcccgccttcaaaatgtttcagtttttaggaatttgaccaacttgagaagtctctggcttgaaaaggtttccatccctcagttatcaggcagtgtcttgcaaaacttgggcaaattatttgtagtcctctgcaaaattaacaacagtttggatgggaaacaattccctaacctctctgagctcactcttgatcactgtgatgatctaactcaattgccctcaagcatttgtggaataaagtcactacaaaacttgagtgtcaccaactgccaccatttgagtcaactacctgttgaatttggcaaactaagatcactagagatcctccgtttatatgcttgtccagatctagaaacacttcctcctagcatgtgtgacatgaagagattgaagtatattgatatttctcaatgtgttaacctttcatgcttccctgaagagattggtagattagtatgcttagagaagattgacatgagggaatgccccatgattaggtatttaccaaagtctgcagtggcattgcaatctctgcagcttgtaatttgtgatgaggaggtatatggtatgtggagagatgttgagatggccaactcaaatgtccttattaaagtagcagaacaacactatgatctagactggcttcaagagtgacccatgtgtctacgttcttgggatgttttaccttcccaattcgttgcacttgtatatacttattcatagcctcaattctgaaaaggaatttttctttttccaaaaagctaatttccgtgatggtgaaaactgtggcacaatattttcactatagttcctagaattaatgccagcagtagccagtgataacccatatttagttattattaggacttcaacggtgatgcacgtaaactaatttatattctcatttaattat

SEQ ID NO: 19428 - protein, 482 aa, Glycine max
SLFCHHAFGQKSIPMGANVSLVKQVVAECGRLPLALKVIGASLRDQNEMFWLSVKSRLSQGQSIGESYEIHLIDRMAISTNYLPEKIKECFLDLCSFPEDRKIPLEVLINMWVEIHDINETEAYAIVVELSNKNLLTLVKEARAGGMYSSCFEISVTQHDILRDLVLHLCNRGSIHQHRRLVMAKRKENGLLPKEWSRYKDQPFEAQIVSINTGAMTKMDWFELDFPKAEVLIINFTSSDYFLPPFINKMPNLRALIIINYSTSYARLQNVSVFRNLTNLRSLWLEKVSIPQLSGSVLQNLGKLFVVLCKINNSLDGKQFPNLSELTLDHCDDLTQLPSSICGIKSLQNLSVTNCHHLSQLPVEFGKLRSLEILRLYACPDLETLPPSMCDMKRLKYIDISQCVNLSCFPEEIGRLVCLEKIDMRECPMIRYLPKSAVALQSLQLVICDEEVYGMWRDVEMANSNVLIKVAEQHYDLDWLQE

SEQ ID NO: 19429 - protein, 468 aa, Glycine max
MGANVSLVKQVVAECGRLPLALKVIGASLRDQNEMFWLSVKSRLSQGQSIGESYEIHLIDRMAISTNYLPEKIKECFLDLCSFPEDRKIPLEVLINMWVEIHDINETEAYAIVVELSNKNLLTLVKEARAGGMYSSCFEISVTQHDILRDLVLHLCNRGSIHQHRRLVMAKRKENGLLPKEWSRYKDQPFEAQIVSINTGAMTKMDWFELDFPKAEVLIINFTSSDYFLPPFINKMPNLRALIIINYSTSYARLQNVSVFRNLTNLRSLWLEKVSIPQLSGSVLQNLGKLFVVLCKINNSLDGKQFPNLSELTLDHCDDLTQLPSSICGIKSLQNLSVTNCHHLSQLPVEFGKLRSLEILRLYACPDLETLPPSMCDMKRLKYIDISQCVNLSCFPEEIGRLVCLEKIDMRECPMIRYLPKSAVALQSLQLVICDEEVYGMWRDVEMANSNVLIKVAEQHYDLDWLQE

SEQ ID NO: 19430 - protein, 434 aa, Glycine max
MFWLSVKSRLSQGQSIGESYEIHLIDRMAISTNYLPEKIKECFLDLCSFPEDRKIPLEVLINMWVEIHDINETEAYAIVVELSNKNLLTLVKEARAGGMYSSCFEISVTQHDILRDLVLHLCNRGSIHQHRRLVMAKRKENGLLPKEWSRYKDQPFEAQIVSINTGAMTKMDWFELDFPKAEVLIINFTSSDYFLPPFINKMPNLRALIIINYSTSYARLQNVSVFRNLTNLRSLWLEKVSIPQLSGSVLQNLGKLFVVLCKINNSLDGKQFPNLSELTLDHCDDLTQLPSSICGIKSLQNLSVTNCHHLSQLPVEFGKLRSLEILRLYACPDLETLPPSMCDMKRLKYIDISQCVNLSCFPEEIGRLVCLEKIDMRECPMIRYLPKSAVALQSLQLVICDEEVYGMWRDVEMANSNVLIKVAEQHYDLDWLQE

SEQ ID NO: 19431 - DNA, 826 bp, Glycine max
attaaattttaaggagcaaaaaggtatttaaatccaaattttatttacttttacataagtcaatcatatttctgattgatgtaatgtaacttggtaggaagactgcatcctagcttttagatttctccaaggagattagcatctatgaatgatgattggagacattggttgctattatatatgtatccaagaaaaatcatagttgtttttatatattccaattatttactaacatacaagtaatgtaacttgggaaatcagtgcgtggctctagcagcgaaatctgtttttattgttgatgagaaagagaaagagaaggcaaaagaagaattatttgaggctctgaattatcttgagaatgagttgaagggaaagttttttggtggagatgagtttggctttgtggatattgctgctgtgatcatacctataattcaagagatagcagggttgcaattgttcccaagtgagaaattcccaaagctctccaaatggagccaagacttttacaaccattcacttgttaaccaagttatgcctcctaaggaccaactttttgcctatttcaaggctcgggctcaaagcctcgctgctaaaagaaagaattaacaaagactcagaattcccaaggagattttaatattgtagaaagtgaaagctacttactatctatgtttagttttcgttttgttcaacaatctatgtttagttttcgttttgttcaacaatctatgtttagttattgcggttatattttcatttcaaaatgaattaagcgatataggatttcgccatgtaaaaaaaataaaaatccaaggttgttgac

SEQ ID NO: 19432 - protein, 32 aa, Glycine max
MFSFRFVQQSMFSFRFVQQSMFSYCGYIFISK

SEQ ID NO: 19433 - protein, 32 aa, Glycine max
MNDDWRHWLLLYMYPRKIIVVFIYSNYLLTYK

SEQ ID NO: 19434 - DNA, 1014 bp, Glycine max
gcatcgcagtgtatctgagtaatatcactgtccctttccctctccctttcatcagaaacacaaacaaaacaccgattcgctatattaccagatcggactcaattcctgaaccgatgaagttgaagccgcagtgaaccaaaccatcatcatcgcgttaccggaataatcgacccatcatcaattagatcgaaatgaaggatgaggacgggcttccgacgacgaccgcggttacaaagaaggaaaacttggattcgagtctgtttggaaaaggcaggtacaaattctgggcgttagcggccatcttgcttctggcgttctggtccatgttcaccggtaccgtctcgctccgctggtccggcactctcaattccctttccaacgacatcgacactcccatccacgacgacctagatgttcttgaaatggaggagagggagaaggttgtgaggcacatgtgggatgtgtacaccaacagtcgcagtgtgaggttgccgcggttctggcaagaggccttcgaggctgcctatgaggatttgacgagcgatgtcgctgaggtcagagacgctgccgtcgccgagatcgccaagatgtctgttcgctccattcattttgatccacctcctcttcaatccacgagtgcccgagaattcagcaagagccttaagcaagccgagaaaggaaaagatgcaacaacctcaaggcgtgcttaaaggttagtgtgtggagcattcaagcgtctgcggtgtacttgaaaaatgctcgagtggtaccggaagattgtgaagagatagtaatggacgaactcatactcggatttcatgtttccatcacagggataatgatgtattttaataggctgtggttcttgcaaattttgcagtcaaaattcgtagtcttcacgaagtgaggagtagtaaatcgaaacacgaacttttgaacagacaaattcaattgagcatgttctgtttagctttattccacaacatctaaattataaaactctcatgtttctac

SEQ ID NO: 19435 - protein, 172 aa, Glycine max
MKDEDGLPTTTAVTKKENLDSSLFGKGRYKFWALAAILLLAFWSMFTGTVSLRWSGTLNSLSNDIDTPIHDDLDVLEMEEREKVVRHMWDVYTNSRSVRLPRFWQEAFEAAYEDLTSDVAEVRDAAVAEIAKMSVRSIHFDPPPLQSTSAREFSKSLKQAEKGKDATTSRRA

SEQ ID NO: 19436 - protein, 128 aa, Glycine max
MFTGTVSLRWSGTLNSLSNDIDTPIHDDLDVLEMEEREKVVRHMWDVYTNSRSVRLPRFWQEAFEAAYEDLTSDVAEVRDAAVAEIAKMSVRSIHFDPPPLQSTSAREFSKSLKQAEKGKDATTSRRA

SEQ ID NO: 19437 - protein, 95 aa, Glycine max
MEEREKVVRHMWDVYTNSRSVRLPRFWQEAFEAAYEDLTSDVAEVRDAAVAEIAKMSVRSIHFDPPPLQSTSAREFSKSLKQAEKGKDATTSRRA

SEQ ID NO: 19438 - DNA, 1759 bp, Glycine max
atggtgttgttagggatgttttcctcccttggtataatgcatatcggttccttgttcaaaatgcaaagagggttgaagttgaaggtctagcaccttttgttccctttgatcaggccacacttctgaactcaacgaatgttcttgatcaatggattaactcagccacccaaagccttattcattttgtccgacaagaaatggatggttatcgcctttacacagtggttccttaccttctgaagtttcttgataaccttacaaatatttatgtaaggttcaatcgtaagagacttaaaggtcgttctggggaagaagactgcaggatagcactatcaactctttaccatgtgcttttgttatcctgtaaagtgatggctccttttacacctttcttcactgaggtgctctatcaaaatatgcgaaaagtttctaatggatcagaggaaagcatacactattgcagttttcctacagaagaaggaaggaggggagaacgaattgagcagagtgtttcaaggatgatgacaataattgatctagccagaaacattcgtgagcgtcacaacaagcctcttaagactccactaagggagatggttatagttcatcccgatgcagacttccttgatgacataaatggaaaattgaaggagtatgtgctggaggaactcaatgtacgatcccttgtaccatgtaatgatactttaaaatatgccactttacgcgccgagcctgaatttagtgttttaggcaaaagacttggaaaatcaatgggcattgttgccaaagaaatcaaagcaatgtcacaggaaaacattttggcttttgagaatgctggagaagtcgtcattgcaaatcaatgtttgaagctgactgatattaaggttctccgtgattttaaacgacctgatggtatgactgagaaggaggttgatgctgctggagatggtgatgttctagtgatattggacttgcgtcctgatgagtcattgtttgaggctggtgctgctcgagagattgttaataggattcagaagttacggaagaaagttgctcttgacccaactgacatggtggaggtttactttgaatcattagatgatgacaaatcggtctctcagagagttttgcattcacaggaatcctacatcagagatgctattggtagtcagttgcttccaaattctctaatgcctgcacatgcagttgtccttggcgaagagaggttccatgggatagccagcatgtcatttggtatcactttgacaagacctgcattgatgtttaaccaaaaagccattctttcactgtttacaggtgatgcaaaaagtgcatataagttgcaaacttatctgctatcaagagatcatttgaagttgaagtctgagtttcaagatggaaatggaaagaaaattgtcgattcaattgaacagctacctgctgtggaagtggttcttggtcagcatgtctttttcactgtgggggactattcccttgctggaaaatctgactgatcatattttccaagtgttcctttttgatcttttatccagtttgcatgctatctgtttgcaagattaggaatacagaatatacccaggcatgcctaattgtaacttttgagcaattgactattcttttttctgtatagaggatctcacgtcttattttaaagataaagtgtcttgatttaatccttgataatctaaagtcaattattttgtcacactcaattccttctattgatttattttctacg

SEQ ID NO: 19439 - protein, 503 aa, Glycine max
GVVRDVFLPWYNAYRFLVQNAKRVEVEGLAPFVPFDQATLLNSTNVLDQWINSATQSLIHFVRQEMDGYRLYTVVPYLLKFLDNLTNIYVRFNRKRLKGRSGEEDCRIALSTLYHVLLLSCKVMAPFTPFFTEVLYQNMRKVSNGSEESIHYCSFPTEEGRRGERIEQSVSRMMTIIDLARNIRERHNKPLKTPLREMVIVHPDADFLDDINGKLKEYVLEELNVRSLVPCNDTLKYATLRAEPEFSVLGKRLGKSMGIVAKEIKAMSQENILAFENAGEVVIANQCLKLTDIKVLRDFKRPDGMTEKEVDAAGDGDVLVILDLRPDESLFEAGAAREIVNRIQKLRKKVALDPTDMVEVYFESLDDDKSVSQRVLHSQESYIRDAIGSQLLPNSLMPAHAVVLGEERFHGIASMSFGITLTRPALMFNQKAILSLFTGDAKSAYKLQTYLLSRDHLKLKSEFQDGNGKKIVDSIEQLPAVEVVLGQHVFFTVGDYSLAGKSD

SEQ ID NO: 19440 - protein, 438 aa, Glycine max
MDGYRLYTVVPYLLKFLDNLTNIYVRFNRKRLKGRSGEEDCRIALSTLYHVLLLSCKVMAPFTPFFTEVLYQNMRKVSNGSEESIHYCSFPTEEGRRGERIEQSVSRMMTIIDLARNIRERHNKPLKTPLREMVIVHPDADFLDDINGKLKEYVLEELNVRSLVPCNDTLKYATLRAEPEFSVLGKRLGKSMGIVAKEIKAMSQENILAFENAGEVVIANQCLKLTDIKVLRDFKRPDGMTEKEVDAAGDGDVLVILDLRPDESLFEAGAAREIVNRIQKLRKKVALDPTDMVEVYFESLDDDKSVSQRVLHSQESYIRDAIGSQLLPNSLMPAHAVVLGEERFHGIASMSFGITLTRPALMFNQKAILSLFTGDAKSAYKLQTYLLSRDHLKLKSEFQDGNGKKIVDSIEQLPAVEVVLGQHVFFTVGDYSLAGKSD

SEQ ID NO: 19441 - protein, 380 aa, Glycine max
MAPFTPFFTEVLYQNMRKVSNGSEESIHYCSFPTEEGRRGERIEQSVSRMMTIIDLARNIRERHNKPLKTPLREMVIVHPDADFLDDINGKLKEYVLEELNVRSLVPCNDTLKYATLRAEPEFSVLGKRLGKSMGIVAKEIKAMSQENILAFENAGEVVIANQCLKLTDIKVLRDFKRPDGMTEKEVDAAGDGDVLVILDLRPDESLFEAGAAREIVNRIQKLRKKVALDPTDMVEVYFESLDDDKSVSQRVLHSQESYIRDAIGSQLLPNSLMPAHAVVLGEERFHGIASMSFGITLTRPALMFNQKAILSLFTGDAKSAYKLQTYLLSRDHLKLKSEFQDGNGKKIVDSIEQLPAVEVVLGQHVFFTVGDYSLAGKSD

SEQ ID NO: 19442 - DNA, 1269 bp, Glycine max
tatttccatcatttcgtgacaacaacaacataaccctctcgcccccaacacacacctcttctttttaagggtttatcttaaaccaggatttttggcactaatttctctatgggagaagcaccagcattgcttgttgatgacgtgcaggatggggctctgaatggccttgaattgaaaaatggaacttgcaaaacaactgctactgttggcgataagatgtatgtcattggtggagctgatgatggaactttgtccattgaagttcaaatttttgacggtagtcttggagaatggtcagtttaaggtttctccgcttcatagctgcctttctcagactcttgctgctgacatctatttaaaattgcagggttcgtcccactgtgcgtggcaccaaacccgtgtcgtgcaatggcctctcagcagtgcctttggaagaccgaatactgattcttaagaagggttctaagcctgatgatcagatatggttcctggagattgacacccaatatgttaggcagcagcaaaaaattttggggactgaggtagttgcatggagtaaaggtgtgataggcaatgctgagaagcctgttgttattagtggtccttctggagtaggcaaaggaacactgatatcaatgcttatgaaggaatttccatctatgtttggtttttccgtgagccacaccacccgtgctccaagaggtatcgagaaagatggggttcattaccattttactgagaagagtataatggagaaagagatcaaagaaggaaagtttcttgagtttgcttctgtccatggcaatctgtatggaactagtgttgaggctgtcgaactggtagcagatgcagggaaaagatgtattcttgatattgacgttcaaggtgcaagatctgtgagggctagtacgcttgaagctatattcatctttatctgtcccccatcaatggaggagctggagaagcgccttcgtgaccgggggacagagactgaggaacagatcctgaagcgactacgaaatgctgatgctgagattgagcaagggaaatcttctcaaatatttgatttcatcctatacaatgacaatcttgaggagtgtcatgagagacttaagaaactattgggacttgacggttttgtcactgctccacctatatcaggccctatagagattgatttaccaatggatcattcagtgtcaaaaattgataacaaaatcatcataaactgcatctcctcaggagagaaggaatcaaagaatttggtca

SEQ ID NO: 19443 - protein, 211 aa, Glycine max
MLMKEFPSMFGFSVSHTTRAPRGIEKDGVHYHFTEKSIMEKEIKEGKFLEFASVHGNLYGTSVEAVELVADAGKRCILDIDVQGARSVRASTLEAIFIFICPPSMEELEKRLRDRGTETEEQILKRLRNADAEIEQGKSSQIFDFILYNDNLEECHERLKKLLGLDGFVTAPPISGPIEIDLPMDHSVSKIDNKIIINCISSGEKESKNLV

SEQ ID NO: 19444 - protein, 209 aa, Glycine max
MKEFPSMFGFSVSHTTRAPRGIEKDGVHYHFTEKSIMEKEIKEGKFLEFASVHGNLYGTSVEAVELVADAGKRCILDIDVQGARSVRASTLEAIFIFICPPSMEELEKRLRDRGTETEEQILKRLRNADAEIEQGKSSQIFDFILYNDNLEECHERLKKLLGLDGFVTAPPISGPIEIDLPMDHSVSKIDNKIIINCISSGEKESKNLV

SEQ ID NO: 19445 - protein, 203 aa, Glycine max
MFGFSVSHTTRAPRGIEKDGVHYHFTEKSIMEKEIKEGKFLEFASVHGNLYGTSVEAVELVADAGKRCILDIDVQGARSVRASTLEAIFIFICPPSMEELEKRLRDRGTETEEQILKRLRNADAEIEQGKSSQIFDFILYNDNLEECHERLKKLLGLDGFVTAPPISGPIEIDLPMDHSVSKIDNKIIINCISSGEKESKNLV

SEQ ID NO: 19446 - DNA, 1515 bp, Glycine max
tttcttctgtagatccatctatctagcttcggagctgcaaatggacgtcgcagtcactgccttccggtcaccgctgatcatcctccgaagaccggtcaacgagtctgcctcagctcggttcggttccacttttgggttttccagaaagcagcaacggttcagttcagtatgtatccccaaacacaagcacaagcaaggtcgtagaagagggtttgtagttagagcttctgcatcctcatctccggagtcggatgatgccaagattgctcctcttcagtttgaatcctcaattgggcagttcctttctcagattttgaaagatcatccgcatcttgtgcctgctgccgttgaccagcagctccagcaactccaaactgaccgcgatgctcatcaacaaaacgaacaaccttctgcttcaaccactgatttagttttgtacaggagaattgctgaggtgaaggctaatgaaaggaggaaagctctggaagagatcttgtatgcattggtagtgcagaagttcatggatgctaatatttctttgataccctctgtaaccccagatctttctggtaaggttgatttgtggccaaatgaagatggtaaacttgagctgcttcactcacacgaagcatatgagatgattcaaaaccacctggctctcattctcggtaacagagctggagatttaacatcaatagctgaaatcagcaaattcagggtagggcaggtctacgcagcatcagtgatgtatggttattttcttagacgagttgaccaaaggttccagttggagaagacaatgaaagttcttccaaatgcaacagaaaaagagaatagtgctcatcaaactacaatggacaatgcaagacccagtattgaagaggacacttctcaagtgatgtctcatcctgaagtatctacctggcctggtggtgatgtccgtcccggtggatttggctatggtgtaaaggcaaccaggttgcgtaactacgtgatgtcctttgatggtgatacactacaaagatatgcaacaattagatccaaagaggctgtcagcatcatcgagaagcacacagaagcattgtttggaagacctgaaattgttgtaacacctgagggggcagtctctaaggatgaaaacatcaaaattagctttggtggtttaaagaagcttgttttagaggctgtgacatttggttcttttctctgggatgttgagagctatgtggactcaaggtaccattttgtgttgaactgagtaaatctttatatgtgtacccttttagatcccaccaggtgggagggaacctcgtgcattcagttgtccttttgagttctgtttgctctcatacatcacaaggcatagtttatagtgtgttggtactgactgatggagtaaatttgaatgtaacttcggtgttaaaagtccaaatattgtttcactaattaatatgtatatactgtagtggtagtggctctggatttcactaataaagggaagcttattttctagtt

SEQ ID NO: 19447 - protein, 418 aa, Glycine max
FFCRSIYLASELQMDVAVTAFRSPLIILRRPVNESASARFGSTFGFSRKQQRFSSVCIPKHKHKQGRRRGFVVRASASSSPESDDAKIAPLQFESSIGQFLSQILKDHPHLVPAAVDQQLQQLQTDRDAHQQNEQPSASTTDLVLYRRIAEVKANERRKALEEILYALVVQKFMDANISLIPSVTPDLSGKVDLWPNEDGKLELLHSHEAYEMIQNHLALILGNRAGDLTSIAEISKFRVGQVYAASVMYGYFLRRVDQRFQLEKTMKVLPNATEKENSAHQTTMDNARPSIEEDTSQVMSHPEVSTWPGGDVRPGGFGYGVKATRLRNYVMSFDGDTLQRYATIRSKEAVSIIEKHTEALFGRPEIVVTPEGAVSKDENIKISFGGLKKLVLEAVTFGSFLWDVESYVDSRYHFVLN

SEQ ID NO: 19448 - protein, 405 aa, Glycine max
MDVAVTAFRSPLIILRRPVNESASARFGSTFGFSRKQQRFSSVCIPKHKHKQGRRRGFVVRASASSSPESDDAKIAPLQFESSIGQFLSQILKDHPHLVPAAVDQQLQQLQTDRDAHQQNEQPSASTTDLVLYRRIAEVKANERRKALEEILYALVVQKFMDANISLIPSVTPDLSGKVDLWPNEDGKLELLHSHEAYEMIQNHLALILGNRAGDLTSIAEISKFRVGQVYAASVMYGYFLRRVDQRFQLEKTMKVLPNATEKENSAHQTTMDNARPSIEEDTSQVMSHPEVSTWPGGDVRPGGFGYGVKATRLRNYVMSFDGDTLQRYATIRSKEAVSIIEKHTEALFGRPEIVVTPEGAVSKDENIKISFGGLKKLVLEAVTFGSFLWDVESYVDSRYHFVLN

SEQ ID NO: 19449 - protein, 245 aa, Glycine max
MDANISLIPSVTPDLSGKVDLWPNEDGKLELLHSHEAYEMIQNHLALILGNRAGDLTSIAEISKFRVGQVYAASVMYGYFLRRVDQRFQLEKTMKVLPNATEKENSAHQTTMDNARPSIEEDTSQVMSHPEVSTWPGGDVRPGGFGYGVKATRLRNYVMSFDGDTLQRYATIRSKEAVSIIEKHTEALFGRPEIVVTPEGAVSKDENIKISFGGLKKLVLEAVTFGSFLWDVESYVDSRYHFVLN

SEQ ID NO: 19450 - DNA, 2150 bp, Glycine max
gagaacccatttttcattttctctctcatcttgtagtgctagttgttcttttgagaatagtgggtgtttttgtgcttaaaactataatgtctgtcttaaagtacagaaatctttttctttgtctggtttcatggttgtgctgttgttgtgtggctgtggcttcgagtgagagtagtattggttccaaagaccttgatcagacaccaacatgggctgtggctggtgtctgcactgttttcatcttgatatccataactctggagaaaagccttcacaaagtgggaacgtggctaagggaaaaacacaagaaagctttgcttgaggctttggaaaaggtcaaagctgagttgatggttcttggtttcctttcactgcttctgactttcgggcagagttacattgttagaatatgcattcctatggatgtggcagacaaattgttgccatgtccttatgttggtaacgacaagggatcaagtagtgaagaggaacaccgtaggaaacttctttcttatgaacgcagatatttgtcagatgatgctaccccttaccaatgtaaggagagacatcagccacttatatctggcaatggattgcaccagttacacatcctcgtatttttcttagcagtcctacatgtgttttacagtgccattacaatgcttcttgggagattaaagattcgtggatggaaggcatgggaggcggagacttcatctcatgggtacgagttcgccaatgatccttcaagattccggttgacacatgaaacatcatttgtgaaagctcacgcttctttttggacaagatattcaatcttcttctatataggatgcttctttagacaattttataggtctgtaggcaaggctgactacttggctttgcgcaatggatttatcacggttcacctggctcctggaagtaaatttaacttccaaaagtatatcaaaagatccttggaggatgacttcaaggtagttgttggagtcagtcctgtcctctgggcatcgtttgttgtttttctgctcctaaatgttaacggatggcatgctatgttttgggcatccttaattcctgttgtgataattttggctgttggaacaaaacttcaagctgcactggcaaacatggctattgaaattacagaaagacatgctgttgtccaagggattcctcttgttcaaggctcagacagatatttttggtttggtcggcctcaattagttcttcatcttatccattttgctttgttccagaatgcgttccaaataacatatttcttgtggatatggtattcttttgggctgagaaattgtttccatgctgactacaagcttgcagtagtgaaagtagctttagggcttggggtgctatgtctctgcagctacatcacccttccattatatgctcttgttactcagatgggctcaagaatgaaaaaatcaatatttgacgaacaaacatcgaaggcgttgaagaaatggcacatggctgtgaaaaagaagcaaggagtgaaacttggaaattccaaggtgcgagccatggatggaagcagcactgattcaacaatacactcttctggccccacactacaccgttacaaaactaccggtcactcaactcacttcgtatcaaactacgatgaccaagatgattaccattctgataccgagttgtcttccatttcaccaacaccaaacttgatagtaagagtggaccatgatgaggaagaagcaaaagaaaatgaacaccacccaacagccaacaatcaagaggcccctttacatttgtcaagcctggaaagaagcatgaaatagcatcagaagttactccattcaaccattctttgttcttttacagctttctagatattgttatacttgatcatgatatagtcagttttgtacattcttgttcttaaaaacacttgccgggcattggaaacttttaagcttgctcaaaatcatgcttatagccttattatattgctttgattcgtgtgcttgagcaaaaggatcgttaggaacaattagaggacagaattgttaggtatattatgtgttatatgttgaagggtatatgtaaatcccaattataatataagctttttggccaagtagagcatatagaagaatatacattcagtc

SEQ ID NO: 19451 - protein, 605 aa, Glycine max
EPIFHFLSHLVVLVVLLRIVGVFVLKTIMSVLKYRNLFLCLVSWLCCCCVAVASSESSIGSKDLDQTPTWAVAGVCTVFILISITLEKSLHKVGTWLREKHKKALLEALEKVKAELMVLGFLSLLLTFGQSYIVRICIPMDVADKLLPCPYVGNDKGSSSEEEHRRKLLSYERRYLSDDATPYQCKERHQPLISGNGLHQLHILVFFLAVLHVFYSAITMLLGRLKIRGWKAWEAETSSHGYEFANDPSRFRLTHETSFVKAHASFWTRYSIFFYIGCFFRQFYRSVGKADYLALRNGFITVHLAPGSKFNFQKYIKRSLEDDFKVVVGVSPVLWASFVVFLLLNVNGWHAMFWASLIPVVIILAVGTKLQAALANMAIEITERHAVVQGIPLVQGSDRYFWFGRPQLVLHLIHFALFQNAFQITYFLWIWYSFGLRNCFHADYKLAVVKVALGLGVLCLCSYITLPLYALVTQMGSRMKKSIFDEQTSKALKKWHMAVKKKQGVKLGNSKVRAMDGSSTDSTIHSSGPTLHRYKTTGHSTHFVSNYDDQDDYHSDTELSSISPTPNLIVRVDHDEEEAKENEHHPTANNQEAPLHLSSLERSMK

SEQ ID NO: 19452 - protein, 577 aa, Glycine max
MSVLKYRNLFLCLVSWLCCCCVAVASSESSIGSKDLDQTPTWAVAGVCTVFILISITLEKSLHKVGTWLREKHKKALLEALEKVKAELMVLGFLSLLLTFGQSYIVRICIPMDVADKLLPCPYVGNDKGSSSEEEHRRKLLSYERRYLSDDATPYQCKERHQPLISGNGLHQLHILVFFLAVLHVFYSAITMLLGRLKIRGWKAWEAETSSHGYEFANDPSRFRLTHETSFVKAHASFWTRYSIFFYIGCFFRQFYRSVGKADYLALRNGFITVHLAPGSKFNFQKYIKRSLEDDFKVVVGVSPVLWASFVVFLLLNVNGWHAMFWASLIPVVIILAVGTKLQAALANMAIEITERHAVVQGIPLVQGSDRYFWFGRPQLVLHLIHFALFQNAFQITYFLWIWYSFGLRNCFHADYKLAVVKVALGLGVLCLCSYITLPLYALVTQMGSRMKKSIFDEQTSKALKKWHMAVKKKQGVKLGNSKVRAMDGSSTDSTIHSSGPTLHRYKTTGHSTHFVSNYDDQDDYHSDTELSSISPTPNLIVRVDHDEEEAKENEHHPTANNQEAPLHLSSLERSMK

SEQ ID NO: 19453 - protein, 489 aa, Glycine max
MVLGFLSLLLTFGQSYIVRICIPMDVADKLLPCPYVGNDKGSSSEEEHRRKLLSYERRYLSDDATPYQCKERHQPLISGNGLHQLHILVFFLAVLHVFYSAITMLLGRLKIRGWKAWEAETSSHGYEFANDPSRFRLTHETSFVKAHASFWTRYSIFFYIGCFFRQFYRSVGKADYLALRNGFITVHLAPGSKFNFQKYIKRSLEDDFKVVVGVSPVLWASFVVFLLLNVNGWHAMFWASLIPVVIILAVGTKLQAALANMAIEITERHAVVQGIPLVQGSDRYFWFGRPQLVLHLIHFALFQNAFQITYFLWIWYSFGLRNCFHADYKLAVVKVALGLGVLCLCSYITLPLYALVTQMGSRMKKSIFDEQTSKALKKWHMAVKKKQGVKLGNSKVRAMDGSSTDSTIHSSGPTLHRYKTTGHSTHFVSNYDDQDDYHSDTELSSISPTPNLIVRVDHDEEEAKENEHHPTANNQEAPLHLSSLERSMK

SEQ ID NO: 19454 - DNA, 2528 bp, Glycine max
gcgagtttcttcttctgaaccgctttcctgcattttcgccaaactccttctcacaagttatttattactttgaactccataaatagcccccggtttctgctcgaacaaccgttacaagaaatagaattaactattgctttttattctttcctttagtttttgaattttgataatttcattgtgactgaatggatataatttgataatttttcgcagatcgagctttgagcatttgaggcatttcactgataactgatacagattaccgaggacattttgtttttcgttgttggttgtgcttattgtttttggttggatttgatttgagttatttgtcaaaatacgtataactcataataagcatggcaagcactatgcaactaagttgggttagtaagagcacggtccccgtggctttgagtagaagagtgtgttgtcaatgtcaaccacccctgtggctgccatggcgaattgggtttgttactcccgttccccttgtgaggagagtttcgagtgagagggtggcggcactcagggttagttgcagcaaggaaactgaaagtgatgtggttgagggtgaaagtgggggctttgcggaaactgaaatgagttacacatgtgtcatgaagtttggtggctcctcggttgccaatgctgaaagaatgagagaggttgccaaccttattctgagcttcccggaagagaggccaataattgttctctctgccatgggaaagacaactaacatgcttttgctggctggagaaaaagctgtaagctgtggagtaactaatgctgatagtattgatgagctcaacataataaaagatcttcatctcaggactgtggaacagcttggagtggacagaaatgttattgagaagcatctagaagaattggagcaacttctaaaggggatagctatgatgaaagagttgactccacggactcaagattatttagtttcatttggagagtgcatgtccactaggatatttgctgcatatcttaatacattaggagttaaggcccgccaatatgatgcatttgagatgggtattataacaactgatgacttcacaaatgctgacattttggaagcaacatatcctgctgttgcaaagaggttacatagtgattgggtttctgatcctgctattccaattgttacaggcttccttggaaaggcacgaaaatcatgtgcggtgacaacattgggtagaggtggaagtgatttaactgctacaacaattgggaaagcgctagggttgccagaaatccaggtatggaaagatgttgatggtgttctaacctgtgatccaaatatatgcccacaagcaaaacctgttccatatttgacatttgatgaggctgctgaacttgcatactttggtgctcaggtcctccatccacagtctatgagaccggctagggaaagtgatattcctgttagggttaaaaattcatacaaccctaaagctccaggtactctgattgctaagacaagggatatgagcaaggcattattaacaagcattgttttgaaacgtaatgtgaccatgttagatattgtaagcactcgcatgcttggtcagtttgggttccttgctaaggtattttcaatattcgaagagttaggcatatcagttgatgttgtagctacaagtgaagttagtatttccttgacattggatccatcaaagctatggagcagagagctaattcaacaggaacttgactatgttgtcgaagaactggaaaaaattgctgtggtaaatctcttaaagaccagatccataatctctctcattggaaatgttcagaagtcatcactaatattggagaaggttttgtgttatattatctccctttgaatattattctgagaaatattattaaaaagttctattttgatgctttgatgttctgtccctatcttggagcatggtcaaaattgcatattgcaataagttcctgggcttgtttgatgcacttttttggactaagttgattctcatcaacttgcgttcttctgtaataagctaatgttttgctcttttattgactttaaaatttactgattagccttttgttgcaggcctttcatgttcttcgaactcttgggatcactgttcaaatgatctctcagggtgcatctaaggtgaatatctcgttagttataaatgacagtgaagcagaccagtgtgtcagggctctccacaaagccttctttgagagcgaactctctgaattagagaatgaatgcatacctagaaatggttcggttcctgcattatcttagcggtatacttttgttttgccaatatagcagattaatatcttatcttataggttaagaaattttttggctaggaggaataacgatatattagtacagtatttattagtatgttattgacagagtaaacctttgtatattctggtcgcctcctctataagggggtttgaccaggtgcaagcagttatttatattttattgtgagtttgaataatcttcttaaaaaaag

SEQ ID NO: 19455 - protein, 503 aa, Glycine max
MASTMQLSWVSKSTVPVALSRRVCCQCQPPLWLPWRIGFVTPVPLVRRVSSERVAALRVSCSKETESDVVEGESGGFAETEMSYTCVMKFGGSSVANAERMREVANLILSFPEERPIIVLSAMGKTTNMLLLAGEKAVSCGVTNADSIDELNIIKDLHLRTVEQLGVDRNVIEKHLEELEQLLKGIAMMKELTPRTQDYLVSFGECMSTRIFAAYLNTLGVKARQYDAFEMGIITTDDFTNADILEATYPAVAKRLHSDWVSDPAIPIVTGFLGKARKSCAVTTLGRGGSDLTATTIGKALGLPEIQVWKDVDGVLTCDPNICPQAKPVPYLTFDEAAELAYFGAQVLHPQSMRPARESDIPVRVKNSYNPKAPGTLIAKTRDMSKALLTSIVLKRNVTMLDIVSTRMLGQFGFLAKVFSIFEELGISVDVVATSEVSISLTLDPSKLWSRELIQQELDYVVEELEKIAVVNLLKTRSIISLIGNVQKSSLILEKVLCYIISL

SEQ ID NO: 19456 - protein, 499 aa, Glycine max
MQLSWVSKSTVPVALSRRVCCQCQPPLWLPWRIGFVTPVPLVRRVSSERVAALRVSCSKETESDVVEGESGGFAETEMSYTCVMKFGGSSVANAERMREVANLILSFPEERPIIVLSAMGKTTNMLLLAGEKAVSCGVTNADSIDELNIIKDLHLRTVEQLGVDRNVIEKHLEELEQLLKGIAMMKELTPRTQDYLVSFGECMSTRIFAAYLNTLGVKARQYDAFEMGIITTDDFTNADILEATYPAVAKRLHSDWVSDPAIPIVTGFLGKARKSCAVTTLGRGGSDLTATTIGKALGLPEIQVWKDVDGVLTCDPNICPQAKPVPYLTFDEAAELAYFGAQVLHPQSMRPARESDIPVRVKNSYNPKAPGTLIAKTRDMSKALLTSIVLKRNVTMLDIVSTRMLGQFGFLAKVFSIFEELGISVDVVATSEVSISLTLDPSKLWSRELIQQELDYVVEELEKIAVVNLLKTRSIISLIGNVQKSSLILEKVLCYIISL

SEQ ID NO: 19457 - protein, 422 aa, Glycine max
MSYTCVMKFGGSSVANAERMREVANLILSFPEERPIIVLSAMGKTTNMLLLAGEKAVSCGVTNADSIDELNIIKDLHLRTVEQLGVDRNVIEKHLEELEQLLKGIAMMKELTPRTQDYLVSFGECMSTRIFAAYLNTLGVKARQYDAFEMGIITTDDFTNADILEATYPAVAKRLHSDWVSDPAIPIVTGFLGKARKSCAVTTLGRGGSDLTATTIGKALGLPEIQVWKDVDGVLTCDPNICPQAKPVPYLTFDEAAELAYFGAQVLHPQSMRPARESDIPVRVKNSYNPKAPGTLIAKTRDMSKALLTSIVLKRNVTMLDIVSTRMLGQFGFLAKVFSIFEELGISVDVVATSEVSISLTLDPSKLWSRELIQQELDYVVEELEKIAVVNLLKTRSIISLIGNVQKSSLILEKVLCYIISL

SEQ ID NO: 19458 - DNA, 1505 bp, Glycine max
ttgcttgaacacagtgccgaggttgaaaccgttgatgatgctggctacactctgttgcattgtgatgctgaggtagaccatttgcaagttgccctctacttgatcgctcatgattcctagaaagattggagtttccattccaatgaaggctaccttatttatgacatacataatggttgatggatgggctggaattgctggtgagattctcagattaaagccattggttatataccatctcagaaacatgttcttatcaaatggttacctggatgaaggggttaaagaaattggtgcatttgtggcttcaagggggtcgctttagcttctgggatcttttggatttggacaaaattccagggaaaggatgggattgtggcaaatttctatagcctacattcatggatgagtttggcttttgtatccctcttcggatcccagaaactaaagcatacaattcacaccaccaaagctggtatgaagttcctgcaaatgaaatttcatgaggagttctccaatctagagtagttagtagtgagtagtaagagggaggaagcagaagtgaagcgatgaatgccctagatcgttacgagcgtttcgtcgtccctgaagggtttcttatgagagggacacgaagatcatcaatgcggcgtccttcaccattgagagagaggagcacaccatcgacaacatcctacgcatgcagcttcacagagaccccaatgtcttgtttgtcggatacaagcttcctcatcctcttcaatacaaaattattgtcaggtgatattcttggtcgcacagttcataaatttcaccaatatggaacatagaaaatagccaagggccatagagcaccaaaggaagcatgttgatgttgatggtttcttggtaagagtgataacttgcaaccatacgggcaagacaggttccatgataagatctttgactgcacatggttctagaattgttgttttatgttcagatcatttaggagacaatgcgagtccaaatttcaacttgagaccaacatgtgcttatttcatcactgaggtagcaaaatgagcatccggaagggctcacatagtacaggcttccatagctgatggtgttttgtcaggtaatactgaccccaagaaaaatattgagttgctacaagatgctattgcttctattactctcttaggaagcataatcacgtccatccctttatcgaggcaagcatgttcatagcttagctcatgcaacttctggatatcacaaagttcttgaagaaaatagcaaactatacaatcaagttcatgatcttaagggtaaatttctgattggttggttgctataagcttagtatgagttatatctttcacacctttctaaagattttgttccttttattgtgcctccctgaaatggttaggcctcgtggagatatgatataggtataggttggataaaatttaattcgactcgacacatttttatacttaataaaaaaattcatttacttt

SEQ ID NO: 19459 - protein, 86 aa, Glycine max
MNALDRYERFVVPEGFLMRGTRRSSMRRPSPLRERSTPSTTSYACSFTETPMSCLSDTSFLILFNTKLLSGDILGRTVHKFHQYGT

SEQ ID NO: 19460 - protein, 71 aa, Glycine max
MIPRKIGVSIPMKATLFMTYIMVDGWAGIAGEILRLKPLVIYHLRNMFLSNGYLDEGVKEIGAFVASRGSL

SEQ ID NO: 19461 - protein, 69 aa, Glycine max
MRGTRRSSMRRPSPLRERSTPSTTSYACSFTETPMSCLSDTSFLILFNTKLLSGDILGRTVHKFHQYGT

SEQ ID NO: 19462 - DNA, 1159 bp, Glycine max
agtcacacaagaagcccaacaagccagatcagaattccatgaaagcaagaggcagaagctggagcgacagccgtggtgccgtggaagtggcgagtcatggaggcagagttggtcagtgcaaagttgtgcgaagcgaagccaggctacgcagacaagcaggccgagggcgaaggcggtcgggtgccacagatggaggcgctgggacagggtggtgaggtgaagaggacggggtcgagagcagctacagtgcgtgcatctgtcccctcctttgttttttcaccaagcctacctaaaatctatcaaattattcagggtaagatagccgaatacatctacctctggttaattttattttttttttaacatgcaagtactttattcagctgattgggtcttcttttacttccgttcctcaattgtattcattggctgatcgccatgcatctagaaggtgatgtcctgaagcatctatcaacatggattatagaccgaattatcaacaagtatggtgttagccagtgttaccgtgctctaaaactatgcaatagtgatctcaaagaaccataaatatccaacatagtggtggactttggcattttgtgtttctgttatgactttcctttgaatattttgttaattttctaattaatctttccttaccagcactgtcagagtgtgattcattatagaaaatttgattgaagatctcaatgatggcaattctttacatatgtatagttgttcagctcctgctttctgaaactatacaggaaatttgattgaagatatgattgatggcgattctagaaaagtgtttgctccatcagattcacataaaaagaaattgcacaactgcatcatggctgtccagtatatgaaggaagctccggttctgatatctgattcagatgcagtcagagtttcagcagaatatattcttaatggcgacaaggaactaattcttgcatttctatggaatatgttcattcatatgcaggttaatctacacatgtcgttcagtatctcattactcatgttgaagttttatactgttttatttcacctttcgtttgtactgaagaggtggactaatggactgactttgtatttttcactcactgcataggcagcattacagtagagatatgttgtacttctc

SEQ ID NO: 19463 - protein, 112 aa, Glycine max
MIDGDSRKVFAPSDSHKKKLHNCIMAVQYMKEAPVLISDSDAVRVSAEYILNGDKELILAFLWNMFIHMQVNLHMSFSISLLMLKFYTVLFHLSFVLKRWTNGLTLYFSLTA

SEQ ID NO: 19464 - protein, 88 aa, Glycine max
MEAELVSAKLCEAKPGYADKQAEGEGGRVPQMEALGQGGEVKRTGSRAATVRASVPSFVFSPSLPKIYQIIQGKIAEYIYLWLILFFF

SEQ ID NO: 19465 - protein, 88 aa, Glycine max
MAVQYMKEAPVLISDSDAVRVSAEYILNGDKELILAFLWNMFIHMQVNLHMSFSISLLMLKFYTVLFHLSFVLKRWTNGLTLYFSLTA

SEQ ID NO: 19466 - DNA, 1445 bp, Glycine max
atatcctctctctctctctctctctctctctgaacaagagcctgcagccagagttagagggaaatcaagcacggctcaatcatcgaatcatagagaacacatacagaagaaggaaaagtggaaccctggaagctgatattgtaggaaggtttgcaagaaaacggattttgttttgagatatatgcatgtgcaagtgcatagggaaattaacaaaaaataagatgacatggtgcaatgactctgacgagaatagggttattgaatcaatcacgccaagaataactattactcctaacactgatgacaaaaagctcacccaagaaattagaaccacagcatgcccctcgtgcggccataacattgcattcaaagataagggtggaatccatgacttgccggggttaccagctggagttaagtttgacccaaatgaccaagaaatattagaacatttggaggcaaaagttgcgtctgatgcatgcaagcttcatcccctaattgatgagttcataccaacgctcgaaggcgagaatgggatctgttatacacacccagaaaaactaccaggagttagcaaagatgggcagatccgccatttctttcacaggccctcaaaagcatacacgactggaacaaggaaaagaagaaaggttcacactgatgatgaaggaattgaaacaagatggcacaaaacgggaaaaactagagcagtttttgcatctggtggtgcagtgaaaggttttaagaaaatactagtactctacaccaactatggaaggcaaaagaagcctgagaaaacttactgggtgatgcatcaataccatcttggcaatactgaagaagagaaagatggagaactagttgtttcaaaagtcttctaccaaacacaacctagacaatgtgttaatcccattatcataaaggacccgtacgaaaaaatgttgaatggtggaagtgtccaagacagcacaaatacatcaataactaaaactactgcaactcttttggattgctacaatgctccttacatagattatgatcatgcccatgcgagtcataatagggaaagttcctcacaactaataattcccagctcggttgttcaggttgatggctcttatattcgctcaacaatggatgcaaagaaagcaagatttgaaagtaacactgggaagagcttctaggtagacaagcagtgacaatgatttacagcatgtcctccatattgtttccattactaattgagtaatagtatttatatgtgaaattagactgaaggaattccaagggttggaaaaatataggtttttccttgaattattgagatcaatatggcgcaggcatgatggactttcccataattgaccctggttgaagttgagagacaagcaagaaggtatatatatttgcggtactgtagtttgattttaattttagggtacatg

SEQ ID NO: 19467 - protein, 332 aa, Glycine max
MCKCIGKLTKNKMTWCNDSDENRVIESITPRITITPNTDDKKLTQEIRTTACPSCGHNIAFKDKGGIHDLPGLPAGVKFDPNDQEILEHLEAKVASDACKLHPLIDEFIPTLEGENGICYTHPEKLPGVSKDGQIRHFFHRPSKAYTTGTRKRRKVHTDDEGIETRWHKTGKTRAVFASGGAVKGFKKILVLYTNYGRQKKPEKTYWVMHQYHLGNTEEEKDGELVVSKVFYQTQPRQCVNPIIIKDPYEKMLNGGSVQDSTNTSITKTTATLLDCYNAPYIDYDHAHASHNRESSSQLIIPSSVVQVDGSYIRSTMDAKKARFESNTGKSF

SEQ ID NO: 19468 - protein, 320 aa, Glycine max
MTWCNDSDENRVIESITPRITITPNTDDKKLTQEIRTTACPSCGHNIAFKDKGGIHDLPGLPAGVKFDPNDQEILEHLEAKVASDACKLHPLIDEFIPTLEGENGICYTHPEKLPGVSKDGQIRHFFHRPSKAYTTGTRKRRKVHTDDEGIETRWHKTGKTRAVFASGGAVKGFKKILVLYTNYGRQKKPEKTYWVMHQYHLGNTEEEKDGELVVSKVFYQTQPRQCVNPIIIKDPYEKMLNGGSVQDSTNTSITKTTATLLDCYNAPYIDYDHAHASHNRESSSQLIIPSSVVQVDGSYIRSTMDAKKARFESNTGKSF

SEQ ID NO: 19469 - DNA, 1490 bp, Glycine max
aattaatgagtacttgattgcatcagatctgccagatgtggatatcaccacaacaggtgttacaagctttacaggccctgaaggaccatttgatgttgaggtttttgattcagcaagtgattatataaaattgatgaagtcaatttttgattttgaatctatcaggaaactgctgtcatctcctaaattcacattctgttatgatgcactacatggggttggtggagcatatgcaaagagtatatttgtggatgagcttggggcacaagaaagctctttactgaactgtacaccaaaggaagactttggaggaggacacccagaccccaatttgacatatgcaaaagagttggttgctcgtatgggattgggcaaatccgaaccacaagatgatcccccagagtttggtgctgcttctgatggtgatgcagatcgcaacatgatacttggtaaaaggttttttgtcactccttcagattccgtggccattatcgctgcaaatgccgttgaagctataccatacttttctgctggtttaaagggtgttgccaggagcatgccaacctctgctgccctggatgttgtagccaaacatctgaatttgaaattttttgaggtccccacgggttggaagttctttggtaatttaatggatgctggattatgttcagtctgtggtgaagaaagttttgggactggttctgaccatattcgtgagaaagatggaatctgggcagttttggcctggctatctatacttgcatataaaaataaagataaacttgaagacaagcttgtcactgttgaagacatagttcgccagcattgggctacttatgggcgccattattatactcgatatgactatgaaaatgtggatgcaggtgcagcaaaggaactgatggcatatttggtcaagctgcagtcctcactttcagaagtcaatcagattattaaggggataaggtcagatgtttcgaatgttgttcacggtgatgaatttgagtacaatgatcctgtggatggttccatctcatcacatcagggaatccgatatttgtttgaggatggatcacgattgattttccgcctatctggaactggatcagaaggtgcaacaattcgactatacattgagcaatatgagaaggatccatcaaagattgggagactttcaaatgaagcccttgctcctcttgtggaagttgcattgaaactttcgaagatggaagaattcactggtcgatccgctccaacagtcattacatgaacacatacaggtggaaggtggttagatcctgaagtttctcccagtcatttcttctttgttcagtttcttacggatggccgaacactagtgttggttgtttgcagcctttgctatgggcacttgagtggaatttgatcagtgtactttatcaaaattttgatgtgctgaataagttgcaactgccgagtgctaattctattacatagtcttaatatgatat

SEQ ID NO: 19470 - protein, 422 aa, Glycine max
INEYLIASDLPDVDITTTGVTSFTGPEGPFDVEVFDSASDYIKLMKSIFDFESIRKLLSSPKFTFCYDALHGVGGAYAKSIFVDELGAQESSLLNCTPKEDFGGGHPDPNLTYAKELVARMGLGKSEPQDDPPEFGAASDGDADRNMILGKRFFVTPSDSVAIIAANAVEAIPYFSAGLKGVARSMPTSAALDVVAKHLNLKFFEVPTGWKFFGNLMDAGLCSVCGEESFGTGSDHIREKDGIWAVLAWLSILAYKNKDKLEDKLVTVEDIVRQHWATYGRHYYTRYDYENVDAGAAKELMAYLVKLQSSLSEVNQIIKGIRSDVSNVVHGDEFEYNDPVDGSISSHQGIRYLFEDGSRLIFRLSGTGSEGATIRLYIEQYEKDPSKIGRLSNEALAPLVEVALKLSKMEEFTGRSAPTVIT

SEQ ID NO: 19471 - protein, 378 aa, Glycine max
MKSIFDFESIRKLLSSPKFTFCYDALHGVGGAYAKSIFVDELGAQESSLLNCTPKEDFGGGHPDPNLTYAKELVARMGLGKSEPQDDPPEFGAASDGDADRNMILGKRFFVTPSDSVAIIAANAVEAIPYFSAGLKGVARSMPTSAALDVVAKHLNLKFFEVPTGWKFFGNLMDAGLCSVCGEESFGTGSDHIREKDGIWAVLAWLSILAYKNKDKLEDKLVTVEDIVRQHWATYGRHYYTRYDYENVDAGAAKELMAYLVKLQSSLSEVNQIIKGIRSDVSNVVHGDEFEYNDPVDGSISSHQGIRYLFEDGSRLIFRLSGTGSEGATIRLYIEQYEKDPSKIGRLSNEALAPLVEVALKLSKMEEFTGRSAPTVIT

SEQ ID NO: 19472 - protein, 302 aa, Glycine max
MGLGKSEPQDDPPEFGAASDGDADRNMILGKRFFVTPSDSVAIIAANAVEAIPYFSAGLKGVARSMPTSAALDVVAKHLNLKFFEVPTGWKFFGNLMDAGLCSVCGEESFGTGSDHIREKDGIWAVLAWLSILAYKNKDKLEDKLVTVEDIVRQHWATYGRHYYTRYDYENVDAGAAKELMAYLVKLQSSLSEVNQIIKGIRSDVSNVVHGDEFEYNDPVDGSISSHQGIRYLFEDGSRLIFRLSGTGSEGATIRLYIEQYEKDPSKIGRLSNEALAPLVEVALKLSKMEEFTGRSAPTVIT

SEQ ID NO: 19473 - DNA, 892 bp, Glycine max
gttgtgtacttgtgtttcaattcattcttcggttgttctctatttgcgttttctcattttctttctttcgttctcttccgtggaacgagtagtagaaacttgaaatcaaaaggcagcgggggaaaaagaaaagagagaagtagggttcgaaaatggcagcagaatcatcagagggcgaagaagaaaccaagttaagcggaggtaaccaattgctcatagttgacgatgacttaacggaaatgggaaagaaagccgcttggagcgtgagttcctgcaaacccggtaacggcgtttcctctctccgtgacgacaatctcgaaacttattggcaatccgacggagggcaaccccatttagttaacattcagtttcagaagaaagttagacttcaattaattgtgctgtacgtggatttcaagcttgacgagagttacacgccgagcaaagtttccatccgtgccggtgatggttttcacaacttgaaggagattaagaccgtggaactcgtgaagccaactgggtgggtttatctttccttgtctggagttgatcctagggatacctttgtgaatactttcatgttgcaaattgctgtgttgtcaaaccatctcaatggaagggatactcacgtgcggcagatcaaagtttacgggcctcgaccgaaccctatcccacatcagccattccaatttacttcaagggaattcatcacctactcttctataagatgagagtttatggaaggatttgatgaagccaccaagtgttaaatcaaaggatgcttcccactaagttattatagcatctggaaggtctgaaaccaaatcactacagaccgaaatgtcaaaaatacatttcacttcaatagtattcttaaaaattgtcatatcag

SEQ ID NO: 19474 - protein, 192 aa, Glycine max
MAAESSEGEEETKLSGGNQLLIVDDDLTEMGKKAAWSVSSCKPGNGVSSLRDDNLETYWQSDGGQPHLVNIQFQKKVRLQLIVLYVDFKLDESYTPSKVSIRAGDGFHNLKEIKTVELVKPTGWVYLSLSGVDPRDTFVNTFMLQIAVLSNHLNGRDTHVRQIKVYGPRPNPIPHQPFQFTSREFITYSSIR

SEQ ID NO: 19475 - protein, 163 aa, Glycine max
MGKKAAWSVSSCKPGNGVSSLRDDNLETYWQSDGGQPHLVNIQFQKKVRLQLIVLYVDFKLDESYTPSKVSIRAGDGFHNLKEIKTVELVKPTGWVYLSLSGVDPRDTFVNTFMLQIAVLSNHLNGRDTHVRQIKVYGPRPNPIPHQPFQFTSREFITYSSIR

SEQ ID NO: 19476 - DNA, 1150 bp, Glycine max
taaacttaaggaacctatattggatgagattacatctgcattgattgggcgccatgggctgaattttacgaagcaggatacatcttctctctggtttttgtgtaaacaggaagcatccttgttggatataactaatcaagcgtgtagtcttttccgccctcctgagattgaattgctggagtggacagatgatctggagatgtttattctgaagggttatggtaaatcactaaactatagaatgggactgccattacttgaagatgttgttcaatccatggaacaggctatcgtggttgaagaagaaagacatgctcctggcagttttgaaaaggcaagacttcggtttgcgcacgctgaaactgtagttccattctcatgtctgcttggtttatttcttgaaggatctgagttaaaaaaaattcagaaggagcaacctttgcagcaccctccaaagcctccacagaaaagaaaatggcggggtagcactgtggccccttttgctggtaacaacatgttagtcttgtatagttgtcctgctccagacaaatctaccagcaagcacttcgtgcaagtgttacacaatgaacaccctgttccattgccaggttgtgatggctctgatttctgtccatttgaagtattcaaggaaaaaatagttgcacctcatcagaagcatgactaccatacagtctgtaatgcaaagctagagcaggagccctcgggcagcaaggtttttcaaatatttaagtggctttcctcactagggaaaggtgataagtatcctaaagatgaattttagtttggtgataccacctcttaatgaattttcagacatgagcgcctattccttctagcagagaatcagttttacttagattgtgctgccagtacaggaatgcctttgttttctcaagcttggtgcctgagctctcctcctctgtagcttctaacaccaagagaatttggaggtggaaagtttagttctaaatgtcttttttattttttccttagtagcattactctcagtactcgactgataccacagataatgtagcttaatgtgccgtactacgcacactcttagtttcattagctctctcttggactacacttttgttctttttgaataatggataatggaccagct

SEQ ID NO: 19477 - protein, 266 aa, Glycine max
KLKEPILDEITSALIGRHGLNFTKQDTSSLWFLCKQEASLLDITNQACSLFRPPEIELLEWTDDLEMFILKGYGKSLNYRMGLPLLEDVVQSMEQAIVVEEERHAPGSFEKARLRFAHAETVVPFSCLLGLFLEGSELKKIQKEQPLQHPPKPPQKRKWRGSTVAPFAGNNMLVLYSCPAPDKSTSKHFVQVLHNEHPVPLPGCDGSDFCPFEVFKEKIVAPHQKHDYHTVCNAKLEQEPSGSKVFQIFKWLSSLGKGDKYPKDEF

SEQ ID NO: 19478 - protein, 200 aa, Glycine max
MFILKGYGKSLNYRMGLPLLEDVVQSMEQAIVVEEERHAPGSFEKARLRFAHAETVVPFSCLLGLFLEGSELKKIQKEQPLQHPPKPPQKRKWRGSTVAPFAGNNMLVLYSCPAPDKSTSKHFVQVLHNEHPVPLPGCDGSDFCPFEVFKEKIVAPHQKHDYHTVCNAKLEQEPSGSKVFQIFKWLSSLGKGDKYPKDEF

SEQ ID NO: 19479 - protein, 186 aa, Glycine max
MGLPLLEDVVQSMEQAIVVEEERHAPGSFEKARLRFAHAETVVPFSCLLGLFLEGSELKKIQKEQPLQHPPKPPQKRKWRGSTVAPFAGNNMLVLYSCPAPDKSTSKHFVQVLHNEHPVPLPGCDGSDFCPFEVFKEKIVAPHQKHDYHTVCNAKLEQEPSGSKVFQIFKWLSSLGKGDKYPKDEF

SEQ ID NO: 19480 - DNA, 1409 bp, Glycine max
tgctcttgatgaaaaaatcaggtctcaaatggatgttattgacaatggtgtccctgctccattatcaatgttcagtgagagtgattcagacatgaaatctgttaatatagatgacttgctgcccaaagaaaagctgcagaggaagttgccaaagccatcagcgggaaggcgaaaaaatggttacctacaaaatggtggttctgtgcatccttatgctgatccagagcaatgtgcagatacaaagcaatcctttggagcctcttccagtggggttacttctcttgatagcatccagaaacataagttgaacatagattctgattctttaggctgtatacagacacaaattcctatgacacgccctgactatagtcatgctccaaatcacacttccctctttccgactttgtctggatcaagatctgagcatgatggacatctgtctccttctcttaaagaatcatcttatgcatcaaacatggagagttcccatggtcattctttggaggctgcggccttgaaaacaaaagagaatagagaaaagttgtataattgctgtgatggacccctaaatagtagtttcaaaaatgaaaatacaccaaatcaaatgccattttgcagtccgggttcagctcagcaagtaggtcatcattttgaaaatgaaaatgaaggtcatagtgaattccgaggagttggcctaggcttttcaccagaaatagattcatcaacagtgcaggaaagctcatccatgggctctgctctggaccaagcttcacttgaagcaactagcttttgccacctgcaacagatcatggatcagttggatattaaaaccaaaatgtgcataagggacagtctataccgcttggctaagagtgctgagcatagacacaataattcaaatgcaaatggttgcattggagacgatgaaacatgcaaagcaatgatggcgcaggatgcaaacaggtgtgccggattaatggatatggaaactgacacaaaccccattgatcggtctgtagcacacttactgtttcacaggccctcagatccatcagtgttgcttcctaacgaaactttacctttcaaatccagtgccacgatgcatcatggatcagtgatcaatccaccagtgaagactgagaaacaggtctgtcaggaagattctactggagtggaaaaaaaggttttacggggtaacacctaatgaaagtgaaaccagcgttggcgcatttcgttgtacaatttatacttttccggtcattgtcgtatatgatgatgtataattatttcgggctaactcggatccctttgttaatttctgaagcatttttgcataggatgccataatactaatgtaactttgtgctaatcaaatcatcaaaaggtagcatacgatgatttagtgt

SEQ ID NO: 19481 - protein, 401 aa, Glycine max
ALDEKIRSQMDVIDNGVPAPLSMFSESDSDMKSVNIDDLLPKEKLQRKLPKPSAGRRKNGYLQNGGSVHPYADPEQCADTKQSFGASSSGVTSLDSIQKHKLNIDSDSLGCIQTQIPMTRPDYSHAPNHTSLFPTLSGSRSEHDGHLSPSLKESSYASNMESSHGHSLEAAALKTKENREKLYNCCDGPLNSSFKNENTPNQMPFCSPGSAQQVGHHFENENEGHSEFRGVGLGFSPEIDSSTVQESSSMGSALDQASLEATSFCHLQQIMDQLDIKTKMCIRDSLYRLAKSAEHRHNNSNANGCIGDDETCKAMMAQDANRCAGLMDMETDTNPIDRSVAHLLFHRPSDPSVLLPNETLPFKSSATMHHGSVINPPVKTEKQVCQEDSTGVEKKVLRGNT

SEQ ID NO: 19482 - protein, 392 aa, Glycine max
MDVIDNGVPAPLSMFSESDSDMKSVNIDDLLPKEKLQRKLPKPSAGRRKNGYLQNGGSVHPYADPEQCADTKQSFGASSSGVTSLDSIQKHKLNIDSDSLGCIQTQIPMTRPDYSHAPNHTSLFPTLSGSRSEHDGHLSPSLKESSYASNMESSHGHSLEAAALKTKENREKLYNCCDGPLNSSFKNENTPNQMPFCSPGSAQQVGHHFENENEGHSEFRGVGLGFSPEIDSSTVQESSSMGSALDQASLEATSFCHLQQIMDQLDIKTKMCIRDSLYRLAKSAEHRHNNSNANGCIGDDETCKAMMAQDANRCAGLMDMETDTNPIDRSVAHLLFHRPSDPSVLLPNETLPFKSSATMHHGSVINPPVKTEKQVCQEDSTGVEKKVLRGNT

SEQ ID NO: 19483 - protein, 379 aa, Glycine max
MFSESDSDMKSVNIDDLLPKEKLQRKLPKPSAGRRKNGYLQNGGSVHPYADPEQCADTKQSFGASSSGVTSLDSIQKHKLNIDSDSLGCIQTQIPMTRPDYSHAPNHTSLFPTLSGSRSEHDGHLSPSLKESSYASNMESSHGHSLEAAALKTKENREKLYNCCDGPLNSSFKNENTPNQMPFCSPGSAQQVGHHFENENEGHSEFRGVGLGFSPEIDSSTVQESSSMGSALDQASLEATSFCHLQQIMDQLDIKTKMCIRDSLYRLAKSAEHRHNNSNANGCIGDDETCKAMMAQDANRCAGLMDMETDTNPIDRSVAHLLFHRPSDPSVLLPNETLPFKSSATMHHGSVINPPVKTEKQVCQEDSTGVEKKVLRGNT

SEQ ID NO: 19484 - DNA, 1643 bp, Glycine max
gagaacctctctcacacaatagcaaagaagggaagactaaaactaaaaccccactctctttttccgagtcttccagtgaaagaaaggcagcgatggaagaagacttcgacatccccggcggcgaggaaatggatctcggcgaagacgaggtcggcgaggagagggagatcggctctggcggcctcaagaagaagctcctcaaggaaggtcaaggctgggaaacccccgaagtcggtgacgaagtccaagttcattacacggggactttgctcgacgggactaagttcgattcgagccgcgacagggattctcccttcagcttcacgctcggacaagggcaagtaattaaaggatgggatgaaggtattaaaaccatgaagaaaggtgaaaatgctattttcaccatccctcccgagctagcttatggtgaatctggttcccctcctactattcctcctaatgctacactccaatttgatgttgagctgctgtcatggactagtgtaaaggacatatgcaaggatggcggtatatttaagaagataattactgagggggagaaatgggagaaccctaaggatcctgatgaagtattggttaagtatgaagttcatctagaaaatggaaagcttttagcaaagtctgatggggaggagttcacagtcagagagggtcattattgtcctgcattgtcaaaggctgttaaaaccatgaagaagggagagaaagtgcttttgacagttaagccacaatatggatttggtgagaaggggaagccagaacaaggggatgaaggtgcagttccaccaaatgcaacattgcagattactcttgaattagtttcatggaaaactgtttcagaagtaactgatgacaagaaggtcataaagaagatcctcaaggaaggggaaggatatgagcgtccaaatgagggggccattgttaaagtgaaactaattggtaagctacaagatggtaccgcttttttgaaaaagggccatgatgaagaagagaagctgtttgaattcaaaacagatgaggaacaagttgttgatggacttgatagagctgtattgactatgaagaagggtgaggttgcgttgttgaccattgcgcctgattatgctttcggtacatcagagtcccaacaggagttggctgtagttcctcctaactcaaccgtgtattttgaagttgagctagtgtcatttgagaaagagaaggagtcctgggatctgaacactgaagagaaacttgaagctgctggtaagaagaaagaagagggaaatgtcttgtttaaagctagtaaatatgcaagagcttccaaaagatatgaaaaggccgtgaagtacatagaatatgattcctcctttggtgaggaggagaaaaagcaggccaagaccttgaaggttgcctgcaatctgaacaatgctgcttgcaagttgaagttaaaagactacaaagaagcagagaaattgtgtactaaggtgttggaccttgagagtacaaatgtgaaagccctctatagaagggcccaagcacatatgcagttgactaacttggatttggctgaacttgacattaagaaagctcttgacattgaccctaacaacagggatgtcaaattggagtacaggactttg

SEQ ID NO: 19485 - protein, 547 aa, Glycine max
EPLSHNSKEGKTKTKTPLSFSESSSERKAAMEEDFDIPGGEEMDLGEDEVGEEREIGSGGLKKKLLKEGQGWETPEVGDEVQVHYTGTLLDGTKFDSSRDRDSPFSFTLGQGQVIKGWDEGIKTMKKGENAIFTIPPELAYGESGSPPTIPPNATLQFDVELLSWTSVKDICKDGGIFKKIITEGEKWENPKDPDEVLVKYEVHLENGKLLAKSDGEEFTVREGHYCPALSKAVKTMKKGEKVLLTVKPQYGFGEKGKPEQGDEGAVPPNATLQITLELVSWKTVSEVTDDKKVIKKILKEGEGYERPNEGAIVKVKLIGKLQDGTAFLKKGHDEEEKLFEFKTDEEQVVDGLDRAVLTMKKGEVALLTIAPDYAFGTSESQQELAVVPPNSTVYFEVELVSFEKEKESWDLNTEEKLEAAGKKKEEGNVLFKASKYARASKRYEKAVKYIEYDSSFGEEEKKQAKTLKVACNLNNAACKLKLKDYKEAEKLCTKVLDLESTNVKALYRRAQAHMQLTNLDLAELDIKKALDIDPNNRDVKLEYRTL

SEQ ID NO: 19486 - protein, 517 aa, Glycine max
MEEDFDIPGGEEMDLGEDEVGEEREIGSGGLKKKLLKEGQGWETPEVGDEVQVHYTGTLLDGTKFDSSRDRDSPFSFTLGQGQVIKGWDEGIKTMKKGENAIFTIPPELAYGESGSPPTIPPNATLQFDVELLSWTSVKDICKDGGIFKKIITEGEKWENPKDPDEVLVKYEVHLENGKLLAKSDGEEFTVREGHYCPALSKAVKTMKKGEKVLLTVKPQYGFGEKGKPEQGDEGAVPPNATLQITLELVSWKTVSEVTDDKKVIKKILKEGEGYERPNEGAIVKVKLIGKLQDGTAFLKKGHDEEEKLFEFKTDEEQVVDGLDRAVLTMKKGEVALLTIAPDYAFGTSESQQELAVVPPNSTVYFEVELVSFEKEKESWDLNTEEKLEAAGKKKEEGNVLFKASKYARASKRYEKAVKYIEYDSSFGEEEKKQAKTLKVACNLNNAACKLKLKDYKEAEKLCTKVLDLESTNVKALYRRAQAHMQLTNLDLAELDIKKALDIDPNNRDVKLEYRTL

SEQ ID NO: 19487 - protein, 505 aa, Glycine max
MDLGEDEVGEEREIGSGGLKKKLLKEGQGWETPEVGDEVQVHYTGTLLDGTKFDSSRDRDSPFSFTLGQGQVIKGWDEGIKTMKKGENAIFTIPPELAYGESGSPPTIPPNATLQFDVELLSWTSVKDICKDGGIFKKIITEGEKWENPKDPDEVLVKYEVHLENGKLLAKSDGEEFTVREGHYCPALSKAVKTMKKGEKVLLTVKPQYGFGEKGKPEQGDEGAVPPNATLQITLELVSWKTVSEVTDDKKVIKKILKEGEGYERPNEGAIVKVKLIGKLQDGTAFLKKGHDEEEKLFEFKTDEEQVVDGLDRAVLTMKKGEVALLTIAPDYAFGTSESQQELAVVPPNSTVYFEVELVSFEKEKESWDLNTEEKLEAAGKKKEEGNVLFKASKYARASKRYEKAVKYIEYDSSFGEEEKKQAKTLKVACNLNNAACKLKLKDYKEAEKLCTKVLDLESTNVKALYRRAQAHMQLTNLDLAELDIKKALDIDPNNRDVKLEYRTL

SEQ ID NO: 19488 - DNA, 1032 bp, Glycine max
gagtcaagcaatcaacaaagaaaagatggaaaccatttccaaatttccctgttcacatcaacctgtaagatccattagtttccctcctagggtacaccccgtttctcaaagagttgaagcacttctaaaccacctaaaacctcatcattctcagcctatctcaatcactacttgtttagaagctgagacaattcagagcgacttagttgtgcttgctgagttgtacaactgcatggaagaacttttccattctccacaaaccaaacaaactcttctacgctaccaagatggaaaactagtagaagaagcattacgtggctcagtcacattgctagacgcatgtgagtctgcaagggatttgttattggttcttaaggaacacatgcaaacccttcattcagccgtgcgtagaagaaagggagattcaaacattgaaagcatcatttctgcttatgaaagcttcaagaagaaggcaaagaagacaattgctaaacaacttggacaattaaagagaatgaagaataaggctaattccttttctttattggatcaagatcaacagctagtgtttttggctagagttataaaagaagcaagcaccatcaccatctctatattacattctctattagtatttatgtccatgccaacatttggaacaaaagggtcttccctgatctcaaagttgaagccaacggttttgttttcttccctgaaagaacagaagaacacaaatggggttgcagatctcaacaatgttctgtgctctctccttagaagagagaaaaacggtgattccagtggtgaatttcaaagggcactaacagtgttagagacattgaatgttaatattggtggtcttgagggtggattagattgcatatttagatgtttagtcaaaaatagagtgtcgtttttgaatatgctggctcattaaatgaatggagcaaaaatacatatcctctgtaaatgtaaaatctccataaatcagtacatgtttgaacaacagcatcaagattaaaaaaaaaaaag

SEQ ID NO: 19489 - protein, 311 aa, Glycine max
SQAINKEKMETISKFPCSHQPVRSISFPPRVHPVSQRVEALLNHLKPHHSQPISITTCLEAETIQSDLVVLAELYNCMEELFHSPQTKQTLLRYQDGKLVEEALRGSVTLLDACESARDLLLVLKEHMQTLHSAVRRRKGDSNIESIISAYESFKKKAKKTIAKQLGQLKRMKNKANSFSLLDQDQQLVFLARVIKEASTITISILHSLLVFMSMPTFGTKGSSLISKLKPTVLFSSLKEQKNTNGVADLNNVLCSLLRREKNGDSSGEFQRALTVLETLNVNIGGLEGGLDCIFRCLVKNRVSFLNMLAH

SEQ ID NO: 19490 - protein, 303 aa, Glycine max
METISKFPCSHQPVRSISFPPRVHPVSQRVEALLNHLKPHHSQPISITTCLEAETIQSDLVVLAELYNCMEELFHSPQTKQTLLRYQDGKLVEEALRGSVTLLDACESARDLLLVLKEHMQTLHSAVRRRKGDSNIESIISAYESFKKKAKKTIAKQLGQLKRMKNKANSFSLLDQDQQLVFLARVIKEASTITISILHSLLVFMSMPTFGTKGSSLISKLKPTVLFSSLKEQKNTNGVADLNNVLCSLLRREKNGDSSGEFQRALTVLETLNVNIGGLEGGLDCIFRCLVKNRVSFLNMLAH

SEQ ID NO: 19491 - protein, 234 aa, Glycine max
MEELFHSPQTKQTLLRYQDGKLVEEALRGSVTLLDACESARDLLLVLKEHMQTLHSAVRRRKGDSNIESIISAYESFKKKAKKTIAKQLGQLKRMKNKANSFSLLDQDQQLVFLARVIKEASTITISILHSLLVFMSMPTFGTKGSSLISKLKPTVLFSSLKEQKNTNGVADLNNVLCSLLRREKNGDSSGEFQRALTVLETLNVNIGGLEGGLDCIFRCLVKNRVSFLNMLAH

SEQ ID NO: 19492 - DNA, 1352 bp, Glycine max
atcatgtttttaagttttaagcttctctctcttaatttcatcagtagtgtgtgtttgaatgcaaagaagcacatgtgccaatgtgcatttgtgtgtcatgcagtaatgccaggcttatacttgcatatgcttggtaattatattcttgtaattatctagctagttgccacaaaaggtgtgattagatttgtttctagttggactatgaaataggaagaattaacattgagttaaatacaaagattttaatattcataattgttggttatatattcccccaatgaccaaattgttgatctcttgttagttcttgagcttatttcctagcaacttgatcttttgtgtaacttcatttctctccaccagttttaccaatataccaattttaaattataaatatttgtgtaggagcatgccaacctctgctgccctggatgttgttgccaaacatctgaatttgaaattttttgaggtccccacgggttggaagttctttggtaatttaatggatgctggattatgttcagtctgtggtgaagaaagttttgggactggttctgaccatattcgtgagaaagatggaatctgggcagttttggcctggctatctatacttgcatataaaaataaagataaacttgaagacaagcttgtcactgttgaagacatagttcgccagcattgggctacttatgggcgccattattatactcgatatgactatgaaaacgtggatgcaggtgcagcaaaggaactgatggcatatttggtcaagctgcagtcctcactttcagaagtcaatcagattgttaaggggataaggtcagatgtttcgaatgttgtccacggtgatgaatttgagtacaatgatcctgtggatggttccatctcatcacatcagggaatccgatatttgtttgaggatggatcacgattgattttccgcctatctggaactggatcagaaggtgcaacaattcgattatacattgagcaatatgagaaggatccatcaaagattgggagactttcaaacgaagcacttgctcctcttgtggaagttgcgttgaaactttcgaagatggaagaattcactggtcgatccgctccaacagtcattacatgaacacattcaagtggaaggtggttagatcctgaagcttctcccagtcatttcatttcttctttgtccagtatcttacggatagccgaacagtagatttggttgtttgcagcctttgctatgggaaattgagtggaatttgagtttctttatctaaattttgatatgctgaataatttgcaacagccgagtgctaattatatagtcttaatataatggtttctcttgc

SEQ ID NO: 19493 - protein, 237 aa, Glycine max
MPTSAALDVVAKHLNLKFFEVPTGWKFFGNLMDAGLCSVCGEESFGTGSDHIREKDGIWAVLAWLSILAYKNKDKLEDKLVTVEDIVRQHWATYGRHYYTRYDYENVDAGAAKELMAYLVKLQSSLSEVNQIVKGIRSDVSNVVHGDEFEYNDPVDGSISSHQGIRYLFEDGSRLIFRLSGTGSEGATIRLYIEQYEKDPSKIGRLSNEALAPLVEVALKLSKMEEFTGRSAPTVIT

SEQ ID NO: 19494 - protein, 206 aa, Glycine max
MDAGLCSVCGEESFGTGSDHIREKDGIWAVLAWLSILAYKNKDKLEDKLVTVEDIVRQHWATYGRHYYTRYDYENVDAGAAKELMAYLVKLQSSLSEVNQIVKGIRSDVSNVVHGDEFEYNDPVDGSISSHQGIRYLFEDGSRLIFRLSGTGSEGATIRLYIEQYEKDPSKIGRLSNEALAPLVEVALKLSKMEEFTGRSAPTVIT

SEQ ID NO: 19495 - protein, 122 aa, Glycine max
MAYLVKLQSSLSEVNQIVKGIRSDVSNVVHGDEFEYNDPVDGSISSHQGIRYLFEDGSRLIFRLSGTGSEGATIRLYIEQYEKDPSKIGRLSNEALAPLVEVALKLSKMEEFTGRSAPTVIT

SEQ ID NO: 19496 - DNA, 1538 bp, Glycine max
gaaaaaagaataaatacatattatcctcccatgtattgtatttgtggggagagagagcgagtggatgtggtgttccggagaagttggaatggcagcggttagtgttagtgttactgtgagagtgaggtggtgcactcgaaaaccacccactccaactccaaccagattcagcgttaatgctctgtttggtgattggggatttgggaatagaacaaggaactcccttcagcagcaattcacgttcactcttgctgatagtaaagtgataagcgtgtcggttgtttcttcgatctcagatgttgcatcgagcgaatgggacgcttgtgctttggatgcgactggccctgacaacttcaatccattcctttcgcatgcctttttgtcgaccttagagcactctgcttccgctgtcagggaaactggttggatcccacaccacatcgttgccaaagccaacaacaacagcaacaacaacgttgtagccgttgtcccactctatcttaaaacccactcctacggcgaatttgtttttgatcattcttgggctaatgcttaccattcttatggctacaattattaccccaagttacaatcttgtgtccccttcacacctgtaactggtccaaggatcttacttcgtaacacctccttcaaacatcaagttttcgacattattgtctccgcaatgaaggaactcgctctcacctcccagctttcatcattacatgttacttttccctctgaaaatgagtggcacaagctcactgagaaaggcttcctccccaggattggaatgcagtaccactggaaaaaccgtaactacaaaaattttgatgacttcttgatggacatgaagcaaagtaaaagaaaaaatatacgtcaagagcgcaaaaagatctcagcccagaacttgattatgaaacgcctccggggttatgaaataaaggctaggcactgggattccttctactctttttacaggaacacaactgataacaaatggggcactcctcacctgacaagggaattttttcatgagctgggagcaaaaatgggagataatgtgctacttgtggtggctgaagaaggggatgaactagttgctggagccctaaatcttatcggaggagataccttgtttgggcgcctatggggatgtcagccacgaagttactacccaagtttgcattttgaagcgtgttattaccaggcaattgaagcagctattgaactcaatcttaaaactgtagaggcaggagctcagggtgaacacaagattcagcggggatatcttcctgtgacaacttatagctgccattaccttattgatgaagaatttagagaagctatacaagattttttaatacgtgaagctgctcaggtgaagctagttataaaactcttgcatgattctggtccttttaaggaaggtatcctttagaaagtaaatttatgggtatagtatttgcaaatatgtatatgattgtaataatttatttataatttagcagaaatgtatatacagctgaagtaatgag

SEQ ID NO: 19497 - protein, 458 aa, Glycine max
MWCSGEVGMAAVSVSVTVRVRWCTRKPPTPTPTRFSVNALFGDWGFGNRTRNSLQQQFTFTLADSKVISVSVVSSISDVASSEWDACALDATGPDNFNPFLSHAFLSTLEHSASAVRETGWIPHHIVAKANNNSNNNVVAVVPLYLKTHSYGEFVFDHSWANAYHSYGYNYYPKLQSCVPFTPVTGPRILLRNTSFKHQVFDIIVSAMKELALTSQLSSLHVTFPSENEWHKLTEKGFLPRIGMQYHWKNRNYKNFDDFLMDMKQSKRKNIRQERKKISAQNLIMKRLRGYEIKARHWDSFYSFYRNTTDNKWGTPHLTREFFHELGAKMGDNVLLVVAEEGDELVAGALNLIGGDTLFGRLWGCQPRSYYPSLHFEACYYQAIEAAIELNLKTVEAGAQGEHKIQRGYLPVTTYSCHYLIDEEFREAIQDFLIREAAQVKLVIKLLHDSGPFKEGIL

SEQ ID NO: 19498 - protein, 450 aa, Glycine max
MAAVSVSVTVRVRWCTRKPPTPTPTRFSVNALFGDWGFGNRTRNSLQQQFTFTLADSKVISVSVVSSISDVASSEWDACALDATGPDNFNPFLSHAFLSTLEHSASAVRETGWIPHHIVAKANNNSNNNVVAVVPLYLKTHSYGEFVFDHSWANAYHSYGYNYYPKLQSCVPFTPVTGPRILLRNTSFKHQVFDIIVSAMKELALTSQLSSLHVTFPSENEWHKLTEKGFLPRIGMQYHWKNRNYKNFDDFLMDMKQSKRKNIRQERKKISAQNLIMKRLRGYEIKARHWDSFYSFYRNTTDNKWGTPHLTREFFHELGAKMGDNVLLVVAEEGDELVAGALNLIGGDTLFGRLWGCQPRSYYPSLHFEACYYQAIEAAIELNLKTVEAGAQGEHKIQRGYLPVTTYSCHYLIDEEFREAIQDFLIREAAQVKLVIKLLHDSGPFKEGIL

SEQ ID NO: 19499 - protein, 251 aa, Glycine max
MKELALTSQLSSLHVTFPSENEWHKLTEKGFLPRIGMQYHWKNRNYKNFDDFLMDMKQSKRKNIRQERKKISAQNLIMKRLRGYEIKARHWDSFYSFYRNTTDNKWGTPHLTREFFHELGAKMGDNVLLVVAEEGDELVAGALNLIGGDTLFGRLWGCQPRSYYPSLHFEACYYQAIEAAIELNLKTVEAGAQGEHKIQRGYLPVTTYSCHYLIDEEFREAIQDFLIREAAQVKLVIKLLHDSGPFKEGIL

SEQ ID NO: 19500 - DNA, 1392 bp, Glycine max
tctcttctcgtatcacacgatccatctacacggtcaaaaagaaaatcgttttccttgagaaaatacggacacagagacagagagagggagagagagaaggaaatgggaagcacaaagtttctattgttggtgatggtgtttctcgcagtgtgcgtggggacatgcaggccttggggtgatgatgtagttgaagatggagaggaggccaaacattttgcagcaaaagccgtgcatgatgtcgaggaagagacccgctcttgggctgattgggctcaagacaagttctccaaaagtttcggggccgaagaggatcatgaaaaacaagcgactcaaaacatgaagtatcaagctgaagatgctgcttcaagggccacggagagagtgaaatctgcagcatcaggagcctcggactatgcttctcaaaaggctacggatgctaagtaagcagtttcaggtgctaaggtcatcaaaatgccaacagatagcattaacaatgcaaaacacacaatgggagatacctacgaggatgctaagcaaaaaatgaacacagcttcagataaggcttcaagtatggctcacaatgccaaagataacacggctgagtccatggaatatggaaaagatatagcagccaatgcctatgaccagggtaagcaaaaaataaacattgcttcagatacagcatcagagaaattctatgatgccaaggacaaggcaagtgatgttaggcataaagtgaaaggagccatgggttgtggaggagataaggccaataatgatgctaaaaataacatgggcgtgaaaatggaacatggaagggacaaagtagccgaaacttttgaccaggctaaacgtgaagtgggtgaagcatatgtatcagcaaagaataccatgactgaagaggccaaagctaagtacgaggctgcaaaggagaaggcttcggatgcaacaggtgatttaggagctaagatgaggaacaccccaaacgtataagcgcatggttagtttaccgcttattcttaactatgacaacctctattagtttttagctctagtttccacaagttatcgtttatattgtgctttaatctcttgtaatgtgttagtcttttacacgttcttgtatgcttttctctttaatagagatgcaaaaaatacttgttagacattatgaaaaagtcattacgtacaaatctattctccataatgataggagagagcctgaaaggtcccacggttaggttcttctatgatctatcacgatgccaggtagattcatatacagggtgctgccccataatgttgtagggactttgcagcttatatatagtaggctatatgtatgtgtaattataacattttgcagttagtggatcctctcacgattggtac

SEQ ID NO: 19501 - protein, 173 aa, Glycine max
MPTDSINNAKHTMGDTYEDAKQKMNTASDKASSMAHNAKDNTAESMEYGKDIAANAYDQGKQKINIASDTASEKFYDAKDKASDVRHKVKGAMGCGGDKANNDAKNNMGVKMEHGRDKVAETFDQAKREVGEAYVSAKNTMTEEAKAKYEAAKEKASDATGDLGAKMRNTPNV

SEQ ID NO: 19502 - protein, 161 aa, Glycine max
MGDTYEDAKQKMNTASDKASSMAHNAKDNTAESMEYGKDIAANAYDQGKQKINIASDTASEKFYDAKDKASDVRHKVKGAMGCGGDKANNDAKNNMGVKMEHGRDKVAETFDQAKREVGEAYVSAKNTMTEEAKAKYEAAKEKASDATGDLGAKMRNTPNV

SEQ ID NO: 19503 - protein, 150 aa, Glycine max
MNTASDKASSMAHNAKDNTAESMEYGKDIAANAYDQGKQKINIASDTASEKFYDAKDKASDVRHKVKGAMGCGGDKANNDAKNNMGVKMEHGRDKVAETFDQAKREVGEAYVSAKNTMTEEAKAKYEAAKEKASDATGDLGAKMRNTPNV

SEQ ID NO: 19504 - DNA, 1141 bp, Glycine max
atgtcatgtgtacatgtgtatatacatatttttttttctctttgatgttacagtttaaatttctttgtaagataattccgagacaaataaaggctgaagaggctgttagcgttatcaggaaaactgttgaagatcttattgaaaaatgtagagagattgtagaatctgagggtgaaagaattgatgtcgaggaatatgtgaatgacagtgaccctagtatcctccggttcttgcttgccagcagagaagaggtttccagtgtgcaattaagggatgatcttttgtcactattagttgctggtcatgagaccaccggttcagtgctgacctggacactttatcttctaagcaaggattcttcgtcattggcaaaagcacaagaagaggtagacagagttttacagggaaggcgtcctacctatgaagatattaaagatcttaagttcttgacacgctgcattattgagtcactccgtctctatcctcatcctccggtattgataagaagagctcaagttcctgatgagcttccaggtggttacaaactcgatgctggtcaagatattatgatctctgtatacaacatacatcgttcttctgaggtctgggatagggctgaagagtttgtgccagaaagatttgatttggatggtccagttccaaatgaaacaaatacagatttcagattcattccattcagtggaggcccccgcaaatgtgttggtgatcagtttgctttaatggaagctatagttgctcttgcaatctttctacaacacatgaacttcgaacttgttcctgatcagaatatcagtatgacaacaggagcaacaatacatacgacgaatggcttgtacatgaaactgagtcgacggttgaaatagtaatatttgttcatcttcgcataggctgctaaattgtctataactatcggcgtatcaaattctttcgattttctcatttttagctagttaatataccacaaggtaatccagtaaatatgtatttgatagcaattattttccgcggtcaaataatttatttatattttctaaatgttgtaaataagtttaattgaatgaattacgaagtgaagaactattgtagacaagtccaggttatggaatcatgtttccaactt

SEQ ID NO: 19505 - protein, 293 aa, Glycine max
VMCTCVYTYFFFSLMLQFKFLCKIIPRQIKAEEAVSVIRKTVEDLIEKCREIVESEGERIDVEEYVNDSDPSILRFLLASREEVSSVQLRDDLLSLLVAGHETTGSVLTWTLYLLSKDSSSLAKAQEEVDRVLQGRRPTYEDIKDLKFLTRCIIESLRLYPHPPVLIRRAQVPDELPGGYKLDAGQDIMISVYNIHRSSEVWDRAEEFVPERFDLDGPVPNETNTDFRFIPFSGGPRKCVGDQFALMEAIVALAIFLQHMNFELVPDQNISMTTGATIHTTNGLYMKLSRRLK

SEQ ID NO: 19506 - protein, 292 aa, Glycine max
MCTCVYTYFFFSLMLQFKFLCKIIPRQIKAEEAVSVIRKTVEDLIEKCREIVESEGERIDVEEYVNDSDPSILRFLLASREEVSSVQLRDDLLSLLVAGHETTGSVLTWTLYLLSKDSSSLAKAQEEVDRVLQGRRPTYEDIKDLKFLTRCIIESLRLYPHPPVLIRRAQVPDELPGGYKLDAGQDIMISVYNIHRSSEVWDRAEEFVPERFDLDGPVPNETNTDFRFIPFSGGPRKCVGDQFALMEAIVALAIFLQHMNFELVPDQNISMTTGATIHTTNGLYMKLSRRLK

SEQ ID NO: 19507 - protein, 279 aa, Glycine max
MLQFKFLCKIIPRQIKAEEAVSVIRKTVEDLIEKCREIVESEGERIDVEEYVNDSDPSILRFLLASREEVSSVQLRDDLLSLLVAGHETTGSVLTWTLYLLSKDSSSLAKAQEEVDRVLQGRRPTYEDIKDLKFLTRCIIESLRLYPHPPVLIRRAQVPDELPGGYKLDAGQDIMISVYNIHRSSEVWDRAEEFVPERFDLDGPVPNETNTDFRFIPFSGGPRKCVGDQFALMEAIVALAIFLQHMNFELVPDQNISMTTGATIHTTNGLYMKLSRRLK

SEQ ID NO: 19508 - DNA, 2000 bp, Glycine max
ttgcatgagtggattgacctcatatttgggtataagcaacgaggcaaggaagctgttacagcaaataatgttttcttttatactacctatgaagggacagtggatcttgataaaatctctgacccagtacaacagcgtgccatacaagatcagattgcttattttggacaaacaccatcccaacttctgactgttcctcacttgaagaaaatgccattagcagaagttctgcatttgcagacaatattccgtaacccaaaagaagtcaaaccatatgctgttccattcccagaacgctgcaatcttcctgcagctgccattcatgcatcttcagatacggttgtggttgttgacatgaatgcaccagcagctcatgttgcccaacacaagtggcaacccaatacacctgatggccagggtactcctttcctctttcaacatagaaaagctacattagcctctgctggtggtacaattatgcgcatgttcaaagcaccggctgcatctggtggggagtggcaattcccccaagcagtagcatttgctgtctctggaattagaagccaagctattgtttctataacaagcaacaaagaagttattactggtgggcatgctgataatagtattaggctaatatcctcagatggagctaaaacattagaaacagcttatgggcactgtgctcctgtaacttgccttggtctttcacctgatagtaattacctagttacaggatcccgagacacaacagtattactctggagaatacatagggcactttcatctcactcaagtgccgtatcagaacactccactgggacaggcacattgtcttcaaccagtaatagttcatcgcacttgatagaaaaagaccggagacgtcgaatcgagggtcctatacaggtacttcgggggcaccacagtgaaatacatagttgttgtgttaactcagatcttgggatagttgtttcctgctcccattcatcagatgtcctcttgcactccataagaaggggacgtttaattagaaggctcgatggtgtggaggcccatactgtttgcctttcctctgaaggggttgtaatgacctggaatgaatcacagcatactctcagtacttttacactcaatggtactccgattgcaagagcacagttatctttctcttgcagtatcagttgcatggaaatttctgttgatgggacaagtgctttgattggcatgaattcccttgaaaatggtagagcctataatagcagtccggattcacagtcgaataagtcaggtgttgttgattttgattcagaatcagaagaaacttttgattacacccaaatagatgttcgatcaccatcaatttgcttcctgcatatgcacactctggaggtatttcatgtattgaagctgggagaaggacaggatatcacagctctggctctaaacaaggataacacaaatcttttggtttccactttggataaacaattgataatcttcactgacccagctttaagcttgaaagtggtcgatcaaatgctcaagcttggatgggaaggtgatgggcttcagcctctcataaaatcatagcttttagggtatacattaatgggttacagatcttctatacaatatcagttaggaaaattaggttgaggttatgacaatggttgcgcctctatggtttagagatatcttgtgacatatgtaacattctattgttaccactagagttagattccttagatttagcagagggttctttgctcctccggttgtgctatagtgttgatattggactagcttctgagttgcgactgaggtttgagccatttttgtcaccattttttttattagagagaatgaaaatttaatagctattctttcttgtactgctgctgcttttcagacgttgcgattgattagattcagagctttgagtcgtcaatatttgttaatataataaccaagtttcaattgtcaaaaaaaaaaaaaaaaaa

SEQ ID NO: 19509 - protein, 529 aa, Glycine max
LHEWIDLIFGYKQRGKEAVTANNVFFYTTYEGTVDLDKISDPVQQRAIQDQIAYFGQTPSQLLTVPHLKKMPLAEVLHLQTIFRNPKEVKPYAVPFPERCNLPAAAIHASSDTVVVVDMNAPAAHVAQHKWQPNTPDGQGTPFLFQHRKATLASAGGTIMRMFKAPAASGGEWQFPQAVAFAVSGIRSQAIVSITSNKEVITGGHADNSIRLISSDGAKTLETAYGHCAPVTCLGLSPDSNYLVTGSRDTTVLLWRIHRALSSHSSAVSEHSTGTGTLSSTSNSSSHLIEKDRRRRIEGPIQVLRGHHSEIHSCCVNSDLGIVVSCSHSSDVLLHSIRRGRLIRRLDGVEAHTVCLSSEGVVMTWNESQHTLSTFTLNGTPIARAQLSFSCSISCMEISVDGTSALIGMNSLENGRAYNSSPDSQSNKSGVVDFDSESEETFDYTQIDVRSPSICFLHMHTLEVFHVLKLGEGQDITALALNKDNTNLLVSTLDKQLIIFTDPALSLKVVDQMLKLGWEGDGLQPLIKS

SEQ ID NO: 19510 - protein, 459 aa, Glycine max
MPLAEVLHLQTIFRNPKEVKPYAVPFPERCNLPAAAIHASSDTVVVVDMNAPAAHVAQHKWQPNTPDGQGTPFLFQHRKATLASAGGTIMRMFKAPAASGGEWQFPQAVAFAVSGIRSQAIVSITSNKEVITGGHADNSIRLISSDGAKTLETAYGHCAPVTCLGLSPDSNYLVTGSRDTTVLLWRIHRALSSHSSAVSEHSTGTGTLSSTSNSSSHLIEKDRRRRIEGPIQVLRGHHSEIHSCCVNSDLGIVVSCSHSSDVLLHSIRRGRLIRRLDGVEAHTVCLSSEGVVMTWNESQHTLSTFTLNGTPIARAQLSFSCSISCMEISVDGTSALIGMNSLENGRAYNSSPDSQSNKSGVVDFDSESEETFDYTQIDVRSPSICFLHMHTLEVFHVLKLGEGQDITALALNKDNTNLLVSTLDKQLIIFTDPALSLKVVDQMLKLGWEGDGLQPLIKS

SEQ ID NO: 19511 - protein, 411 aa, Glycine max
MNAPAAHVAQHKWQPNTPDGQGTPFLFQHRKATLASAGGTIMRMFKAPAASGGEWQFPQAVAFAVSGIRSQAIVSITSNKEVITGGHADNSIRLISSDGAKTLETAYGHCAPVTCLGLSPDSNYLVTGSRDTTVLLWRIHRALSSHSSAVSEHSTGTGTLSSTSNSSSHLIEKDRRRRIEGPIQVLRGHHSEIHSCCVNSDLGIVVSCSHSSDVLLHSIRRGRLIRRLDGVEAHTVCLSSEGVVMTWNESQHTLSTFTLNGTPIARAQLSFSCSISCMEISVDGTSALIGMNSLENGRAYNSSPDSQSNKSGVVDFDSESEETFDYTQIDVRSPSICFLHMHTLEVFHVLKLGEGQDITALALNKDNTNLLVSTLDKQLIIFTDPALSLKVVDQMLKLGWEGDGLQPLIKS

SEQ ID NO: 19512 - DNA, 1461 bp, Glycine max
aacaaggataaatttaagttcttttacaaggccacgcttcttcagcaagtcaatgatcttctggaaagcatttccaatgaaataacttctgcacaattagtagttgaagaattagagactgcaataaggcccatagagaatgagcttaatgagctgcaagttaaaattagaaatatggaacatgttgaacaaatatccatacaggttcagcagttaaagaagaaacttgcatggtcatgggtttatcatgtggatgagcaactggagcaacaaaatgtaaagattgaaaagttgaagaatcggatacctacctgccaggctaagattgatcaacaactgcatttagttgaaaagttggaggaaatctggtccaagaagaaagaggaaattaaaagtatgtttgcaaagacatcacaagttaatcaaatgaaggaaaatttaaaccagtctgtgtccatggcaaagaaagaggcgtttgaacttgagcgagactgcaaatgcaaaaccagcaacatacagaagatggttaatcaacttgaaaagcttaaaaaacaagtacaggatatccatgatcagcacgtaaaaaattctcaggctgaagaatctaacatggaggagaaactgaaggggcttaaagatgaggttcatgcagctgagtcaaagctgaagagattgcaagaagaagaagctttgttactggataacatacataggcaaaaggatgaaatccgaaagatagctgataagatcgatgatcatgaaaaaagttataaagatttgatgtgtcaaattcgtggtcttcaacaaaatcaaagcaataagattactgtttttggaggaaataaagtgttagatttgttacgtataattgagaactaccaccaaaggtttaagatgcctccaattggtcccatcggtgcccatctgaagcttcttcatggtaataaatgggcacttgccgtagaacatgctattgggagattgctcaattcttttatagtgactgatcatgcggattgtcgtcttctgaaacaatgtgcgaaggaagcacactttggtcaccttcaaattattgtttatgatttttcaatcccaaggttgacgataccacagcacatgcttcctgatacagaacatccatcaattctttctgtcttacaatgcgagaatcaaactgtgattaatgtcttagtggatcatggaaatgttgagagacaagtgcttgttaaggattatgaagttgggaaagtggttgtctttgaccgaaggattcgaaatttgaaggaggcctatacagaagatggatgtagaatgttttgtcgaggtccagtgcagaattttcttcaaccaaatatgaggcgaagaactggtcgtctttgtggttcttttgaagatgagattaagaaacttcatgctgaagcgtctgatgtaaaaaatgaagccaatggctgtaaaaatatc

SEQ ID NO: 19513 - protein, 487 aa, Glycine max
NKDKFKFFYKATLLQQVNDLLESISNEITSAQLVVEELETAIRPIENELNELQVKIRNMEHVEQISIQVQQLKKKLAWSWVYHVDEQLEQQNVKIEKLKNRIPTCQAKIDQQLHLVEKLEEIWSKKKEEIKSMFAKTSQVNQMKENLNQSVSMAKKEAFELERDCKCKTSNIQKMVNQLEKLKKQVQDIHDQHVKNSQAEESNMEEKLKGLKDEVHAAESKLKRLQEEEALLLDNIHRQKDEIRKIADKIDDHEKSYKDLMCQIRGLQQNQSNKITVFGGNKVLDLLRIIENYHQRFKMPPIGPIGAHLKLLHGNKWALAVEHAIGRLLNSFIVTDHADCRLLKQCAKEAHFGHLQIIVYDFSIPRLTIPQHMLPDTEHPSILSVLQCENQTVINVLVDHGNVERQVLVKDYEVGKVVVFDRRIRNLKEAYTEDGCRMFCRGPVQNFLQPNMRRRTGRLCGSFEDEIKKLHAEASDVKNEANGCKNI

SEQ ID NO: 19514 - protein, 429 aa, Glycine max
MEHVEQISIQVQQLKKKLAWSWVYHVDEQLEQQNVKIEKLKNRIPTCQAKIDQQLHLVEKLEEIWSKKKEEIKSMFAKTSQVNQMKENLNQSVSMAKKEAFELERDCKCKTSNIQKMVNQLEKLKKQVQDIHDQHVKNSQAEESNMEEKLKGLKDEVHAAESKLKRLQEEEALLLDNIHRQKDEIRKIADKIDDHEKSYKDLMCQIRGLQQNQSNKITVFGGNKVLDLLRIIENYHQRFKMPPIGPIGAHLKLLHGNKWALAVEHAIGRLLNSFIVTDHADCRLLKQCAKEAHFGHLQIIVYDFSIPRLTIPQHMLPDTEHPSILSVLQCENQTVINVLVDHGNVERQVLVKDYEVGKVVVFDRRIRNLKEAYTEDGCRMFCRGPVQNFLQPNMRRRTGRLCGSFEDEIKKLHAEASDVKNEANGCKNI

SEQ ID NO: 19515 - protein, 355 aa, Glycine max
MFAKTSQVNQMKENLNQSVSMAKKEAFELERDCKCKTSNIQKMVNQLEKLKKQVQDIHDQHVKNSQAEESNMEEKLKGLKDEVHAAESKLKRLQEEEALLLDNIHRQKDEIRKIADKIDDHEKSYKDLMCQIRGLQQNQSNKITVFGGNKVLDLLRIIENYHQRFKMPPIGPIGAHLKLLHGNKWALAVEHAIGRLLNSFIVTDHADCRLLKQCAKEAHFGHLQIIVYDFSIPRLTIPQHMLPDTEHPSILSVLQCENQTVINVLVDHGNVERQVLVKDYEVGKVVVFDRRIRNLKEAYTEDGCRMFCRGPVQNFLQPNMRRRTGRLCGSFEDEIKKLHAEASDVKNEANGCKNI

SEQ ID NO: 19516 - DNA, 1057 bp, Glycine max
tccgctttattcagattttggttcttcgggtcctaatccgtaacagaaacaggggattcgcagttgtggagtagatctgagttgtgagcaatagattctccaaatttggcggcaatgggtgggctcaccgctgaagatctgtcgaccatcggcggaatcgccaccgtgtcgcttctccattccttcattcccactcactggcttcctttctccattgtcggtcgcgctcagaaatggactctctccaccactctcatcgtcactgcacttggagcaattttgcacgtaatatccacttcactgcttggtataacggcaattaccatggcaaacaccattgctggtgaagaaactgtgcataaggttgcttcacttttgcttgtatttttgggtggtagttatataattctgtttctgatgggaaagggtggccatagtcattcacacaaccaacccatggagaaaatggctgtagctggacttattctcgttcctgcattgtctccttgtgctacaacactcccggttttcttgctgttggaaattcctcttccatgatggtgcttgccatcatagtactactattcagcacaataactgtgatgacttcgctagtagcgttgtcattttatggggccagtcaactgaagtttcactgggtggagcggtatgacaagcttcttgttggttctgttctgtgtttagtaggagtcttgaccctactttttcatgatcatgatcatgaagtagtttcgattggacatcactcacattcacataggaagattatttccttgtgagatatataaatgtttttggaattacatgcttatgagcattgtcacggtattgtttttattttgtatcagaagggaaaaagaaaaaagaaaaacagatgttgctgcttaggagaactgatcatcttggtctagtaaaagtcgttgtatactgagttttcaatgtgaaattaatgtgtttttagtataaaaaaatactttgattaaaaatgaatcaccaataaataattctatttcttgaccttttctttaaaaaaaag

SEQ ID NO: 19517 - protein, 147 aa, Glycine max
MGGLTAEDLSTIGGIATVSLLHSFIPTHWLPFSIVGRAQKWTLSTTLIVTALGAILHVISTSLLGITAITMANTIAGEETVHKVASLLLVFLGGSYIILFLMGKGGHSHSHNQPMEKMAVAGLILVPALSPCATTLPVFLLLEIPLP

SEQ ID NO: 19518 - protein, 81 aa, Glycine max
MMVLAIIVLLFSTITVMTSLVALSFYGASQLKFHWVERYDKLLVGSVLCLVGVLTLLFHDHDHEVVSIGHHSHSHRKIISL

SEQ ID NO: 19519 - protein, 80 aa, Glycine max
MVLAIIVLLFSTITVMTSLVALSFYGASQLKFHWVERYDKLLVGSVLCLVGVLTLLFHDHDHEVVSIGHHSHSHRKIISL

SEQ ID NO: 19520 - DNA, 1528 bp, Glycine max
ggatatgaaatcaaacttccattggaggatgaacaacctccagaaaagaagcttgatgtgtttgttaaagctaaaaaacttctgcacaagattaaggctcgattccatggtcaagataatgtttacaagacatttctggccatattaaagatgcacaaagatggaaccaagtctcccactgcagcttacggggagattactgcacttcttcagcaccatgcggatcttcttaatgagttaccttttttatctcttaatacttcaagaactatctcaattcattttacttctgcacaaaattctttgtttcgtgaaaaaagctctgcagttccaatagtgcaacaaatgtgtgttctgaagagaaaaaggaccaaaacttcacatgatgatcacaaccacattgttggtcatagattagagagcgattggagtgaacgggaaaaggataatagagattattatcaagatggtattcagaagcttctatctctgaaacggacacatttttgtatggctgaagaccttatggctagatcattttgtaatgttgataaacattttggtagtgaaaggttttctttctgtgcaaaaatcaaggataaattacaaaatcctaagaattacttttcaaagcatgtggatatctacagcaaggaaaaaactactcgacaagaattgtcatcatcaacaactgatttcccaagaaaattcccagatctcatgaagggatttaatgaatgtgtaacccaatgtaagaagatgaatgaatcctcgagggatgaagaacatgtgcagaaacaaataaagttggaagactggaacagagatcgacatcatgatggtgatgatcgggtgaaagaaacagttagtgattgccggaaaagggacaaatctactgtagttgccaacaagaatgtttctggtcgtaagttgtctctatatgccagcaagaagaagaattctgcaaaatctgttagagagctggatctatctatctgtgaaaagtgcactcccagttactatcttctaccaaaagaagattgaacttgacatgtgtttagaaactgcaaagtcaacaactaagcaagttgaagagctcatagaaaagatcaataccaatatgattgaaagagacaatccaattaacattgagaagcacttaatagctcaaaatcttaggtgcattgagcagttatatggcgaccatgggattgatgtgctggatgtgttaaggaagaatgcatctcaagttttgccagtcattttaactaggttgaagcagaaacatgaagaatgggcaagatgtcgtgctgatttaaataaactttgggctgaagtatatgctaaaaactatcataaatcacttaatcatgatcgtgttccttctactaggaaccaagagctttagtacttgggttatgattttttatgctttttttttttcacttatggaaaaacaaattttgtccagattgtttcttttttgtaaaaaaaaatattacataatcatcatagtttttaaatacgc

SEQ ID NO: 19521 - protein, 347 aa, Glycine max
GYEIKLPLEDEQPPEKKLDVFVKAKKLLHKIKARFHGQDNVYKTFLAILKMHKDGTKSPTAAYGEITALLQHHADLLNELPFLSLNTSRTISIHFTSAQNSLFREKSSAVPIVQQMCVLKRKRTKTSHDDHNHIVGHRLESDWSEREKDNRDYYQDGIQKLLSLKRTHFCMAEDLMARSFCNVDKHFGSERFSFCAKIKDKLQNPKNYFSKHVDIYSKEKTTRQELSSSTTDFPRKFPDLMKGFNECVTQCKKMNESSRDEEHVQKQIKLEDWNRDRHHDGDDRVKETVSDCRKRDKSTVVANKNVSGRKLSLYASKKKNSAKSVRELDLSICEKCTPSYYLLPKED

SEQ ID NO: 19522 - protein, 297 aa, Glycine max
MHKDGTKSPTAAYGEITALLQHHADLLNELPFLSLNTSRTISIHFTSAQNSLFREKSSAVPIVQQMCVLKRKRTKTSHDDHNHIVGHRLESDWSEREKDNRDYYQDGIQKLLSLKRTHFCMAEDLMARSFCNVDKHFGSERFSFCAKIKDKLQNPKNYFSKHVDIYSKEKTTRQELSSSTTDFPRKFPDLMKGFNECVTQCKKMNESSRDEEHVQKQIKLEDWNRDRHHDGDDRVKETVSDCRKRDKSTVVANKNVSGRKLSLYASKKKNSAKSVRELDLSICEKCTPSYYLLPKED

SEQ ID NO: 19523 - protein, 232 aa, Glycine max
MCVLKRKRTKTSHDDHNHIVGHRLESDWSEREKDNRDYYQDGIQKLLSLKRTHFCMAEDLMARSFCNVDKHFGSERFSFCAKIKDKLQNPKNYFSKHVDIYSKEKTTRQELSSSTTDFPRKFPDLMKGFNECVTQCKKMNESSRDEEHVQKQIKLEDWNRDRHHDGDDRVKETVSDCRKRDKSTVVANKNVSGRKLSLYASKKKNSAKSVRELDLSICEKCTPSYYLLPKED

SEQ ID NO: 19524 - DNA, 1130 bp, Glycine max
gtttagttctctcttctctctctctcaaacctgaattcggttgtgatataaacctgcgttgcgctaaacgacaccgttttcactgtctctgagaatggaggcactaagtcgctttgtggaagaaatattcgaggatttccagggccgaagagccggcatcatcaaagcccttaccaccgatgttgaagatttctacagccaatgtgatcctgagaaggagaatttgtgcttatatggatttcctaatgagcaatgggaggtaaatttacccgttgaagaagttcctccagagcttcctgagcctgtcctaggcattaactttgctagggatggcatgctggaaaaagactggttatcattagttgctgttcatagtgatacatggttacttgcccttgccttttattttggagccagatttggatttgataaaactgacaggaaacgactattcggtatgatcaatgaactaccaacaatatttgaagttgttactggtgaagcaaagaaacaagttaaagagaagtcttcggtttcaaacaacagtggcaacaaatctaagtctaactctcaagcgcaggcttccgaaacccagggcagacagtcaaaggcattacaaacaaaagatgaggatgaagaactagaagagcaagataacgatgaacatggagataccttgtgtggggcatgtggtgagaattatggtactgatgaattctggatttgctgtgacatctgtgagaagtggttccatggcaaatgtgtgaagatcacccctgctagagcagagcttatcaagcaatacaagtgcccatcatgcagtaacaagagagctcgctaagcaaatttccatcagggacaataaaccatttgagtcttaacgaatctgattaatattttttttttctagatgtagctgatggatagtttttatgtttgacacatgtagatttcttgtctttctgtgggatttatgctgtgttggttgtctgggggaagttcattctttttccaagccttgtcctagctatggatccacatcggcataagcttcatatgaatggggttgaaaccataatctcctggccaccttaatactatggaaatgaaagtacttcgacatttgcacc

SEQ ID NO: 19525 - protein, 248 aa, Glycine max
MEALSRFVEEIFEDFQGRRAGIIKALTTDVEDFYSQCDPEKENLCLYGFPNEQWEVNLPVEEVPPELPEPVLGINFARDGMLEKDWLSLVAVHSDTWLLALAFYFGARFGFDKTDRKRLFGMINELPTIFEVVTGEAKKQVKEKSSVSNNSGNKSKSNSQAQASETQGRQSKALQTKDEDEELEEQDNDEHGDTLCGACGENYGTDEFWICCDICEKWFHGKCVKITPARAELIKQYKCPSCSNKRAR

SEQ ID NO: 19526 - protein, 168 aa, Glycine max
MLEKDWLSLVAVHSDTWLLALAFYFGARFGFDKTDRKRLFGMINELPTIFEVVTGEAKKQVKEKSSVSNNSGNKSKSNSQAQASETQGRQSKALQTKDEDEELEEQDNDEHGDTLCGACGENYGTDEFWICCDICEKWFHGKCVKITPARAELIKQYKCPSCSNKRAR

SEQ ID NO: 19527 - protein, 127 aa, Glycine max
MINELPTIFEVVTGEAKKQVKEKSSVSNNSGNKSKSNSQAQASETQGRQSKALQTKDEDEELEEQDNDEHGDTLCGACGENYGTDEFWICCDICEKWFHGKCVKITPARAELIKQYKCPSCSNKRAR

SEQ ID NO: 19528 - DNA, 1300 bp, Glycine max
agcgtcaccatccttccaaaatagcttatccattctgcaccaagtccctgaaggccatgtgggggtatattggagaggaggtgcccttctgaaaacaattacagagccaggcttccatctaaagatgccttttataactcagtatgaacctgttcaagttacacttcaaacagatatggtgatagatataccctgtggtactaaaggtggtgttatgatcagttttgggaagattgaggttgtgaatcaactccataaggaatttgtctttgagacattgctcaactatggtgtacattatgataagacatggatatatgacaagattcatcatgagattaatcagttctgcagttctcattctctgcaacaagtctatattgatgtctttgatcagattgatgaaaagatgaaagatgctcttcaagttgactgcactcgctatgctccaggaattgagatcttaagtgtccgtgtcacaaagccaactattccagaaagcataagacgcaatttcgaacaaatggaagaggagcgtactaaggtcttaatagctattgagaaacagaaagtatccgagaaggaggcagagactatgaagaagatggccattagtgaggccgagaagaatgccaatgttagcaagatccttatggagcaaaaattattggaaaaggatagtgctagacgacaagaagaaatagagaatgcaatgtacctggcacgtgaaaagagcctggcagatgcagacttctaccgtgtaataaaggaagctgaagcaaacaggttgaagctcacccctgaatttcttcagcttaaatttattcaggccattgctaataatacgaagattttctttggagataaggttcctaatatgattttggatcagaggctgcttgggaacttacttcatgatgtttctagagggagaactacaacggccaaagcagatatctgaattattcttagatgtcagaggtctgagctcagatgactcaaaatgcattaccaatattttggaggagttatatcttcgtagttatctttacacaatgagaatgaaacaagtttacaaatttccttgtgtggggagcatgtagataataggtggtcccttttgatgtagtggaaactggaacactcattacacaatcagagatcaactgttacatctaggcataaaggacgcaacatatcagcttcttgttaagtcgttacattttcctcttatacgtattatatttgtaatggatttagataaaacgctatgcgttgaaaaattatttaccttcagatc

SEQ ID NO: 19529 - protein, 319 aa, Glycine max
ASPSFQNSLSILHQVPEGHVGVYWRGGALLKTITEPGFHLKMPFITQYEPVQVTLQTDMVIDIPCGTKGGVMISFGKIEVVNQLHKEFVFETLLNYGVHYDKTWIYDKIHHEINQFCSSHSLQQVYIDVFDQIDEKMKDALQVDCTRYAPGIEILSVRVTKPTIPESIRRNFEQMEEERTKVLIAIEKQKVSEKEAETMKKMAISEAEKNANVSKILMEQKLLEKDSARRQEEIENAMYLAREKSLADADFYRVIKEAEANRLKLTPEFLQLKFIQAIANNTKIFFGDKVPNMILDQRLLGNLLHDVSRGRTTTAKADI

SEQ ID NO: 19530 - protein, 278 aa, Glycine max
MPFITQYEPVQVTLQTDMVIDIPCGTKGGVMISFGKIEVVNQLHKEFVFETLLNYGVHYDKTWIYDKIHHEINQFCSSHSLQQVYIDVFDQIDEKMKDALQVDCTRYAPGIEILSVRVTKPTIPESIRRNFEQMEEERTKVLIAIEKQKVSEKEAETMKKMAISEAEKNANVSKILMEQKLLEKDSARRQEEIENAMYLAREKSLADADFYRVIKEAEANRLKLTPEFLQLKFIQAIANNTKIFFGDKVPNMILDQRLLGNLLHDVSRGRTTTAKADI

SEQ ID NO: 19531 - protein, 261 aa, Glycine max
MVIDIPCGTKGGVMISFGKIEVVNQLHKEFVFETLLNYGVHYDKTWIYDKIHHEINQFCSSHSLQQVYIDVFDQIDEKMKDALQVDCTRYAPGIEILSVRVTKPTIPESIRRNFEQMEEERTKVLIAIEKQKVSEKEAETMKKMAISEAEKNANVSKILMEQKLLEKDSARRQEEIENAMYLAREKSLADADFYRVIKEAEANRLKLTPEFLQLKFIQAIANNTKIFFGDKVPNMILDQRLLGNLLHDVSRGRTTTAKADI

SEQ ID NO: 19532 - DNA, 1275 bp, Glycine max
gttgttggggttcgaaggtgcaaagcaaggaagctgaaataactaaatgattctgaattcttgttccatgagtccacaacctctgtcacctcacaatttcagagacctcttcgattccgtcgaagcttttctcttcgactgcgacggtgtgatttggaagggcgacgaactcatcgatggtgttccgcaaactctggacatgcttcgcgccaagggcaagaagctcgtcttcgtcaccaacaattcctggaagtcgcgttctcagtacgccgacaagttccgatcgttgggaatttcggtttcgcaggatgagatattctcctcgtcttttgcggctgctatgtacttgaaggtcaacaatttcccatcacaaaacaaggtttatgtaattggtggagagggtatactggaggagttgcagcttgcaggcattacagcttttggtggtccagacgatgcaaataaaacaatagacctgaagcagaactgctttgttgaacatgataagagtgttggagctgtcgtggttggtatagatccaaacattaactattataagcttcagtatggaaccctttgcatacgtgaaaatccaggatgccttttcattgccaccaaccgtgatgcagttggacatatgactgctttgcaagaatggcctggtgcggggtgtatggttgctgctatatgtggatcaacccagaaggagcctgttgtggtggggaaaccgtcaacctttatgatggagtttttacttaagaaattcaatgtaagttgctccaagatgtgcatggtgggtgatagactagatactgatatattgtttggacaaaatgctggttgcaaaacacttctagttctttcaggttgcacaactcaatcagctctacaagatccttcaaataatattcaacctgactattatactagtaaaatttctgacatgcttgacttatcaggagcatgaattggttcttcccaatttagacattctttgatgatccattgagactatacaataatgctctacatacacacacttatatttaactttcacaatctaattatagctgatctcatctggatttctgatacatcactttggtgtgaggttgatgtacaccaaacattattaaaggctataatagttgttctcccctgtgaatcagaatcatataattgcaatgtactcagatttcgttacagaatatcagtcatgaccagggtgaaattacactttctgccatttcaataatatggcaccatgattatatt

SEQ ID NO: 19533 - protein, 306 aa, Glycine max
MILNSCSMSPQPLSPHNFRDLFDSVEAFLFDCDGVIWKGDELIDGVPQTLDMLRAKGKKLVFVTNNSWKSRSQYADKFRSLGISVSQDEIFSSSFAAAMYLKVNNFPSQNKVYVIGGEGILEELQLAGITAFGGPDDANKTIDLKQNCFVEHDKSVGAVVVGIDPNINYYKLQYGTLCIRENPGCLFIATNRDAVGHMTALQEWPGAGCMVAAICGSTQKEPVVVGKPSTFMMEFLLKKFNVSCSKMCMVGDRLDTDILFGQNAGCKTLLVLSGCTTQSALQDPSNNIQPDYYTSKISDMLDLSGA

SEQ ID NO: 19534 - protein, 299 aa, Glycine max
MSPQPLSPHNFRDLFDSVEAFLFDCDGVIWKGDELIDGVPQTLDMLRAKGKKLVFVTNNSWKSRSQYADKFRSLGISVSQDEIFSSSFAAAMYLKVNNFPSQNKVYVIGGEGILEELQLAGITAFGGPDDANKTIDLKQNCFVEHDKSVGAVVVGIDPNINYYKLQYGTLCIRENPGCLFIATNRDAVGHMTALQEWPGAGCMVAAICGSTQKEPVVVGKPSTFMMEFLLKKFNVSCSKMCMVGDRLDTDILFGQNAGCKTLLVLSGCTTQSALQDPSNNIQPDYYTSKISDMLDLSGA

SEQ ID NO: 19535 - protein, 255 aa, Glycine max
MLRAKGKKLVFVTNNSWKSRSQYADKFRSLGISVSQDEIFSSSFAAAMYLKVNNFPSQNKVYVIGGEGILEELQLAGITAFGGPDDANKTIDLKQNCFVEHDKSVGAVVVGIDPNINYYKLQYGTLCIRENPGCLFIATNRDAVGHMTALQEWPGAGCMVAAICGSTQKEPVVVGKPSTFMMEFLLKKFNVSCSKMCMVGDRLDTDILFGQNAGCKTLLVLSGCTTQSALQDPSNNIQPDYYTSKISDMLDLSGA

SEQ ID NO: 19536 - DNA, 1584 bp, Glycine max
aactcaagatagaatggcacaggcacaacatgaagagaggatccatgaaaaccaaaaagaaaaggaaacccaagaaacaggaaactctagcttcaaattcaatgcccaagcacctgaatttgttccaagatcacatacccagatgccagtttcaggttattactacccttgcttccaaatttttggtgggtctagtgagtcagctgattggttctttgttggggaccaagatccttcttgtttgatccctactcccaatgttgcacaacccaattcctccaagaatattcttacccctgatcttcaacaaaagatcgttaaacaggtggagtatcagttcagtgacatgagtttgttagcaaatgaatcctttcataaacagatgaataaagatcctgaaggttatgttccaataaccgtaattgcttctaccaaaaaggttaaatctcttgttagtaacattaatatgcttactcaagctatacgttcatcttcaaaacttgttttgagtgttgatggaaaaaaggttaagcgtaaacatccttacactgaaaaggaaaaagaggacttgctggctcgcactgttgtggcagagaatttacctgacgatcattcccatcagaatcttcaaaaaatctttggtatagttgggagcgtgaaaacgatcagaatatgccatccccaagagcctaattcttctcgcccaaaatctgatttcatcgtcagtaataagctccatgcactagtggagtatgagacatcagatatagccgagaaagctgctgagaagttaaatgatgaaagaaattggaggaaagggatgcgtgtaaggttgttccttagatgctcgccaaaatctgttctgaagagtagaaagtcagaatttgatggatatctagatgatgacgagattataaattttgaatctgttgaggattcttctccttctcactcaaacaatgctgaattgtttgagacaaatgttgatgaaaattgggtaggatgtaagaaaggatgggctggtagaggacgtggaaagggtagagggcgcactcaaggacgtggcctacttgccccaccctctcaatcaagcagtactatcctttgtgatgcacacacaaaacacaacactaagggcccaagaatgccagatggaacaagaggcttcaccatgggacgtggcaagccaattagtccttcttctcatgtcacttcacctaaagagtgatggatatttcttaagtttttcctttggctacatatagtgaacttaggagaattctttgcatttcttcaccacagttatttaaaatcagcaaaagtgttttagaagaccctattatgtgggctactagacgggtagtcccaattttttagatttgaccagtttagtaataattcatgatgtatagtgtgatatggtatggcaatccttatgataatggccacgaagattttaaatcttacttagctttcaatttagtgaggggtattgtttttaatgtcggaaataagtgcttattgttattgtacactaaattgtttttgggattgaataagagacttaggagtcaaattctcccc

SEQ ID NO: 19537 - protein, 408 aa, Glycine max
TQDRMAQAQHEERIHENQKEKETQETGNSSFKFNAQAPEFVPRSHTQMPVSGYYYPCFQIFGGSSESADWFFVGDQDPSCLIPTPNVAQPNSSKNILTPDLQQKIVKQVEYQFSDMSLLANESFHKQMNKDPEGYVPITVIASTKKVKSLVSNINMLTQAIRSSSKLVLSVDGKKVKRKHPYTEKEKEDLLARTVVAENLPDDHSHQNLQKIFGIVGSVKTIRICHPQEPNSSRPKSDFIVSNKLHALVEYETSDIAEKAAEKLNDERNWRKGMRVRLFLRCSPKSVLKSRKSEFDGYLDDDEIINFESVEDSSPSHSNNAELFETNVDENWVGCKKGWAGRGRGKGRGRTQGRGLLAPPSQSSSTILCDAHTKHNTKGPRMPDGTRGFTMGRGKPISPSSHVTSPKE

SEQ ID NO: 19538 - protein, 404 aa, Glycine max
MAQAQHEERIHENQKEKETQETGNSSFKFNAQAPEFVPRSHTQMPVSGYYYPCFQIFGGSSESADWFFVGDQDPSCLIPTPNVAQPNSSKNILTPDLQQKIVKQVEYQFSDMSLLANESFHKQMNKDPEGYVPITVIASTKKVKSLVSNINMLTQAIRSSSKLVLSVDGKKVKRKHPYTEKEKEDLLARTVVAENLPDDHSHQNLQKIFGIVGSVKTIRICHPQEPNSSRPKSDFIVSNKLHALVEYETSDIAEKAAEKLNDERNWRKGMRVRLFLRCSPKSVLKSRKSEFDGYLDDDEIINFESVEDSSPSHSNNAELFETNVDENWVGCKKGWAGRGRGKGRGRTQGRGLLAPPSQSSSTILCDAHTKHNTKGPRMPDGTRGFTMGRGKPISPSSHVTSPKE

SEQ ID NO: 19539 - protein, 361 aa, Glycine max
MPVSGYYYPCFQIFGGSSESADWFFVGDQDPSCLIPTPNVAQPNSSKNILTPDLQQKIVKQVEYQFSDMSLLANESFHKQMNKDPEGYVPITVIASTKKVKSLVSNINMLTQAIRSSSKLVLSVDGKKVKRKHPYTEKEKEDLLARTVVAENLPDDHSHQNLQKIFGIVGSVKTIRICHPQEPNSSRPKSDFIVSNKLHALVEYETSDIAEKAAEKLNDERNWRKGMRVRLFLRCSPKSVLKSRKSEFDGYLDDDEIINFESVEDSSPSHSNNAELFETNVDENWVGCKKGWAGRGRGKGRGRTQGRGLLAPPSQSSSTILCDAHTKHNTKGPRMPDGTRGFTMGRGKPISPSSHVTSPKE

SEQ ID NO: 19540 - DNA, 1450 bp, Glycine max
ggattctagtgcaatagcaaagcatgcaaagttttgcggagatgaagttgaaatggttgtcccatttgaggggaccaactcagtagagttaaaggtgaagtttgtagtaaaagagtggcagttttctgatggttcgcatagcttgaacagcctccgttctaattctcagcgatcacttattggatcatcaagtcttctgtcaaaaactggaaggaaacttaagataactgttgtagaagcaaaggatctcgctgcaaaagacaaatctgaaaaaattaacccatacattaaattgctatatggaaaggttgtcaagaaaacaaaggttgctcttactactactagtactactacaaatcctgtctggaatcaatcatttgaatttgatgagaatgatggtgatgaatacctaaatgtaaaatgctttagtgaagaaatttttggagatgaaaatattggtagtgcaaatgtaaatttggaaggactgggggatgggtcaatcaaggttgaatggatccctcttgaaggagtgagttcgggtgaattgaagcttaaaattgaagtagttaaggtggaggaccaagaaggatcaaggggttcaactaatggttggatagaacttgttgtgattgaagcgagggatcttattgctgctgatcttcgagggacaagtgatccttatgtgagggtaaactacggaaactcgaagaaaaggacaaaggttatacacaaaacactcaaccctcgttggaaccagacattagagttccttgacgatggcagtcccttgatactgcatgttaaggaccacaatgctttactacccgaatcaagtataggcgaaggtgttgtagaatatcaaaggttgcctccaaaccagatgtctgacaagtggatacctctgcaaggggtgaaaagtggtgagatccacatccaaattacaagaaaagttccagaaatgcaaacaagacatactctagactctcaaccctcttcgttaagtaaatcacaccaaattcctacccagatgagagagatgatgaaaaagtttcgatcattaatagaggatgaaaatcttgaaggattaacaacaactttgagtgagttagaaagtctagaggatacacaggaagggtatataacacagttggagacagagcaaatgcttctactcagcaaaataaatgaactgggtcgggagatcatcaattcttcttcccgcgctagtagtagtccttctcaaagtggaatttgaccctcatgagcatcatctacctaacgttatccgtagttgatactttgactttcccatgcaaaatattgctcatgggaatgggaatcataacgtacagactttttttattttatccaagaattcttgtgtagttgcccctcacatagcaacggtatatgtttaattgatcaataaattgcaacgagtttatgtttc

SEQ ID NO: 19541 - protein, 417 aa, Glycine max
DSSAIAKHAKFCGDEVEMVVPFEGTNSVELKVKFVVKEWQFSDGSHSLNSLRSNSQRSLIGSSSLLSKTGRKLKITVVEAKDLAAKDKSEKINPYIKLLYGKVVKKTKVALTTTSTTTNPVWNQSFEFDENDGDEYLNVKCFSEEIFGDENIGSANVNLEGLGDGSIKVEWIPLEGVSSGELKLKIEVVKVEDQEGSRGSTNGWIELVVIEARDLIAADLRGTSDPYVRVNYGNSKKRTKVIHKTLNPRWNQTLEFLDDGSPLILHVKDHNALLPESSIGEGVVEYQRLPPNQMSDKWIPLQGVKSGEIHIQITRKVPEMQTRHTLDSQPSSLSKSHQIPTQMREMMKKFRSLIEDENLEGLTTTLSELESLEDTQEGYITQLETEQMLLLSKINELGREIINSSSRASSSPSQSGI

SEQ ID NO: 19542 - protein, 400 aa, Glycine max
MVVPFEGTNSVELKVKFVVKEWQFSDGSHSLNSLRSNSQRSLIGSSSLLSKTGRKLKITVVEAKDLAAKDKSEKINPYIKLLYGKVVKKTKVALTTTSTTTNPVWNQSFEFDENDGDEYLNVKCFSEEIFGDENIGSANVNLEGLGDGSIKVEWIPLEGVSSGELKLKIEVVKVEDQEGSRGSTNGWIELVVIEARDLIAADLRGTSDPYVRVNYGNSKKRTKVIHKTLNPRWNQTLEFLDDGSPLILHVKDHNALLPESSIGEGVVEYQRLPPNQMSDKWIPLQGVKSGEIHIQITRKVPEMQTRHTLDSQPSSLSKSHQIPTQMREMMKKFRSLIEDENLEGLTTTLSELESLEDTQEGYITQLETEQMLLLSKINELGREIINSSSRASSSPSQSGI

SEQ ID NO: 19543 - DNA, 1416 bp, Glycine max
aagtaaaggaaaattatgatctttgcaacatttgtttcaatgaaatgggtaatgggacagattatatcagaatggaccgccctgcatctgctcgggcccctcgatacttacatggacatacaaaaaactttccaacattaccaccacatatttttaagaaaggtgccattttgaagcatgcaaagccaaaactagatagtaggtttattttggatgttaatgtgatagatggtacaatgatggctccatctactgcatttacaaagatctggcggatgcgcaataatggcactatagtctggcacaagggaactcaacttgtttggattggaggagacaagtttagtgactctcattcagttgacttagaggttcctgaggatggtgtccctttggagaaggaacttgacattgccgttgacttcacagcacctccattacctggtcgttacatatcatattggaggatgacaactccatctggacatcaatttggccaacgtgtttgggtccttatacaggttgatgcctctctcaaggactcattttatgataactctcaaggtctgaacttgaatattcccctcgatatcagtggctctaaaggacctcatattatagatatcaatgtccagcctactgaggatgatactgttcttcaaacccgcaagcctaatgctcccattgagcctttgaatcaaatggttgatgaggaaccaaggttggagctggaaaacgaattccctataaatgaagctacatttgttgcccctgttgcctcagccccagctgcaacctctgtggcatcttcatcagtgccttgtcctataattgatctgtctgaaacaaccccagctgttccatctaatcagcaatccccaaccgtggatgtgccatcgtcatctatgggtactggtggaggaattaattctgtggaggagaatctacttaaagagcttgaggagatgggttttaaacaggttgatttgaacaaggagatcttgaggaagaatgagtacgatctggaccaatccctagacgctctctgtggtgttgatgtctgtggtgtttctgagtgggaccatatgcttgaagagttacaggagatgggttttcgtgacaaagagatgaataagagactgcttgagaaaaacaatggaagcctcaaacgtgttgttatggatttaataaacggcgagtagttttagttgaaatgttagttaatagtttatgtaaaggtgacgacttgtgctcctagggtgcctgatacttgcctggcagtcataattatcttatttcctatctcgatcttgagttgtggtgattcatcacaattgaacaatttgatctatcctatgtttggatttaagtatgttatgaactcaaaagtatatagctaaatcattttggttattt

SEQ ID NO: 19544 - protein, 399 aa, Glycine max
VKENYDLCNICFNEMGNGTDYIRMDRPASARAPRYLHGHTKNFPTLPPHIFKKGAILKHAKPKLDSRFILDVNVIDGTMMAPSTAFTKIWRMRNNGTIVWHKGTQLVWIGGDKFSDSHSVDLEVPEDGVPLEKELDIAVDFTAPPLPGRYISYWRMTTPSGHQFGQRVWVLIQVDASLKDSFYDNSQGLNLNIPLDISGSKGPHIIDINVQPTEDDTVLQTRKPNAPIEPLNQMVDEEPRLELENEFPINEATFVAPVASAPAATSVASSSVPCPIIDLSETTPAVPSNQQSPTVDVPSSSMGTGGGINSVEENLLKELEEMGFKQVDLNKEILRKNEYDLDQSLDALCGVDVCGVSEWDHMLEELQEMGFRDKEMNKRLLEKNNGSLKRVVMDLINGE

SEQ ID NO: 19545 - protein, 385 aa, Glycine max
MGNGTDYIRMDRPASARAPRYLHGHTKNFPTLPPHIFKKGAILKHAKPKLDSRFILDVNVIDGTMMAPSTAFTKIWRMRNNGTIVWHKGTQLVWIGGDKFSDSHSVDLEVPEDGVPLEKELDIAVDFTAPPLPGRYISYWRMTTPSGHQFGQRVWVLIQVDASLKDSFYDNSQGLNLNIPLDISGSKGPHIIDINVQPTEDDTVLQTRKPNAPIEPLNQMVDEEPRLELENEFPINEATFVAPVASAPAATSVASSSVPCPIIDLSETTPAVPSNQQSPTVDVPSSSMGTGGGINSVEENLLKELEEMGFKQVDLNKEILRKNEYDLDQSLDALCGVDVCGVSEWDHMLEELQEMGFRDKEMNKRLLEKNNGSLKRVVMDLINGE

SEQ ID NO: 19546 - protein, 376 aa, Glycine max
MDRPASARAPRYLHGHTKNFPTLPPHIFKKGAILKHAKPKLDSRFILDVNVIDGTMMAPSTAFTKIWRMRNNGTIVWHKGTQLVWIGGDKFSDSHSVDLEVPEDGVPLEKELDIAVDFTAPPLPGRYISYWRMTTPSGHQFGQRVWVLIQVDASLKDSFYDNSQGLNLNIPLDISGSKGPHIIDINVQPTEDDTVLQTRKPNAPIEPLNQMVDEEPRLELENEFPINEATFVAPVASAPAATSVASSSVPCPIIDLSETTPAVPSNQQSPTVDVPSSSMGTGGGINSVEENLLKELEEMGFKQVDLNKEILRKNEYDLDQSLDALCGVDVCGVSEWDHMLEELQEMGFRDKEMNKRLLEKNNGSLKRVVMDLINGE

SEQ ID NO: 19547 - DNA, 1521 bp, Glycine max
attcgaactactaaggtcatggcaactgtcattattcaaagcattatgaaaaacggaacacgcatttctacttcagaaaaggttgaagcattgtttgaactgataaaggggcttatcaaggattctgatgggatccctaatgatgagctggatgaagatgatttcaaagaggagcagaactctgtttcccgtctaatccagatgctttataatgatgatccagaagaaatgtttaagatcattgatactgtgaggaagcacatactgactggaggaccaaaacgtctgcctttcactgttccacctcttgttttttcttctttaaagttggtcagacagttgcaaggtcaagaagaaaatccatttggagatgatgcatcaacaacaccaaagaaaatttttcagctttaaatcagaccatcgagactttgtcaggtgtcctggcgccagaattagcattgcagttgtacttgcaatgtgctgaggctgcaaatgactgtgaattggagcctgttgcttatgaatttttcacccaagcttatattctatatgaagaagaaatttctgattccagagcacagatcacagctatccatttaataatagggactcttcaaaggatgcacgtctttggtgttgaaaacagggatactttaacccacaaggccacagggtattcagcaaagcttttaaagaagccagatcaatgcagagctgtgtatgcatgctcacatctgttttgggttgatgatcatgataacatgaaagatggagagagggtcctattatgtcttaagcgggctttaagaattgcaaatgcagcccaacaaatggcaaatgcagcacgaggtagcaccggatcagtaatgctcttcattgagatattgaacaagtatctttacttctttgagaagggaaacctacaagtcaccgttgcggctatccagggcttaattgagttaattatgaatgaaatgcagagcgacaccacaactccagatccagctgccaatgctttcttagccagtactatgcggtatatagagttccaaaaacaaaaaggcggtgcggtaggtgagaagtatgaagccatcaaggtttcacatgctggataactgatacccttgatgttgtcatgttagattttgaagcaatttgttcttgggctggtccagctactgttttcaattgtctttagattccaaactgaagaaccacttcctgatatgtgcccacagcaaaagtacactcgctcattgagttaggactccgattcactctgtaactaatgaaactgagccaccattaaacattgctagatcttttcttcttccaattttacatcagtttagagaaattacttgtagtacagttgctatatttaaattcttaaagtgtgcacaatggtttagacggacttgtcgatttccagtggagtctatagtcagactataagagtgtgttttaaactgttgttttttaattttgaaaattgaaaaaagatttgaagttattcttatc

SEQ ID NO: 19548 - protein, 164 aa, Glycine max
MHVFGVENRDTLTHKATGYSAKLLKKPDQCRAVYACSHLFWVDDHDNMKDGERVLLCLKRALRIANAAQQMANAARGSTGSVMLFIEILNKYLYFFEKGNLQVTVAAIQGLIELIMNEMQSDTTTPDPAANAFLASTMRYIEFQKQKGGAVGEKYEAIKVSHAG

SEQ ID NO: 19549 - protein, 136 aa, Glycine max
IRTTKVMATVIIQSIMKNGTRISTSEKVEALFELIKGLIKDSDGIPNDELDEDDFKEEQNSVSRLIQMLYNDDPEEMFKIIDTVRKHILTGGPKRLPFTVPPLVFSSLKLVRQLQGQEENPFGDDASTTPKKIFQL

SEQ ID NO: 19550 - protein, 130 aa, Glycine max
MATVIIQSIMKNGTRISTSEKVEALFELIKGLIKDSDGIPNDELDEDDFKEEQNSVSRLIQMLYNDDPEEMFKIIDTVRKHILTGGPKRLPFTVPPLVFSSLKLVRQLQGQEENPFGDDASTTPKKIFQL

SEQ ID NO: 19551 - DNA, 953 bp, Glycine max
ataccacctcccagaagtagagttgctgtagattatggctcaagggtggcttctgtaaggcgaccatcttacagggattatcctgcccgtggtcctggctacaccgagctccctagaagcacatctcgtgctgcaccaaggagaggctatgtggatgatgggtatggccaaagatttgaaagggctcctcctccacctcctccaccccatctaagttaccgtgaaggacgtcctcgagattatgatgctctgtctggctcaaaacgtccttatgctgctatagatgatcttcctccacgatatgctgatactggtgctcgccaatcaagagctcgtctagactatgactatggtgatagtgcttcgcagtatggagatgcttatggtgatagacttggaagatctagtgtgggatatggtggtggcagcagaagttctatttctagtcaagattcacatgggatgtatagcagtcggcagggcatgagttatggaggaggttcttttggtagtggtgatgttggtggcatgtattcatcaagttatggtggtgattacatttctcgtggaagtgatgttggtggcagctcatattcatcagtgtattctggagggggtgtgggtggtggtagcagttatatgggtggtggtggtttaggatcttattattgagatctgatatgataaagtggctgctgtaggatgaccgttgaagcattatgtctacaatttggagacaaaggattgctatttatagcttttatgagaatttgttacaaaaactagcttatctcaattagagatgggatgtatttatcaagttatggtggtgattacatttctggatgggatgtattatcagtacttgaatttatgctgtatggactcaagttaattagagatggaaaaagtattgagcagtgatgtgtaattcatatcatacttggacggac

SEQ ID NO: 19552 - protein, 223 aa, Glycine max
IPPPRSRVAVDYGSRVASVRRPSYRDYPARGPGYTELPRSTSRAAPRRGYVDDGYGQRFERAPPPPPPPHLSYREGRPRDYDALSGSKRPYAAIDDLPPRYADTGARQSRARLDYDYGDSASQYGDAYGDRLGRSSVGYGGGSRSSISSQDSHGMYSSRQGMSYGGGSFGSGDVGGMYSSSYGGDYISRGSDVGGSSYSSVYSGGGVGGGSSYMGGGGLGSYY

SEQ ID NO: 19553 - DNA, 1326 bp, Glycine max
ataaaaggttaaattttctccttttaaaaggtaatcactttatgggggatataccaaagcagatatgccagttgatagatttaaacatgctagacctttctcataacaatttttctggtgttatccccaaatgcttaggtaaaatgccttttgagaataagtacctgaagagcttgttagcaagattttctacctttgatccagatcccaataaccttgcccaatctccggaccttgcccaatctccaacaccggtatcgggaccaactctaaatttgcaagagaaagcaaatttcactacaaaggaaagaactgacacttacatcgggagagtccttttttatatgtctggaattgacttatctcacaataaactgaagggaaatatcccatttgagcttggatacttgacaaaaattcgagcattgaacttatcccacaatgatttaactgggaaaattccagttacattctccttgttggcacaaacagagagtttggatctttcttttaacatgttaaacagtcaaattcctcctcaactgagcatgttaacatcacttgaagtatttagtgtggcacacaataacttatcaggtccaacacctgattttaaaggacaattttccacatttgatgaaagcagctatgagggtaatccgttactttgtggtcctccactgccaaagagttgcaatcctccacctactattataccaaatgactcaaacactgatggagacaatgatagtttgttggatatgtatgttttctgtgtgagctttgccgtgtcatacatatcaacattgttggtaactgcagcagctttatacatcaatccttactggaggcaggcatggttttactacatggaattgaaatacaagcaagggacaagaagaaaagttgaagcttgaagattcgcacttaacgcgccaatctatcttcgagctgttgttgcttagcgggagggtttacgcttagcacgaagaagaagcatggagaatctgcagtcatgcaaagtagtgcgcaggcgcgctcagcgcttattcaccaaatctccatctcaggatggcttttaagtgaaaaagatagagtaaaaaagggttgttcatgttatgataaaatatagagttctaaagcttgagctagaggaagaagacaaccattgggagctcattctcttccatggatttatcttcattccttatcccttaatcttttacacccttttgtacagttgagcccttcatgactgtgaagggctaaacaacccattgttggagaggtttccaccaaactctatttaatattattattattttc

SEQ ID NO: 19554 - protein, 304 aa, Glycine max
KRLNFLLLKGNHFMGDIPKQICQLIDLNMLDLSHNNFSGVIPKCLGKMPFENKYLKSLLARFSTFDPDPNNLAQSPDLAQSPTPVSGPTLNLQEKANFTTKERTDTYIGRVLFYMSGIDLSHNKLKGNIPFELGYLTKIRALNLSHNDLTGKIPVTFSLLAQTESLDLSFNMLNSQIPPQLSMLTSLEVFSVAHNNLSGPTPDFKGQFSTFDESSYEGNPLLCGPPLPKSCNPPPTIIPNDSNTDGDNDSLLDMYVFCVSFAVSYISTLLVTAAALYINPYWRQAWFYYMELKYKQGTRRKVEA

SEQ ID NO: 19555 - protein, 291 aa, Glycine max
MGDIPKQICQLIDLNMLDLSHNNFSGVIPKCLGKMPFENKYLKSLLARFSTFDPDPNNLAQSPDLAQSPTPVSGPTLNLQEKANFTTKERTDTYIGRVLFYMSGIDLSHNKLKGNIPFELGYLTKIRALNLSHNDLTGKIPVTFSLLAQTESLDLSFNMLNSQIPPQLSMLTSLEVFSVAHNNLSGPTPDFKGQFSTFDESSYEGNPLLCGPPLPKSCNPPPTIIPNDSNTDGDNDSLLDMYVFCVSFAVSYISTLLVTAAALYINPYWRQAWFYYMELKYKQGTRRKVEA

SEQ ID NO: 19556 - protein, 276 aa, Glycine max
MLDLSHNNFSGVIPKCLGKMPFENKYLKSLLARFSTFDPDPNNLAQSPDLAQSPTPVSGPTLNLQEKANFTTKERTDTYIGRVLFYMSGIDLSHNKLKGNIPFELGYLTKIRALNLSHNDLTGKIPVTFSLLAQTESLDLSFNMLNSQIPPQLSMLTSLEVFSVAHNNLSGPTPDFKGQFSTFDESSYEGNPLLCGPPLPKSCNPPPTIIPNDSNTDGDNDSLLDMYVFCVSFAVSYISTLLVTAAALYINPYWRQAWFYYMELKYKQGTRRKVEA

SEQ ID NO: 19557 - DNA, 1117 bp, Glycine max
gacacgcatctatacttgtccagaagaagtaagatccatgaactaacattcccacacgctcgcttcaccatatttgccacccttttaacctcacttcttagggttattttgctcccttttccttgtttgggaattgggtttggtttggtttttcttggttgtaaaaggaaacaaagaaagaactaagatgggaagaggtagggtacagctgaagaggatagagaacaagatcaatcgccaggtaactttctccaaaaggagaggtgggttgctcaagaaagctcatgaaatatctgtactctgtgatgctgaggtagctttgattatcttctctcacaaaggaaagctctttgagtatgctactgattcatgcatggagaagatactggaacgccatgaaaggtatgcctatgcagagaggcagctagtagcaaatgattctgagacacaggaaaactggaccattgaatacactagactgaaggcaaaaattgaccttttacagagaaaccacaggcactatatgggagaagatttggcttcaatgagcctcaaagagcttcagagtttggagcagcagttggttactggtatcaaaaacatccgcacaaggaggaatgatctcatgtccgagtccatttctgagcttcagaaaaaggagaaaaggatacaagaggagaataacacccttgcaaagaagatcaaggagaaagagcaggctgtagcacagcaagctgcacaatgggagcagccaaactacagggttgatacatctttcatgccacagcagcaaccccttcccaccagtttgaacatatgtggcaataattactgccaggaagctgcaccagaactaggaaggaacggtctagacctgaccctggaaccactctattcttgcaaccttggatgcttctgaaaagttgtttcttctgagttggattatattatataagtgctggcatatatgaactactataagtagtctgtttgaatgttttatatgtattttggtctatggcttttccctctactttgaagacattattttgaattgcttctgttgtaaacaaattgaatttgaaatctaattgtgtatttttgaaatatgttaaag

SEQ ID NO: 19558 - protein, 243 aa, Glycine max
MGRGRVQLKRIENKINRQVTFSKRRGGLLKKAHEISVLCDAEVALIIFSHKGKLFEYATDSCMEKILERHERYAYAERQLVANDSETQENWTIEYTRLKAKIDLLQRNHRHYMGEDLASMSLKELQSLEQQLVTGIKNIRTRRNDLMSESISELQKKEKRIQEENNTLAKKIKEKEQAVAQQAAQWEQPNYRVDTSFMPQQQPLPTSLNICGNNYCQEAAPELGRNGLDLTLEPLYSCNLGCF

SEQ ID NO: 19559 - protein, 181 aa, Glycine max
MEKILERHERYAYAERQLVANDSETQENWTIEYTRLKAKIDLLQRNHRHYMGEDLASMSLKELQSLEQQLVTGIKNIRTRRNDLMSESISELQKKEKRIQEENNTLAKKIKEKEQAVAQQAAQWEQPNYRVDTSFMPQQQPLPTSLNICGNNYCQEAAPELGRNGLDLTLEPLYSCNLGCF

SEQ ID NO: 19560 - protein, 131 aa, Glycine max
MGEDLASMSLKELQSLEQQLVTGIKNIRTRRNDLMSESISELQKKEKRIQEENNTLAKKIKEKEQAVAQQAAQWEQPNYRVDTSFMPQQQPLPTSLNICGNNYCQEAAPELGRNGLDLTLEPLYSCNLGCF

SEQ ID NO: 19561 - DNA, 1391 bp, Glycine max
acactttttttgtctgttgaatcttgcgcttttagcttttatccattgaatagcaagagaccccttttgttcccttttgttttttagtcctttaaacattcttggcttctttgcagagctggaattttcactcttcaacccacattgttttgatcccaaatcagaaaaaaaaaaaaaaaaaattgggtttgatatgatccgtaagctgaaaggctgaaactagtatcattggagacaccctttttcatctcataatttgaggttgatcaacgagatcgtttcgttcagagttcagactaatcatggcgtgttccttgaacagtgttttctgtgttcctgacttgaatgagagcatgtttggttccagaaccaaaggggctttagtgccttgtccttcaaaaactggcaaagttaaatcatggggttgttctgttttgagtaatgctttcatgggaaaatccatttctcttgatgaaaagggttcaggatgttgcaactcaaaatcctccagtaatatccctgttcatgcacaagcaacaatttgtgttagcaaggctttgaagtggtggaagaagaccctaaagcctaatatgattgagatccattcagcacaagaactggtccattctttggtcaacgctggcgattcattgcttgtggttgatttctattcacttggttgtggaggctgcaaagcccttcatcctaagatctgtcaaatagctgaattgtacccaaatgcaacctttctgaaagtcaattacgaggaactgaaaacaatgtgtcacggtttacgaattcacgtgttacccttcttcaggttctatagaggttcggagggtcgagtttgtagcttcagctgtaccaatgccactatcaagaaatttaaggacgctttggcaaagcatgggagtgaacggtgtagttttggtccaacaaaaggtttggaagaatccgagttaaaaattttggcttctattggtgaaattaattcttctccgttactatgtcctaagctagggaaattggaagatttggttatggagagccatgatttttctggggtttggagcatggaaagtaatagcaggggaattatgctggatgctatatattgatttattttcaaactagctagtagggcatttattttgccatcttacagaatgaagattataatggagtaaagcacttccatatcatttgttttcctaaaatatttactgttttttattttttctgtaaattattattttattattttttttggaggggcttgtaacattattttggttggatttgagccctacaatttagcaagtgctgctgggatactatcttctgtatctgaaccctctcagattatttttaatagttctctaaatcatctt

SEQ ID NO: 19562 - protein, 271 aa, Glycine max
MACSLNSVFCVPDLNESMFGSRTKGALVPCPSKTGKVKSWGCSVLSNAFMGKSISLDEKGSGCCNSKSSSNIPVHAQATICVSKALKWWKKTLKPNMIEIHSAQELVHSLVNAGDSLLVVDFYSLGCGGCKALHPKICQIAELYPNATFLKVNYEELKTMCHGLRIHVLPFFRFYRGSEGRVCSFSCTNATIKKFKDALAKHGSERCSFGPTKGLEESELKILASIGEINSSPLLCPKLGKLEDLVMESHDFSGVWSMESNSRGIMLDAIY

SEQ ID NO: 19563 - protein, 254 aa, Glycine max
MFGSRTKGALVPCPSKTGKVKSWGCSVLSNAFMGKSISLDEKGSGCCNSKSSSNIPVHAQATICVSKALKWWKKTLKPNMIEIHSAQELVHSLVNAGDSLLVVDFYSLGCGGCKALHPKICQIAELYPNATFLKVNYEELKTMCHGLRIHVLPFFRFYRGSEGRVCSFSCTNATIKKFKDALAKHGSERCSFGPTKGLEESELKILASIGEINSSPLLCPKLGKLEDLVMESHDFSGVWSMESNSRGIMLDAIY

SEQ ID NO: 19564 - protein, 222 aa, Glycine max
MGKSISLDEKGSGCCNSKSSSNIPVHAQATICVSKALKWWKKTLKPNMIEIHSAQELVHSLVNAGDSLLVVDFYSLGCGGCKALHPKICQIAELYPNATFLKVNYEELKTMCHGLRIHVLPFFRFYRGSEGRVCSFSCTNATIKKFKDALAKHGSERCSFGPTKGLEESELKILASIGEINSSPLLCPKLGKLEDLVMESHDFSGVWSMESNSRGIMLDAIY

SEQ ID NO: 19565 - DNA, 1337 bp, Glycine max
ttggttctttcttgtcatatatcaaggacaatagctccaggatttttagataacgatctgtttcgcattcaaacattgcaacatgtaatgaagatgacccgtacttgggactcaacaatgtcaatgataccaagaggaggagatactatatggggtggtcttgattggtcaccagaagaaggctatcaccctagccagagaaagcacagcaataacaatactcagttgaaagaccacgaaacaaatcaaacaaattttgtcaactatggaagaatgatatcatttggcagagatgtggctgaggcacactcccctgagattcagatgactgacttccggggtgctatcaagggtcgcagtattgcaaataccacttgtcgtgatgtgtggactgaataccatgaaatgggatttgaaggagtgagagcagttgctgaacataaagtttacacagctggctcagtcgttgacctccttcaatttgttgctccaaagatgatggctcgtggtagtgctcatttctcttatggaattgctgacaatttggatgaccctaaatataatcactacaagtattggtcaaaccccttggaaacaaaattaccaaatgctcctgatatggaaatcttctctatgtatggagttggcttacctactgaaagatcttatatttacaagttaactccctttgccgagtgttacattccttttgaaattgacaccacacaagatggtggtagcgatgaagatagctgtctgcaaggtggagtctacactgttgatggggatgagactgtgccggttctaagttcaggcttcatgtgtgctaaaggttggcgcggaaaaacaagattcaacccatccggtatccgcacctacgttagagaatatgatcattctcctccagccaaccttctagagggaaggggcacacaaagtggtgctcacgttgacatcatgggaaattttgcattgattgaggatgttataagagtggctgctggagccaaaggagaagatctaggaggtgataaagtgtattctgatatcttcaagtggtctgagaaaatcaagttacccctatgaatgaagcccaatgcacttccacagttccactcagacacttctcttgaacccctttaaggatcagatcaggctatatataatttttgcagtatattttcactgccaccagagttctgtaagttgcacttattagaattgctggttctgctgatcaaattccagttccatggaggggtgaactatgcgaattggttatattgtaagagcttgtattgaacatttttgttattaaagtaaggatttgatttgtc

SEQ ID NO: 19566 - protein, 361 aa, Glycine max
LVLSCHISRTIAPGFLDNDLFRIQTLQHVMKMTRTWDSTMSMIPRGGDTIWGGLDWSPEEGYHPSQRKHSNNNTQLKDHETNQTNFVNYGRMISFGRDVAEAHSPEIQMTDFRGAIKGRSIANTTCRDVWTEYHEMGFEGVRAVAEHKVYTAGSVVDLLQFVAPKMMARGSAHFSYGIADNLDDPKYNHYKYWSNPLETKLPNAPDMEIFSMYGVGLPTERSYIYKLTPFAECYIPFEIDTTQDGGSDEDSCLQGGVYTVDGDETVPVLSSGFMCAKGWRGKTRFNPSGIRTYVREYDHSPPANLLEGRGTQSGAHVDIMGNFALIEDVIRVAAGAKGEDLGGDKVYSDIFKWSEKIKLPL

SEQ ID NO: 19567 - protein, 332 aa, Glycine max; identical to SEQ ID NO: 16746

SEQ ID NO: 19568 - protein, 330 aa, Glycine max; identical to SEQ ID NO: 16747

SEQ ID NO: 19569 - DNA, 785 bp, Glycine max
aaagaacatatacaaagatccagatgatgggcagcagcgctttttgcttgaattggagtttgttcagtgccttgccaatcctacctacatccactatttggcccaaaatcgatactttgaggatgaagcattcattggatacttaaagtatcttcaatattggcaacgccctgaatatattaaatttattatgtatcctcattgcctctattttcttgagctgcttcagaatgcaaattttcgcaatgcaatggcgcatccaaccaataaggaactggcacacagacaacaattctacttctggaagaactataggaacaatcggctaaaacacattttaccaagatcccttcctgaacttagcgccacacctgcagctcctgcttcaacctcatctcaggcacctgtgtctgcactaccaccagtacctgcaacaagtgttgctgtgacagcaacaccttctcaagctccttctccaatgccatatggtatgccccctggctctggtcttgcaaaaaatgacatgaggaatcctacagttgataatagaaggaagagaaagtgactgtataatacgacatgtaaattgattataaaagcaattcaatgtggttggatcaggcaatcagtttatttttccttcttagctgaaagattgaagtggtgatattgatcgaaccaaatttttttgcaagttaatttttttcccgttaatgttattaaatattagtggaatttgcacttggttagttaattttttactgggctgaaacagttctgattgg

SEQ ID NO: 19570 - protein, 187 aa, Glycine max
KNIYKDPDDGQQRFLLELEFVQCLANPTYIHYLAQNRYFEDEAFIGYLKYLQYWQRPEYIKFIMYPHCLYFLELLQNANFRNAMAHPTNKELAHRQQFYFWKNYRNNRLKHILPRSLPELSATPAAPASTSSQAPVSALPPVPATSVAVTATPSQAPSPMPYGMPPGSGLAKNDMRNPTVDNRRKRK

SEQ ID NO: 19571 - protein, 124 aa, Glycine max
MYPHCLYFLELLQNANFRNAMAHPTNKELAHRQQFYFWKNYRNNRLKHILPRSLPELSATPAAPASTSSQAPVSALPPVPATSVAVTATPSQAPSPMPYGMPPGSGLAKNDMRNPTVDNRRKRK

SEQ ID NO: 19572 - protein, 104 aa, Glycine max
MAHPTNKELAHRQQFYFWKNYRNNRLKHILPRSLPELSATPAAPASTSSQAPVSALPPVPATSVAVTATPSQAPSPMPYGMPPGSGLAKNDMRNPTVDNRRKRK

SEQ ID NO: 19573 - DNA, 1478 bp, Glycine max
gattgattttacttccttatcctctcttcttcttcttctcccgctcgcgccttctgtctcaatctcaatccaccagaaatggcaacaatagttagccaccaccaccgcctattctccgccgccacgcgcttcaattccactggcagagactcgcggcggcaaaggagcggcgcaaactcggtccggtgcgctgacgtaagcacggtcacgagcgagaatcagcgagtgacggtgagtaacaggagcgattcgctggagatatgccgcgtgctgaacggaatgtggcagaccagcggcggatggggccgaatcgaccgagacgacgccgtcgaggctatgcttcgctacgccgacgccggcctaactaccttcgacatggccgatcactatggacctgctgaagatctatatgggattttcattaatcgagttcgtcgagagcgtcctgctgaattgttggaacaggtcagaggtctcactaagtgggttcctccgccagttaagatgactagtagctatgtaagagacagcatcaatgtttcaaggaagagaatggatgtggaatccttggacatgcttcagtttcattggtgggattactcgaatccaggctacctggatgcactaaaacacctaacagatttgaaagaagaaggtaaaatcaagactgtggctctgacaaattttgatacggagagattacaaattattcttgaaaatgaggttcctgttgtaagcaatcaggtgcaacattcccttgttgatatgcgtccccaacagagaatggcagagctttgtcagcatacaggagtcaaacttataacgtatggaacagtaatgggtggtctgttgtctgagaagttccttgacaccaacatagctattccttttgctggtcctgcaataaacactccctccctccaaaagtacaaaaggatggtagatgcttggggaggatggagtttgttccagggactgcttcggactcttaaacaagtagcttctaaacatggcgtatcgatcgcaactgttgctgtgaagtatatactagatcagcctgcagtagcaggatcaatggttggtgtcagacttggcttggcagaacatattcaagataccaatgctatcttttcacttgttctcgatgaagatgacgtgaacagcataagagaagccacagcgaaaggaaaggatctgcttaaagtgattggtgattgtggagatgagtacaggcgtgcatgagtcatgttggcttatcaacctggtgaagtgctttaatttatataggacaaggggatggaaaaaaagggagggggacacaggaaaagtgttcaagctcaattttttgtcagttgaagaatttgtgtgtaatacttttatggattacccagtaatgatcaaaagacaaaatagatgaaaggaggaagtaatgtattctgtagtatatatcttgtgagatttatgcaaactttcctcac

SEQ ID NO: 19574 - protein, 387 aa, Glycine max
MATIVSHHHRLFSAATRFNSTGRDSRRQRSGANSVRCADVSTVTSENQRVTVSNRSDSLEICRVLNGMWQTSGGWGRIDRDDAVEAMLRYADAGLTTFDMADHYGPAEDLYGIFINRVRRERPAELLEQVRGLTKWVPPPVKMTSSYVRDSINVSRKRMDVESLDMLQFHWWDYSNPGYLDALKHLTDLKEEGKIKTVALTNFDTERLQIILENEVPVVSNQVQHSLVDMRPQQRMAELCQHTGVKLITYGTVMGGLLSEKFLDTNIAIPFAGPAINTPSLQKYKRMVDAWGGWSLFQGLLRTLKQVASKHGVSIATVAVKYILDQPAVAGSMVGVRLGLAEHIQDTNAIFSLVLDEDDVNSIREATAKGKDLLKVIGDCGDEYRRA

SEQ ID NO: 19575 - protein, 320 aa, Glycine max
MWQTSGGWGRIDRDDAVEAMLRYADAGLTTFDMADHYGPAEDLYGIFINRVRRERPAELLEQVRGLTKWVPPPVKMTSSYVRDSINVSRKRMDVESLDMLQFHWWDYSNPGYLDALKHLTDLKEEGKIKTVALTNFDTERLQIILENEVPVVSNQVQHSLVDMRPQQRMAELCQHTGVKLITYGTVMGGLLSEKFLDTNIAIPFAGPAINTPSLQKYKRMVDAWGGWSLFQGLLRTLKQVASKHGVSIATVAVKYILDQPAVAGSMVGVRLGLAEHIQDTNAIFSLVLDEDDVNSIREATAKGKDLLKVIGDCGDEYRRA

SEQ ID NO: 19576 - protein, 301 aa, Glycine max
MLRYADAGLTTFDMADHYGPAEDLYGIFINRVRRERPAELLEQVRGLTKWVPPPVKMTSSYVRDSINVSRKRMDVESLDMLQFHWWDYSNPGYLDALKHLTDLKEEGKIKTVALTNFDTERLQIILENEVPVVSNQVQHSLVDMRPQQRMAELCQHTGVKLITYGTVMGGLLSEKFLDTNIAIPFAGPAINTPSLQKYKRMVDAWGGWSLFQGLLRTLKQVASKHGVSIATVAVKYILDQPAVAGSMVGVRLGLAEHIQDTNAIFSLVLDEDDVNSIREATAKGKDLLKVIGDCGDEYRRA

SEQ ID NO: 19577 - DNA, 1250 bp, Glycine max
agttatctggaaatggtttctgtgtgaaatataaatttgataaaggcagaatataatgatgttttatttcaagatatgtttcacaaaccgacctaaagaagtgcattgtgcagttagtaaattgaattgagttttcaagttgtttaagaattttgtataaatgaggatctattatttaattacacggattgcatatattatggattcaatgcattttaaattttttcccattcatgtcctctgttaacagaagttctatataaaacttttactgtatcactttcagtcatgcagatcttgtattgagtgctaataaaaagataaccattactggtataaacctttcttattcatgttaattttgcagccttcaatacttccaattcagatcctccgaattgggcagcttatcattcttagtgtaccaggagaattcacaacaatggccgggaggcgtcttcgtgatgcagtgaagacagtgctaactagtgaagaatattttgaatttgatgacattcacattgttatagcagggttaactaatacttattcacagtacatcactacatacgaagagtaccaggtgcaaagatatgagggtgcttctacgctatatggtccacacacactcagtgcatacattcaggagtttaagaaacttgcagaggctctcgtctacggcgaaccagtagaacctggtcctcaacctcctgatctcctggagaagcaaataagcttacttccacctgttgtggtggatgcaaccccccttggtgtaaattttggggatgtttgcactgatgtaccacggaactccaccttcaagagtggtgacttggtgacagcttcgttctggtctgcatgtcctcgtaacgaccttatgactgaaggcacctttgcactggtggaatttctccaagaaaaggatgcttggactcctgcttatgatgatgatgatttctgcctgcgctataagtggtcaaggccttccaaactgagttctaggagcaaagcaaccttggaatggaggataccacagagtgtggctcctggtgtgtacagattaagacactttggagctgcaaagggcttatttggatcaattcatcactttacaggttcatccactgcgtttgtagtagcctaaagggaggcatgttgtttcagccgttactatatttgtgatttgtttttctgaactttagcagaatctattcaatcctaaagaaggatgtttcactatggatcag

SEQ ID NO: 19578 - protein, 264 aa, Glycine max
MLILQPSILPIQILRIGQLIILSVPGEFTTMAGRRLRDAVKTVLTSEEYFEFDDIHIVIAGLTNTYSQYITTYEEYQVQRYEGASTLYGPHTLSAYIQEFKKLAEALVYGEPVEPGPQPPDLLEKQISLLPPVVVDATPLGVNFGDVCTDVPRNSTFKSGDLVTASFWSACPRNDLMTEGTFALVEFLQEKDAWTPAYDDDDFCLRYKWSRPSKLSSRSKATLEWRIPQSVAPGVYRLRHFGAAKGLFGSIHHFTGSSTAFVVA

SEQ ID NO: 19579 - protein, 234 aa, Glycine max
MAGRRLRDAVKTVLTSEEYFEFDDIHIVIAGLTNTYSQYITTYEEYQVQRYEGASTLYGPHTLSAYIQEFKKLAEALVYGEPVEPGPQPPDLLEKQISLLPPVVVDATPLGVNFGDVCTDVPRNSTFKSGDLVTASFWSACPRNDLMTEGTFALVEFLQEKDAWTPAYDDDDFCLRYKWSRPSKLSSRSKATLEWRIPQSVAPGVYRLRHFGAAKGLFGSIHHFTGSSTAFVVA

SEQ ID NO: 19580 - DNA, 1233 bp, Glycine max
gatgcgaaaatatctcgttcatgttaatgttatgataacgaggaatggactatgatgctgttctgttggtgacggtgtgattgattgtgacgaaatctgacaatgaagcgtggagcattgttgtcagtgcttgcctgcgccttcgcggcggtgatctgggcagcgaacggcgacgacaacctcgtcccgcctcgccgggaagtgtacggcaatgggcgaatattcgacatcagtcatcggtaccaacccgagatgccggaatgggaatcgaatgacggcatagggcagttcctgtggcttcccaagagcatgaagaacggttccctcgccaacaactccgaaatgaagtttcccacccacaccggcacgcacgtcgatgcccccggtcacgtgttcgaccactacttccacgccggcttcgatgtcgacacgctcgacttggacatcctcaacggacctgctatgttggttgatgttccaagagatagtaatattaccgctcaagttatgaagtcgttgaatattccaaggggtgtaatacgtgttctcttccgaactttaaataccgaccggcggctgatgtttcagaaggaatgggactcaagctatgtgggattcacagccgatggagccaaatggctagtggagaacacagatatcaaacttgtaggaattgattacctatctgttgcttcttatgattacttgattccatctcaccttgtttttctaaaagacagggagatcattctcgtggaaggcttgaagcttgatgatgttccagcagggttatattcagtccattgcttacctcttaggttggctggtgctgagggatcaccaatacggtgcattctgattaaaaattagggtgtccacatgtctgtgttcggtgtccgcgtcggtgtcggtgcttcataggctggaactgataaattggcatgggggtgtggtgtccttatggagcaagatagtttcaatgttgtgcaacaacttttgtagcttatgtttacacttactaaaaacatgcataagcacttcaaaaaatcattttgaaaaggaaaataatgtatatatagataatttgcacatttcattagcacttcaagagagatgcaacgatattggcattgcgctgaatttggttttcttttgtctgctaggttggaaaggaataagttggcacaatggtgtctttatggagcaagatagtatcaataatgtttgttaaag

SEQ ID NO: 19581 - protein, 255 aa, Glycine max
MKRGALLSVLACAFAAVIWAANGDDNLVPPRREVYGNGRIFDISHRYQPEMPEWESNDGIGQFLWLPKSMKNGSLANNSEMKFPTHTGTHVDAPGHVFDHYFHAGFDVDTLDLDILNGPAMLVDVPRDSNITAQVMKSLNIPRGVIRVLFRTLNTDRRLMFQKEWDSSYVGFTADGAKWLVENTDIKLVGIDYLSVASYDYLIPSHLVFLKDREIILVEGLKLDDVPAGLYSVHCLPLRLAGAEGSPIRCILIKN

SEQ ID NO: 19582 - protein, 205 aa, Glycine max
MPEWESNDGIGQFLWLPKSMKNGSLANNSEMKFPTHTGTHVDAPGHVFDHYFHAGFDVDTLDLDILNGPAMLVDVPRDSNITAQVMKSLNIPRGVIRVLFRTLNTDRRLMFQKEWDSSYVGFTADGAKWLVENTDIKLVGIDYLSVASYDYLIPSHLVFLKDREIILVEGLKLDDVPAGLYSVHCLPLRLAGAEGSPIRCILIKN

SEQ ID NO: 19583 - protein, 186 aa, Glycine max
MKNGSLANNSEMKFPTHTGTHVDAPGHVFDHYFHAGFDVDTLDLDILNGPAMLVDVPRDSNITAQVMKSLNIPRGVIRVLFRTLNTDRRLMFQKEWDSSYVGFTADGAKWLVENTDIKLVGIDYLSVASYDYLIPSHLVFLKDREIILVEGLKLDDVPAGLYSVHCLPLRLAGAEGSPIRCILIKN

SEQ ID NO: 19584 - DNA, 1485 bp, Glycine max
tctgtgatctctttgatttgcaccaggagcaagtaccttatgaagtggcatggttttggcaaaaggagattgtcagggaaaagaaggcacagattgaaaaggaaggagattgcactgacacccttattattctacaacatccttctgtttatacattaggtacagctagtactgaggggaacctcaagtttgacatgaaaaatgctccctttaatatttatcgcactgagcgtggtggagaagttacataccatggccctggtcagctagttatgtaccccatcatcaaccttcgaagacacaagatggatcttcattggtaccttagaactcttgaagaggttgttattcgtgttctttcttcagcattttcaattcaggcttctaggctggaaggtttaactggtgtttgggttggtaaatctctaaatcctattgatataacactcattgacggtttttgctcctcacatcctgcttgggttctaaattatcttggttattacacacattaatagttaataattatacagcatttgttttaatctaagtattatcaaatatcatccaatagattttgattttttggtgctaatatcatacaccgcatgggactctgaaaactttgtttccttccttatgcttagaagtgtgttgttagatttataaccttttagatattctacttggatttaaggcagagacaactactacaattgagaaataagattataagacacattcaataatgcatgtgagtttgtcatgattcagtttgaaatataacaatagtcaaaaatcatttgtcttattctacttagtaatgtattacaggaaatgagaaactggcagctgttggtatcagagtgtctcactggataacctatcatggcttagcacttaatgtcacaacagatttgtctccatttaaatggattgtcccatgcggaatacatgatcgtcaagtaggaagcattaaggggttggtgagagaaggcaagcaatgtattattgatcatggaacaactgatttgcatcaactggatgatgccagtcttattcatactacacataagtccttgattgaggagttctcacaagcatttcagcttgagtactgttacaaaagtatttctgccgccctgttgtatgaaagcaaacaaagctctctcaccaaatagacacagcaaagttgtatttgtttgatatacatagcaatcccctgtctattcactttttccagataaagggccagagaaaatatcatcacttttgcaatagaaacacttttatacttacgttcctgattaccaattgcttgggaagaatagctagctgattaagttatagattactgatgattagttttatctacgtttattctaagcaagtatatttgttgatttctgtaaaatttatcattgtataggcacttttcttggctagtactaatttgacagatacttaaatttatctgtcaatact

SEQ ID NO: 19585 - protein, 170 aa, Glycine max
CDLFDLHQEQVPYEVAWFWQKEIVREKKAQIEKEGDCTDTLIILQHPSVYTLGTASTEGNLKFDMKNAPFNIYRTERGGEVTYHGPGQLVMYPIINLRRHKMDLHWYLRTLEEVVIRVLSSAFSIQASRLEGLTGVWVGKSLNPIDITLIDGFCSSHPAWVLNYLGYYTH

SEQ ID NO: 19586 - protein, 106 aa, Glycine max
MKNAPFNIYRTERGGEVTYHGPGQLVMYPIINLRRHKMDLHWYLRTLEEVVIRVLSSAFSIQASRLEGLTGVWVGKSLNPIDITLIDGFCSSHPAWVLNYLGYYTH

SEQ ID NO: 19587 - DNA, 1409 bp, Glycine max
ggaaacattcctaaatgctaacctacttttgtttgtttcctctcatgttttcgctttcctttcttcttcttcttcttctgcattgagccttctttctttttctgttttcatggcatcaagcaacaacaacattcaggcaatatctcgcagccgaaaacatcaaaactcagccgtgacgatcgcccttggccgcaggagggggacccacaagaaacactctggtggtggtgatggcaattgcagttccccagttgtgaattcttgggaaggtggttccaagaaaagtgaggtttctgcgaggaagctcgctgctgggttgtggcagatgcagtatattcaagtctcaagggatcatcatgctgctgcttttggacacagctcctttccttcctccatgtcccagctggctaatggaaatgcaaagatcaggtttccccattatgacaaacctggtgaaaagtttcaagagaccaaggatcagctaaagaggccaataaccatcttgcgttcaagaaacggacttcgatctgagcttgaatcttctatgccacatctcaatggttcaaaagaaatggccacagaatggagccctactctcaatgaagcatccaatgagttcatcatgatccatagcaggaagcttctcgaagacaaaaaattagtaggtgaccataactctgttgtctccactttgctagaagaactccttcaagctcaaagatccatcaataaactcaaagcagagcaaaagaccatccagaaaaacgttgaacattttttgcagaatctcaaagatgacaaaatctttttgaagagcaaggaacaccacaagattaaagcaacaataggtgaattaaagggtaagttggaaagggaaagaagaagtagagagaggatggagttacttaacaccaaattggtgcatgaactagctgaagccaacttattaaggaagcagtttatgacaaactgcgagaaagagaagaaagagagagaactaatggaggaaatgtgcgaagaactagccatgcaaataggagaagacaaggctaagcttacagtaatactaagtgagtccaagagaatttgcgaggaagtggaagaagagaggaacatgatgcaaatggctgaactttggcgcgaagaacgcgtgcaaatgaagcttgttgatgcacaatttgttcttgaagacaagtataaccggttggtgcaacttgctgcttctcttgaaaggttcttgatatcaaggggtgctgaacttgacactacggaactagaggatgctgagttgatcaaacaagaagttgaatcattgaatattcaacgtgttatggagctttcttttgatgtctaaaaaacttccaagatatatatagttcacaatattctaggaacatggtatgaacagt

SEQ ID NO: 19588 - protein, 450 aa, Glycine max
ETFLNANLLLFVSSHVFAFLSSSSSSALSLLSFSVFMASSNNNIQAISRSRKHQNSAVTIALGRRRGTHKKHSGGGDGNCSSPVVNSWEGGSKKSEVSARKLAAGLWQMQYIQVSRDHHAAAFGHSSFPSSMSQLANGNAKIRFPHYDKPGEKFQETKDQLKRPITILRSRNGLRSELESSMPHLNGSKEMATEWSPTLNEASNEFIMIHSRKLLEDKKLVGDHNSVVSTLLEELLQAQRSINKLKAEQKTIQKNVEHFLQNLKDDKIFLKSKEHHKIKATIGELKGKLERERRSRERMELLNTKLVHELAEANLLRKQFMTNCEKEKKERELMEEMCEELAMQIGEDKAKLTVILSESKRICEEVEEERNMMQMAELWREERVQMKLVDAQFVLEDKYNRLVQLAASLERFLISRGAELDTTELEDAELIKQEVESLNIQRVMELSFDV

SEQ ID NO: 19589 - protein, 414 aa, Glycine max
MASSNNNIQAISRSRKHQNSAVTIALGRRRGTHKKHSGGGDGNCSSPVVNSWEGGSKKSEVSARKLAAGLWQMQYIQVSRDHHAAAFGHSSFPSSMSQLANGNAKIRFPHYDKPGEKFQETKDQLKRPITILRSRNGLRSELESSMPHLNGSKEMATEWSPTLNEASNEFIMIHSRKLLEDKKLVGDHNSVVSTLLEELLQAQRSINKLKAEQKTIQKNVEHFLQNLKDDKIFLKSKEHHKIKATIGELKGKLERERRSRERMELLNTKLVHELAEANLLRKQFMTNCEKEKKERELMEEMCEELAMQIGEDKAKLTVILSESKRICEEVEEERNMMQMAELWREERVQMKLVDAQFVLEDKYNRLVQLAASLERFLISRGAELDTTELEDAELIKQEVESLNIQRVMELSFDV

SEQ ID NO: 19590 - protein, 342 aa, Glycine max
MQYIQVSRDHHAAAFGHSSFPSSMSQLANGNAKIRFPHYDKPGEKFQETKDQLKRPITILRSRNGLRSELESSMPHLNGSKEMATEWSPTLNEASNEFIMIHSRKLLEDKKLVGDHNSVVSTLLEELLQAQRSINKLKAEQKTIQKNVEHFLQNLKDDKIFLKSKEHHKIKATIGELKGKLERERRSRERMELLNTKLVHELAEANLLRKQFMTNCEKEKKERELMEEMCEELAMQIGEDKAKLTVILSESKRICEEVEEERNMMQMAELWREERVQMKLVDAQFVLEDKYNRLVQLAASLERFLISRGAELDTTELEDAELIKQEVESLNIQRVMELSFDV

SEQ ID NO: 19591 - DNA, 1484 bp, Glycine max
aaattcttaagcgttcacacaagcttttcacatggaaatcggctcccccgcattccttaccctcgaagactattcttccttcttcttccctgacatggatcccattcccaattccaatgtcaacaagcgtcgtgcaaacaacgaccagttcgacttaaatgactccgcattcagccacctcctcaattccatcatggatcctaaccatttccaacaccaatccaaaccaatccaattcgactcctccccgaccaagagagctcgccgtgacctcctcgttctcgaagacagccacctcaaccccgcctcggccccgcaacagcagcgccgtctctgggtcaaggaccgctccaaggactggtggcagcggtgcaacagcccggacttccccgaagaggaattccggcgccacttccgcatgagcaaggccaccttcgacatgatctgccagcacctggactccgccgtcaccaagaagaacaccatgctccgagaagccatcccggtccggcagcgcgtggcggtgtgcatttggcgcctcgccaccggcgaccccctccgcgaagtttcgaagcgcttcggcttgggaatctccacgtgtcacaagctggttctggaggtctgctccgccatcaaaagcgttctgatgcccaagttcctccactggccaaacgaagccgaaatgaaacccatcaccgaaaaattcgagtctctctccggaatccccaacgtgggaggctcaatgtacaccactcacattcccatcattgcaccaaaatccaacgtcaacgcttacttcaacaagcgccacacagaaagaaaccagaagacatgttactctataaccgtccagggcgtggttgatcccaaaggtatttttagcgatgtttgtataggttggcctgggtctctctcagacgatcaagtgttggagaaaagcgcgttgtatcagagagccactatgggaaatttgaaggacgtgtgggtggtgggaaactcgggacaccctctgatggagggtgttttggttccttacactcatcagaatcttacttggacgcagcacgcgtttaatcagaaggttggggagattcagagcattgctaaggacgctttcgccaggctcaaagggaggtggtcttgcttgcagaagaggactgaagtcaagcttgaggacttgcccgtgcttcttggggcctgctgtgttttgcataatatttgtgagatgagggatgaggaaatgaagcctcagtggaactttgacatctttgatgatcagatgctgccccagaataataacgttcgctctaatgcttccgagcaagccagagatcagatagcgcactacttgttgcaccatggccgtgcagggactaattttttctagacttcttgggatatcacactttctcattaattcttttggctatgccttattattatagtcacttgcattataataacattctcatcatctacttctc

SEQ ID NO: 19592 - protein, 451 aa, Glycine max
MEIGSPAFLTLEDYSSFFFPDMDPIPNSNVNKRRANNDQFDLNDSAFSHLLNSIMDPNHFQHQSKPIQFDSSPTKRARRDLLVLEDSHLNPASAPQQQRRLWVKDRSKDWWQRCNSPDFPEEEFRRHFRMSKATFDMICQHLDSAVTKKNTMLREAIPVRQRVAVCIWRLATGDPLREVSKRFGLGISTCHKLVLEVCSAIKSVLMPKFLHWPNEAEMKPITEKFESLSGIPNVGGSMYTTHIPIIAPKSNVNAYFNKRHTERNQKTCYSITVQGVVDPKGIFSDVCIGWPGSLSDDQVLEKSALYQRATMGNLKDVWVVGNSGHPLMEGVLVPYTHQNLTWTQHAFNQKVGEIQSIAKDAFARLKGRWSCLQKRTEVKLEDLPVLLGACCVLHNICEMRDEEMKPQWNFDIFDDQMLPQNNNVRSNASEQARDQIAHYLLHHGRAGTNFF

SEQ ID NO: 19593 - protein, 430 aa, Glycine max
MDPIPNSNVNKRRANNDQFDLNDSAFSHLLNSIMDPNHFQHQSKPIQFDSSPTKRARRDLLVLEDSHLNPASAPQQQRRLWVKDRSKDWWQRCNSPDFPEEEFRRHFRMSKATFDMICQHLDSAVTKKNTMLREAIPVRQRVAVCIWRLATGDPLREVSKRFGLGISTCHKLVLEVCSAIKSVLMPKFLHWPNEAEMKPITEKFESLSGIPNVGGSMYTTHIPIIAPKSNVNAYFNKRHTERNQKTCYSITVQGVVDPKGIFSDVCIGWPGSLSDDQVLEKSALYQRATMGNLKDVWVVGNSGHPLMEGVLVPYTHQNLTWTQHAFNQKVGEIQSIAKDAFARLKGRWSCLQKRTEVKLEDLPVLLGACCVLHNICEMRDEEMKPQWNFDIFDDQMLPQNNNVRSNASEQARDQIAHYLLHHGRAGTNFF

SEQ ID NO: 19594 - protein, 397 aa, Glycine max
MDPNHFQHQSKPIQFDSSPTKRARRDLLVLEDSHLNPASAPQQQRRLWVKDRSKDWWQRCNSPDFPEEEFRRHFRMSKATFDMICQHLDSAVTKKNTMLREAIPVRQRVAVCIWRLATGDPLREVSKRFGLGISTCHKLVLEVCSAIKSVLMPKFLHWPNEAEMKPITEKFESLSGIPNVGGSMYTTHIPIIAPKSNVNAYFNKRHTERNQKTCYSITVQGVVDPKGIFSDVCIGWPGSLSDDQVLEKSALYQRATMGNLKDVWVVGNSGHPLMEGVLVPYTHQNLTWTQHAFNQKVGEIQSIAKDAFARLKGRWSCLQKRTEVKLEDLPVLLGACCVLHNICEMRDEEMKPQWNFDIFDDQMLPQNNNVRSNASEQARDQIAHYLLHHGRAGTNFF

SEQ ID NO: 19595 - DNA, 1508 bp, Glycine max
aatgacgcggaatcccatctttgtcacgtcggatacgctcgccattgatgcgcttcagaaaatgattcagggtagatttagacacctccctgttgtggaaaatggtgaagtcattgccatgctggatatcaccaaatgtctttatgatgccatatctagaatggagagcgctactcaacaggggagtgccgttgctgcagcagttgagggagtggaacttcagcgaactactccaaatactttcattgaaacattgagggagcgcgtgttcaaaccttccctgtcaactatagtcgatgaaaatacaaaggttgctattgcattagtatcagatcctgtgtacgtggcagcaaaaaagatgcgggagttacatgtaaatgcagctgtgattgtgatggaaaacaagattaaggggatacttacttcaaaggacatccttatgcgcgtggtggctcaaaatctttccccagagtcggctcttctggaaaaggtgatgactccaaatccagaatgtgcatctctagagacaacaattcttgatgcactgcatatgatgcataatgggaagttcttacatcttcccgtggtggacagagatggaaatgctattgcttgtttggatgttttgcagataactcatgctgcaatttctctggttgaaagtagtcctggagcatctaatgatgcggcaaacacagttatgcaaaaattttgggactcagcttttgctctagagccgccgcctgaagattttgacacccatagtgaagcctctggacggttgactttggatggggcagataccacaaagtctacatatcaatctgtaggttttggaaattcatttgcttttaaatttgatgatcacaatggccatgtgcatcgattctactgtggtgctgaacatcaagaacttctatctgctgtcatgcaaagaattggtgatattaatgatggagaacaccctacaatgctgtataaggacgatgatggtgataaaattattattgcgactgataacgatcttgtggctgccgtcagctatgctaggtctgcaggactgaaggctttaaagttggatttggagtttcccaattcaaccaaaccaacaaaactgcaacctggtacagccactatacagaaaaccagtacattgcgtctccgttctggtatttttgcaggtgttgttgttctaacgagcattagcgtattggtgtacttaaagcgctctagacagtaatatgtttgccagcttgaaaacaaaacatgctataatcttactctatgaatcccagagtttcgtcataaatcaaatgctcgttgacaaaggaaatgatggacacggaataggtggatgatgtggagtctctctaatcagccgtttttaattatctttttctttttgagtcactgatttaattagaaccaaagatatagtcgtggcatgcaatactgaagtgtcaccatgttcttctcaattaaggtacttgtaattccatatatttatc

SEQ ID NO: 19596 - protein, 412 aa, Glycine max
MTRNPIFVTSDTLAIDALQKMIQGRFRHLPVVENGEVIAMLDITKCLYDAISRMESATQQGSAVAAAVEGVELQRTTPNTFIETLRERVFKPSLSTIVDENTKVAIALVSDPVYVAAKKMRELHVNAAVIVMENKIKGILTSKDILMRVVAQNLSPESALLEKVMTPNPECASLETTILDALHMMHNGKFLHLPVVDRDGNAIACLDVLQITHAAISLVESSPGASNDAANTVMQKFWDSAFALEPPPEDFDTHSEASGRLTLDGADTTKSTYQSVGFGNSFAFKFDDHNGHVHRFYCGAEHQELLSAVMQRIGDINDGEHPTMLYKDDDGDKIIIATDNDLVAAVSYARSAGLKALKLDLEFPNSTKPTKLQPGTATIQKTSTLRLRSGIFAGVVVLTSISVLVYLKRSRQ

SEQ ID NO: 19597 - protein, 392 aa, Glycine max
MIQGRFRHLPVVENGEVIAMLDITKCLYDAISRMESATQQGSAVAAAVEGVELQRTTPNTFIETLRERVFKPSLSTIVDENTKVAIALVSDPVYVAAKKMRELHVNAAVIVMENKIKGILTSKDILMRVVAQNLSPESALLEKVMTPNPECASLETTILDALHMMHNGKFLHLPVVDRDGNAIACLDVLQITHAAISLVESSPGASNDAANTVMQKFWDSAFALEPPPEDFDTHSEASGRLTLDGADTTKSTYQSVGFGNSFAFKFDDHNGHVHRFYCGAEHQELLSAVMQRIGDINDGEHPTMLYKDDDGDKIIIATDNDLVAAVSYARSAGLKALKLDLEFPNSTKPTKLQPGTATIQKTSTLRLRSGIFAGVVVLTSISVLVYLKRSRQ

SEQ ID NO: 19598 - protein, 373 aa, Glycine max
MLDITKCLYDAISRMESATQQGSAVAAAVEGVELQRTTPNTFIETLRERVFKPSLSTIVDENTKVAIALVSDPVYVAAKKMRELHVNAAVIVMENKIKGILTSKDILMRVVAQNLSPESALLEKVMTPNPECASLETTILDALHMMHNGKFLHLPVVDRDGNAIACLDVLQITHAAISLVESSPGASNDAANTVMQKFWDSAFALEPPPEDFDTHSEASGRLTLDGADTTKSTYQSVGFGNSFAFKFDDHNGHVHRFYCGAEHQELLSAVMQRIGDINDGEHPTMLYKDDDGDKIIIATDNDLVAAVSYARSAGLKALKLDLEFPNSTKPTKLQPGTATIQKTSTLRLRSGIFAGVVVLTSISVLVYLKRSRQ

SEQ ID NO: 19599 - DNA, 1169 bp, Glycine max
atgttgcaacagagagacagaaaaaggactcacaatcacgaaggagaagaaacccaataagtgattctcatttttatggctcttgccctgaagtcaagttgcttcttgcaattgaagaaacctgaggctggtttcaatgtttgtttttcatctaagaaagctataatctccgtgaaacgacacactcccgtggctgctatcaggaccatggaagcagtgggactctctgcaacattcaccaggttgaaaaaagaaggaaaagtagctttcatcccgtatgtcactgctggtgatcctgacctttcaaccacagcagaagcactgaaagtgcttgattcatgtgggtctgacataattgagctaggtgttccatactctgatcctttggcagatggtcctgttatccaggctgctgctacaagatctttagcaaaggggaccaatttgaatgcgattattgatatgttgaaggaggttgttccgcaactgtcatgtccaattgcactgtttacatattacaatccaatactgaagcgtggtactgataaatttatgtccactataagagacagtggtgtacatgggcttgtagtcccagatgtccctctggaggagacggaaactttaaggacagaagctaagaaacatggaattgaactggtactcctcacaacacccacaactccaacaaaccgaatgagagccattgttgatgtggcagaaggatttgtgtatcttgtgagctcagtgggggtcactggagcccgagcatcagttagtggttctgttcagtctcttttgaaggaaattaaagaggcaactactaaacctgtggcagttggttttggaatatcaaaacctgagcatgtgaaacaggtagtggtatggggagctgatggtgtgattgttggcagtgctatagtgaaggtgcttggtgaggccaaatctcctcaagagggattgaaagaacttgaagttttcacccgctccttaaaagcggcacttccttaaaaaatatgttttaagagctcgaacttcatgtagttgttgtcgtcatcgtagatattggattcaataaaatgcggttcagttgtttttcttctgttcatgatatagtagttttgacatttttatttccttttcaattatgattggatttcttagttacc

SEQ ID NO: 19600 - protein, 311 aa, Glycine max
MALALKSSCFLQLKKPEAGFNVCFSSKKAIISVKRHTPVAAIRTMEAVGLSATFTRLKKEGKVAFIPYVTAGDPDLSTTAEALKVLDSCGSDIIELGVPYSDPLADGPVIQAAATRSLAKGTNLNAIIDMLKEVVPQLSCPIALFTYYNPILKRGTDKFMSTIRDSGVHGLVVPDVPLEETETLRTEAKKHGIELVLLTTPTTPTNRMRAIVDVAEGFVYLVSSVGVTGARASVSGSVQSLLKEIKEATTKPVAVGFGISKPEHVKQVVVWGADGVIVGSAIVKVLGEAKSPQEGLKELEVFTRSLKAALP

SEQ ID NO: 19601 - protein, 267 aa, Glycine max
MEAVGLSATFTRLKKEGKVAFIPYVTAGDPDLSTTAEALKVLDSCGSDIIELGVPYSDPLADGPVIQAAATRSLAKGTNLNAIIDMLKEVVPQLSCPIALFTYYNPILKRGTDKFMSTIRDSGVHGLVVPDVPLEETETLRTEAKKHGIELVLLTTPTTPTNRMRAIVDVAEGFVYLVSSVGVTGARASVSGSVQSLLKEIKEATTKPVAVGFGISKPEHVKQVVVWGADGVIVGSAIVKVLGEAKSPQEGLKELEVFTRSLKAALP

SEQ ID NO: 19602 - protein, 182 aa, Glycine max
MLKEVVPQLSCPIALFTYYNPILKRGTDKFMSTIRDSGVHGLVVPDVPLEETETLRTEAKKHGIELVLLTTPTTPTNRMRAIVDVAEGFVYLVSSVGVTGARASVSGSVQSLLKEIKEATTKPVAVGFGISKPEHVKQVVVWGADGVIVGSAIVKVLGEAKSPQEGLKELEVFTRSLKAALP

SEQ ID NO: 19603 - DNA, 1303 bp, Glycine max
atttgcatctgctgatgatgaatccagggtatctgttgatgccgaggaaacagaaaaacacccagaaatctttcagacacttaaagagtcttttttgaaggcattcaaagttatggatagagaactgaagatgcaccaaagtattgattgcttctgtagtgggacgacagcagtaactctggttaagcagggccgtgatcttattattggaaatgttggtgactctagagctgttctgggtacaagagagaaagacaattctcttgttgccatccagttaactgtggatctaaagcccaatcttccagctgaagaagagagaattcgcaaatgtaaaggacgtgtttttgctcttcaggatgaacctgaagttgctcgagtctggttgccaaacaatgactcacctggccttgccatggcaagggcatttggagatttttgtcttaaagattttggcctgatatctgttcccgaggtgtcatacagacgagtcaccgagaaggacgaatttgttgtcatggcaacagatgggatttgggatgttctctcaaacaaagaagtggtggacattgtggcagccgcgccaaggcgtgccttggctgcacgagcgctggttgagtcagcggttcgctcatggaggtacaagtatccaacctccaaagtggatgactgtgctgtggtttgcctctttctggactcggactcggactcccacaaagtgtgtagtgcttccaatgtcatcaagtccaaggaacaacctagttcaggtatccaagtccacaacggtgacagtggagatgttcctgcacctactggtctggcaaggtcaggaacttgcagggaaaacaatgaagacaacaacaacaacagcgaggaagagtctaaggaagaggaaatagatactgatgcagaaatagagtggtctgctctcgaaggagtgtcgcgtgtgaacacattactaaacctcccaaggtttgaacctgacaaagaagacaaggggatgagaaaacacaaatgaaaaaaaaaaaatggttcaaccaatcaaggaatgctgagttgagtgaaagatggtcttttactttatatttgtttatttttattttgtttttgtttcccatcatcattatatggatacatataccctctctttttatttttgttatttttgctcaattttcttttctatttatatattcatgttcccacccattgatgtttttgtttggactagagaggatggccgggctgttttagtgtgtctggaaatctgtcctccctctcgtgtgcttgaaaattttgtaaa

SEQ ID NO: 19604 - protein, 338 aa, Glycine max
FASADDESRVSVDAEETEKHPEIFQTLKESFLKAFKVMDRELKMHQSIDCFCSGTTAVTLVKQGRDLIIGNVGDSRAVLGTREKDNSLVAIQLTVDLKPNLPAEEERIRKCKGRVFALQDEPEVARVWLPNNDSPGLAMARAFGDFCLKDFGLISVPEVSYRRVTEKDEFVVMATDGIWDVLSNKEVVDIVAAAPRRALAARALVESAVRSWRYKYPTSKVDDCAVVCLFLDSDSDSHKVCSASNVIKSKEQPSSGIQVHNGDSGDVPAPTGLARSGTCRENNEDNNNNSEEESKEEEIDTDAEIEWSALEGVSRVNTLLNLPRFEPDKEDKGMRKHK

SEQ ID NO: 19605 - protein, 301 aa, Glycine max
MDRELKMHQSIDCFCSGTTAVTLVKQGRDLIIGNVGDSRAVLGTREKDNSLVAIQLTVDLKPNLPAEEERIRKCKGRVFALQDEPEVARVWLPNNDSPGLAMARAFGDFCLKDFGLISVPEVSYRRVTEKDEFVVMATDGIWDVLSNKEVVDIVAAAPRRALAARALVESAVRSWRYKYPTSKVDDCAVVCLFLDSDSDSHKVCSASNVIKSKEQPSSGIQVHNGDSGDVPAPTGLARSGTCRENNEDNNNNSEEESKEEEIDTDAEIEWSALEGVSRVNTLLNLPRFEPDKEDKGMRKHK

SEQ ID NO: 19606 - protein, 295 aa, Glycine max
MHQSIDCFCSGTTAVTLVKQGRDLIIGNVGDSRAVLGTREKDNSLVAIQLTVDLKPNLPAEEERIRKCKGRVFALQDEPEVARVWLPNNDSPGLAMARAFGDFCLKDFGLISVPEVSYRRVTEKDEFVVMATDGIWDVLSNKEVVDIVAAAPRRALAARALVESAVRSWRYKYPTSKVDDCAVVCLFLDSDSDSHKVCSASNVIKSKEQPSSGIQVHNGDSGDVPAPTGLARSGTCRENNEDNNNNSEEESKEEEIDTDAEIEWSALEGVSRVNTLLNLPRFEPDKEDKGMRKHK

SEQ ID NO: 19607 - DNA, 1562 bp, Glycine max
tcctttaagccagcacgccaaaaagaacttctttgcaaaacacgactgaggaccttgcaacaccggcgtctccctccttcctctcctctctctgcctttacctttgattgtaggtttttcattatttggcggcgaaacagggttgaatatttttgttttagcgtctgagctttgaattacagagcaaagtgaagcgtgaacatggtgatgcatctaaacgggacaccgtgcgctctcggattccacatgcctgcggagtgggaaacccacgcgcagtgctggatgggttggcctgaacgtgccgataactggcgtgacggcgccgttcacgcccaacgcgtgtttgcgagggtagcgtcagcaatctcaagattcgagtctgtaacagtttgtgttagttctgcacagtgggagaacgcgcggagtcagctaccggagcatatcagggtcgttgagatgaacatgaacgattcttggttccgtgatattggacctacttttgttatgagaagaagcaccacgccggaatctggtgatgcagtgagcaggattgcagggattgactggaattttaatagttggggaggcttagaagatggatgttactgtgattggagtcttgatttgcttgtggctaagaagattttgggaattgagaagattcctagattttcacattcgatggtgcttgaaggtggaagcatccatgtggatggagaaggaacttgtcttaccacagaagagtgcctcttgaacaagaacaggaaccctcacttgagtaagaaccaaatagaggatgaacttaagacatatcttggaatccggaaggttatatggttgcctcgtggattatatggagatgatgacacaaatggtcatattgataacatgtgctgttttgtgaggcctggtgtggttatgctgtcttggattgatgatgaaactgatcctcagtatgaaagatctgtagaagcatattctttgctttcaaatgaaacagatgctaatggtagaaagtttgaaatcattaaactccatgttcccagtccactctatatgacagaggacgaggctgctggggtttctctggataatgaggctaagccaagacttccaggtactaggcttgctgcttcctatgtaaacttttacattgcaaataaagctatcattgcaccacaatttggagataaaaagtgggatgatgaagctgtccgagtcctatctaaggccttccctcatcatgaagttgtgggaattgaaggtgccagggagattgttttggccggtggaaatatacattgcattactcagcaacaaccagccatttgagcggcggcactctcgatattcgttgataggtgttgtattgttgcttatgggtttccagaataaattgatttggttaaattgcttggttagttagttggtttgctccaattgggcatgtatgctaatttttggagattagcaaaatccaataattgcagcctggatgaaagtgtatgcaaatagatggaaaaccgttgaaaatataaaacctaatttatatttaaattggc

SEQ ID NO: 19608 - protein, 376 aa, Glycine max
MVMHLNGTPCALGFHMPAEWETHAQCWMGWPERADNWRDGAVHAQRVFARVASAISRFESVTVCVSSAQWENARSQLPEHIRVVEMNMNDSWFRDIGPTFVMRRSTTPESGDAVSRIAGIDWNFNSWGGLEDGCYCDWSLDLLVAKKILGIEKIPRFSHSMVLEGGSIHVDGEGTCLTTEECLLNKNRNPHLSKNQIEDELKTYLGIRKVIWLPRGLYGDDDTNGHIDNMCCFVRPGVVMLSWIDDETDPQYERSVEAYSLLSNETDANGRKFEIIKLHVPSPLYMTEDEAAGVSLDNEAKPRLPGTRLAASYVNFYIANKAIIAPQFGDKKWDDEAVRVLSKAFPHHEVVGIEGAREIVLAGGNIHCITQQQPAI

SEQ ID NO: 19609 - protein, 374 aa, Glycine max
MHLNGTPCALGFHMPAEWETHAQCWMGWPERADNWRDGAVHAQRVFARVASAISRFESVTVCVSSAQWENARSQLPEHIRVVEMNMNDSWFRDIGPTFVMRRSTTPESGDAVSRIAGIDWNFNSWGGLEDGCYCDWSLDLLVAKKILGIEKIPRFSHSMVLEGGSIHVDGEGTCLTTEECLLNKNRNPHLSKNQIEDELKTYLGIRKVIWLPRGLYGDDDTNGHIDNMCCFVRPGVVMLSWIDDETDPQYERSVEAYSLLSNETDANGRKFEIIKLHVPSPLYMTEDEAAGVSLDNEAKPRLPGTRLAASYVNFYIANKAIIAPQFGDKKWDDEAVRVLSKAFPHHEVVGIEGAREIVLAGGNIHCITQQQPAI

SEQ ID NO: 19610 - protein, 361 aa, Glycine max
MPAEWETHAQCWMGWPERADNWRDGAVHAQRVFARVASAISRFESVTVCVSSAQWENARSQLPEHIRVVEMNMNDSWFRDIGPTFVMRRSTTPESGDAVSRIAGIDWNFNSWGGLEDGCYCDWSLDLLVAKKILGIEKIPRFSHSMVLEGGSIHVDGEGTCLTTEECLLNKNRNPHLSKNQIEDELKTYLGIRKVIWLPRGLYGDDDTNGHIDNMCCFVRPGVVMLSWIDDETDPQYERSVEAYSLLSNETDANGRKFEIIKLHVPSPLYMTEDEAAGVSLDNEAKPRLPGTRLAASYVNFYIANKAIIAPQFGDKKWDDEAVRVLSKAFPHHEVVGIEGAREIVLAGGNIHCITQQQPAI

SEQ ID NO: 19611 - DNA, 1238 bp, Glycine max
ttttaagtccatgatgtgaagtaataataagcatctgattatttttaattgtatattgtctaagcaaatactattccatttttaatttctaaacaggcactagcaagactccgtttttctgagactgttgctcagagtgacgtggacgaggcactgaggttaatgcagatgtcaaaattctctttgtattctgaagatcgtcaaaaatctggtctggatgccatatctgatatctattccatactgcgggatgaagcagctagaggtaaccgaatggacgtcagctatgcccatgcactgaactggatatctaggaaggtaagtacatatactgcccaaagttgaatacgatccattgtgcagtattgtgaacagtttagattcaagtttgactgttgaacacgaggaactcaacaatcaaaagatcatggaacatttaaaggattactttatttcattgaataaagagccataaactgaatatattatcaaatgaactaagagatggtaaggcaagtttgagtaaacactattccttgtttttacaaaattgcacttattattttttgatcctctctgtaattaatttactgacgtacttggctgttaactaaatgtgctagcacttagtattttgcttttgttgtgtgaaagacagagcatggccctgactgtcaaataagttagctgttttgtttccccctagacaataatattctgaccttgggacttttggctttcaaacaggggtacagcgaagcccagttgaaagagtgcttggaggagtatgcagcacttaatgtatggcagatacatcctcacacctttgacattagatttatagacgcttgatgcccttcttttcccccattaacattgtttcaaggggcgaggacaagagtgcttggtggacttagggagggaatcatattttgcactttggtttttattagttttgatttaggttgtttgtattgttacagttagatttgcattttttattgagtacaataattgctaatttaaatttgtatacttaaagttagtactacatgaagcacgcattaggttcaagcttcgcatacatcgtgtttagtcaaatgcatctgtagttagaaatgtcattgactcgcctaaaatgagttttcatcataagacggcagaggcgcagaggattagtataaaagcaaaacgaaaacataatattgcagttgtataaatattaattacagttggat

SEQ ID NO: 19612 - protein, 60 aa, Glycine max
MQMSKFSLYSEDRQKSGLDAISDIYSILRDEAARGNRMDVSYAHALNWISRKVSTYTAQS

SEQ ID NO: 19613 - protein, 58 aa, Glycine max
MSKFSLYSEDRQKSGLDAISDIYSILRDEAARGNRMDVSYAHALNWISRKVSTYTAQS

SEQ ID NO: 19614 - DNA, 1060 bp, Glycine max
aaaaaactgagtgatgatggactacacctacgacaccaagcatcgcacaatggaacctcatgggataaggggtgtaatggacttggagcatcaaattcactacctggaaactgaggcttatagttctattttgaaggctttcattgctcaatctgatcttcttacttggggcaaagaggggcttatgactgagctgcgaaaggaactaaatgttacagatattgaacatggagaaatcctactgaaaataaattcagaccagttaattaagcagataagggagcagaggaaattggcatctcaagctaaggattatattaaacctagtgctcctgattgtgtttgtgcttcgatgggaaattcagtgataagaatgaaaactccttcctctgctgcattttatactcagaagaaaatgtcacactgccaagcttctctaatttccactcccattccttctccaatgcctccaaaatttaatgatgatccattgaatgctgagtttgcccacggaaatgtgcagcaatctatggaaatgttaaattgtaatgttcagttaccacctgttggaggaggaagaggactgaaaggaaagtatccattgcagaaggatttacacagatctcaccttgtcaagttaaagaaaagatctgatttaattcagcttcgtgcaacagatagggttatccacgatgttaagaagatgcttttcagtagagggaaacctgacccagttgatattgagagagcaaaaaggactcttacggaacaagaaatagctataactgaagcacttggtaaagtggctaatgtgttagagaggggtgatgcacctaatcagatgcaacgttatgaactctctaagaatactcctggaggacaagaaatgatgatacatgctaatttccgtgaactaattggtaatggtaggttgaataaacatggggttcattctgatctgtgcagttagggtgatgatttcatggcatagatatggagcttttaactctgatgaggctatacaacttatatagtgatattgctggattggtttagtgaa

SEQ ID NO: 19615 - protein, 318 aa, Glycine max
MMDYTYDTKHRTMEPHGIRGVMDLEHQIHYLETEAYSSILKAFIAQSDLLTWGKEGLMTELRKELNVTDIEHGEILLKINSDQLIKQIREQRKLASQAKDYIKPSAPDCVCASMGNSVIRMKTPSSAAFYTQKKMSHCQASLISTPIPSPMPPKFNDDPLNAEFAHGNVQQSMEMLNCNVQLPPVGGGRGLKGKYPLQKDLHRSHLVKLKKRSDLIQLRATDRVIHDVKKMLFSRGKPDPVDIERAKRTLTEQEIAITEALGKVANVLERGDAPNQMQRYELSKNTPGGQEMMIHANFRELIGNGRLNKHGVHSDLCS

SEQ ID NO: 19616 - protein, 317 aa, Glycine max
MDYTYDTKHRTMEPHGIRGVMDLEHQIHYLETEAYSSILKAFIAQSDLLTWGKEGLMTELRKELNVTDIEHGEILLKINSDQLIKQIREQRKLASQAKDYIKPSAPDCVCASMGNSVIRMKTPSSAAFYTQKKMSHCQASLISTPIPSPMPPKFNDDPLNAEFAHGNVQQSMEMLNCNVQLPPVGGGRGLKGKYPLQKDLHRSHLVKLKKRSDLIQLRATDRVIHDVKKMLFSRGKPDPVDIERAKRTLTEQEIAITEALGKVANVLERGDAPNQMQRYELSKNTPGGQEMMIHANFRELIGNGRLNKHGVHSDLCS

SEQ ID NO: 19617 - protein, 306 aa, Glycine max
MEPHGIRGVMDLEHQIHYLETEAYSSILKAFIAQSDLLTWGKEGLMTELRKELNVTDIEHGEILLKINSDQLIKQIREQRKLASQAKDYIKPSAPDCVCASMGNSVIRMKTPSSAAFYTQKKMSHCQASLISTPIPSPMPPKFNDDPLNAEFAHGNVQQSMEMLNCNVQLPPVGGGRGLKGKYPLQKDLHRSHLVKLKKRSDLIQLRATDRVIHDVKKMLFSRGKPDPVDIERAKRTLTEQEIAITEALGKVANVLERGDAPNQMQRYELSKNTPGGQEMMIHANFRELIGNGRLNKHGVHSDLCS

SEQ ID NO: 19618 - DNA, 1461 bp, Glycine max
aaagaaaggaatgaatgaaagagggatggtaggagaaaaatgagaatggcgtgaatgtgaggagagaagagcctgaatattagaatcggatacccttaaagaagcggagataggagtgtgcgcctccaaacccaaggggcttcggaggggctcttcatcggaggcggtgctatattcccctccggatattcccaccatgaagagcctcttcaagcccaagccccgcacttttccgatatcgtcaaacaaacgcgagatcttcttctccgtctcacctcccgagatgacgataacatgcccgacttgaccaaaaacctcagggacttaaagtcaatcctctatggtaacagtgaatccgaacccgtccccgaagcttgtgcacagctcactcaggaattcttcgccgacaacaccttacgcctccttatccaatatcttcccaaactcaacttggaggctagaaaagatgccactcagattgttgcaaatttacagaggcagcaggttcagtccaagctcatcgcctctgattacttggatactaatttggatcttatggatgtcttggtatctggatatgaaaacacagacatggctttacactacggtgcaatgttgagggagtgcataagacaccagattgttgcaaaatatgttctggactcacctcatatgaagaagttttttgactacattcagcttccaaattttgacatagctgcagatgccgcagcaacttttaaggagctaatgacaaggcataaatctactgtagctgatttccttagcaattattatgaatggttttttgatgaatataactctaaactgttggaatcttccaattatattacaaggcgccaagctgtcaagttgctgggagatatgttacttgatcgcacaaattcagcagtaatgacaagatatgtcagctcacgagacaacttaaggattttaatgaatcttctacgtgagtcaagcaagagcatacagatagaagcatttcatgttttcaagctgtttgctgctaaccaaaagaaaccagctgatatcatcagcatatttgttgcaaacagaagcaagcttcttagacttttgggtgacttaaaaaccgataaagaggatgaacagttcgaagctgataaagctcaagttataaaagaaattgcggctcttgaacctagggacctcgcttgagcttcagtttgtgtcgagtaacaagttgcattgtggcattttaccttatttaattgtctattgttatagttcttttagtcttcatcaagatgagactaacattcaacacaaattccagtgttttctttctgaattttcatttcggttctgtaattcctagatgaataaattgctgaaagagctacatgcagtggcagtattcggctttcatggtgttagaaagctttgcttgcctagcagttagtttataaattatacgatgcc

SEQ ID NO: 19619 - protein, 300 aa, Glycine max
MPDLTKNLRDLKSILYGNSESEPVPEACAQLTQEFFADNTLRLLIQYLPKLNLEARKDATQIVANLQRQQVQSKLIASDYLDTNLDLMDVLVSGYENTDMALHYGAMLRECIRHQIVAKYVLDSPHMKKFFDYIQLPNFDIAADAAATFKELMTRHKSTVADFLSNYYEWFFDEYNSKLLESSNYITRRQAVKLLGDMLLDRTNSAVMTRYVSSRDNLRILMNLLRESSKSIQIEAFHVFKLFAANQKKPADIISIFVANRSKLLRLLGDLKTDKEDEQFEADKAQVIKEIAALEPRDLA

SEQ ID NO: 19620 - protein, 213 aa, Glycine max
MDVLVSGYENTDMALHYGAMLRECIRHQIVAKYVLDSPHMKKFFDYIQLPNFDIAADAAATFKELMTRHKSTVADFLSNYYEWFFDEYNSKLLESSNYITRRQAVKLLGDMLLDRTNSAVMTRYVSSRDNLRILMNLLRESSKSIQIEAFHVFKLFAANQKKPADIISIFVANRSKLLRLLGDLKTDKEDEQFEADKAQVIKEIAALEPRDLA

SEQ ID NO: 19621 - protein, 201 aa, Glycine max
MALHYGAMLRECIRHQIVAKYVLDSPHMKKFFDYIQLPNFDIAADAAATFKELMTRHKSTVADFLSNYYEWFFDEYNSKLLESSNYITRRQAVKLLGDMLLDRTNSAVMTRYVSSRDNLRILMNLLRESSKSIQIEAFHVFKLFAANQKKPADIISIFVANRSKLLRLLGDLKTDKEDEQFEADKAQVIKEIAALEPRDLA

SEQ ID NO: 19622 - DNA, 1324 bp, Glycine max
tatagttaaggctccggctaatgtgaaatggaagactagggagcttgccactgaagttgctttcaatgctgttaactctctagaaggtgctggtgtgtttgcagttgaattgttcttgactaaggatgggcagattttattaaatgaagtggcgcctagacctcacaatagtgggcatcacacaattgaatcttgctatacctcacaatatgagcaacatttgcgggctgttgttggtcttccacttggtgatccatcactgaaaactccagctgctatcatgtacaatatattaggtgaagaagagggggatattggttttcaattagctcatcaattgatcaaaagggcattgaccatccctggggctactgttcattggtatgataagccagaaatgagaaagcaacggaagatgggccatataaccattgttgggccttcccttagcaatattgaaagcaatcttgctgtagtggtggaagggaaaagattagatgacaagactgcagttgctccatgtgtggggatcataatgggttctgattcagatctacctgttatgaaaagtgccgctgaaatcttggagatgtttggtgtgcctcacgaggtaagaatagtttcagctcacaggactccagaattgatgttttcttatgcctcatctgctcatgaacgaggcatacaagtcattattgctggtgctggtggtgcagctcacttgcctggtatggttgctgctcttactcccttgcctgttattggcgttcctgtgcgtgcttctaccttggatgggattgattcactcttgtcaattgtccagatgccgagaggtgtccccgttgccactgttgcagttaataatgcaactaatgctggattactggcggtgaggatgttgggtgttgccaatgatgatcttctgtcaaggatgagtcgatatcaagaggaccaaaaggaaagcgtattggacaaaggagataagttagaaaaacatggttggaaatcctacttaaacaatagttaattatccccattaatttggtggttattttgtaggctcgtttctcatttttggtcaactacaaattttgatagaaaagatttcacatggatggtgtatagacccagggtatcaataagtaggttaagaataattcgagctatatgttctgttacctatatcaacaggttttctattttctattgctaacttatagcaagagaggaaaaatgtgtaatctggcagaaaagccttgtattcacattgatattgactgttatcaaaataagtccctgtcagtgtcgtgggatcgatttgacc

SEQ ID NO: 19623 - protein, 341 aa, Glycine max
IVKAPANVKWKTRELATEVAFNAVNSLEGAGVFAVELFLTKDGQILLNEVAPRPHNSGHHTIESCYTSQYEQHLRAVVGLPLGDPSLKTPAAIMYNILGEEEGDIGFQLAHQLIKRALTIPGATVHWYDKPEMRKQRKMGHITIVGPSLSNIESNLAVVVEGKRLDDKTAVAPCVGIIMGSDSDLPVMKSAAEILEMFGVPHEVRIVSAHRTPELMFSYASSAHERGIQVIIAGAGGAAHLPGMVAALTPLPVIGVPVRASTLDGIDSLLSIVQMPRGVPVATVAVNNATNAGLLAVRMLGVANDDLLSRMSRYQEDQKESVLDKGDKLEKHGWKSYLNNS

SEQ ID NO: 19624 - protein, 248 aa, Glycine max
MYNILGEEEGDIGFQLAHQLIKRALTIPGATVHWYDKPEMRKQRKMGHITIVGPSLSNIESNLAVVVEGKRLDDKTAVAPCVGIIMGSDSDLPVMKSAAEILEMFGVPHEVRIVSAHRTPELMFSYASSAHERGIQVIIAGAGGAAHLPGMVAALTPLPVIGVPVRASTLDGIDSLLSIVQMPRGVPVATVAVNNATNAGLLAVRMLGVANDDLLSRMSRYQEDQKESVLDKGDKLEKHGWKSYLNNS

SEQ ID NO: 19625 - protein, 209 aa, Glycine max
MRKQRKMGHITIVGPSLSNIESNLAVVVEGKRLDDKTAVAPCVGIIMGSDSDLPVMKSAAEILEMFGVPHEVRIVSAHRTPELMFSYASSAHERGIQVIIAGAGGAAHLPGMVAALTPLPVIGVPVRASTLDGIDSLLSIVQMPRGVPVATVAVNNATNAGLLAVRMLGVANDDLLSRMSRYQEDQKESVLDKGDKLEKHGWKSYLNNS

SEQ ID NO: 19626 - DNA, 1018 bp, Glycine max
agcttaaacatgggcaatcatgagcctaaacgttggtcatattttcagaacttggccaaagaggggtttgataatgtatctctaattgatcaggataatcttggtttttcgtctgctgtgagaaaagtacaagagggggatagtaaatctcagccatctgctcctctaccagctgctggtgttttggcaggacacacggaatcccacctcaatgttggtgaagaaagtcagaaaaatgtacctgtggcaactaaaacagaagcaacaatctttcaccaaaaatatgagcattcccaactaaagggcaatgaaaataagaacatggatgccgtaatggaaaacatacaaccacaggagtctgaataccaggatggcaaggatgaaccaaggaatgtggttgtagcaggggaattcgacaccagtactgtgcagttcataaagaatgaagatctagaagagttgcgagagctgggttctggtacgtttgggactgtgtaccatggaaaatggagaggatcggatgttgcaattaaaagaataaagaaaagctgcttcgctggtcgatcttcagaacaagaaaggctgaccatagagttctggcgggaagctgacatactttccaagcttcaccatccaaatgtggtggcattttatggtgtagttcaggatggaccaggagcaacactagcgactgttgccgagtacatggtggatggttctcttaggaatgttttgcttcgtaaggataggtatcttgatcgccgcaagagactgataattgccatggatgctgcttttggaatggaatatttacactcgaaaaatattgtgcattttgacttgaaatgtgacaatttgctcgtgaacttgaaggatcctatgcggccaatatgcaaggttggtgattttggcctatcaaagattaagcgaaataccttggtgtctggtggtgttcgtggaactctaccttggatggcaccagagctactaaatggtagtagcaataaggtctcagaaa

SEQ ID NO: 19627 - protein, 339 aa, Glycine max
SLNMGNHEPKRWSYFQNLAKEGFDNVSLIDQDNLGFSSAVRKVQEGDSKSQPSAPLPAAGVLAGHTESHLNVGEESQKNVPVATKTEATIFHQKYEHSQLKGNENKNMDAVMENIQPQESEYQDGKDEPRNVVVAGEFDTSTVQFIKNEDLEELRELGSGTFGTVYHGKWRGSDVAIKRIKKSCFAGRSSEQERLTIEFWREADILSKLHHPNVVAFYGVVQDGPGATLATVAEYMVDGSLRNVLLRKDRYLDRRKRLIIAMDAAFGMEYLHSKNIVHFDLKCDNLLVNLKDPMRPICKVGDFGLSKIKRNTLVSGGVRGTLPWMAPELLNGSSNKVSE

SEQ ID NO: 19628 - protein, 336 aa, Glycine max
MGNHEPKRWSYFQNLAKEGFDNVSLIDQDNLGFSSAVRKVQEGDSKSQPSAPLPAAGVLAGHTESHLNVGEESQKNVPVATKTEATIFHQKYEHSQLKGNENKNMDAVMENIQPQESEYQDGKDEPRNVVVAGEFDTSTVQFIKNEDLEELRELGSGTFGTVYHGKWRGSDVAIKRIKKSCFAGRSSEQERLTIEFWREADILSKLHHPNVVAFYGVVQDGPGATLATVAEYMVDGSLRNVLLRKDRYLDRRKRLIIAMDAAFGMEYLHSKNIVHFDLKCDNLLVNLKDPMRPICKVGDFGLSKIKRNTLVSGGVRGTLPWMAPELLNGSSNKVSE

SEQ ID NO: 19629 - protein, 232 aa, Glycine max
MDAVMENIQPQESEYQDGKDEPRNVVVAGEFDTSTVQFIKNEDLEELRELGSGTFGTVYHGKWRGSDVAIKRIKKSCFAGRSSEQERLTIEFWREADILSKLHHPNVVAFYGVVQDGPGATLATVAEYMVDGSLRNVLLRKDRYLDRRKRLIIAMDAAFGMEYLHSKNIVHFDLKCDNLLVNLKDPMRPICKVGDFGLSKIKRNTLVSGGVRGTLPWMAPELLNGSSNKVSE

SEQ ID NO: 19630 - DNA, 1215 bp, Glycine max
ggaatagagccacacatagggcgaagaggtgtcagcgggaagaggtgccacgtgtaggattttgccctcgctcattgcacttcccagtgagtgacttgactctctttctcacacctccttttttccccgatgctaactctacaagcttcgtctcgtaaagaaaattcgaaagctcaatagagagaactcaattgaatcatcaaatgaggacagtgatttcgcgcttgatccattccacgccttccatttccaggctcaatgccacggtagtgtcaatcagcgggagaaatctctgcacagattctaacaaagttgatgggccattcaaagttgaagaagcagagactgtaaatgtgcctccactcccaacagaaaagttgcttgtgttgggagggaatgggtttgttggatcacacatttgtagagaagccttagaccgtgatttgtctgttgcgagtcttagcaggtctggtaggtcatccctgcatgattcctgggctaccaatgttgcttggtataaagggaatctcctttcaactgattcattgaaagaagctctgaatggggtcactgctgttatctcatgtgttggtggttttggctccaactcttacatgtacaaaattaatgggactgctaacatcaatgcaattagagcagcttcagatcaaggtgttaaaagatttgtctatatctctgcagctgactttggtgtagtaaattacttactgcgggggtattatgaaggaaagagagcttctgaaacagagctcctgaccagattcccatatggaggagtaattctgaggccaggatttatttatggtactcgaagtgttgggagtatgaagataccccttggtgtaattggatctccattggaaatggttctccaagttgctaaaccattgaaccagatcccacttgttgggcctctattgacacctcctgtcaatgttactgcggtggcaaaagttgctgttagagctgctactgatcctgtttttcccccggggatcattgatgcttatggaatacaacgttacagtcagcataaatcaaactagaaaattatctatattttgttttctgggtaaatctaatatggggcgatttgcctctgaatatctgtgttttagtattgttaaactgagaatatttcttcattccatatccttgagagaataaaatctgaaagtgcgagcatgtagccat

SEQ ID NO: 19631 - protein, 287 aa, Glycine max
MRTVISRLIHSTPSISRLNATVVSISGRNLCTDSNKVDGPFKVEEAETVNVPPLPTEKLLVLGGNGFVGSHICREALDRDLSVASLSRSGRSSLHDSWATNVAWYKGNLLSTDSLKEALNGVTAVISCVGGFGSNSYMYKINGTANINAIRAASDQGVKRFVYISAADFGVVNYLLRGYYEGKRASETELLTRFPYGGVILRPGFIYGTRSVGSMKIPLGVIGSPLEMVLQVAKPLNQIPLVGPLLTPPVNVTAVAKVAVRAATDPVFPPGIIDAYGIQRYSQHKSN

SEQ ID NO: 19632 - protein, 150 aa, Glycine max
MYKINGTANINAIRAASDQGVKRFVYISAADFGVVNYLLRGYYEGKRASETELLTRFPYGGVILRPGFIYGTRSVGSMKIPLGVIGSPLEMVLQVAKPLNQIPLVGPLLTPPVNVTAVAKVAVRAATDPVFPPGIIDAYGIQRYSQHKSN

SEQ ID NO: 19633 - DNA, 1285 bp, Glycine max
gtgcagaccactgtctccccttttgctctcttcattttccattcgtagacgccaagaaccctaacaggagaatgcagtggacctggataatttgtgaggatatttaacatcgtgtacattgtgctcctttaattattttcatcagttggtgttgtgatggatggtaataatggtcttaacatacgtaattggggttactatgaacccgctacgtcgtttaagagccacctggggctgcagctgatgtcatccttgccggaaaaacctttaattggagggcgcaatgctgtggttttagctggcactgatggggcatttcaccatagggacattggtggtatgccccaagctacataccctatcgaatacatgagggatacatggattagtcagagagacaaatatatgaatatgatacctacaaaccataattatggtggtattccggagacatcttcagcacatcaaattcaaatgattcaagcaccggaattgccaaaggaagaaaagccagtggaagaagcacctgtcgtcaagaaggcaaatggaactcgtaagaaaagacaggggcccaaggttcccaaatctcccaaggctaagaagccaaagagggtgcctcgtgcgccaaaggatgagaatgctcctgcagttcaacgtgcaagggttccgaagaaaactactgaaattgtaataaatgggattgatatggatatttctcgcattccaattccagtttgttcatgcaccggggcaacgcaacagtgttataaatggggatctggtggttggcagtctgcatgttgcacaacaggcatgtcggtatatcctttgcctatgagtaccaagcggcgtggtgctaggattgctggaaggaaaatgagtataggagcatttaagaaagtgttagagaaactcgccgccgagggttataacttttctaatccgattgatttgaggacttattgggcaaaacatggcaccaacaagtttgtcaccatcaggtagatctagtctgtggccatctggcctgttatgtcttttagcctgtttgtgatgtatatacatgcgtatttggccagagacagactttttagctggtttgtagtacaacaattttcaaattcattagacatcttgttttgtcttctaactctctttgttagtatcttcactttattggatgtagtacatgggaactcatctatcggttggttggttcagattgggaactacctgatgaggtcttgttttattaatatttagtaggagaatttaattggttcac

SEQ ID NO: 19634 - protein, 282 aa, Glycine max
MDGNNGLNIRNWGYYEPATSFKSHLGLQLMSSLPEKPLIGGRNAVVLAGTDGAFHHRDIGGMPQATYPIEYMRDTWISQRDKYMNMIPTNHNYGGIPETSSAHQIQMIQAPELPKEEKPVEEAPVVKKANGTRKKRQGPKVPKSPKAKKPKRVPRAPKDENAPAVQRARVPKKTTEIVINGIDMDISRIPIPVCSCTGATQQCYKWGSGGWQSACCTTGMSVYPLPMSTKRRGARIAGRKMSIGAFKKVLEKLAAEGYNFSNPIDLRTYWAKHGTNKFVTIR

SEQ ID NO: 19635 - protein, 253 aa, Glycine max
MSSLPEKPLIGGRNAVVLAGTDGAFHHRDIGGMPQATYPIEYMRDTWISQRDKYMNMIPTNHNYGGIPETSSAHQIQMIQAPELPKEEKPVEEAPVVKKANGTRKKRQGPKVPKSPKAKKPKRVPRAPKDENAPAVQRARVPKKTTEIVINGIDMDISRIPIPVCSCTGATQQCYKWGSGGWQSACCTTGMSVYPLPMSTKRRGARIAGRKMSIGAFKKVLEKLAAEGYNFSNPIDLRTYWAKHGTNKFVTIR

SEQ ID NO: 19636 - protein, 221 aa, Glycine max
MPQATYPIEYMRDTWISQRDKYMNMIPTNHNYGGIPETSSAHQIQMIQAPELPKEEKPVEEAPVVKKANGTRKKRQGPKVPKSPKAKKPKRVPRAPKDENAPAVQRARVPKKTTEIVINGIDMDISRIPIPVCSCTGATQQCYKWGSGGWQSACCTTGMSVYPLPMSTKRRGARIAGRKMSIGAFKKVLEKLAAEGYNFSNPIDLRTYWAKHGTNKFVTIR

SEQ ID NO: 19637 - DNA, 1238 bp, Glycine max
ggtgcccttcattcctatcaattatcaaacagcttcggtgatcatcgtaactacctctacatttgtttgtttatcatttctttgctcgtatcaatgtctaacaccagcaacaatgtcgctggggtcgacaacacgttcagaagaaaatttgatcgagaagagtatctagaacgagcacgggagcgcgagagacaggaggaggagggtcgagcgaaacctaaagccaaaggtcctcccgtgcagaggaagcccttgaaacatagagattatgaagtggaccttgaatcccgcttgggcaagactcaggttgttacgccggttgcaccactaagtcagcaggctggatactactgctcagtttgtgagtgtgtggtgaaggactctgcaaactacttggatcatattaatggaaagaaacatcaaagagccttgggcatgtccatgcgagtagaacgtgcttctctccaacaggttcaggaacgatttgaagttcttaagaagcgtaaagatgttggcagcttcacagagcaagatcttgacgagcggattttaaaacagcagcaagaggaggaagaaagaaagcgactgcgtcgagaaaagaaaaaagaaaaggtagtgtctgtatagtcgtttaattttagttagaaataggcaataggtttgaataaaccttttttctatcctccctttaccttatcccactaccatcaagtacaattagtttttttaatgttatttacttattataactgctaataattgcatccatctttctaaaaatgatttttaatgttattttaataaacaaagattgcttttgtttttcacaacttagctaatagcatgtgttaaattttggattcagaaggagaaggcagttgaagaacctgaaattgatcctgatgttgctgccatgatggggtttggaggtttccggtcatccaacaagaaatgatagcattctgcatgcggaatgaactgcgtatgaaattttggaacaattattctgcaatgataagctgaaagattattctgtggagaatcgttaaatagttgggctgcggtatcttccagcctgattttgggtgtggcttaaagatttttctgtggagaatagttaaatagttgggctgctcaaacagtagtatgggtgctggtgcattgcgttatattcaatcatttgattcggttgattcatgtacatttcttctgatagctaacctgatgtattattatat

SEQ ID NO: 19638 - protein, 208 aa, Glycine max
GALHSYQLSNSFGDHRNYLYICLFIISLLVSMSNTSNNVAGVDNTFRRKFDREEYLERARERERQEEEGRAKPKAKGPPVQRKPLKHRDYEVDLESRLGKTQVVTPVAPLSQQAGYYCSVCECVVKDSANYLDHINGKKHQRALGMSMRVERASLQQVQERFEVLKKRKDVGSFTEQDLDERILKQQQEEEERKRLRREKKKEKVVSV

SEQ ID NO: 19639 - protein, 177 aa, Glycine max
MSNTSNNVAGVDNTFRRKFDREEYLERARERERQEEEGRAKPKAKGPPVQRKPLKHRDYEVDLESRLGKTQVVTPVAPLSQQAGYYCSVCECVVKDSANYLDHINGKKHQRALGMSMRVERASLQQVQERFEVLKKRKDVGSFTEQDLDERILKQQQEEEERKRLRREKKKEKVVSV

SEQ ID NO: 19640 - DNA, 1282 bp, Glycine max
tttttttaatctaatggttataaaaagtaattccttgacagctaggattatcaaacaaatatacctttcctttcataattttgcatacatatataataaaaatctcatttttattggtgggctatctttgatctgagcattttacacttattggtggctttagtttctctacgtggtcctcaatagatttttagttgtgcctttatgtgtagattatagccccaagcggcatatgaggtggatatcctttggtatatagttgaggttaatttcactgccactgcctacaaatcgaccaaatagcattgaccctgcattgaaaatgtctggtagatttgatagtgaaattgatattggtgttcctgatgaagttggaagacttgaagtccttcgcgtacataccaaaaacatgaagctttcagatgctgttgatctagagagaattgcaaaagatactcatggatatgttgatgctgaccttactgccctttgcactgaagctgctcttcaatgcatcagggagaagatggatgtcattgatttggaagatgagagtattgatgctgaagtgctgaattctatggcagtttcaaatgagcatttccatactgctctgggaacaagcaatccatttgctttacgagaaactgttgttgaggtgcctaaggtcagcggggaggatattggaggccttgagaatgtcaagcgtgagctgcaagagactgttcaatatcctgtggagcacctagaaaaatttgagaagtttggtatgtcaccattaaaaggggttctcttctatggtcctccaggatgtggaaaaactttgttggccaaagcaattgctaatgaatgtcaagctaatttcatcagtgaggggcccagaattgctcactatgtggtttggtgaaagtgaagccaatgttcgagaaatttttgacaaggccagacaatcagctccatgtgtcctctttgatgagcttgattccattgctactcaggtctatttttgtacttcgcatccatgcaggccaggttgaattaaattatgaggctgggttgaaaggaattgtatgattttgttgccaaatctgtagatgatttaaggagataatgttacacgatgtttttcctatgtctaagttggtttttcctagaaatattctaaagtatcatcaacgcatgttgcgtgcacctgggaggctaagacaaactcatcaaaacattgtatctcaagagaatagtgcaccaccatttccatcaaagaaggattttggacgatttc

SEQ ID NO: 19641 - protein, 194 aa, Glycine max; identical to SEQ ID NO: 18913

SEQ ID NO: 19642 - protein, 165 aa, Glycine max; identical to SEQ ID NO: 18914

SEQ ID NO: 19643 - protein, 126 aa, Glycine max; identical to SEQ ID NO: 18915

SEQ ID NO: 19644 - DNA, 1688 bp, Glycine max
gaaacaaagtagagagcaaaagaatggtgggaacagaggcagcagaaaaaatgagtgtcaatgaagaaaaagatttgattagcactcttcctgattcagttcttgtctctatcatttctctccttccctgcaacgaaggcgtgagaacctgtgttctttccaaccgatggaaaaccatgtggaaacatgttcctcaccttagcttggatcagagcaaaatgttgaagcttttgatccgagcttatcttcgcgggctataccttagcacgcgtcttgaaatggcttataatcgtcgtaggggagatcaagaaaaagattttgaagacttggatgaaattgctaaagcagaggtgttgattgattcagtgttggattcacacgttgtttctttggaaagttgtactattcggcacctgccagaaagttgtgctagtggcaaagctgttatgtggatcgagaaactccttaagcaaaataaggtgaagaagctttcaatggagcgagatgacactgattatttgggctctgaggaaagtttgccacgggttctgagatatcatggaaggactctagacttgccttttaagattttctcaggctttgaggcacttgagttgaagaactattttctcaagacttcgccctcgagtaatgattcttgccaggttcttacaactttagcctttaggaacatgagtgttaagaaggatgcttgggaagggattttgtcttgttgcctgtgtcttgaaaatttaacacttgaaaatttaacacatgataactgcaagttgatgagagaggttactatcaatagtccaagactcaaatttctcagaatttgtagaatgcagatgaatgggtttaaggtttctgctgtgaaccttgaggtctttgagattgatactgttgtttgtatgccgaaaagactacttacttttgaaatcccaaaggttcatctgcttcgatctcgctctgatttgaaaattagagggcaatatatttgttgggttgggagcaaactgttgcagtcgagaaatattctacacactagcagccagagtcatcaaggaacaacttcgagctttgctggaatatttgagaacctggctactctatgtattgattttgatttgaaaacagtaaaaaatgccataaccctcttttcagctcttaaggcatgcccaaagttgcaaaatcttgaaattaatagcgagattaatgacaacgcagtggattactatgatcaacatgatgaggatgatgcaatggaatactaccgtagaaaggagccatgtgagtgcatcgatcaacaactaaagacccttagcataatgggatttgcaggaaaaaaactgaggtggaattccttaaatatgtaataacaaatggtgaagtaatgaagaagattacaatttggtttgttgatgattgctcatggattcatgccgctgaaactggatgtttgctatcatttcagacagcctctccaaacttgtccatcattctcaatcctgggccattttacatggcaaatgtgggtgggaactttgaaacatggctctcaactctaagggagtaggaaatttaccggtgaccatggccaaactatgtgtttcaaattctattttagtcttgaactttgaatatttctagtattacgtttataacactaaagacagattagtggc

SEQ ID NO: 19645 - protein, 458 aa, Glycine max
NKVESKRMVGTEAAEKMSVNEEKDLISTLPDSVLVSIISLLPCNEGVRTCVLSNRWKTMWKHVPHLSLDQSKMLKLLIRAYLRGLYLSTRLEMAYNRRRGDQEKDFEDLDEIAKAEVLIDSVLDSHVVSLESCTIRHLPESCASGKAVMWIEKLLKQNKVKKLSMERDDTDYLGSEESLPRVLRYHGRTLDLPFKIFSGFEALELKNYFLKTSPSSNDSCQVLTTLAFRNMSVKKDAWEGILSCCLCLENLTLENLTHDNCKLMREVTINSPRLKFLRICRMQMNGFKVSAVNLEVFEIDTVVCMPKRLLTFEIPKVHLLRSRSDLKIRGQYICWVGSKLLQSRNILHTSSQSHQGTTSSFAGIFENLATLCIDFDLKTVKNAITLFSALKACPKLQNLEINSEINDNAVDYYDQHDEDDAMEYYRRKEPCECIDQQLKTLSIMGFAGKKLRWNSLNM

SEQ ID NO: 19646 - protein, 451 aa, Glycine max
MVGTEAAEKMSVNEEKDLISTLPDSVLVSIISLLPCNEGVRTCVLSNRWKTMWKHVPHLSLDQSKMLKLLIRAYLRGLYLSTRLEMAYNRRRGDQEKDFEDLDEIAKAEVLIDSVLDSHVVSLESCTIRHLPESCASGKAVMWIEKLLKQNKVKKLSMERDDTDYLGSEESLPRVLRYHGRTLDLPFKIFSGFEALELKNYFLKTSPSSNDSCQVLTTLAFRNMSVKKDAWEGILSCCLCLENLTLENLTHDNCKLMREVTINSPRLKFLRICRMQMNGFKVSAVNLEVFEIDTVVCMPKRLLTFEIPKVHLLRSRSDLKIRGQYICWVGSKLLQSRNILHTSSQSHQGTTSSFAGIFENLATLCIDFDLKTVKNAITLFSALKACPKLQNLEINSEINDNAVDYYDQHDEDDAMEYYRRKEPCECIDQQLKTLSIMGFAGKKLRWNSLNM

SEQ ID NO: 19647 - protein, 442 aa, Glycine max
MSVNEEKDLISTLPDSVLVSIISLLPCNEGVRTCVLSNRWKTMWKHVPHLSLDQSKMLKLLIRAYLRGLYLSTRLEMAYNRRRGDQEKDFEDLDEIAKAEVLIDSVLDSHVVSLESCTIRHLPESCASGKAVMWIEKLLKQNKVKKLSMERDDTDYLGSEESLPRVLRYHGRTLDLPFKIFSGFEALELKNYFLKTSPSSNDSCQVLTTLAFRNMSVKKDAWEGILSCCLCLENLTLENLTHDNCKLMREVTINSPRLKFLRICRMQMNGFKVSAVNLEVFEIDTVVCMPKRLLTFEIPKVHLLRSRSDLKIRGQYICWVGSKLLQSRNILHTSSQSHQGTTSSFAGIFENLATLCIDFDLKTVKNAITLFSALKACPKLQNLEINSEINDNAVDYYDQHDEDDAMEYYRRKEPCECIDQQLKTLSIMGFAGKKLRWNSLNM

SEQ ID NO: 19648 - DNA, 1213 bp, Glycine max
caaggtgaattctctctctctctctctctctcaaatcatcctctgcttttctctttcttttctttgaattttcatggctgtagctactgcagtggccaaaggacaatattggacttataattgtgagagtagtcatggaggggatggctcccaattcatgtgcaaggccagttgtagagaagaaagcaaggccacaagagcaactgaattgtccaaggtgcaattcaaccaatacaaagttctgctactacaacaactacagcctcacacagccaagatacttctgcaagacttgtagaaggtattggacagaaggagggtctctgagaaacgttccagttggaggtggttcaagaaagaacaagaaggtctctgtgacagcttcatcatcaccaaaggttccagacctaaacccaccaaaccactcagctatctcatcacacaaccctaaaataatgcatggtggccaagatctcaatcttgctttcccagccatggaaaagtaccatcatcatggcatgtcaccttataacgttgagatgcaaaacagtaacaccaccactactcatcatcatcaccaaacctctccttcttgttctgctcctccagctaattctctttcagctcttgagctacttaggtccagcatggcatctaggggtttgaacccttatgctcctaattcttccttgatgccaaactcaacaaacaacaacaacaatgccctttacccatcagggtttcccatgcaagaagttaaacctagtcttaacttttcttcagttgatgggatcggaaataatagatcatatgatcaagagaggggtggtggcagagttttgttcccttttggagacgtcaaacagctttctgctgctgcaggtgctgctgatcaagtggaacaacaacaacaaggaaattcaactggttattggactggaatgattggtgaaggaacatggtaagaaagaaaaaaaaaagggaggacaaaggaaaattaagagaacatgcattaataacattatatttatatatcttttttttttattttggtcttccctttttttttctctttccacaatatggatatcatttggcagctgaagttgttcaggaactaacaataggacacacatggttaattatttctttgttttgtacacacctcctttgttttatttgagagaacgtaagaggattttacttctaaaag

SEQ ID NO: 19649 - protein, 276 aa, Glycine max
MEGMAPNSCARPVVEKKARPQEQLNCPRCNSTNTKFCYYNNYSLTQPRYFCKTCRRYWTEGGSLRNVPVGGGSRKNKKVSVTASSSPKVPDLNPPNHSAISSHNPKIMHGGQDLNLAFPAMEKYHHHGMSPYNVEMQNSNTTTTHHHHQTSPSCSAPPANSLSALELLRSSMASRGLNPYAPNSSLMPNSTNNNNNALYPSGFPMQEVKPSLNFSSVDGIGNNRSYDQERGGGRVLFPFGDVKQLSAAAGAADQVEQQQQGNSTGYWTGMIGEGTW

SEQ ID NO: 19650 - protein, 273 aa, Glycine max
MAPNSCARPVVEKKARPQEQLNCPRCNSTNTKFCYYNNYSLTQPRYFCKTCRRYWTEGGSLRNVPVGGGSRKNKKVSVTASSSPKVPDLNPPNHSAISSHNPKIMHGGQDLNLAFPAMEKYHHHGMSPYNVEMQNSNTTTTHHHHQTSPSCSAPPANSLSALELLRSSMASRGLNPYAPNSSLMPNSTNNNNNALYPSGFPMQEVKPSLNFSSVDGIGNNRSYDQERGGGRVLFPFGDVKQLSAAAGAADQVEQQQQGNSTGYWTGMIGEGTW

SEQ ID NO: 19651 - protein, 169 aa, Glycine max
MHGGQDLNLAFPAMEKYHHHGMSPYNVEMQNSNTTTTHHHHQTSPSCSAPPANSLSALELLRSSMASRGLNPYAPNSSLMPNSTNNNNNALYPSGFPMQEVKPSLNFSSVDGIGNNRSYDQERGGGRVLFPFGDVKQLSAAAGAADQVEQQQQGNSTGYWTGMIGEGTW

SEQ ID NO: 19652 - DNA, 1585 bp, Glycine max
ccccccgagaacagagtgtgataatagtaagacagagcacctactcactcgtaaatggcgaggaagaagatcagagagtaccactccaagaggcttctcaaggagcatctcaaacgtctcgcctctatcgacctccaaatcctctcagctcaggtgacagaatctacggatttcactgagctgacagaccagcatccatggctttcgtcaaccagattggtcgtcaagccagacatgctgttcgggaagcgcggcaagagtggcttagttgctctcaatttagacatagctcaagtcgccgagttcgtcaaagcacgcctcggcgttgaggttgagatgggaggttgcaaggcgcctataaccacttttattgtcgaaccgtttgttcctcacgaccaagagttttatctgtctattgtttctgaaaggcttggctccactatcagcttctccgaatgtggcggcattgaaattgaagagaattgggataaggtcaaaactatattccttccgacggaaaaaccattgactccggaggcatgtgcgccattgattgctatacttcctttggagattagggggacaattggcgatttcataatgggtgtgtttgctgtcttcaaagatctggacttcagttttttagagatgaatccatttacactggtgaatgaaaagccatatccactggatatgagaggggaattggatgacactgccgcattcaagaacttcaacaagtggggtaatatagaatttccattgccttttggaagaattctgagccctacagaaagcttcattcattccttggatgataagacaagtgcatcattgaaatttactatattgaatccgaaaggacgcatatggacaatggtagcaggaggtggtgcaagtgtaatttatgctgatacggttggagatttaggctatgcatcagagcttggaaactatgctgagtatagtggagctccgaatgaggaggaggtgttgcagtatgcaagagttgtaattgattgtgctactgaagaccccgatggccgtaagagagcccttcttattggaggtggcatagcaaacttcactgatgttgctgccacattcaacgggattattcgagccctgaaagagaaggaatcaaagcttaaagcagcgcaaatgcacatatatgtcagaagaggtggtccaaactaccagactggtttggcaaagatgcgtgcattgggggaggagttgggagtaccaattcaggtttatggaccggaggccacgatgacgggtatctgcaaacaagctattgattgcatcatgtccgaagcataaagaagattaatttttgtctcatcatgtttcatttgtgaaactaatttggtggtgttttgatggatatattgatataagtccataatctgaaccaaagcaaagagtaataaggtgaagatgatagatgttacaagcctgaaactgttaaattcttatcttttcttcctattgtgattttattgttatattttgactaaacattataaaaatccccaatagtatccgtgaaaaatgtaatcttagttggcgatttttcctc

SEQ ID NO: 19653 - protein, 423 aa, Glycine max
MARKKIREYHSKRLLKEHLKRLASIDLQILSAQVTESTDFTELTDQHPWLSSTRLVVKPDMLFGKRGKSGLVALNLDIAQVAEFVKARLGVEVEMGGCKAPITTFIVEPFVPHDQEFYLSIVSERLGSTISFSECGGIEIEENWDKVKTIFLPTEKPLTPEACAPLIAILPLEIRGTIGDFIMGVFAVFKDLDFSFLEMNPFTLVNEKPYPLDMRGELDDTAAFKNFNKWGNIEFPLPFGRILSPTESFIHSLDDKTSASLKFTILNPKGRIWTMVAGGGASVIYADTVGDLGYASELGNYAEYSGAPNEEEVLQYARVVIDCATEDPDGRKRALLIGGGIANFTDVAATFNGIIRALKEKESKLKAAQMHIYVRRGGPNYQTGLAKMRALGEELGVPIQVYGPEATMTGICKQAIDCIMSEA

SEQ ID NO: 19654 - protein, 363 aa, Glycine max
MLFGKRGKSGLVALNLDIAQVAEFVKARLGVEVEMGGCKAPITTFIVEPFVPHDQEFYLSIVSERLGSTISFSECGGIEIEENWDKVKTIFLPTEKPLTPEACAPLIAILPLEIRGTIGDFIMGVFAVFKDLDFSFLEMNPFTLVNEKPYPLDMRGELDDTAAFKNFNKWGNIEFPLPFGRILSPTESFIHSLDDKTSASLKFTILNPKGRIWTMVAGGGASVIYADTVGDLGYASELGNYAEYSGAPNEEEVLQYARVVIDCATEDPDGRKRALLIGGGIANFTDVAATFNGIIRALKEKESKLKAAQMHIYVRRGGPNYQTGLAKMRALGEELGVPIQVYGPEATMTGICKQAIDCIMSEA

SEQ ID NO: 19655 - protein, 329 aa, Glycine max
MGGCKAPITTFIVEPFVPHDQEFYLSIVSERLGSTISFSECGGIEIEENWDKVKTIFLPTEKPLTPEACAPLIAILPLEIRGTIGDFIMGVFAVFKDLDFSFLEMNPFTLVNEKPYPLDMRGELDDTAAFKNFNKWGNIEFPLPFGRILSPTESFIHSLDDKTSASLKFTILNPKGRIWTMVAGGGASVIYADTVGDLGYASELGNYAEYSGAPNEEEVLQYARVVIDCATEDPDGRKRALLIGGGIANFTDVAATFNGIIRALKEKESKLKAAQMHIYVRRGGPNYQTGLAKMRALGEELGVPIQVYGPEATMTGICKQAIDCIMSEA

SEQ ID NO: 19656 - DNA, 1465 bp, Glycine max
attgaaatctgataccatgaacaaagatgctatgatcagatcagatgatgctgaatttggagaagcagatcaagatgagcaaaaatatgtagatccattggataaatttctccctcccccatcaaaaactaaatgctctgaggagttacaaagaaaaataaacaaattcctggagtataagaaggctggaaaaagttttaatgcagaagttcgcaacaggaaggactatcgaaaccctgacttcttactgcatgcagtgaggtaccaggatattgatcaaatagggtcttgcttcagtaaagatgtatttgaccctcatggatatgatccaagtgatttctatgatgaaatagaagctgatatgaggcgcgaaagtgagaggaaagagcaagaaaagaagaaagcacagaaggttgaatttatttcggggggtgcacaaccgggaattgtagctagcgcttctaggattagcatgcccattgcaggtgcttctgctgtgactgcaagtggtttgcctttggtgcctcctacagccgattctattaatcgggatggtagacagaataaaaaatcaaaatgggataaggtattcatctaaacaaatgcaatagcaactttagggacattcttcattgtgcttaagaaatttttgtgaaagataggtggatggtgataaaaaaaatcctctgccctctgcggggcaggattctgtatctactattggggttcatgcagccattttatctgctgctaatgccggcggtggatatatgcaatttgcgtaagttgataaacaaccatgaactttcatatgcattctacttctatcttttgattctggttatgctttcaatttctaagatttgattttgggttgacacgttttattgtgtagacattttttaggtgttcgcatttttccaatttgaacttatcaaatctactgaaaaaactagaatctaaattaacatattacttgcagagatttccaaatttaaatattgattttgaatagtcagtcatctatacttaagaaacgtgtttgatgttatttcatgaaattgacagtcaaatggatggaatatccagttctgacaattggcaattagctgatatagttatgtttgatacaataatctcattttgttgaacaggcaacaaaaacgacgggaggctgaggagaaaagatccactgaaaggaggttagagagaaggtcgtgagccattcagtgtggggctgtagtatcgaacattgcggataagctgtggcagagatttctctgaaacattttgtctgttaaataactttggcaatgatcgcagacactgtatatctcgaacttgaaaagaaatttcctgctccaaccgtgcccttagctggaataattcttccaattccagtacttgtgtcccatgatatggttgattgatcggttcgttgctaatgcctaatttttatttgatt

SEQ ID NO: 19657 - protein, 198 aa, Glycine max
LKSDTMNKDAMIRSDDAEFGEADQDEQKYVDPLDKFLPPPSKTKCSEELQRKINKFLEYKKAGKSFNAEVRNRKDYRNPDFLLHAVRYQDIDQIGSCFSKDVFDPHGYDPSDFYDEIEADMRRESERKEQEKKKAQKVEFISGGAQPGIVASASRISMPIAGASAVTASGLPLVPPTADSINRDGRQNKKSKWDKVFI

SEQ ID NO: 19658 - protein, 193 aa, Glycine max
MNKDAMIRSDDAEFGEADQDEQKYVDPLDKFLPPPSKTKCSEELQRKINKFLEYKKAGKSFNAEVRNRKDYRNPDFLLHAVRYQDIDQIGSCFSKDVFDPHGYDPSDFYDEIEADMRRESERKEQEKKKAQKVEFISGGAQPGIVASASRISMPIAGASAVTASGLPLVPPTADSINRDGRQNKKSKWDKVFI

SEQ ID NO: 19659 - protein, 188 aa, Glycine max
MIRSDDAEFGEADQDEQKYVDPLDKFLPPPSKTKCSEELQRKINKFLEYKKAGKSFNAEVRNRKDYRNPDFLLHAVRYQDIDQIGSCFSKDVFDPHGYDPSDFYDEIEADMRRESERKEQEKKKAQKVEFISGGAQPGIVASASRISMPIAGASAVTASGLPLVPPTADSINRDGRQNKKSKWDKVFI

SEQ ID NO: 19660 - DNA, 1470 bp, Glycine max
aaaaaagttctattccttcgtctgcaaccctagctttccgttgtttgcaaatctatggctggtgaatctgataaacccgaaaacaccctctcttgtgctaactgtggcaaacctgcgaatcttcagtgtccaaaatgtatggaattgaagcttcctcgagaaggtgctgccttctgctctcaggattgtttcaagtcttcatggagctcgcacaaatcagtgcatctgaaggcaaaactatccccacctggcacacaaaattcagactcacttgatgaaggttggttatattgtttgaagagagggcaggctcgaacgccaaagcttcctcactttgattggacaggaccactgcagccatatcccatttctagtaaacggattgtcccagatcaaattgataaacctgattgggctggtgatggaacacccaaaattgagcccaatagtagtctacagcataccattgaggtcaaaactccagatcaaatagagagaatgagggaaacttgtcggattgcaagggaggtgttggatgcagctgctcggattattcagcctggtgtgacgactgatgagattgacagagttgttcatgaggcaactattgctgcaggaggatatccatcgcctctcaattaccatttcttccctaaatcttgctgcacgtcagttaatgaagtaatctgtcatggaattcctgatgcaaggaagcttgaggatggtgacattgtaaatgttgatgtcactgtgtactataaaggtgttcatggtgatctcaatgaaacatactttgtgggaaatgttgatgaagagtctctccaactagtaaaatgcacatatgagtgcctggagaaggcaatatccattgttaaacctgggatacgattccgtgagattggtgaagtcattaatcgtcatgcttcaatgtctggattctcggtggtaaaatcttattgtggtcatggaattggagagctcttccattgtgcaccaaacattcctcattattcaagaaataaagcagttggtgtgatgaaggctggacagacctttacaattgaaccaatgatcaatgccggtgtctggcgtgatcgaatgtggcctgatggatggactgctgttacagcggatggtaaacgaagtgctcaatttgagcacactcttttggtgacagagactggtgttgaagttttaacagggcggttgcagacatcacccaatgtttttccttggctaggttcataattgggtgaatcatggagacagatgctggcagtgtctaaataccatacaattattagacgacatttctttgatctatttctctgattgcctcctttgggtatcatgtttgtaagttatacaaaaaacagaagcaaattcaattgagtttaggtgaaaagtatgcttaatgatatgtttgtgtaattgaagaaaatttaattttagaattttgtcttgctttcc

SEQ ID NO: 19661 - protein, 397 aa, Glycine max
MAGESDKPENTLSCANCGKPANLQCPKCMELKLPREGAAFCSQDCFKSSWSSHKSVHLKAKLSPPGTQNSDSLDEGWLYCLKRGQARTPKLPHFDWTGPLQPYPISSKRIVPDQIDKPDWAGDGTPKIEPNSSLQHTIEVKTPDQIERMRETCRIAREVLDAAARIIQPGVTTDEIDRVVHEATIAAGGYPSPLNYHFFPKSCCTSVNEVICHGIPDARKLEDGDIVNVDVTVYYKGVHGDLNETYFVGNVDEESLQLVKCTYECLEKAISIVKPGIRFREIGEVINRHASMSGFSVVKSYCGHGIGELFHCAPNIPHYSRNKAVGVMKAGQTFTIEPMINAGVWRDRMWPDGWTAVTADGKRSAQFEHTLLVTETGVEVLTGRLQTSPNVFPWLGS

SEQ ID NO: 19662 - protein, 369 aa, Glycine max
MELKLPREGAAFCSQDCFKSSWSSHKSVHLKAKLSPPGTQNSDSLDEGWLYCLKRGQARTPKLPHFDWTGPLQPYPISSKRIVPDQIDKPDWAGDGTPKIEPNSSLQHTIEVKTPDQIERMRETCRIAREVLDAAARIIQPGVTTDEIDRVVHEATIAAGGYPSPLNYHFFPKSCCTSVNEVICHGIPDARKLEDGDIVNVDVTVYYKGVHGDLNETYFVGNVDEESLQLVKCTYECLEKAISIVKPGIRFREIGEVINRHASMSGFSVVKSYCGHGIGELFHCAPNIPHYSRNKAVGVMKAGQTFTIEPMINAGVWRDRMWPDGWTAVTADGKRSAQFEHTLLVTETGVEVLTGRLQTSPNVFPWLGS

SEQ ID NO: 19663 - protein, 249 aa, Glycine max
MRETCRIAREVLDAAARIIQPGVTTDEIDRVVHEATIAAGGYPSPLNYHFFPKSCCTSVNEVICHGIPDARKLEDGDIVNVDVTVYYKGVHGDLNETYFVGNVDEESLQLVKCTYECLEKAISIVKPGIRFREIGEVINRHASMSGFSVVKSYCGHGIGELFHCAPNIPHYSRNKAVGVMKAGQTFTIEPMINAGVWRDRMWPDGWTAVTADGKRSAQFEHTLLVTETGVEVLTGRLQTSPNVFPWLGS

SEQ ID NO: 19664 - DNA, 991 bp, Glycine max
attaaaaaaacgtgttaaactaaaagtgttgagagtgtgatagcgcaacggaacaatgtcaggacctgagtgttgctcaaactcaccagttctgaacccgaatgcaggagctggccacgttgaaaaactcgctgctctcgattcctatctctctggttcccctaattccattgccattcttctcgtctccgacgtttttggatatgaagcaccaaatttaaggaacattgcagacaaggttgcagctgctgggtattatgtggttgttcctgactttttctatggtgatccctataatcctgagaatgctagcaggcctttatctgtttggttgaaagatcatggcacggacaaaggatcagaagctgcaaaatccataattgaagctttgaaaagtaaaggtgtgacagctattggggctgctggattttgttgggggggtaaagtcgtggttgaacttgcaaaatccagactaatccaagctgatgtgctattacatccagcatttgtctctgtggatgatatcaagggtgttgatattccaacagctgtgcttggagctgagattgacaaaatgtcacctccagagcttgtaaaacagtttgaacaagtcctaactgctaaacctggggttgattgttttgttaaaatatttcctaaagtttcacacggttggactgttagatacaaccctgaagatgcagaagctgtaaaggctgcagaggaggcccatcaggacatgctaaactggtttgctaaacatcttaagtagaaatcttgttatgataagagtatgtacgtgtttagacaacaaaataaaacaacatagaacttctatgtggattattgtcattttctgcggtggaggatgtaaaacttctaatcattcagtgtaggtgtagtttacaagaaaataagtgctgtattgcttgtaggacatgcaacacgttactgaaagttttatatgctaatatatgataaataaaatatt

SEQ ID NO: 19665 - protein, 238 aa, Glycine max
MSGPECCSNSPVLNPNAGAGHVEKLAALDSYLSGSPNSIAILLVSDVFGYEAPNLRNIADKVAAAGYYVVVPDFFYGDPYNPENASRPLSVWLKDHGTDKGSEAAKSIIEALKSKGVTAIGAAGFCWGGKVVVELAKSRLIQADVLLHPAFVSVDDIKGVDIPTAVLGAEIDKMSPPELVKQFEQVLTAKPGVDCFVKIFPKVSHGWTVRYNPEDAEAVKAAEEAHQDMLNWFAKHLK

SEQ ID NO: 19666 - DNA, 1445 bp, Glycine max
ggaacttctgttttcttgcccactgctacatattctatgtttccagaaaatcttgccatggggggcatgagtttgagacaaggagagctttgtaatgcaattactgtatcagttgtgctgcataatgatggcagcattgcagaatattcagtgtttaactcagtgattaaaccaacatacatgcttacatatgagagtgcatctgagctactccatttgaaccttcaggaggagggtgaactcagaattttgtctgaggctgcaaaccttcgttcaaattggcgccgtcagcaggtaaaggcattccttagaggcaagcctccaccctttacagctggtaagcttgaagggatagcagctgttgtaaatgagaatgttagaacagtgaggaaactctgcagcagcagtcttcggtactggatattagaatatttacgaagacaaccaaaagagagaacatatcgtgcattggtccttagatttttgaaagatcgaattgcagctctattgttgcttgaggttggatttcaagcttctgcctggatccctgtaggaatgcagataggggatgaagtagaagttaaggtggaagaagcacatccacgtgatgatattctatttctgaaggaggttgtaaaagagtgatgagctaagataggattttgaataggctttatcattgttcaacgatttattcaatagggtaaacatctttccgcatcccaaatccactcaatttggctggtaggatgcagcctccttcctggtctattgcatggaagagagatcacactttcactggcagaatttcatcatttgaaacattgttaagtggttcaaatcaaatcttgaagtgtcatttctggcagagaagttcatggatgtaatagccaacaagtgtacagtccttcaaacattttctccaaccatagtcacatgaggtctatcggttttgttcctcacttgagcaagtaattttgcccattcacctgatttggtgtagtagtagtagtatatggttggccttacaattcatatgaagatctaagtgagctttcattgtaatatcacattcttcgtgcaataacatccgaaaatctagagtttcagtactgcgggtgattacgcggaagagacatttttacatgatatacgcttacacccagtttcccatataccactataattgatcatgaagggctaaaattgtggaatacaagcgatgtcatctcaaatgatcattgcattatgtaactgttcataacatttgcattcaggggctaagaatatttggagacatttgttcctactactaacaatttctaggtgtctttagattagagtttgtaaactttattttagatcattttggttaaaaattagatttgagtgaatggagcaaaaaataaaaataaaaagaaattcaattttaaaacatttattcg

SEQ ID NO: 19667 - protein, 214 aa, Glycine max
GTSVFLPTATYSMFPENLAMGGMSLRQGELCNAITVSVVLHNDGSIAEYSVFNSVIKPTYMLTYESASELLHLNLQEEGELRILSEAANLRSNWRRQQVKAFLRGKPPPFTAGKLEGIAAVVNENVRTVRKLCSSSLRYWILEYLRRQPKERTYRALVLRFLKDRIAALLLLEVGFQASAWIPVGMQIGDEVEVKVEEAHPRDDILFLKEVVKE

SEQ ID NO: 19668 - protein, 202 aa, Glycine max
MFPENLAMGGMSLRQGELCNAITVSVVLHNDGSIAEYSVFNSVIKPTYMLTYESASELLHLNLQEEGELRILSEAANLRSNWRRQQVKAFLRGKPPPFTAGKLEGIAAVVNENVRTVRKLCSSSLRYWILEYLRRQPKERTYRALVLRFLKDRIAALLLLEVGFQASAWIPVGMQIGDEVEVKVEEAHPRDDILFLKEVVKE

SEQ ID NO: 19669 - protein, 195 aa, Glycine max
MGGMSLRQGELCNAITVSVVLHNDGSIAEYSVFNSVIKPTYMLTYESASELLHLNLQEEGELRILSEAANLRSNWRRQQVKAFLRGKPPPFTAGKLEGIAAVVNENVRTVRKLCSSSLRYWILEYLRRQPKERTYRALVLRFLKDRIAALLLLEVGFQASAWIPVGMQIGDEVEVKVEEAHPRDDILFLKEVVKE

SEQ ID NO: 19670 - DNA, 1271 bp, Glycine max
actaactttctaatattcatgtaccattttgttttaaaaatattcttcttgattgttcttcattcaccttgatctatcgtaatcttttttaatattttttatgttttagaatattttaatttttaatttaataattccttttatgaacatccacatccacaacaaattaaataatcaagtaattaagtatatttttcccctaaaattgtgctcacttcgtataacccgtctctgttgttgttgttgttgttttttttttggtgaatacccatctctgttgttgcactcaccggctatggaatttgagtctctccaacgacgtcgttcaagcagtgtcagtgccaaccagaacaacgcttctatcagagagaagaggccgaaacgcagtgaggtaatcgccaagaagaaaaccattgaagaactcatcaaaacagcacgtgccgaaaaagaccacctcgctcctttccccgactttcgacgtttccacgtaaacggtctctctgtgtgtttgaagtcaggacatggcaataaactttcctcacctgttaagcattatattcagagtctccttaagctaaacatggaaggaccatatggatctgagtggccagaggaagaaaagagacttcaacttgtttggaagatagtggccccttggttggattcgtacagtatcgctttgttttggaagaagagataccagtgctttatgtttatgaattacagcttgagcctcgtgttcagggcaagggagtggggaagtttctaatgcaacttgttgagcttatggcacaaaagagccgtatgagtgctgtcatgctgactgttcaaaaggctaatgtagtagctatggatttctatataaataagctaagatacatcatatcagctatgtcaccttcaagagtcaatccaatgatgcagttggagaagagttatgaaatactttgtaaagcatttaatgatgaagctaaaactattctggaggatagagaggatgagttggaccagttggacaaagacggctcaagttattagtcccatttttatagacttctttactctaccaatcgagtgcccttctttattgggttctttttttgtttctttcttctcttctctatccatttagaacaattctattttgtcacattgtagacgccttctgttcaagacaaagtgggtctaactcacccatgtccaaatgttaattatgaatataaggatggtgtgtaacacaaatatttatcattcaaagtttgtctgaaatc

SEQ ID NO: 19671 - protein, 208 aa, Glycine max
MNIHIHNKLNNQVIKYIFPLKLCSLRITRLCCCCCCFFFGEYPSLLLHSPAMEFESLQRRRSSSVSANQNNASIREKRPKRSEVIAKKKTIEELIKTARAEKDHLAPFPDFRRFHVNGLSVCLKSGHGNKLSSPVKHYIQSLLKLNMEGPYGSEWPEEEKRLQLVWKIVAPWLDSYSIALFWKKRYQCFMFMNYSLSLVFRAREWGSF

SEQ ID NO: 19672 - protein, 157 aa, Glycine max
MEFESLQRRRSSSVSANQNNASIREKRPKRSEVIAKKKTIEELIKTARAEKDHLAPFPDFRRFHVNGLSVCLKSGHGNKLSSPVKHYIQSLLKLNMEGPYGSEWPEEEKRLQLVWKIVAPWLDSYSIALFWKKRYQCFMFMNYSLSLVFRAREWGSF

SEQ ID NO: 19673 - DNA, 1234 bp, Glycine max
gatcagaagttagctgcataacccagagaaaagtaaacactgcaataggaagagttttcaaatggcagagggaaaaggtagagtttgtgtcactggaggcactgggttccttggttcatggatcatcaagagactccttgaagatggatatgctgttaacaccactattagatctgacccaggacgaaagagagatgttagcttcctcacaaacctaccaggcgcatccgaaaagctaaaaattttcaacgctgatctcagcgaccctgaaagttttgatccagcagttgagggatgtgttggaattttccacacagccacgccaattgattttgcagtgaacgagcctgaggaagtggtaaccaaaagagccatcgatggagcactaggcataatgaaagcaggcctaaaagcaaagacagtgaagagggttgtttacacttctagtggctccaccgtttccttcagcagccttgaagaaaaagatgtggtggatgagagtgtttggagtgatgtggatatgcttaggagtgtaaagccttttggttggtcctatgcagtttcaaaggtgttgactgagaaggctgtgcttgaatttggagaacataatgggttggaagttgcaactgttattgctccttttattgttggtccttttgtttgtcccaagcttcctgactctattgaaaaagctctgcttatggtgttgggcaaaaaagaagaaattggtgtcattcgttaccatatggtacatgtggatgatgtggctagagcacatatcttcctgcttgagcatcctaatccaaaagggagatataattgctcaccattcattgtacccattgaagagatgggtgaacttctttcagccaaatacccggaatttcaactaccaacagtagacgagctgaagggaattaaaggtgccaagcaaccacatttaacctccaagaaacttgttgatgctggttttgagttcaagtatagcttagaggacatgtttcaggatgcaattgaatgctgcaaggaaaagggttatctttaatcgaatttagccatgaagttgacaaaataaaattgatgcatatggttgttagtttgaactatttcagatcgatggcaatcatggctaatgacatatatgtacatctaggaatgcatgatgttactcgtaatagatgaatgaggaaaataatcttcttcgtttgtctaaatgctaaataaaccatttaac

SEQ ID NO: 19674 - protein, 327 aa, Glycine max
MAEGKGRVCVTGGTGFLGSWIIKRLLEDGYAVNTTIRSDPGRKRDVSFLTNLPGASEKLKIFNADLSDPESFDPAVEGCVGIFHTATPIDFAVNEPEEVVTKRAIDGALGIMKAGLKAKTVKRVVYTSSGSTVSFSSLEEKDVVDESVWSDVDMLRSVKPFGWSYAVSKVLTEKAVLEFGEHNGLEVATVIAPFIVGPFVCPKLPDSIEKALLMVLGKKEEIGVIRYHMVHVDDVARAHIFLLEHPNPKGRYNCSPFIVPIEEMGELLSAKYPEFQLPTVDELKGIKGAKQPHLTSKKLVDAGFEFKYSLEDMFQDAIECCKEKGYL

SEQ ID NO: 19675 - protein, 216 aa, Glycine max
MKAGLKAKTVKRVVYTSSGSTVSFSSLEEKDVVDESVWSDVDMLRSVKPFGWSYAVSKVLTEKAVLEFGEHNGLEVATVIAPFIVGPFVCPKLPDSIEKALLMVLGKKEEIGVIRYHMVHVDDVARAHIFLLEHPNPKGRYNCSPFIVPIEEMGELLSAKYPEFQLPTVDELKGIKGAKQPHLTSKKLVDAGFEFKYSLEDMFQDAIECCKEKGYL

SEQ ID NO: 19676 - protein, 174 aa, Glycine max
MLRSVKPFGWSYAVSKVLTEKAVLEFGEHNGLEVATVIAPFIVGPFVCPKLPDSIEKALLMVLGKKEEIGVIRYHMVHVDDVARAHIFLLEHPNPKGRYNCSPFIVPIEEMGELLSAKYPEFQLPTVDELKGIKGAKQPHLTSKKLVDAGFEFKYSLEDMFQDAIECCKEKGYL

SEQ ID NO: 19677 - DNA, 2114 bp, Glycine max
agtttattagaattagagagaaagaagcggttttatatttctcgcgcgattcgtttcaggcaagtgcagtgcagaaacaaagcgacgtcgttcattggacgatgaaagaagctcaacaagtgctggatctctgaactctttgcgattcgaatctcgagtcgttgatcgtttcggacaatggattcgtggctcaaagccgctgaaggtttatttgaagttgtagatcgacgagcgaaggctgttgccagtgacttatcagaggagcagggtgatcttaagtctccagcatcaaatgggcaaggatctcagggcaagaagacaaaatcaaaaccaaaggctcaaaagggactatccgactcatcaactacaattagtgatactactcaggagaaaagtggatctccatcagcacctgcggacatagcaacttcaatagacaaagttgatcctgaaataattgatgggagcgcttcaacatctacaaaccaaccaaaggagccacgacctagcgatgcaacatcacccttgttaggctcttcattatcaaaaatgctaggcgatgatgttggtaaacatgacccagatgatgtggaaacattagtaaatgatgctgatattggagttgccactattgctgctaatggtgatactgtccaagagagtgcttcagatgtttgtgagatggatcctcctccagctcccaaagaaattgagggccccagtgatgaacccactagtactgggcaaattatcaaatctagagatttagatgccagtaaaaatgtggatatagagaaatctgaatctgtggcttctgacacagctcctaataatgatactatactcaaagattctgatgtaaaacttgaatctgttgtggatgaaaaaagccaagaggatcacaaaactgatatctcccccaaaaaagtacaggatcaacttgatgaggctcaaggattacttaaaacaacaaaatctactggtcagtctaaagaggcaaggttagctcgggtctgtgctggattgtcatcccgtcttcaagaatacaaatctgaaaatgcacagttggaggaacttctcacttcagagagagagctgagtaaatcatatgaagctagcataaaacagctacagaaggatttgtctgaaagtaaaagggaagtgaccagagttgaatcaaatatggttgaggctttggctgcaaaaaatgctgaaattgaggcacttttaagttcgatggatgctgttaagaggcaggctgcattgtcagaaggaaatctagcttccctgcaggcaagcatggaatcaatgatgagaaatcgagaactaagtgaaacaaggatgatgcaggctctaagagaggagctagcatctgctgagcgaagagcagaagaggagcgtgctgcacataatgctaccaaaatggttgctatggaaagagaagtggaattggagcacagagcagttgagtcatccactgcacttgcaaggatacagagagtagcggacgagaggacagcaaaagccacagaacttgagcagaaagtggcacttctcgaggttgaatgtgcatctttaaatcaagaactacaagatatggaagcccgtgtgcgccgggaacaaaaaaaggcaccagaagaggcaaatcaagtaattcagatgcaggcatggcaggaagaattggagcgtgcacgtcaaggtcagagggaagctgaaaacaagctatcatccttggaggctgaaatgcaaaaaatgagagttgaaatggctgccatgaagagggatgctgagcattactcacgtcaggagcatatggagttagagaaacgctatcgggaactgactgaccttttgtactacaaacaaactcaattagaaaccatggtcagtgaaaaagctgctgcagagtttcaattggaaaaggaaattaagcgtcttcaggaagcaaaggcagaggcagaaagaagtagagtttctcgtcgagcatcatcatcttgggaagatgagactgaaataaaatcccttgagccgcttcctttgcatcaccgtcatttggtcggtgcaagtattcagttgcaaaaggcagtgaaactattagattctggggctgtcag

SEQ ID NO: 19678 - protein, 645 aa, Glycine max
MDSWLKAAEGLFEVVDRRAKAVASDLSEEQGDLKSPASNGQGSQGKKTKSKPKAQKGLSDSSTTISDTTQEKSGSPSAPADIATSIDKVDPEIIDGSASTSTNQPKEPRPSDATSPLLGSSLSKMLGDDVGKHDPDDVETLVNDADIGVATIAANGDTVQESASDVCEMDPPPAPKEIEGPSDEPTSTGQIIKSRDLDASKNVDIEKSESVASDTAPNNDTILKDSDVKLESVVDEKSQEDHKTDISPKKVQDQLDEAQGLLKTTKSTGQSKEARLARVCAGLSSRLQEYKSENAQLEELLTSERELSKSYEASIKQLQKDLSESKREVTRVESNMVEALAAKNAEIEALLSSMDAVKRQAALSEGNLASLQASMESMMRNRELSETRMMQALREELASAERRAEEERAAHNATKMVAMEREVELEHRAVESSTALARIQRVADERTAKATELEQKVALLEVECASLNQELQDMEARVRREQKKAPEEANQVIQMQAWQEELERARQGQREAENKLSSLEAEMQKMRVEMAAMKRDAEHYSRQEHMELEKRYRELTDLLYYKQTQLETMVSEKAAAEFQLEKEIKRLQEAKAEAERSRVSRRASSSWEDETEIKSLEPLPLHHRHLVGASIQLQKAVKLLDSGAV

SEQ ID NO: 19679 - protein, 521 aa, Glycine max
MLGDDVGKHDPDDVETLVNDADIGVATIAANGDTVQESASDVCEMDPPPAPKEIEGPSDEPTSTGQIIKSRDLDASKNVDIEKSESVASDTAPNNDTILKDSDVKLESVVDEKSQEDHKTDISPKKVQDQLDEAQGLLKTTKSTGQSKEARLARVCAGLSSRLQEYKSENAQLEELLTSERELSKSYEASIKQLQKDLSESKREVTRVESNMVEALAAKNAEIEALLSSMDAVKRQAALSEGNLASLQASMESMMRNRELSETRMMQALREELASAERRAEEERAAHNATKMVAMEREVELEHRAVESSTALARIQRVADERTAKATELEQKVALLEVECASLNQELQDMEARVRREQKKAPEEANQVIQMQAWQEELERARQGQREAENKLSSLEAEMQKMRVEMAAMKRDAEHYSRQEHMELEKRYRELTDLLYYKQTQLETMVSEKAAAEFQLEKEIKRLQEAKAEAERSRVSRRASSSWEDETEIKSLEPLPLHHRHLVGASIQLQKAVKLLDSGAV

SEQ ID NO: 19680 - protein, 477 aa, Glycine max
MDPPPAPKEIEGPSDEPTSTGQIIKSRDLDASKNVDIEKSESVASDTAPNNDTILKDSDVKLESVVDEKSQEDHKTDISPKKVQDQLDEAQGLLKTTKSTGQSKEARLARVCAGLSSRLQEYKSENAQLEELLTSERELSKSYEASIKQLQKDLSESKREVTRVESNMVEALAAKNAEIEALLSSMDAVKRQAALSEGNLASLQASMESMMRNRELSETRMMQALREELASAERRAEEERAAHNATKMVAMEREVELEHRAVESSTALARIQRVADERTAKATELEQKVALLEVECASLNQELQDMEARVRREQKKAPEEANQVIQMQAWQEELERARQGQREAENKLSSLEAEMQKMRVEMAAMKRDAEHYSRQEHMELEKRYRELTDLLYYKQTQLETMVSEKAAAEFQLEKEIKRLQEAKAEAERSRVSRRASSSWEDETEIKSLEPLPLHHRHLVGASIQLQKAVKLLDSGAV

SEQ ID NO: 19681 - DNA, 1469 bp, Glycine max
gaaaactgaaacagagaaaggttgctgggcacacaatattgtcccctactgagaacacagatgccatagaaaatcttcatatatcttccactatgcatggaagaagtactttatcaaaacaggtttcttcttcaagttccaaatcacaactgaaagttgtgtgcagtgagattgggattggtaatgcccaactagcatcaagctctcgaccttcccttcttgatcatgtccattcaaaagaagctgacatattagctatttcagagttgaattgtgctctagacaaaaaggaacgtgtattgtctgaactgaagcacatgaatgatggggtatcagagagccagaaatatggagacaactcagtaaaggattcagaaccttttaagaggaattatgcttcagtactaaagcaattaactgaagcaaatgaacaggtttcttctgccttgttttgcttgaggcaacgcaacacatatcaagcaagctcctctgttttgtcattaaagcccctggctaattttgatgatccaagtggtcaggccagctcttccaattgttcggcttgccacaaccaagaatctatatctcaaagtcatatagctgagattgtcgaaagttctagaagaaaagctagaacaatggttgttgaagccacacaggcaatgtcaagtttaagaaagacagaaagtaaggttgaaagaattgaggatgcaataaattttatcaatagccagctttcagtggacgaacctactgcttcagctacaacatttcttcctgcagattctttttctctggcttctcaggatcaattgactgccaacatattgaatccgttggcaagttgtcatgtacaagatgctgaacttaatagttcatctgatcaaaatgaaatgaaaattccctcagaactcatatctcattgcctagctacattgttcatgattcagaagtgtacggaacgactatttcccccagctgatgttgctcaggtactagattctgctgtcaccagtttgcagccattatcttcaaagaatcttccagtatatggtgagatacagaaatgcatgggcatcataagaaatcagatattggctctcataccgacatagcttggactctttcctcctttgttgtttgtaaatctgcaatgctctggtatttggctggttcaactcttgctgacgtgatctctatggagcgtcgtgagaccatacctacatccactgggacccagatatttcgtaattaacgcgggggagggtgggggggactatttataaaactgtttatacaattgtagccggaagaaaagggaaggttctacatattctcttttctgatgtacatatttttaaagatcaaatcatagtgagggactagcatgtcctattcagaaccagtaatgtgtattatgtattatgtcataatgttaaatgccataagctttatgaatgctattgcct

SEQ ID NO: 19682 - protein, 370 aa, Glycine max
KLKQRKVAGHTILSPTENTDAIENLHISSTMHGRSTLSKQVSSSSSKSQLKVVCSEIGIGNAQLASSSRPSLLDHVHSKEADILAISELNCALDKKERVLSELKHMNDGVSESQKYGDNSVKDSEPFKRNYASVLKQLTEANEQVSSALFCLRQRNTYQASSSVLSLKPLANFDDPSGQASSSNCSACHNQESISQSHIAEIVESSRRKARTMVVEATQAMSSLRKTESKVERIEDAINFINSQLSVDEPTASATTFLPADSFSLASQDQLTANILNPLASCHVQDAELNSSSDQNEMKIPSELISHCLATLFMIQKCTERLFPPADVAQVLDSAVTSLQPLSSKNLPVYGEIQKCMGIIRNQILALIPT

SEQ ID NO: 19683 - protein, 340 aa, Glycine max
MHGRSTLSKQVSSSSSKSQLKVVCSEIGIGNAQLASSSRPSLLDHVHSKEADILAISELNCALDKKERVLSELKHMNDGVSESQKYGDNSVKDSEPFKRNYASVLKQLTEANEQVSSALFCLRQRNTYQASSSVLSLKPLANFDDPSGQASSSNCSACHNQESISQSHIAEIVESSRRKARTMVVEATQAMSSLRKTESKVERIEDAINFINSQLSVDEPTASATTFLPADSFSLASQDQLTANILNPLASCHVQDAELNSSSDQNEMKIPSELISHCLATLFMIQKCTERLFPPADVAQVLDSAVTSLQPLSSKNLPVYGEIQKCMGIIRNQILALIPT

SEQ ID NO: 19684 - protein, 265 aa, Glycine max
MNDGVSESQKYGDNSVKDSEPFKRNYASVLKQLTEANEQVSSALFCLRQRNTYQASSSVLSLKPLANFDDPSGQASSSNCSACHNQESISQSHIAEIVESSRRKARTMVVEATQAMSSLRKTESKVERIEDAINFINSQLSVDEPTASATTFLPADSFSLASQDQLTANILNPLASCHVQDAELNSSSDQNEMKIPSELISHCLATLFMIQKCTERLFPPADVAQVLDSAVTSLQPLSSKNLPVYGEIQKCMGIIRNQILALIPT

SEQ ID NO: 19685 - DNA, 1220 bp, Glycine max
gtatgcgactaaccctagttcattgcactgcaacttagccacttgaacccccttcgtaagcctcttcacatcttcacttcttcttccgcactaatacgaaaccagagggaattcacaaaagaggttaccatgtcggacgatgagagagaggagaaggagttggatctcacttctccggaagttgtcaccaagtacaagagcgccgcggagattgttaacagggctttgcagttagttatttcagaatgtaaaccgaaggcaaagattgttgacctttgcgagaaaggggattcgtatattagagagcaaactggtagcatgtacaagaatgtgaagaggaagatagagagaggtgttgccttccctacatgtgtgtctgtgaacaacactgtctgtcacttctctcctcttgccagtgatgaaacagtgttggaagatggtgatatagtgaaaattgacatggcttgccatatagatgggttcattgctgctgtggcacacactcatgttcttcaggaggggccagttacaggacgggcagccgatgctcttgcagcagcaaacaccgctgccgaagtggccttgcggcttgtaaggcctggaaggaagaacaaggatgtaactgaagcaattcagaagattgccgcagcgtatgattgtaaaattgttgagggtgttcttagccaccaaatgaaacagtttgtgattgatgggaataaggttgtgctaagtgtatccaatccagatacaagggttgatgatgcagagtttgaggagaatgaagtttatgcaattgatatcgtagcaagtactggagatggcaagcctaagcttttggatgaaaagcagacaactatttataagagagctgttgacaagagctatcacttgaagatgaaagcatctaggttcattttcagtgaaataagccaaaagtttcccatcatgcccttctctgcaagggctttggaagagaaaagagctcgtttgggtttagtggaatgtgtgaatcatgagctcctgcaaccttatcctgttctgcatgaaaagcctggtgattatgttgcacatatcaaattcactgtcttgctaatgcccaatggatcagatcgtgttacgtctcactcactccaggagttgcagcccaccaaaacaatagatgatcccgaaatcaaggcgtggctagcattgggcacaaagacaaagaagaaaggcggtgg

SEQ ID NO: 19686 - protein, 363 aa, Glycine max
MSDDEREEKELDLTSPEVVTKYKSAAEIVNRALQLVISECKPKAKIVDLCEKGDSYIREQTGSMYKNVKRKIERGVAFPTCVSVNNTVCHFSPLASDETVLEDGDIVKIDMACHIDGFIAAVAHTHVLQEGPVTGRAADALAAANTAAEVALRLVRPGRKNKDVTEAIQKIAAAYDCKIVEGVLSHQMKQFVIDGNKVVLSVSNPDTRVDDAEFEENEVYAIDIVASTGDGKPKLLDEKQTTIYKRAVDKSYHLKMKASRFIFSEISQKFPIMPFSARALEEKRARLGLVECVNHELLQPYPVLHEKPGDYVAHIKFTVLLMPNGSDRVTSHSLQELQPTKTIDDPEIKAWLALGTKTKKKGG

SEQ ID NO: 19687 - protein, 300 aa, Glycine max
MYKNVKRKIERGVAFPTCVSVNNTVCHFSPLASDETVLEDGDIVKIDMACHIDGFIAAVAHTHVLQEGPVTGRAADALAAANTAAEVALRLVRPGRKNKDVTEAIQKIAAAYDCKIVEGVLSHQMKQFVIDGNKVVLSVSNPDTRVDDAEFEENEVYAIDIVASTGDGKPKLLDEKQTTIYKRAVDKSYHLKMKASRFIFSEISQKFPIMPFSARALEEKRARLGLVECVNHELLQPYPVLHEKPGDYVAHIKFTVLLMPNGSDRVTSHSLQELQPTKTIDDPEIKAWLALGTKTKKKGG

SEQ ID NO: 19688 - protein, 253 aa, Glycine max
MACHIDGFIAAVAHTHVLQEGPVTGRAADALAAANTAAEVALRLVRPGRKNKDVTEAIQKIAAAYDCKIVEGVLSHQMKQFVIDGNKVVLSVSNPDTRVDDAEFEENEVYAIDIVASTGDGKPKLLDEKQTTIYKRAVDKSYHLKMKASRFIFSEISQKFPIMPFSARALEEKRARLGLVECVNHELLQPYPVLHEKPGDYVAHIKFTVLLMPNGSDRVTSHSLQELQPTKTIDDPEIKAWLALGTKTKKKGG

SEQ ID NO: 19689 - DNA, 1646 bp, Glycine max
aagcttctcttgcaacaagttattccactcccttgatgaatcttcttgttctcttcctgcctgtttgggtgctaagcatttctttttcctcaccaattcttcatgctgcttcctccatttctctttctcaaaatgcacaagctgaatctccaggaattcaggaggttagaacagtgcaccaccagaatttgaataagagaattctaatcgcactagttgcttgttctgctcttcttgttggagtcttcctattcctgttatatgtctggttcggtcgacataaaaacttaagatgctccaaaagtaaaagccaagaaaccatcgaggctgcaaaaggggaaaccataagctcggttaatgctaaacttaactactctaagatggcagataaaaagagttcagttgctatttttgactatcagctgttagaggctgcaacaaacagctttaacacaagtaatattatgggagagagtggttctagaattgtttacagagctcattttgatgaacatttccaggcagctgttaagaaagcagatagtgacgctgatagagaatttgagaatgaagtgagttggttgagcaagatacagcatcagaatatcataaaaattatgggttattgcattcatggtgaatcgaggtttcttgtttatgaattgatggagaatggatctctggaaactcaattacatgggcctaatcgggggtcatctttaacttggcctctaaggttaagaattgctgttgatgttgccaggtgagtttatgacgcttattctacttaagactaatttaatgtcccttgtcttatctatattatctaatgcatattgtctgttagagcactagaatatctccacgagcacaacaatcctcctgtggttcatagagacctaaaatcgtctaatgtttttctggattctaactttaatgccaaggttagattgtgattgacttgttagtcttacatgttgtcaattagttaataatattacttactttcctttactgagttttgtgattcagttatcagattttggatttgctatggttttgggaatgcaacacaagaacatgaagatgtcaggaactttaggatatttggctcctgagtacatatcgcatggtaaactaactgataagagcgatgtctatgcttttggggttgtccttctagagctcctaaccggaaaaaaacccatggaaaacatgacctcgaaccaatatcaatcccttgtatcatgggccatgcctcagctaaccgacagatcaaagcttccaagtattctggatcctgttatcagagacacaatggatttgaagcatttgtatcaggttgctgcagtggctgtactctgtgtgcaatcagaaccaagttataggccactaataactgatgtgttgcactctcttatccctttggtaccagttgagcttggagggtcactaagagttacagaaccaatcagctcatagaactctcattgatattgaaaagttgtgttttcatttttcaactatggtatttgttcactttattaacattttgttattgtaattattatccaattgtaattattcatgattgtgatttggttcttctttttagtcgtaaatcatggtgatattaccatctttac

SEQ ID NO: 19690 - protein, 254 aa, Glycine max
ASLATSYSTPLMNLLVLFLPVWVLSISFSSPILHAASSISLSQNAQAESPGIQEVRTVHHQNLNKRILIALVACSALLVGVFLFLLYVWFGRHKNLRCSKSKSQETIEAAKGETISSVNAKLNYSKMADKKSSVAIFDYQLLEAATNSFNTSNIMGESGSRIVYRAHFDEHFQAAVKKADSDADREFENEVSWLSKIQHQNIIKIMGYCIHGESRFLVYELMENGSLETQLHGPNRGSSLTWPLRLRIAVDVAR

SEQ ID NO: 19691 - protein, 243 aa, Glycine max
MNLLVLFLPVWVLSISFSSPILHAASSISLSQNAQAESPGIQEVRTVHHQNLNKRILIALVACSALLVGVFLFLLYVWFGRHKNLRCSKSKSQETIEAAKGETISSVNAKLNYSKMADKKSSVAIFDYQLLEAATNSFNTSNIMGESGSRIVYRAHFDEHFQAAVKKADSDADREFENEVSWLSKIQHQNIIKIMGYCIHGESRFLVYELMENGSLETQLHGPNRGSSLTWPLRLRIAVDVAR

SEQ ID NO: 19692 - protein, 142 aa, Glycine max
MVLGMQHKNMKMSGTLGYLAPEYISHGKLTDKSDVYAFGVVLLELLTGKKPMENMTSNQYQSLVSWAMPQLTDRSKLPSILDPVIRDTMDLKHLYQVAAVAVLCVQSEPSYRPLITDVLHSLIPLVPVELGGSLRVTEPISS

SEQ ID NO: 19693 - DNA, 1426 bp, Glycine max
aatttttttttcattcaaggacaacatgtagagtttttttatagcaactacgggccagaaaaatgtagagtaaacattatggatcaattcataaacattttttcacgtggggaggaaaatgtgagttgtgatttagtgaataaaattttaacaatatatcaaattgttacacaactgatcatggaccttgcctgagcctgaaccatcattttttttaagttagagctttaagaatacagcaggacataatgtttttcttggagtaggagaatgtgaggttggcagtggaaagatgcctgttgcatttactgtctcttgatctgtgattgttttttggtccctttattaataaaattgagttgagagtcatgactacaggagctgaaactattcactgagcagtcttagtaatatatacattaacaaaaggtaatatacgtatacagactttatatttttattttttcaatttaagcgtcctatacttcagtgacagactagtgtgtggttttttataacttccaatttatcttccgagcttgaccgttgattctacattgcagagggaaaaatcccatgaattggttagagtgacaagtcccatggtctactagtctttattctttaccaagtaacatacatagtatcttcaacaaggacttatctgcatacattgtggcactaaaattcattttatatcgtaaatttgaaacccaagacatgtatagacatctcagctgcacagtgagactaatggtgggtaagcattctcacatgcgtgggagaaaaaaggaaagatttacttgttttaagtatatattaatttatttggtctctccttttaaaatcttctcccagggagcaaattttgctgatgttatacaaatgactgacatctttgaggggagtattattcggagtgctagaaggcttgacgagtttttgaatcagttgcgtgctgctgctaatgcagttggagaggctgacttggagaagaaatttgcagctgcaagtgaaagccttcgacgaggtattatgtttgcaaattctttgtatctgtgacttgtttttctccagaccttacgttatatctcacggtcattccggctggctgaaagtttactttcccatccaaccttttggcatgcacccacttccttctcttaaaagctttctggtgtaaatatttgtatgctgtcactaatggtaaagggtgtgaatatagagtgatagaaaaatctggtcaatagatagaaaattccggtcaataaaggttcatcttgagagtcgcagatcattcatttatttaccttcagaacctctagtctgtctggggcttgaggagtgagggtgccgaagatatttgtttgtaatttgctgaaaaattttcaatacaaattttgattgatagttcattattttagtg

SEQ ID NO: 19694 - protein, 113 aa, Glycine max
MYRHLSCTVRLMVGKHSHMRGRKKERFTCFKYILIYLVSPFKIFSQGANFADVIQMTDIFEGSIIRSARRLDEFLNQLRAAANAVGEADLEKKFAAASESLRRGIMFANSLYL

SEQ ID NO: 19695 - protein, 102 aa, Glycine max
MVGKHSHMRGRKKERFTCFKYILIYLVSPFKIFSQGANFADVIQMTDIFEGSIIRSARRLDEFLNQLRAAANAVGEADLEKKFAAASESLRRGIMFANSLYL

SEQ ID NO: 19696 - protein, 95 aa, Glycine max
MRGRKKERFTCFKYILIYLVSPFKIFSQGANFADVIQMTDIFEGSIIRSARRLDEFLNQLRAAANAVGEADLEKKFAAASESLRRGIMFANSLYL

SEQ ID NO: 19697 - DNA, 1251 bp, Glycine max
ataacagagcacaccaacaccaacatcaacattctcattctctctcttttttctttcagttttggctttgatctttcaagttcaatggctggagatatagggagagccttgcctcctcctgattcagaagaattctcaaccttgttcaaccaactcctccacaattctcccccactaggaatggaccccaatcattcaccttctgatttcaccccacacaacaccaccatcaacatcaacagcaacaacaacaacaacactgttccttcctctccctcaaatttcaatttctctgacccccatcattacatccctgcctctgatgccaccaccttcaagcaacacaacatcaaccacaacaacaatcacacccctgatttcacttcttctcatgttgagaagagtgtggaggcatcgaaacctgtcccaccaccacgttcttcgtcaaagaggagtagagctgcagagttccataatttgtctgaaaagagaaggaggagtaggattaacgagaaaatgaaagccttacagaatttaattccaaattccaacaagacagacaaagcttcaatgctagatgaggccatagaatatttaaagcagctccagcttcaagtgcaaatgttaatgatgagaaatggtttgagcttgcatccaatgtctttgccaggaggactaagacctatgataatgcctcagactggattgaatcttgatgggagtaatggatttcagaattctacctgtgcaattgcctcatcttcaaatgatgaaagcttggtgcggcatgcctttagttttccaaagcaatgcagcatctcaaataagtctattggtgtaccctccgtgaaaaacatagcaacttcggatacctcatccacttttcatccctctattaaggatgcactctacggcaacatgccacaaccgtttatggatacaacaaagattggaaaaccctctccagacgtgtcttaaacagctcgatttcattgagggagaaaagaattttttagatggcaagtcgcctcgtaaaagggtagctttgttcaggcattataatctacatttaaatctgctgactatatgacactccattgggttgttcctggtgcagtttaatttgtagcagtttgacagagtctttgtgccattgttgacacttgcataaaaatgtacaagtattttataacttcatcaattgcaaaatgcagctaatgaacattctgcaacatgttgtgactgacttgt

SEQ ID NO: 19698 - protein, 325 aa, Glycine max
ITEHTNTNINILILSLFSFSFGFDLSSSMAGDIGRALPPPDSEEFSTLFNQLLHNSPPLGMDPNHSPSDFTPHNTTININSNNNNNTVPSSPSNFNFSDPHHYIPASDATTFKQHNINHNNNHTPDFTSSHVEKSVEASKPVPPPRSSSKRSRAAEFHNLSEKRRRSRINEKMKALQNLIPNSNKTDKASMLDEAIEYLKQLQLQVQMLMMRNGLSLHPMSLPGGLRPMIMPQTGLNLDGSNGFQNSTCAIASSSNDESLVRHAFSFPKQCSISNKSIGVPSVKNIATSDTSSTFHPSIKDALYGNMPQPFMDTTKIGKPSPDVS

SEQ ID NO: 19699 - protein, 297 aa, Glycine max
MAGDIGRALPPPDSEEFSTLFNQLLHNSPPLGMDPNHSPSDFTPHNTTININSNNNNNTVPSSPSNFNFSDPHHYIPASDATTFKQHNINHNNNHTPDFTSSHVEKSVEASKPVPPPRSSSKRSRAAEFHNLSEKRRRSRINEKMKALQNLIPNSNKTDKASMLDEAIEYLKQLQLQVQMLMMRNGLSLHPMSLPGGLRPMIMPQTGLNLDGSNGFQNSTCAIASSSNDESLVRHAFSFPKQCSISNKSIGVPSVKNIATSDTSSTFHPSIKDALYGNMPQPFMDTTKIGKPSPDVS

SEQ ID NO: 19700 - protein, 265 aa, Glycine max
MDPNHSPSDFTPHNTTININSNNNNNTVPSSPSNFNFSDPHHYIPASDATTFKQHNINHNNNHTPDFTSSHVEKSVEASKPVPPPRSSSKRSRAAEFHNLSEKRRRSRINEKMKALQNLIPNSNKTDKASMLDEAIEYLKQLQLQVQMLMMRNGLSLHPMSLPGGLRPMIMPQTGLNLDGSNGFQNSTCAIASSSNDESLVRHAFSFPKQCSISNKSIGVPSVKNIATSDTSSTFHPSIKDALYGNMPQPFMDTTKIGKPSPDVS

SEQ ID NO: 19701 - DNA, 1415 bp, Glycine max
aaacagagtgctatttgaaaaattgttctctcaccgtgaaagagagagagaggttaggctatggctgatgagagcgttgttgagtccccagtgaagaggcagagagatgatggtgaagaaaatggtgtctctgtttccatggacgcggagggtggcaaagaccctcttagtaacggtttatcatctgtgattcctgggtggttctctgaaatcagtgcaatgtggcctggagaggctcactccttgaaggtggaaaagattttgtttcaaggaaagtcagaataccaaaatgtcatggtcttccagtcatcaacatatggcaaggttcttgttttggatggagtaattcagctaacagaaagggatgaatgtgcctaccaagaaatgatcactcatcttcctctttgctctattccaaaccctaaaaaggttttggttatcggtggaggtgatggaggggtcatacgagaagtagcacgccattcttcagttgaaaagatagacatttgtgaaattgacaagatggttgttgatgtctccaaacaatacttccctgatgtagctgttgggtatgatgatcctcgtgtgacacttcatattggtgatggagttgcatttttgaaggaagttccagaaggaacttatgatgctgttatagtggattcatccgaccctattggtcctgctcaggagctttttgaaaagcccttctttgcgtcagttgcaaaggctctttgtcccggtggagttgtgtgtactcaggcagaaagcatttggcttcatatggatataattgaggacattgtggccaattgtcgccagatttttaaaggctctgtcaactatgcttggactactgttcctacatacccaagtgggatgattggttttatgctttgctcaactgagggaccacctgttgatttcaagcatccagttaatcccatagatgaaaatgagagtcagaagtcagtaagaccactgaaattttacaactctgagattcatacagcagctttctgtttgccgtcatttgcaaagaggaagattagttctaaagcaaattaaaaagattttcagaacctttgaaggagctcaagtggctgttgtagaagtccaacattcatccttgctgtattggtccatctatcaatgagccttggaataagtcagattaaatttggcattgaatagttaagtttatttctggaaatcaattagcaatcggattaagagtctaggcaatcctaaacggggtttaaaagtgatggcaattatcattatcaacccaagaattacctgttttataatctatctttatattcttattaataagttggagaggggaccaatcgattgacatgattaaatcaactttgaatgccgatcactatcaattggatgccataattttc

SEQ ID NO: 19702 - protein, 335 aa, Glycine max
MADESVVESPVKRQRDDGEENGVSVSMDAEGGKDPLSNGLSSVIPGWFSEISAMWPGEAHSLKVEKILFQGKSEYQNVMVFQSSTYGKVLVLDGVIQLTERDECAYQEMITHLPLCSIPNPKKVLVIGGGDGGVIREVARHSSVEKIDICEIDKMVVDVSKQYFPDVAVGYDDPRVTLHIGDGVAFLKEVPEGTYDAVIVDSSDPIGPAQELFEKPFFASVAKALCPGGVVCTQAESIWLHMDIIEDIVANCRQIFKGSVNYAWTTVPTYPSGMIGFMLCSTEGPPVDFKHPVNPIDENESQKSVRPLKFYNSEIHTAAFCLPSFAKRKISSKAN

SEQ ID NO: 19703 - protein, 309 aa, Glycine max
MDAEGGKDPLSNGLSSVIPGWFSEISAMWPGEAHSLKVEKILFQGKSEYQNVMVFQSSTYGKVLVLDGVIQLTERDECAYQEMITHLPLCSIPNPKKVLVIGGGDGGVIREVARHSSVEKIDICEIDKMVVDVSKQYFPDVAVGYDDPRVTLHIGDGVAFLKEVPEGTYDAVIVDSSDPIGPAQELFEKPFFASVAKALCPGGVVCTQAESIWLHMDIIEDIVANCRQIFKGSVNYAWTTVPTYPSGMIGFMLCSTEGPPVDFKHPVNPIDENESQKSVRPLKFYNSEIHTAAFCLPSFAKRKISSKAN

SEQ ID NO: 19704 - protein, 282 aa, Glycine max
MWPGEAHSLKVEKILFQGKSEYQNVMVFQSSTYGKVLVLDGVIQLTERDECAYQEMITHLPLCSIPNPKKVLVIGGGDGGVIREVARHSSVEKIDICEIDKMVVDVSKQYFPDVAVGYDDPRVTLHIGDGVAFLKEVPEGTYDAVIVDSSDPIGPAQELFEKPFFASVAKALCPGGVVCTQAESIWLHMDIIEDIVANCRQIFKGSVNYAWTTVPTYPSGMIGFMLCSTEGPPVDFKHPVNPIDENESQKSVRPLKFYNSEIHTAAFCLPSFAKRKISSKAN

SEQ ID NO: 19705 - DNA, 1046 bp, Glycine max
gacgttcattcggcttgcttgattgttccaggtattcgcagtcgaccgtgtcctcggagcacgatgaaggttgttgctgcctacctgcttgctgtcctcgctgggaatgccagcccctccgctgaggatttgactggcattctggagtcagttggctgtgaagttgacaatgaaaggatggaactgctgctgtcccaactgagcggtaaggacatcaccgagctcattgccgcgggcagagagaagtttgcttcagtcccatgtggcggcggcggtgtggctgttgcggcaggtgcacctgctgctggcggagctgctcctgcagctgaggcaaagaaagaagagaaggtggaagagaaggaagaaagcgatgatgatatgggcttcagcctcttcgactaggttgcacagtcatcacagtattgtttcgggcagtgaaggcatctccaccacccgcatctcctccccctgcctcccctcctccggcatctcctcccccagccactcctcctcctgcttctcctcctcccttttcaccaccaccagcaactcctccaccagcaacgcctccacccgcattgacccctacacccctttcctctccaccagccacttctccagctccagctcctgccaaggtggttgctcctgcactctctccttccttggctcccggccccagcctctccaccatctctccctctggcgatgatagtggggctgaaaagttgtggtcctttcagaagatgattgggagcttagtattcggatgtgctttgctgtccttgttgttctagacatcatcgatctctgtcttcggacttgcagatttttctgccaattcatgttatttttctatttaccttacctttatatattattattttgtggatgtgatcatgggagtttattaattactgtatttgaattatatacgtacattgcttgcattcttgggagatttgaggggaggttttgtattcgaggacagttattttgtatggcactattattagtgtatcgatcgttgcattctagtaaaaaac

SEQ ID NO: 19706 - protein, 133 aa, Glycine max
DVHSACLIVPGIRSRPCPRSTMKVVAAYLLAVLAGNASPSAEDLTGILESVGCEVDNERMELLLSQLSGKDITELIAAGREKFASVPCGGGGVAVAAGAPAAGGAAPAAEAKKEEKVEEKEESDDDMGFSLFD

SEQ ID NO: 19707 - protein, 113 aa, Glycine max
MMIWASASSTRLHSHHSIVSGSEGISTTRISSPCLPSSGISSPSHSSSCFSSSLFTTTSNSSTSNASTRIDPYTPFLSTSHFSSSSSCQGGCSCTLSFLGSRPQPLHHLSLWR

SEQ ID NO: 19708 - protein, 112 aa, Glycine max
MKVVAAYLLAVLAGNASPSAEDLTGILESVGCEVDNERMELLLSQLSGKDITELIAAGREKFASVPCGGGGVAVAAGAPAAGGAAPAAEAKKEEKVEEKEESDDDMGFSLFD

SEQ ID NO: 19709 - DNA, 1028 bp, Glycine max
atgttcggctatgccactgacgagactcccgagctcatgcccttgagccatgtccttgccacgaagctcggtgccaagctcaccgaggttcggaagaacgggacatgcccttggctgagacctgatggcaagacccaagtcactgttgagtactacaatgacaagggtgccatggttccaatccgcgtccacactgtgctcatctccacacagcatgatgagactgtcacaaatgatgagattgcagctgatcttaaagaacacgtgattaagcctgtgattcctgagaagtaccttgatgagaagaccattttccatttgaacccttctggcaggtttgtcattggagggccgcatggcgatgctggtctcaccggccgcaagatcatcatcgacacctatggaggatggggtgcacatggtggtggtgccttctctgggaaggatcctaccaaggttgataggagtggtgcctacattgtgaggcaagctgcaaagagcattgttgcaaatggacttgctaggagggcaattgtgcaagtttcctatgccattggtgtgcctgagcccttgtctgtgtttgttgacacttatggcactgggaagatccctgacaaggaaatcctcagcattgtgaaggagagttttgacttcaggcctggcatgatctccatcaaccttgatctcaagaggggtggaaatggcaggttcttgaagactgctgcatatggacactttggcagagatgaccctgacttcacatgggaagtggtgaagccactcaagggggagaaggtacctgcttaactaaaaggggttccaacactcttggcaagggacttttgcactactactggcttcttattatctgattgctaaaattttctctatgtttccttccctcttactcaattctgttttttttttctgtatttttttatgaatttcccccttttttttgtgtacttgtatgtgttctttcagaacatatatattttatatgatgaaacaaaaaaaaatgttctctc

SEQ ID NO: 19710 - protein, 268 aa, Glycine max
MFGYATDETPELMPLSHVLATKLGAKLTEVRKNGTCPWLRPDGKTQVTVEYYNDKGAMVPIRVHTVLISTQHDETVTNDEIAADLKEHVIKPVIPEKYLDEKTIFHLNPSGRFVIGGPHGDAGLTGRKIIIDTYGGWGAHGGGAFSGKDPTKVDRSGAYIVRQAAKSIVANGLARRAIVQVSYAIGVPEPLSVFVDTYGTGKIPDKEILSIVKESFDFRPGMISINLDLKRGGNGRFLKTAAYGHFGRDDPDFTWEVVKPLKGEKVPA

SEQ ID NO: 19711 - protein, 256 aa, Glycine max
MPLSHVLATKLGAKLTEVRKNGTCPWLRPDGKTQVTVEYYNDKGAMVPIRVHTVLISTQHDETVTNDEIAADLKEHVIKPVIPEKYLDEKTIFHLNPSGRFVIGGPHGDAGLTGRKIIIDTYGGWGAHGGGAFSGKDPTKVDRSGAYIVRQAAKSIVANGLARRAIVQVSYAIGVPEPLSVFVDTYGTGKIPDKEILSIVKESFDFRPGMISINLDLKRGGNGRFLKTAAYGHFGRDDPDFTWEVVKPLKGEKVPA

SEQ ID NO: 19712 - protein, 211 aa, Glycine max
MVPIRVHTVLISTQHDETVTNDEIAADLKEHVIKPVIPEKYLDEKTIFHLNPSGRFVIGGPHGDAGLTGRKIIIDTYGGWGAHGGGAFSGKDPTKVDRSGAYIVRQAAKSIVANGLARRAIVQVSYAIGVPEPLSVFVDTYGTGKIPDKEILSIVKESFDFRPGMISINLDLKRGGNGRFLKTAAYGHFGRDDPDFTWEVVKPLKGEKVPA

SEQ ID NO: 19713 - DNA, 1476 bp, Glycine max
aaagtagagagaagagaagcaattaccccttttcataaaaccctagcaagtaaaaaccgtcccttttcgtttctgttctctgtgcttcgaaaaccctaactaaactcgcgtggtagctccaatgggaggaaagaggaagaagagcgatgatgatgatgacgtggaagcagaagcagaagcttcaggttggaagaagaaaacgagaacgacgtcggagagagagaaggagaagaaggagccattgcgtccttcgatgataaagaacaaggagaagcgatcggagctgcacgcgaaactgaagcaccagaagaagctcgagaagcgcgccaaggccaaggctcgggacgctgctctcaagaaagctctcgagctcggcgaggagcctccagagaagaaggtccctcgcactatcgagaacacgagggaactcgacgagaccgtttgcaagcccgatgacgaagagttatttgctggaaatgatgctgatgaatttggtccaattttgaatcagcaacaaactcccaagatattaatcaccacttgccgcttccattctactaggggacctgcttttatatcagagttgctttcagttataccaaatgcacattacttcaagagaggaacatatgatctgaaaaagattgtagaatatgcaaagaagaaggacttcacttctattatagttgttcacaccaatcgtagggaaccagatgctcttttaatcataggtgtacctgatgggcctactgctcatttcaagctctcgaaacttgttttgcgcaaggatatcaagaatcatggaaatccaaccggtcacaagcccgagcttgtattgaataacttcacaacacgtctagggcatcgagttggaaggttgatacagtcacttttcccacaagatccagaatttaaaggccggcgagtagtcactttccacaaccagagagacttcatattcttccggcatcatcggtatatttttgaaaccaaagaagttaaaaaagcagagtccaaaggtaaaaaggacaaagatggcgagagtgagaatgttcctgaacagaaaacaattgcccgacttcaggaatgtggtcctcgtttcacattaaaattgattagcctgcagcatggaacatttgacaccaagggtggggaatatgagtgggttcacaagccggaaatggacactagccgaaggaggttcttcctatgacttgtttgggaaggttgcattttggacatcttttttgctggaaataggttttatccggtgaagagggttaattatcttgaggttgttgggatctttcaacttaattctggtgtatcatttttttatttttttttattgggggctaaagtcctatcatctctgtaagccgtgagcaattttgaccttacatctattggtggttgaggaagagataacaaaggtttcttataagcaaatatataagcaattttgtattatggtcc

SEQ ID NO: 19714 - protein, 363 aa, Glycine max
MGGKRKKSDDDDDVEAEAEASGWKKKTRTTSEREKEKKEPLRPSMIKNKEKRSELHAKLKHQKKLEKRAKAKARDAALKKALELGEEPPEKKVPRTIENTRELDETVCKPDDEELFAGNDADEFGPILNQQQTPKILITTCRFHSTRGPAFISELLSVIPNAHYFKRGTYDLKKIVEYAKKKDFTSIIVVHTNRREPDALLIIGVPDGPTAHFKLSKLVLRKDIKNHGNPTGHKPELVLNNFTTRLGHRVGRLIQSLFPQDPEFKGRRVVTFHNQRDFIFFRHHRYIFETKEVKKAESKGKKDKDGESENVPEQKTIARLQECGPRFTLKLISLQHGTFDTKGGEYEWVHKPEMDTSRRRFFL

SEQ ID NO: 19715 - protein, 319 aa, Glycine max
MIKNKEKRSELHAKLKHQKKLEKRAKAKARDAALKKALELGEEPPEKKVPRTIENTRELDETVCKPDDEELFAGNDADEFGPILNQQQTPKILITTCRFHSTRGPAFISELLSVIPNAHYFKRGTYDLKKIVEYAKKKDFTSIIVVHTNRREPDALLIIGVPDGPTAHFKLSKLVLRKDIKNHGNPTGHKPELVLNNFTTRLGHRVGRLIQSLFPQDPEFKGRRVVTFHNQRDFIFFRHHRYIFETKEVKKAESKGKKDKDGESENVPEQKTIARLQECGPRFTLKLISLQHGTFDTKGGEYEWVHKPEMDTSRRRFFL

SEQ ID NO: 19716 - DNA, 961 bp, Glycine max
atagagaaacagataagggcgctctccgtaccatcttcctaatcctccttacatttgcagtgttcccatgtctcctacccactgaagtcgaacccctatttttcctctccctaatggcttctcaagttcttcttcagcaggcactgtttgcccccaagctaagtttcccttcttcttctcgtaacgtggcgttaatttctagggttccttccaccccaatttcatggcgttgcactcccctcattgctaagcctagtttcgtagtgagagctgacaccaacctcgatggcggtggtgaagccaccgaggatgttccttcggataatgctgaaaaagtttcggaaggcgaagcagaacaagtttcggattctgaagctccgaaatcgcctagaaaaccccgagtcaaactcggagacattatggggatattgaatcagagggcaattgaggcatccgagaagcaaagaccaactccagacattaggactggggatattgtcgaaatcaaattggaggttcctgagaacaagcgtaggttgtccatttataaagggattgtcatctcaaaacaaaatgctggtattcacacgactattcgaatccgaagaatcattgccggcactggggttgagatagtcttcccagtttactcaccaaacatcaaagaaatcaaagtggtaagtcaccgtaaggtcaggagggcaagattgtactatctgagagacaagcttccgagattctccactttcaagtgatactcggataccccacctttcctcacgttattcgtcgaactagtctgctgatccaggataagtgctgcggagctttaatttttttaatttcaatttgttctgttgtagaatacatcatttttcttcccctttgtgtatcttcccttaaatcgaaacaagtgtactgaaccttgatagtattgagaaatttgaagtgtttcttctgc

SEQ ID NO: 19717 - protein, 250 aa, Glycine max
RETDKGALRTIFLILLTFAVFPCLLPTEVEPLFFLSLMASQVLLQQALFAPKLSFPSSSRNVALISRVPSTPISWRCTPLIAKPSFVVRADTNLDGGGEATEDVPSDNAEKVSEGEAEQVSDSEAPKSPRKPRVKLGDIMGILNQRAIEASEKQRPTPDIRTGDIVEIKLEVPENKRRLSIYKGIVISKQNAGIHTTIRIRRIIAGTGVEIVFPVYSPNIKEIKVVSHRKVRRARLYYLRDKLPRFSTFK

SEQ ID NO: 19718 - protein, 213 aa, Glycine max
MASQVLLQQALFAPKLSFPSSSRNVALISRVPSTPISWRCTPLIAKPSFVVRADTNLDGGGEATEDVPSDNAEKVSEGEAEQVSDSEAPKSPRKPRVKLGDIMGILNQRAIEASEKQRPTPDIRTGDIVEIKLEVPENKRRLSIYKGIVISKQNAGIHTTIRIRRIIAGTGVEIVFPVYSPNIKEIKVVSHRKVRRARLYYLRDKLPRFSTFK

SEQ ID NO: 19719 - DNA, 1479 bp, Glycine max
agattacttccctgagttgatggagatggctgaaaaattaattcgccagggtaaagcatatgttgatgacacaccacgtgaacaaatgcaaaaagagagaatggatggcatagattctaaatgcagaaataatagtgtagaggagaatctaaaattgtggaaggaaatgattgcaggaacagagaggggcttgcagtgttgtgtccgtggcaagttggatatgcaggacccaaacaaatcacttagagatcctgtttattatcgttgcaatccaatgccccatcatagaattggatccaagtataaagtgtatccaacttatgattttgcttgtccatatgttgattctatagaaggaatcacgcatgcccttcgatctagtgaataccatgatcgcaatgcccagtattactggattcaagaggacatgggtcttagaaaagttcttatctacgaatttagccggttgaatatggtctacactcttctgagcaaacgaaagcttttgtggtttgtacaaaatgggaaagttgatggatgggatgatgcacgatttcctacagtgcaaggaattgtgcgtagaggtttgaaaattgaagccctgatacagtttattgttgagcagggggcgtccaaaaatctcaatctcatggaatgggacaagctctggaccattaataagaagattattgaccctgtctgtcctagacacactgctgtcattgcagacagacgtgttttgttgactctcactgatggtcctgagaaaccttttgtccgcatcatacctcggcacaagaaatatgaagctgccggagataaagctacaacatatactaaaaggatatggcttgaccttgctgatgcagtgtctttatcagcaggtgaggaagtaacattgatggattggggaaatgccatagtgaaggaaatagagaaggaccaagatggaaatatcatagggttgagtggtgttttgcatcttgaaggatctgtgaagaccacaaaattgaaactcacttggctacctgagatagatgaactagttagcctgacattagtggagtttgattatctaattacaaagaaaaagcttgaagaaggggaggatttcattgatgtggttaacccatgtaccaaaaaggagactttagcttatggagactccaacatgcgaaatcttcagcgtggagatttattgcaactggagagaaagggatatttcaggtgtgatttacccttcattcgcccctcacaaccaatcgtgctatatgcaatccctgatggcaggcaacagacaagtttgaagtaatctttttggtcttgaaactgtttgggccacattcacactcagaatagttggtaatggtgataacaagtttgtggaactacttttatgtttaccatcacattgtactgtttatatgcaaaccattatatctggattttttactagtaattggaaaattcgtctttgtt

SEQ ID NO: 19720 - protein, 436 aa, Glycine max
DYFPELMEMAEKLIRQGKAYVDDTPREQMQKERMDGIDSKCRNNSVEENLKLWKEMIAGTERGLQCCVRGKLDMQDPNKSLRDPVYYRCNPMPHHRIGSKYKVYPTYDFACPYVDSIEGITHALRSSEYHDRNAQYYWIQEDMGLRKVLIYEFSRLNMVYTLLSKRKLLWFVQNGKVDGWDDARFPTVQGIVRRGLKIEALIQFIVEQGASKNLNLMEWDKLWTINKKIIDPVCPRHTAVIADRRVLLTLTDGPEKPFVRIIPRHKKYEAAGDKATTYTKRIWLDLADAVSLSAGEEVTLMDWGNAIVKEIEKDQDGNIIGLSGVLHLEGSVKTTKLKLTWLPEIDELVSLTLVEFDYLITKKKLEEGEDFIDVVNPCTKKETLAYGDSNMRNLQRGDLLQLERKGYFRCDLPFIRPSQPIVLYAIPDGRQQTSLK

SEQ ID NO: 19721 - protein, 430 aa, Glycine max
MEMAEKLIRQGKAYVDDTPREQMQKERMDGIDSKCRNNSVEENLKLWKEMIAGTERGLQCCVRGKLDMQDPNKSLRDPVYYRCNPMPHHRIGSKYKVYPTYDFACPYVDSIEGITHALRSSEYHDRNAQYYWIQEDMGLRKVLIYEFSRLNMVYTLLSKRKLLWFVQNGKVDGWDDARFPTVQGIVRRGLKIEALIQFIVEQGASKNLNLMEWDKLWTINKKIIDPVCPRHTAVIADRRVLLTLTDGPEKPFVRIIPRHKKYEAAGDKATTYTKRIWLDLADAVSLSAGEEVTLMDWGNAIVKEIEKDQDGNIIGLSGVLHLEGSVKTTKLKLTWLPEIDELVSLTLVEFDYLITKKKLEEGEDFIDVVNPCTKKETLAYGDSNMRNLQRGDLLQLERKGYFRCDLPFIRPSQPIVLYAIPDGRQQTSLK

SEQ ID NO: 19722 - protein, 428 aa, Glycine max
MAEKLIRQGKAYVDDTPREQMQKERMDGIDSKCRNNSVEENLKLWKEMIAGTERGLQCCVRGKLDMQDPNKSLRDPVYYRCNPMPHHRIGSKYKVYPTYDFACPYVDSIEGITHALRSSEYHDRNAQYYWIQEDMGLRKVLIYEFSRLNMVYTLLSKRKLLWFVQNGKVDGWDDARFPTVQGIVRRGLKIEALIQFIVEQGASKNLNLMEWDKLWTINKKIIDPVCPRHTAVIADRRVLLTLTDGPEKPFVRIIPRHKKYEAAGDKATTYTKRIWLDLADAVSLSAGEEVTLMDWGNAIVKEIEKDQDGNIIGLSGVLHLEGSVKTTKLKLTWLPEIDELVSLTLVEFDYLITKKKLEEGEDFIDVVNPCTKKETLAYGDSNMRNLQRGDLLQLERKGYFRCDLPFIRPSQPIVLYAIPDGRQQTSLK

SEQ ID NO: 19723 - DNA, 1359 bp, Glycine max
tttattttctgatggtaagtactaagtagccaaaatgtattttccagttcggtttgatgtgaaagacatgataatttgatgtcgtgttagacactgtaggtgatttttttagccattccaaacctgaaatcaccggatccattagtagtaaaggatttgttgaagtattcagtattgatcttgtatgtgccaaggctgtggcggatctatccactataccaagaagtaaagaaaactattggaatattcactgagaaagcatgggctggagctacctttaatctttttctctttaccctagcaagtcatatggttggagccgtctggtacatgctttctatagagtcagaggtgtggtgctggcgcagagagttgaagaatgcttcactctttcatgaagaatacttgagttgtggacacggcgatcaaaatgtctttcaacttctcaataaaacttgttctttcattgaccctgataaaatcatagacaaaaacaccttcaattttggaatattctttgatgctttagattcaggtgtggtagaatctacaacagatcttcatcagaagttcttctactgcttttggtggggtttgcgcaatttaagttcccttggacaaaacctcaaaacaagtattaatgtcatagagatagcctttgcaatctttattgccattgttggattggttttgtactcattgcttattggaaacatgcagaaatatcttcatcaatatacgcaatctaaaaactttatagaggaaaagaagagaaactttatagaggaaaagaagagagtgaagcggagacatgaaatagaactctggatgtcccaccgaatgctacctgaggacttaaagcaaagaattagacgttttgaacattacaaatggcaagaaaatagcggtgttgacgaggaggcattaattcgtaaccttcctaaagatctcagaagggacactaagcgtcacctttgcttagctttagttagaagggtgccaatgtttggattaatggatcagcagttgttgggtgcaatgtgcgatagactgaagacagtcctttatgataagcatagctgcattgtttgtgaaggagatccacttgatgagatggttttcattatgagtggaaaagtttattctgtgacaacaaatggtggaggatctggtttcctcaaggctggtgacttttgtggagaggaacttctgacatgggctttggatcccaactcctcctcaaatctacccatttcaaccaggacagtacaaactatgtcagaagttgaagcctttgctctcatggctgatgacttgaagtttgttgtttcccaatttcgacaccttcacagcaaacag

SEQ ID NO: 19724 - protein, 350 aa, Glycine max
MVGAVWYMLSIESEVWCWRRELKNASLFHEEYLSCGHGDQNVFQLLNKTCSFIDPDKIIDKNTFNFGIFFDALDSGVVESTTDLHQKFFYCFWWGLRNLSSLGQNLKTSINVIEIAFAIFIAIVGLVLYSLLIGNMQKYLHQYTQSKNFIEEKKRNFIEEKKRVKRRHEIELWMSHRMLPEDLKQRIRRFEHYKWQENSGVDEEALIRNLPKDLRRDTKRHLCLALVRRVPMFGLMDQQLLGAMCDRLKTVLYDKHSCIVCEGDPLDEMVFIMSGKVYSVTTNGGGSGFLKAGDFCGEELLTWALDPNSSSNLPISTRTVQTMSEVEAFALMADDLKFVVSQFRHLHSKQ

SEQ ID NO: 19725 - protein, 343 aa, Glycine max
MLSIESEVWCWRRELKNASLFHEEYLSCGHGDQNVFQLLNKTCSFIDPDKIIDKNTFNFGIFFDALDSGVVESTTDLHQKFFYCFWWGLRNLSSLGQNLKTSINVIEIAFAIFIAIVGLVLYSLLIGNMQKYLHQYTQSKNFIEEKKRNFIEEKKRVKRRHEIELWMSHRMLPEDLKQRIRRFEHYKWQENSGVDEEALIRNLPKDLRRDTKRHLCLALVRRVPMFGLMDQQLLGAMCDRLKTVLYDKHSCIVCEGDPLDEMVFIMSGKVYSVTTNGGGSGFLKAGDFCGEELLTWALDPNSSSNLPISTRTVQTMSEVEAFALMADDLKFVVSQFRHLHSKQ

SEQ ID NO: 19726 - protein, 215 aa, Glycine max
MQKYLHQYTQSKNFIEEKKRNFIEEKKRVKRRHEIELWMSHRMLPEDLKQRIRRFEHYKWQENSGVDEEALIRNLPKDLRRDTKRHLCLALVRRVPMFGLMDQQLLGAMCDRLKTVLYDKHSCIVCEGDPLDEMVFIMSGKVYSVTTNGGGSGFLKAGDFCGEELLTWALDPNSSSNLPISTRTVQTMSEVEAFALMADDLKFVVSQFRHLHSKQ

SEQ ID NO: 19727 - DNA, 1534 bp, Glycine max
tattttttttatgggatggcggactaccaacatgtgattccagttcatgctgatgttgcccggaggaagaagcggaactggtcagagctagaagaactgcattttgataaaggtggtttcatggatctggatcacgaggatgttatgattatagtgcctccaattttcgctccaaaagatgtgccagaaaatttagtcttaagaccagctaccatgtcgagttcgaaaaagaaaccagaggaagttgtacaaccccattttgagatggacatggagccagttcttgcaattgattttgacattaaagagattcctaagaaagtgaattgggaggaatacataccccaaggctcagatcagtgggagttacagatggttgtatctagaatgtttgatgagcggcctatatggtccaaaaattcgcttaccgaactcttgcttgataagggcttaagcttttcgcacagcatgctcagaaggcttctatctagaatttcttactacttttctagtggaccatttctgaggttttggatcaagaaaggatatgatccacgcaaagatcctaattctcgaatttatcaaagaattgattatcgagtacctgttccattacgaagttactgtgatgctcattcagccaataaatcaaaacatagatggaaggatatatgtgcctttcgtgttttcccttacaagttccagacttctttacagtttttcgaccttgttgatgattatattcaatcagaaataaataagcctcctttccgaccaacttgcacttctggaactgggtggttctcacaacacatgatcaattgtattagacaacgtcttatggtgcgatatctatcagtattccccaagcctggtgctgagaatttactcagagctgccactttaaagtttgaaaaattgaagagggagtgctataggcatgccatgaagctcgatggagaagaatgccaacaagctaatttaggtttggaagagaatgaagaacttgataatggtgaagatgaagaggaggcagctgagggtaatgatagtgatgaagaatgggaagaagagcatgatttggctggagataatgaaatgcctctgccatctgattcctacatcaactttgagaatctttcaaggactcatttacaggatctttttgttaacttccctcctaatgaaattgattgtgacaatgtgcaagcaaatggcagcgaagaagaatatcaaatatacggggaagatagtgaggacaattactctgatgaatgatttctggcatttggagtcatcaaatacacaggaatgtcaatatttgtagaagttacataggagggtagatatcatcttttagatttgttgattaaatatcatcatagatcctagtattcactgttacgtataagaacaagtatctctaattacattagagaaacacgggagaaaaaaatagtagaagtagatgatggaaaatagaagagaaatggacatggttgattgaagaaaaccgtttttcattttattttcg

SEQ ID NO: 19728 - protein, 425 aa, Glycine max
YFFYGMADYQHVIPVHADVARRKKRNWSELEELHFDKGGFMDLDHEDVMIIVPPIFAPKDVPENLVLRPATMSSSKKKPEEVVQPHFEMDMEPVLAIDFDIKEIPKKVNWEEYIPQGSDQWELQMVVSRMFDERPIWSKNSLTELLLDKGLSFSHSMLRRLLSRISYYFSSGPFLRFWIKKGYDPRKDPNSRIYQRIDYRVPVPLRSYCDAHSANKSKHRWKDICAFRVFPYKFQTSLQFFDLVDDYIQSEINKPPFRPTCTSGTGWFSQHMINCIRQRLMVRYLSVFPKPGAENLLRAATLKFEKLKRECYRHAMKLDGEECQQANLGLEENEELDNGEDEEEAAEGNDSDEEWEEEHDLAGDNEMPLPSDSYINFENLSRTHLQDLFVNFPPNEIDCDNVQANGSEEEYQIYGEDSEDNYSDE

SEQ ID NO: 19729 - protein, 420 aa, Glycine max
MADYQHVIPVHADVARRKKRNWSELEELHFDKGGFMDLDHEDVMIIVPPIFAPKDVPENLVLRPATMSSSKKKPEEVVQPHFEMDMEPVLAIDFDIKEIPKKVNWEEYIPQGSDQWELQMVVSRMFDERPIWSKNSLTELLLDKGLSFSHSMLRRLLSRISYYFSSGPFLRFWIKKGYDPRKDPNSRIYQRIDYRVPVPLRSYCDAHSANKSKHRWKDICAFRVFPYKFQTSLQFFDLVDDYIQSEINKPPFRPTCTSGTGWFSQHMINCIRQRLMVRYLSVFPKPGAENLLRAATLKFEKLKRECYRHAMKLDGEECQQANLGLEENEELDNGEDEEEAAEGNDSDEEWEEEHDLAGDNEMPLPSDSYINFENLSRTHLQDLFVNFPPNEIDCDNVQANGSEEEYQIYGEDSEDNYSDE

SEQ ID NO: 19730 - protein, 385 aa, Glycine max
MDLDHEDVMIIVPPIFAPKDVPENLVLRPATMSSSKKKPEEVVQPHFEMDMEPVLAIDFDIKEIPKKVNWEEYIPQGSDQWELQMVVSRMFDERPIWSKNSLTELLLDKGLSFSHSMLRRLLSRISYYFSSGPFLRFWIKKGYDPRKDPNSRIYQRIDYRVPVPLRSYCDAHSANKSKHRWKDICAFRVFPYKFQTSLQFFDLVDDYIQSEINKPPFRPTCTSGTGWFSQHMINCIRQRLMVRYLSVFPKPGAENLLRAATLKFEKLKRECYRHAMKLDGEECQQANLGLEENEELDNGEDEEEAAEGNDSDEEWEEEHDLAGDNEMPLPSDSYINFENLSRTHLQDLFVNFPPNEIDCDNVQANGSEEEYQIYGEDSEDNYSDE

SEQ ID NO: 19731 - DNA, 1440 bp, Glycine max
aatggatgtaaacacaaattctatggcaatgcaatctgacgatatccaaggtttatgaaaacacacacattctttcctttgttaactgtgctgactatgtgaatgcatttgtgcagctactgctgttcgaggcatgaaagcctgggaaaaaatgcgtggaggagcttcaaaacttatggggaagtatgctgtccaaacttgtggatattatccagaggtgcaagtgggacccaaaggtcatagagtacgaaattgtcaagctttcaaacaccagataagggatgggcaacgtgcatggtagggggcaacaattgatgatttggcacctccagtatatgtctatcacatccgagatgatcaacataggaagcctttggtaaatgagttgaaaaggtactatggtatgctgcctgcagtggttgagctatttgcccaggctggggcaccagttgataagaattatgcttctatgatgagggaagatgtcgtaatccctgaaatggatgaggaaaagttggttgtttaaagcaatggtttgattgacttcatatgcatgtaagaggcatttgggcaatggaagagtctaaatatgaaaaatttaaggtttaatttctttcaaattataacaggttgtatttgtatatatgctaagatagaggacctgtctaatgttggtaattagacatataataggatgaaacaagagcattgggccactaaactatctcatgttctattggcaatataaggttgcagtattgattatatggaacaaatttacttttggcactcactgcatcatcacctaatttagttatagatgaaaaaagacttggatttcttgctgggattcctttgagaacaactcttcatccctctaccgatctcattcatcacctaatttagttatagtctgatctgcttttatgcaatattttgtattggtagtataatttcctgttactaaaaccaaagaaaactttagcccacaaggttaatttagtatcttctggaatacaagaggcagagggatggtcgacaatgcactagataaggtggaaaaagtgttttacttgccaagcatattaggaagaggaagaaagtgtaaaaggaacttcaaaaattggcaacagtaaagtagttcctgtgctcgagctctatcagattttcagaacaggttgtggctgggttcttcagtgttccacttccaaatccttgttcagctggtgcatcagaatattcttcgagacttcatagaacagttgggagttgggtgccttgaacgatagattgttgttgcttaattaaaacaaattgtatcatctacatatatcctacagtcttgtaatatatattatcatctcgaccttaacactttgttaataattataaccatgtgtgtttgtattcccagttagagacaacgaacaccaattcaac

SEQ ID NO: 19732 - protein, 55 aa, Glycine max
MKAWEKMRGGASKLMGKYAVQTCGYYPEVQVGPKGHRVRNCQAFKHQIRDGQRAW

SEQ ID NO: 19733 - protein, 49 aa, Glycine max
MRGGASKLMGKYAVQTCGYYPEVQVGPKGHRVRNCQAFKHQIRDGQRAW

SEQ ID NO: 19734 - protein, 46 aa, Glycine max
MHLCSYCCSRHESLGKNAWRSFKTYGEVCCPNLWILSRGASGTQRS

SEQ ID NO: 19735 - DNA, 1261 bp, Glycine max
tagtatagttggaacaaagaggcaaacattttgtacctagagtcaccagcaggcgttggattctcttactctctcaatttgtcattttataaaacactgaacgatgaaatcacagcccgagacagtctggttttcctgcggcgctggtttgccaagttcccagaatacaagaatagagatttttatataacgggagagagttatggaggtcactatgtacctcaacttgctgaactcataattaagagtaaagtgaatttcaacctaaagggcatagcaataggaaaccctcttctggatttcgacactgatatgaatgcagtcgatgaatattactggtctcatggaataataagtgattatgcatacaaaatcaggacctctctatgtaactcgtctagagtattaagagaatacttcagtggccaaatttccaaagattgtcttgttgcagctcaaaaagtctcagaagaatattcttttacaaatttcatcgacccatattacgttgttggggagaaatgtctttcttacaatgtttctcaggcaggttttcttagggagacgctaaattcagggatgtttcagtttaggaactctcattatgtgcttcaaacagaagaacctgaccagcaagttgatgagtgtaatttgaaatattcagagatgtacttgaacaggaaagatgtgcagaaggctctccatgcccggctggagggaaccaccaaatatcgtttgtgcagcaagattgtacaaacaaattatgacccattgaacagagagataccaacaattaatgttgtcggcttccttgtaaaatcaggtcttcgagtcatcgtatacagtggggatcaagactctgtgattccattcatgggcacgagaagattggttgatagactagcaaagacactaggacttaaaacaaccctgccttacagtgcctggtttgtggacaagcaggttggaggatggacaaaagtttatggcaatcacctcacgtacaccacaataagaggagcttcacatggcactccagctactcaaccaaagagatcttttgttttgtttaatgcgtttcttcaagggaaaccactccctaaagcatgaaaaatttaatgcttagttaataaatgtcattgccatataagaagaagtaaaatattgatctattatctgttatttgaagaagaagaaaatgctaacgcacttcctaacacgagaaattattacatgatttgggatcagaaggatcctggct

SEQ ID NO: 19736 - protein, 265 aa, Glycine max
MNAVDEYYWSHGIISDYAYKIRTSLCNSSRVLREYFSGQISKDCLVAAQKVSEEYSFTNFIDPYYVVGEKCLSYNVSQAGFLRETLNSGMFQFRNSHYVLQTEEPDQQVDECNLKYSEMYLNRKDVQKALHARLEGTTKYRLCSKIVQTNYDPLNREIPTINVVGFLVKSGLRVIVYSGDQDSVIPFMGTRRLVDRLAKTLGLKTTLPYSAWFVDKQVGGWTKVYGNHLTYTTIRGASHGTPATQPKRSFVLFNAFLQGKPLPKA

SEQ ID NO: 19737 - protein, 176 aa, Glycine max
MFQFRNSHYVLQTEEPDQQVDECNLKYSEMYLNRKDVQKALHARLEGTTKYRLCSKIVQTNYDPLNREIPTINVVGFLVKSGLRVIVYSGDQDSVIPFMGTRRLVDRLAKTLGLKTTLPYSAWFVDKQVGGWTKVYGNHLTYTTIRGASHGTPATQPKRSFVLFNAFLQGKPLPKA

SEQ ID NO: 19738 - protein, 147 aa, Glycine max
MYLNRKDVQKALHARLEGTTKYRLCSKIVQTNYDPLNREIPTINVVGFLVKSGLRVIVYSGDQDSVIPFMGTRRLVDRLAKTLGLKTTLPYSAWFVDKQVGGWTKVYGNHLTYTTIRGASHGTPATQPKRSFVLFNAFLQGKPLPKA

SEQ ID NO: 19739 - DNA, 1508 bp, Glycine max
ttcagacgttttatgatttatgttcatgccaaaggaatggtagttgatgacgaatacgtaattattggatcagcaaacattaaccagagatccttagatggttcaagggacacagaaatagctatgggtgcctatcaaccaaaatatacatggacagaaaagaatgctcatccacgtggccaggtgtatggatacagaatgtcactgtgggctgagcaccttggcagtcttgatcattgttttgctgaacctcacaacctggaatgtgtcagacatgtcaacaaaattgccaaacgaaactgggacatatatgtgtctgaggaagagaatcggatgaggggacacttgatgcaatatccagttaagatcagcagggatggaaaagtcagtgcacttgatgattatgaatcctttcctgatgttggtggcaaaattcttggatcaccaaattcacttccggatgcattaaccacctgattaaccaaagtcttagaatattcgcctacagatatatatagccgctaagaattgcagctcaaaaaattggtaatgatggtaaagccaatttatatacacttaaaattaccttttgtatgtaaatttctgtatttgatagtgagtgcatagatctcttttaatatatatataggtgcgagtatgggactagttgagtactagactagtagtactcgttcctgcatgcatcccattaaattttgtggtaaatagccagaccctgatctgttcccattgagcgggtatccatagagtctggatataatatctatccctaattgtcatataaaaatctttagactgacaatgtatcaaaataaagctctaaatgaaagtagtacaatttaaatttgtagctagtatgaactagatgtatcgagggcttttgctactcataatcgacgtgtctgtacattagggacatgtaagtttttgtctcacgcaactgattaaaaatggatttcagccttcctgcacagttatatttaccgttgtgggaacaatagatacattatggtcagagaacaatcaagaggaagatggagcttggagcttggaaaatatagatgatgtggtcacattctgcatgagtgctctaatttcctaattgagtctgcttttgacgtacttggttggctggtgcattgagtaacatctataatgtggtagcatatgcacatgtataatgccaggggtaagcagagcagtagattcagttgatgcatgaaatgtattttttggatcatggtttttcctttcacgtgtagcaattttaatttagttgctagtttggtggctttttaatatacgggatgaagatgaggaatggaaaaagagttgggaacttaagatattcttgctgcataatacatgacatcattgattatgcataacatacagttcttgtatttctgtcccctatactgtaaatctgtaatctagatatgattttcattcaatttgaagaatttgaagttgttaagttgggattt

SEQ ID NO: 19740 - protein, 158 aa, Glycine max
FRRFMIYVHAKGMVVDDEYVIIGSANINQRSLDGSRDTEIAMGAYQPKYTWTEKNAHPRGQVYGYRMSLWAEHLGSLDHCFAEPHNLECVRHVNKIAKRNWDIYVSEEENRMRGHLMQYPVKISRDGKVSALDDYESFPDVGGKILGSPNSLPDALTT

SEQ ID NO: 19741 - protein, 154 aa, Glycine max
MIYVHAKGMVVDDEYVIIGSANINQRSLDGSRDTEIAMGAYQPKYTWTEKNAHPRGQVYGYRMSLWAEHLGSLDHCFAEPHNLECVRHVNKIAKRNWDIYVSEEENRMRGHLMQYPVKISRDGKVSALDDYESFPDVGGKILGSPNSLPDALTT

SEQ ID NO: 19742 - protein, 146 aa, Glycine max
MVVDDEYVIIGSANINQRSLDGSRDTEIAMGAYQPKYTWTEKNAHPRGQVYGYRMSLWAEHLGSLDHCFAEPHNLECVRHVNKIAKRNWDIYVSEEENRMRGHLMQYPVKISRDGKVSALDDYESFPDVGGKILGSPNSLPDALTT

SEQ ID NO: 19743 - DNA, 1150 bp, Glycine max
ttttcctaaatacacacacaaaaccggttcctctcttaaccctctgaaagccaaaagagaaaaaaaaaatgcagccccaccagaaccctcccgcactggattccgacccgcagctcccgcagatcaaaatccaccaccctgcctccccacgccaccatcacccttcctccgccggcgccgcgacccccacccccaccgccggcgcgcgtcgcaaaatcggcgtggccgtcgacctctccgacgagagcgcctacgcggtccgctgggccgtgcagcactacatccgccccggcgacgccgtgatcctgctccacgtcagcgctaccaacgtcctcttcggcgccgactggggctccatcgacctctccatcaacaccgaccccaactccgacgaggatgccgtcagcgccgtcaacaacagcaacgaccacaacagcaagcgcaagctggaggacgacttcgacgcctttacggcgtccaaggcggcggatctcgcgaaaccgttacgggaattgcagattccgttcaagatccatatcgtgaaggatcatgacatgaaggagaggctttgcttggaggtggagaggcttgggctgagtgctgttattatggggagtagaggctttggcgctgtgaggcgtggcagcgatgggaagcttgggagtgttagtgattactgcgttcatcactgtgtttgtcctgttgtggtggtgcgttatcccgatgataaggatgcggtcgcggcggccaccacggccgagcccgtggtggcggtcaaggacggagacgagggcgaggccgtcgtccagccggtgccgcataagaaagaggattagttggagccaactcatcacttcaaccctatctctgaagagtgtttctgatccgaagagataggtggaaatatggttgtagagtgctctctttctcttcctgtcaggttgtacttagagcatttcctgcatatgaactgtggaaagattatggatgattttgtatggcttgatatgatctcggttccattaggctttggacgattgtttttagttccgaagtggtctatactctttcatttagatgtacaagtttgcctgtgactgtttttggggttattttcttcccatatgatgtgggaaatcggattaaaaag

SEQ ID NO: 19744 - protein, 255 aa, Glycine max
MQPHQNPPALDSDPQLPQIKIHHPASPRHHHPSSAGAATPTPTAGARRKIGVAVDLSDESAYAVRWAVQHYIRPGDAVILLHVSATNVLFGADWGSIDLSINTDPNSDEDAVSAVNNSNDHNSKRKLEDDFDAFTASKAADLAKPLRELQIPFKIHIVKDHDMKERLCLEVERLGLSAVIMGSRGFGAVRRGSDGKLGSVSDYCVHHCVCPVVVVRYPDDKDAVAAATTAEPVVAVKDGDEGEAVVQPVPHKKED

SEQ ID NO: 19745 - protein, 183 aa, Glycine max
FPKYTHKTGSSLNPLKAKREKKNAAPPEPSRTGFRPAAPADQNPPPCLPTPPSPFLRRRRDPHPHRRRASQNRRGRRPLRRERLRGPLGRAALHPPRRRRDPAPRQRYQRPLRRRLGLHRPLHQHRPQLRRGCRQRRQQQQRPQQQAQAGGRLRRLYGVQGGGSRETVTGIADSVQDPYREGS

SEQ ID NO: 19746 - DNA, 1188 bp, Glycine max
tttttggaacagaatttactttgaagagggttggcaggtttttcaaaaataaaactgttcaggaaaaacagattttctactttttaagcatgatgggaccaatgtgttcaagtttgtaattcttgaacaatcatgacggtgtgaaaggagagaagctgaagaagatgaggaagaacatgaagcaactgaggacgaggatgaggatgagaatgagaattaggatgatgatgacgatgatcatgagtataaagacatggaagaagaaagttaagaagaaaatagtgctgaatacacgacgagtcaaactcatcatcgtagagtctgcaaaaaatggagtgtaggaagcaaatttgaggtgcaggaagcaattgtccacttaaaattgaaaatagaaagcttatcccagatgcttttgtgaaatctacacgcttacaaggatggaggatccctgaggatgtcatcctcacaaatgttggtaggagagtttggaatgtgaaaacacgtcttgttggaaacaaaatttactttgaagagggttggaaggtttttcaagaagaaaactttttaggaaaagaagattatcttgtttttaagtatgatggggccaacattttcaaggttgtaattcttgaacaatcatcacggtgtgaaaggacagaagctgaagaagaggatgaggtgatagagattacagatgatgaagaacatgaagaagctgaggatgatgaggatgaaggtgatgatgatgatcagtatagagaaatggaagaagaacatagtgctgaatacatgaggagtcaaagtcatcctcgtagagcttccaaaaggttgagtgcaacaagttacagtcctacggttgaaggtcctcatcttgaagactatgaatttgatccgcaaatgtatattcagccgggaaatccaaattttgaagcaaagctcttcaaaaatagacccaacgaattgcatgttccaaaaaatgtgattaaggactcgtcccttacttttggagaacagattaccctttcacgttgccaatgcttccaattcgaggatactcaaagagatgaattacgagactatcatggcttgccacaatggacacccatatattcggaagtagcaaaagtgtctgagtggcgtgatggtcgagtatgtatcaaagggtggacaagtttttgtaaaaagaac

SEQ ID NO: 19747 - protein, 142 aa, Glycine max
MEEEHSAEYMRSQSHPRRASKRLSATSYSPTVEGPHLEDYEFDPQMYIQPGNPNFEAKLFKNRPNELHVPKNVIKDSSLTFGEQITLSRCQCFQFEDTQRDELRDYHGLPQWTPIYSEVAKVSEWRDGRVCIKGWTSFCKKN

SEQ ID NO: 19748 - protein, 133 aa, Glycine max
MRSQSHPRRASKRLSATSYSPTVEGPHLEDYEFDPQMYIQPGNPNFEAKLFKNRPNELHVPKNVIKDSSLTFGEQITLSRCQCFQFEDTQRDELRDYHGLPQWTPIYSEVAKVSEWRDGRVCIKGWTSFCKKN

SEQ ID NO: 19749 - protein, 97 aa, Glycine max
MYIQPGNPNFEAKLFKNRPNELHVPKNVIKDSSLTFGEQITLSRCQCFQFEDTQRDELRDYHGLPQWTPIYSEVAKVSEWRDGRVCIKGWTSFCKKN

SEQ ID NO: 19750 - DNA, 1475 bp, Glycine max
atctgaatacaatcctgcaaagctgttgcttaatggggttggatggtcaattccacaatcccaaggaagaagtgccaaaaatttgatccctcaaagacgaccatttaaagttcatcaaagtccagtagcagtgcatgaaggaatgtcataccaaatgaaccatgaaccctggttttggttccctagtccagccaccatctgggatgggcctgaatttcttgggagggtgggggttcagaaagacgaacttccatggaagatcagagcatctgttatatactctatacgtgcacatcatggagcagtgaggtctctggctgttaaccaagatgaatgtactgtttttactgcaggaattggccaaggatataaaggaactgttcagaaatgggaattgagccgaactaactgtctgtccggctaccatggccatgaggaggttgtgaatgatatttacatcttatcatctagtggaagagtggcttcttgtgatggaacaattcacatttggaatagtcaaacagggaagcagatattagtatttgctgagtcccaaacagaatctggccatcctacaagccatccatcctctgcatcaaaaattaacagtgaccaggcaaatgtgcttaatatgaatacactatccaatggaatattgtctagtgcttttgactcaagcctttatacttgtatgcatctattaaactccactgaaactcttgtagttggaactggaaatggttctctgaggtgaaattaattctttgtttttgaatgccatttcaatcagataattaaaaaatatgtcaatgcctgccaacttttgaatctttgctgtactgtacaggttcattgatgttgctcgaggtcaaaagcttcatatctggagaggcgaatctactgtatctagttttccttcacttatttctgccatttgttccactggctctgacaagatgcaagcaggtggaatttccactttgccatcttttattgcagctggactaagttctggtcactgtaaattatttgatgcaaagagtggaaatgtaatttcctcttggcgagctcatgatgcatatgtgacaaagttggcagcacctgaggaacatctacttgtttccagctctctggacagaactttacgagtctgggacttaagaatgaatctgccattgcagcccattattttcagaggtcattcagatggcatatccagtttctccgtttggggccaagatgttatttcaatttcccggaatagaatcgggcttctctccttgtctaaatctgccaatgaaacagatgggcagcatcacattagcccccagaaactatatatttctgataatggtcagagaagcttgtcagcgttatcaagtattagtatacttccattctctcgattgtttctcattggaaccgaagatggttatctgagaatctgttgttaaatatgcttcattgttttcctt

SEQ ID NO: 19751 - protein, 250 aa, Glycine max
SEYNPAKLLLNGVGWSIPQSQGRSAKNLIPQRRPFKVHQSPVAVHEGMSYQMNHEPWFWFPSPATIWDGPEFLGRVGVQKDELPWKIRASVIYSIRAHHGAVRSLAVNQDECTVFTAGIGQGYKGTVQKWELSRTNCLSGYHGHEEVVNDIYILSSSGRVASCDGTIHIWNSQTGKQILVFAESQTESGHPTSHPSSASKINSDQANVLNMNTLSNGILSSAFDSSLYTCMHLLNSTETLVVGTGNGSLR

SEQ ID NO: 19752 - protein, 203 aa, Glycine max
MSYQMNHEPWFWFPSPATIWDGPEFLGRVGVQKDELPWKIRASVIYSIRAHHGAVRSLAVNQDECTVFTAGIGQGYKGTVQKWELSRTNCLSGYHGHEEVVNDIYILSSSGRVASCDGTIHIWNSQTGKQILVFAESQTESGHPTSHPSSASKINSDQANVLNMNTLSNGILSSAFDSSLYTCMHLLNSTETLVVGTGNGSLR

SEQ ID NO: 19753 - protein, 199 aa, Glycine max
MNHEPWFWFPSPATIWDGPEFLGRVGVQKDELPWKIRASVIYSIRAHHGAVRSLAVNQDECTVFTAGIGQGYKGTVQKWELSRTNCLSGYHGHEEVVNDIYILSSSGRVASCDGTIHIWNSQTGKQILVFAESQTESGHPTSHPSSASKINSDQANVLNMNTLSNGILSSAFDSSLYTCMHLLNSTETLVVGTGNGSLR

SEQ ID NO: 19754 - DNA, 1486 bp, Glycine max
acacaagattgagacacgaaacagaaaatgccaggactcacagcaccttccgattactcccaagaacccccccgccactcttctcttctcatcaacgccaaggaacctttcaatgcggagccaccgcgtgctgcgttggttgcttcctacgtcaccccttccgatttcttctataagaggaaccacggtccaatccccatcgttgagaacatcaacagatattccgtgaacgtgtccggcttggtggagcgtcccaaacagctcttcatgaaagatatatggatgcttccaaagtataatgtcactgccacgttgcagtgtgcaggtaatcgaaggactgctatgagcaagaccaaaacagtgaagggagttggctgggatgtttctgctattggaaatgctatttggggtggagccaaattgtctgatgttcttgaactcattggaattccaaagttgactagtgtcactgaatttggtggaagacatgtggaattcgtaagcattgataagtgcaaggaggaaaatggaggcccatacaaggcttcaataccactcagtcaggccacaaatcctgaagcagatgttctactagcttatgaaatgaatggtgaacctcttaacagggatcatgggtatccattacgtgtggttgttcctggtgtcattggagcccggtctgttaaatggctggaagatatcaatatcattgaagaagaatgtcagggtttcttcatgcaaaaggactacaaaatgtttccaccatcagtgaattgggataatattgattggtctacccggagaccccaaatggatttcccagttcagtgtgttatatgttctcttgaagacgtgagcacaataaagcctgggaaggtaaaaattagtggatatgcagcatcaggaggtggcagaggcattgagagagtagatgtgtctgttgatggaggcaaaacatggatggaagcctcaagaattcagaaaagtggggttccttatatatcagaacatgccagcagtgacaaatgggcatgggtgctgtttgaagtcacagctgatatccttcacagcactgagataattgcaaaagcggtagattctgctgcaaatgtccaacctgaaaaggttgaagacatttggaaccttagaggtattttaaacacttcatggcatcgagtgaaagttcaagcgagttactcaaacctgtaaaagtagcaccaacttcccaatcgagcctttatgactctctcccccaacaatgcttggtggattttgaagcttctctgtttgaactatgaacactgaaaacacctgaacaggcatcgcaatcagttgtaaaaaagtctttatacaaataagctataggcaagggattataagaaaaatccttgggtttctcagagtttttcatggaatatctgttcttcgtttcttcgaggaaataatttgagatcgtaaacatgattcgtctggcactttgaatttc

SEQ ID NO: 19755 - protein, 393 aa, Glycine max
MPGLTAPSDYSQEPPRHSSLLINAKEPFNAEPPRAALVASYVTPSDFFYKRNHGPIPIVENINRYSVNVSGLVERPKQLFMKDIWMLPKYNVTATLQCAGNRRTAMSKTKTVKGVGWDVSAIGNAIWGGAKLSDVLELIGIPKLTSVTEFGGRHVEFVSIDKCKEENGGPYKASIPLSQATNPEADVLLAYEMNGEPLNRDHGYPLRVVVPGVIGARSVKWLEDINIIEEECQGFFMQKDYKMFPPSVNWDNIDWSTRRPQMDFPVQCVICSLEDVSTIKPGKVKISGYAASGGGRGIERVDVSVDGGKTWMEASRIQKSGVPYISEHASSDKWAWVLFEVTADILHSTEIIAKAVDSAANVQPEKVEDIWNLRGILNTSWHRVKVQASYSNL

SEQ ID NO: 19756 - protein, 313 aa, Glycine max
MKDIWMLPKYNVTATLQCAGNRRTAMSKTKTVKGVGWDVSAIGNAIWGGAKLSDVLELIGIPKLTSVTEFGGRHVEFVSIDKCKEENGGPYKASIPLSQATNPEADVLLAYEMNGEPLNRDHGYPLRVVVPGVIGARSVKWLEDINIIEEECQGFFMQKDYKMFPPSVNWDNIDWSTRRPQMDFPVQCVICSLEDVSTIKPGKVKISGYAASGGGRGIERVDVSVDGGKTWMEASRIQKSGVPYISEHASSDKWAWVLFEVTADILHSTEIIAKAVDSAANVQPEKVEDIWNLRGILNTSWHRVKVQASYSNL

SEQ ID NO: 19757 - protein, 308 aa, Glycine max
MLPKYNVTATLQCAGNRRTAMSKTKTVKGVGWDVSAIGNAIWGGAKLSDVLELIGIPKLTSVTEFGGRHVEFVSIDKCKEENGGPYKASIPLSQATNPEADVLLAYEMNGEPLNRDHGYPLRVVVPGVIGARSVKWLEDINIIEEECQGFFMQKDYKMFPPSVNWDNIDWSTRRPQMDFPVQCVICSLEDVSTIKPGKVKISGYAASGGGRGIERVDVSVDGGKTWMEASRIQKSGVPYISEHASSDKWAWVLFEVTADILHSTEIIAKAVDSAANVQPEKVEDIWNLRGILNTSWHRVKVQASYSNL

SEQ ID NO: 19758 - DNA, 681 bp, Glycine max
catactttcgtttccccttctcatcgaatcgaagcgccgcaccgtgtttcttctctgcctgaataacgcaaagaaaattgaagcatcctaagggttgtttctaagggataccgggttgggagagaagatgaaacaggtggtgggaacggtggtttcaaataagatgcagaaatcagtggtggtggcagtggatagactattctaccacaaattgtacgaccgatatgtcaagcgcacgtctaagtttatggctcatgatgagcacaatcattgttcggctggatccttctaggcctttgagtaagcataaacattgggcagttgctgaaattctcaagaaagcacgtatatatgttccgccctcaatgccagtgccggggagtgtgagctcaagctctgaagcatctgcttcctgatttggctgaaggtattataacatattttggctgtcaatatctacacaagttgtagctgttcgtattgaagtgattctggaaataaagtttagctgaatgagttgtggatagtttgtaaccttattcaagttacttgttttaaggactgttatttaaaaaacaaaatagaccttatttggcaggttgtccactccagtctaatgcatttaattggcagtgtactatataatactgtgcattctagtaacttcctgattataagttt

SEQ ID NO: 19759 - protein, 63 aa, Glycine max
MSSARLSLWLMMSTIIVRLDPSRPLSKHKHWAVAEILKKARIYVPPSMPVPGSVSSSSEASAS

SEQ ID NO: 19760 - protein, 54 aa, Glycine max
MKQVVGTVVSNKMQKSVVVAVDRLFYHKLYDRYVKRTSKFMAHDEHNHCSAGSF

SEQ ID NO: 19761 - protein, 53 aa, Glycine max
MMSTIIVRLDPSRPLSKHKHWAVAEILKKARIYVPPSMPVPGSVSSSSEASAS

SEQ ID NO: 19762 - DNA, 1433 bp, Glycine max
gaggcacgggttttgtttgaggttttctgttcgtttcatttcatttggtcgcacagtgctgtcggccactgtctctctttctctttcgcgcttcaactttcgtttatgcaccgattgggatggatcagtgggatgctcatcatcgactcatgttcattggtcggcatgaggaagatggaactgctgatacttctaagggagaggaatcaaatgatgaagaaaaaataagtaaaactgaacccgtctttgtgcctgaaactaagaaaaggaaacgccttagccttagtcagcttaaagaggtgaaagaggagtctcatgggaagcaaagcagtagcaagtctaagagaaagaagcatgatagtagggatagatggtcagctgagaggtatcaattggccgagcaaaacatgtgggaggtactaaaggctgaaggggcgacatttgaaaacccaataacccgacctgcactaagattagctgcccgcaaacacattggagatactggacttttagaccacttactgaagcacattgatggtaaagtggcacctggagggactgagcgtttccgaagatggttcaacaccaatggaatcatggagtattggttggagagtgctgacttggacaaggtgcgccaggaggcaggggtgcaggacccttactggataccgccatctacatatagggaagctggtgccccctcccagaatattgattcttctggtgaattgaaacagcttaaaatagaattgatgcaaatgaagaaagatatgcatgagctcattgccaagaaggaagagaaaagtgatattaacatggtggaggtgaatgttgaataatttgttaattcaatggtttgctgtcttctcttgcagcactttatgatgttttgttttgagttgctatggcaggagacacacaaggaatctgtaaagtggaaatttatgactgaccatcgccttactgaaatcatgacttctttgaaggatattcaggggaagtatggtgaattgatgatttggaaaactacagttgagcaacaacttatggaaataactgataaattgaatgatcttcaagcatctagggagtgcaccactaatagtcctccttcagaaaggtggcaagattggatagaaagtaccaacctagacaatattcaggaagatgcatttgcaacttggattgggaatccggagctacttaatgttccacaagaggttatacttgaagatcccaacacaaccataccaacacagccacccagtgaagaactgactaacaagaggagcgatgtgctggagttagtacctggtaaactagaagatcaacctaatgtaacccctgattcttctacaactgttaattcgaagtcagaccatgacaacaactcattgatcatgtttcaggagatgtttatggatttatac

SEQ ID NO: 19763 - protein, 240 aa, Glycine max
MDQWDAHHRLMFIGRHEEDGTADTSKGEESNDEEKISKTEPVFVPETKKRKRLSLSQLKEVKEESHGKQSSSKSKRKKHDSRDRWSAERYQLAEQNMWEVLKAEGATFENPITRPALRLAARKHIGDTGLLDHLLKHIDGKVAPGGTERFRRWFNTNGIMEYWLESADLDKVRQEAGVQDPYWIPPSTYREAGAPSQNIDSSGELKQLKIELMQMKKDMHELIAKKEEKSDINMVEVNVE

SEQ ID NO: 19764 - protein, 230 aa, Glycine max
MFIGRHEEDGTADTSKGEESNDEEKISKTEPVFVPETKKRKRLSLSQLKEVKEESHGKQSSSKSKRKKHDSRDRWSAERYQLAEQNMWEVLKAEGATFENPITRPALRLAARKHIGDTGLLDHLLKHIDGKVAPGGTERFRRWFNTNGIMEYWLESADLDKVRQEAGVQDPYWIPPSTYREAGAPSQNIDSSGELKQLKIELMQMKKDMHELIAKKEEKSDINMVEVNVE

SEQ ID NO: 19765 - protein, 193 aa, Glycine max
MVCCLLLQHFMMFCFELLWQETHKESVKWKFMTDHRLTEIMTSLKDIQGKYGELMIWKTTVEQQLMEITDKLNDLQASRECTTNSPPSERWQDWIESTNLDNIQEDAFATWIGNPELLNVPQEVILEDPNTTIPTQPPSEELTNKRSDVLELVPGKLEDQPNVTPDSSTTVNSKSDHDNNSLIMFQEMFMDLY

SEQ ID NO: 19766 - DNA, 1817 bp, Glycine max
agtcacaacacacacacacatagcaatggcatctatggcggctataggttctctcaatgttccacgttctgcttcttcccgttcatcctttgtgggaagaaaaagcgttccacgcagcctttccttctctgcatcacaactttgtggagacaagattcccacagattcagttttattggcaccaaaaataggtcgcagtccagttatcgttactcctaaagcagtttctgattcccaaaactcacaaacgtgccttgatcccgatgctagcagaagtgtgcttggcattatacttggaggtggtgctgggactcggctttatccactcaccaagaagagggcaaagccagctgttcctcttggagctaactataggcttattgatattcctgttagcaactgcttgaatagcaatgtctccaagatctatgttctcactcaattcaattctgcgtcgttaaaccgacacctttctcgtgcttatgcaagcaacatgggtggctacaaaaatgagggatttgttgaggttcttgctgctcagcagagtcctgagaatcctaattggttccagggtactgcagatgctgtgaggcagtatttgtggctttttgaagagcacaatgttttggaattcttggttctggctggtgaccatttgtatcgaatggattacgagaaatttatccaagcgcatagggaaactgatgctgatatcactgtggctgcattgccaatggatgaagcgcgtgccactgcatttggtttgatgaagattgatgaagaggggcgtataattgaatttgctgaaaagccaaaaggagaacagttgaaagctatgaaggttgatactacaattttgggtcttgatgacgagagagcaaaagaaatgccttatattgctagcatgggtatatatgttgttagcaaaaatgtgatgttagacctgctccgtgagaagtttcctggtgcaaatgactttgggagtgaagtgattcctggtgctacttctattggaatgagagtgcaagcttacttgtatgatggctactgggaagacattggtacaatcgaggctttctataatgcaaatctgggaatcaccaaaaagcctgtgcctgacttcagtttctatgatcgttcatctccaatctacacccaaccacgatatttgcctccctctaagatgcttgatgctgatgtcactgatagtgttattggtgaaggatgtgtgactaagaactgcaaaattcaccattctgtggttgggctgcgatcttgcatatcagaaggtgcaattattgaagacacgttattaatgggggcagattattacgagacggaggctgataagaggtttctggctgccaaaggcagtgttccaattggtataggcaggaactctcatatcaaaagggcaattattgacaagaatgctcgaattggggaaaatgtcaagattattaacagtgacaatgtccaagaagctgcaagggaaacagatgggtatttcataaaaagtgggattgtcacagtaatcaaggatgctttaattcctagtggaacagtcatctaaacacaaccacctccccaaaaaatttcttgtaccccaaatcctaatggtgactgcgaagctcattaccaccgcaggagagtttatcaagctctgcttccacgtctaagataggcttttgtgtttcatgatatatatttttgggcagtggcttgtaaataatagcggaagagaaggcccgctatgagcaatcacgctgtaaagttcgttaatcaattcaataaaacaagtttctttatttcgtacc

SEQ ID NO: 19767 - protein, 523 aa, Glycine max
VTTHTHIAMASMAAIGSLNVPRSASSRSSFVGRKSVPRSLSFSASQLCGDKIPTDSVLLAPKIGRSPVIVTPKAVSDSQNSQTCLDPDASRSVLGIILGGGAGTRLYPLTKKRAKPAVPLGANYRLIDIPVSNCLNSNVSKIYVLTQFNSASLNRHLSRAYASNMGGYKNEGFVEVLAAQQSPENPNWFQGTADAVRQYLWLFEEHNVLEFLVLAGDHLYRMDYEKFIQAHRETDADITVAALPMDEARATAFGLMKIDEEGRIIEFAEKPKGEQLKAMKVDTTILGLDDERAKEMPYIASMGIYVVSKNVMLDLLREKFPGANDFGSEVIPGATSIGMRVQAYLYDGYWEDIGTIEAFYNANLGITKKPVPDFSFYDRSSPIYTQPRYLPPSKMLDADVTDSVIGEGCVTKNCKIHHSVVGLRSCISEGAIIEDTLLMGADYYETEADKRFLAAKGSVPIGIGRNSHIKRAIIDKNARIGENVKIINSDNVQEAARETDGYFIKSGIVTVIKDALIPSGTVI

SEQ ID NO: 19768 - protein, 515 aa, Glycine max
MASMAAIGSLNVPRSASSRSSFVGRKSVPRSLSFSASQLCGDKIPTDSVLLAPKIGRSPVIVTPKAVSDSQNSQTCLDPDASRSVLGIILGGGAGTRLYPLTKKRAKPAVPLGANYRLIDIPVSNCLNSNVSKIYVLTQFNSASLNRHLSRAYASNMGGYKNEGFVEVLAAQQSPENPNWFQGTADAVRQYLWLFEEHNVLEFLVLAGDHLYRMDYEKFIQAHRETDADITVAALPMDEARATAFGLMKIDEEGRIIEFAEKPKGEQLKAMKVDTTILGLDDERAKEMPYIASMGIYVVSKNVMLDLLREKFPGANDFGSEVIPGATSIGMRVQAYLYDGYWEDIGTIEAFYNANLGITKKPVPDFSFYDRSSPIYTQPRYLPPSKMLDADVTDSVIGEGCVTKNCKIHHSVVGLRSCISEGAIIEDTLLMGADYYETEADKRFLAAKGSVPIGIGRNSHIKRAIIDKNARIGENVKIINSDNVQEAARETDGYFIKSGIVTVIKDALIPSGTVI

SEQ ID NO: 19769 - protein, 512 aa, Glycine max
MAAIGSLNVPRSASSRSSFVGRKSVPRSLSFSASQLCGDKIPTDSVLLAPKIGRSPVIVTPKAVSDSQNSQTCLDPDASRSVLGIILGGGAGTRLYPLTKKRAKPAVPLGANYRLIDIPVSNCLNSNVSKIYVLTQFNSASLNRHLSRAYASNMGGYKNEGFVEVLAAQQSPENPNWFQGTADAVRQYLWLFEEHNVLEFLVLAGDHLYRMDYEKFIQAHRETDADITVAALPMDEARATAFGLMKIDEEGRIIEFAEKPKGEQLKAMKVDTTILGLDDERAKEMPYIASMGIYVVSKNVMLDLLREKFPGANDFGSEVIPGATSIGMRVQAYLYDGYWEDIGTIEAFYNANLGITKKPVPDFSFYDRSSPIYTQPRYLPPSKMLDADVTDSVIGEGCVTKNCKIHHSVVGLRSCISEGAIIEDTLLMGADYYETEADKRFLAAKGSVPIGIGRNSHIKRAIIDKNARIGENVKIINSDNVQEAARETDGYFIKSGIVTVIKDALIPSGTVI

SEQ ID NO: 19770 - DNA, 1187 bp, Glycine max
aagccagagaaagagaaggaaccaacaacaaagagcagagagaaagagaggaccattccaaccctaatttctctgctaaaccctagttgtttggcatttcctctcttctccctcgtaaatcttctcccattccctccggtagctttccagatccaaataaatcatggttttctgggtttttggctacggttcactggtgtggaaccctggattcgattacgacgagaagattattggtttcatcaaggactacagacgcgtgtttgatttagcgtgcattgatcaccggggaacgcctgaaaacccagcgagaacttgcacattggaggagaaagaaggggctatttgctggggagctgcttattgtgttcgaggaggccctgaaaaggaaaaattggctatgcagtatttggagcgacgggaatgtgaatatgacagaaagactcttgtaaacttcttcaaggaaggagattcactgcatcctactttaactgatgtaatagtattcacatctactccagacaaagtgaacaacaaatactacctgggacctgctccacttgaagacatggctaggcaaatagcaactgcatacggcccttgcggaaacaacagggattacattttccttctagaaaaggccatgcatgatattggccatgaggatgacttggtgatagagcttgccaatgaagtgaagaaagtacttggagtgggaaatgtagtaccaaaggagaagaaacaggttggagcagcacaacttccacaccctcctcatgtgccaatccctacccttcaactgctcccgctgccagaacctattgctttggatagctgacgcggaaactgacgctgagttcggcaactaaactgatttactgcggaccctactaaccctaattcaaattttaaataacatcacatatattcctcttcgcctagttttagcggcttcttcagccattcccttgagatattgcttaaattcagtgaggcgcaatattttgaattggaatgaatgttcgcagatgttataattgaaaaagttcaatttttctatttatttcgtttacggcaatcttacagagttttttttccaccagttctgcatcccaatcttacggagttatttatagcttttaattgctggtacttcgaaatgaataatattacttctgttttgagcg

SEQ ID NO: 19771 - protein, 224 aa, Glycine max
MVFWVFGYGSLVWNPGFDYDEKIIGFIKDYRRVFDLACIDHRGTPENPARTCTLEEKEGAICWGAAYCVRGGPEKEKLAMQYLERRECEYDRKTLVNFFKEGDSLHPTLTDVIVFTSTPDKVNNKYYLGPAPLEDMARQIATAYGPCGNNRDYIFLLEKAMHDIGHEDDLVIELANEVKKVLGVGNVVPKEKKQVGAAQLPHPPHVPIPTLQLLPLPEPIALDS

SEQ ID NO: 19772 - protein, 145 aa, Glycine max
MQYLERRECEYDRKTLVNFFKEGDSLHPTLTDVIVFTSTPDKVNNKYYLGPAPLEDMARQIATAYGPCGNNRDYIFLLEKAMHDIGHEDDLVIELANEVKKVLGVGNVVPKEKKQVGAAQLPHPPHVPIPTLQLLPLPEPIALDS

SEQ ID NO: 19773 - DNA, 1403 bp, Glycine max
agtcttgcttaactctttttcttcaatttttgcataggagtgatccaaagagaatggaagataacttgtaaacgacagagaacgaagaatcatcattttattagttcatcatgtaatgctagggagttaaaaatgtgtatatgaaaatttttcatagttatttgaattgtcaaaagagagaactttttttcacatggtaactcatcactgcatgttcatgatttatatctgtatatgtgtttgcgagtatttccattttcttagcacacaaaaataaaatgatttcaggtttcgcgccacctgtttaaatggaccaaagaagtctcttatgcagactattactagcatgccttgaccaatggtgtgctcggcattcaaagagggaccgatcctggagtgatgatttatatgcttccactaggtcttggggtttccaaggctaaaacttaccatagttggggaacaccatttaactctttctggtgctgctatggaacgggaattgaatcattctcaaaactgggagattctgtctattttgaagacaaaggcaaagatcctacactttatatcactcagtacatatcaagctcgtttaattggaaatctggcaaaattttgcacaatcagacagttgatccagttgtttcatgggatccttacctacgagtgacatttatgttttctccagtttaggaaatgtttttgccaatcacacgacaatggagtgctagtgacaagctaacccttcagctgccaatgccaactactaccatgataatccatgtacctgaaatgtggaatggttgaagaacagtggccatgaaagatgacaggcctgaatatgcatctgttcaagcaattctttatcttcttgttggtcatactattggtgatgattgagaccataaagctggggctagacatgcagattggattactcctatccttgccagttacaatagcaactagtttcttttttcccaacagtttaaaaaatcaacttttgttttggcaaatttaaaccaatcactagcaatgctaaaattgcctaaatccgatttggctcttcagggaacctttaggcttgtgagcttgtcctaaaagaatcttcctcaaaattttcaacattggcagatgcttatggtagatcagtgatgttagaacaatttgatctttctggagtggatgtgattcaccaagaagcagacaaacctcttcacttgtagattcttcccatggtgagccatctgtttttcttgtggaactatatctttagaatctcaaagcaaaaagagctgttatgtgtatggtggcatgagctttaatgcaggagtcaagctcagttgcaaatctgattctgatttactagcttatacatttaacttaaataaaccctttag

SEQ ID NO: 19774 - protein, 98 aa, Glycine max
MIYMLPLGLGVSKAKTYHSWGTPFNSFWCCYGTGIESFSKLGDSVYFEDKGKDPTLYITQYISSSFNWKSGKILHNQTVDPVVSWDPYLRVTFMFSPV

SEQ ID NO: 19775 - protein, 95 aa, Glycine max
MLPLGLGVSKAKTYHSWGTPFNSFWCCYGTGIESFSKLGDSVYFEDKGKDPTLYITQYISSSFNWKSGKILHNQTVDPVVSWDPYLRVTFMFSPV

SEQ ID NO: 19776 - protein, 64 aa, Glycine max
MTGLNMHLFKQFFIFLLVILLVMIETIKLGLDMQIGLLLSLPVTIATSFFFPNSLKNQLLFWQI

SEQ ID NO: 19777 - DNA, 1798 bp, Glycine max
aaagtctgctcttgcattacaaagactagttcaagctgctgtatggtttcttggggaaaatgcaaattatgctgcttctgaatatgcttgggaatctgctaccccgcctggtactgcattgatgatgttagatgctgataaaatggttgctgctgctagttctcgtaatcctactctagctggtgccttgacaaggctccagaggtgcgcattcaatggcagctgggagattcgaattattgctgctcaagctcttacaacaatggcaattagatctggggaacctttcaggttacagatttatgagtttctgcacactttggcgcaaggtggtattcagtcacagttctctgatatgcatcttagtaatggagaagatcaaggagcaagtggtacaggccttggagttttattaagtcctatgataaaggttctggatgagatgtatagagcacaagatgatttgatcaaggaaatacgcaatcatgacaatgctaagaaagaatggactgatgatgaactgaagaaactatatgaaacccatgaaaggctgctagatcttgtttcattgttttgttatgttccaagaacaaagtatctacctttgggcccaataagtgccaaactcattgacatctatcgtacacgccacaatattagttcatctactggtttgagtgatccagctgttgccactggtatatctgatcttgtctatgaatcccaaccaccacctgctgagcctgatacacttgatgatgacctagtaaatgcttgggcagcaaaccttggtgatgatggcttatggggaaacaatgcaccagcaatgaatagggtaaatgaatttctggcaggtgctggaacagacgccccagaagttgatgaagagaatatgatctctaggccttcagttagctatgatgatatgtgggcaaaaacacttctagaatcttctgagctagaggaagatgatgcaaagtcattgggatcatcatctccagattcaacaggatcagttgaaacttcgatatcatcccactttggaggaatgagctacccttcgctgtttagttcccgaccacaaactacggataaggcaccagcaagccgaggctctatgtatgagggttatggttctccgataagagaagagcctccgtcatactcatcctctgtcatgcaaagacacgagtcatttgagaacccccttgcagggaatggattgcacagttttgggtctcaagatgatgagcgagcttcatctggaaatcctcaacatggaagtgcactttatgacttcacagcaggaggagacgatgaattgagtttaaccgcaggagaagaagtcgacattgagtacgaagtagatggctggttttatgttaagaagaaacgccctggtagggatggcaagatggctggactggttcctgttttatatgttagtcaatcttgaatcatgtacgtaagctattgtaacttccgattcttgcaaaaaggctttttttgctttattttatccagtgttgctttcattcaaagtttccatgttcccatgtagcatgccattctggctgttctccttcaaagtatcttgtatcctggtccctacctaattcgtctagttgtatgctatcaaagtatcatttaccatgctaattggttgcgagtgtctagtcattcatcatagtaggcctttcattctattatatttatattttacatacagctattggtgtacgagtgtttgtttttatacaaggaatttaatatatcaagtgaaagtttcacgtttttc

SEQ ID NO: 19778 - protein, 484 aa, Glycine max
KSALALQRLVQAAVWFLGENANYAASEYAWESATPPGTALMMLDADKMVAAASSRNPTLAGALTRLQRCAFNGSWEIRIIAAQALTTMAIRSGEPFRLQIYEFLHTLAQGGIQSQFSDMHLSNGEDQGASGTGLGVLLSPMIKVLDEMYRAQDDLIKEIRNHDNAKKEWTDDELKKLYETHERLLDLVSLFCYVPRTKYLPLGPISAKLIDIYRTRHNISSSTGLSDPAVATGISDLVYESQPPPAEPDTLDDDLVNAWAANLGDDGLWGNNAPAMNRVNEFLAGAGTDAPEVDEENMISRPSVSYDDMWAKTLLESSELEEDDAKSLGSSSPDSTGSVETSISSHFGGMSYPSLFSSRPQTTDKAPASRGSMYEGYGSPIREEPPSYSSSVMQRHESFENPLAGNGLHSFGSQDDERASSGNPQHGSALYDFTAGGDDELSLTAGEEVDIEYEVDGWFYVKKKRPGRDGKMAGLVPVLYVSQS

SEQ ID NO: 19779 - protein, 444 aa, Glycine max
MMLDADKMVAAASSRNPTLAGALTRLQRCAFNGSWEIRIIAAQALTTMAIRSGEPFRLQIYEFLHTLAQGGIQSQFSDMHLSNGEDQGASGTGLGVLLSPMIKVLDEMYRAQDDLIKEIRNHDNAKKEWTDDELKKLYETHERLLDLVSLFCYVPRTKYLPLGPISAKLIDIYRTRHNISSSTGLSDPAVATGISDLVYESQPPPAEPDTLDDDLVNAWAANLGDDGLWGNNAPAMNRVNEFLAGAGTDAPEVDEENMISRPSVSYDDMWAKTLLESSELEEDDAKSLGSSSPDSTGSVETSISSHFGGMSYPSLFSSRPQTTDKAPASRGSMYEGYGSPIREEPPSYSSSVMQRHESFENPLAGNGLHSFGSQDDERASSGNPQHGSALYDFTAGGDDELSLTAGEEVDIEYEVDGWFYVKKKRPGRDGKMAGLVPVLYVSQS

SEQ ID NO: 19780 - protein, 443 aa, Glycine max
MLDADKMVAAASSRNPTLAGALTRLQRCAFNGSWEIRIIAAQALTTMAIRSGEPFRLQIYEFLHTLAQGGIQSQFSDMHLSNGEDQGASGTGLGVLLSPMIKVLDEMYRAQDDLIKEIRNHDNAKKEWTDDELKKLYETHERLLDLVSLFCYVPRTKYLPLGPISAKLIDIYRTRHNISSSTGLSDPAVATGISDLVYESQPPPAEPDTLDDDLVNAWAANLGDDGLWGNNAPAMNRVNEFLAGAGTDAPEVDEENMISRPSVSYDDMWAKTLLESSELEEDDAKSLGSSSPDSTGSVETSISSHFGGMSYPSLFSSRPQTTDKAPASRGSMYEGYGSPIREEPPSYSSSVMQRHESFENPLAGNGLHSFGSQDDERASSGNPQHGSALYDFTAGGDDELSLTAGEEVDIEYEVDGWFYVKKKRPGRDGKMAGLVPVLYVSQS

SEQ ID NO: 19781 - DNA, 1092 bp, Glycine max
atgttgataccgggaacacgagaatagatcaagctggatcgtggaaaaacccttatggtgtaacttttcccggaaaaccagccggtagattctccgatggtagagttctaaccgacttcattgctaagtatttgggaatcaaatcgccagttccgtacaaattcaggaaactgatgctgaaacaattgaaatctgggatgaattttgcatatggtggcactggtgtgtttgacacgccctccaaaaacccaaacatgacaatccaaatcgattttttgaagcaattgataaaagaacatgtgtacacgacctcagatctgaacaactcagtggcctatgtttccgtagctggaaatgattacaatttctacttggccacaaatggatctattgagggtttcccgtctttcatcgcctcagtggttaaccaaactgtcactaacttgcttcacatccaaaggttgggagtgagaaaaattgttgtgggtggtctacaaccccttggatgtcttccttcctccacagccttatcttcattccaacaatgtaatagcacattcaacgacctcataggtctccacaacaaactattgaaccaagccgtgaccaagttgaaccaaaaaagcaaggataactccaccttcatagttcttgaccttttcgacactttcatgtcagtgttaaaccacccatctaccaataacattaaggaccctctcaagccttgctgcgtagggttaagtagccaagatttttgtgggagcgtggacgagagaaatgttaagcaatataaggtttgtgacagtcccaaatcagctttcttttgggatctcttgcacccaactcaagcaggttggcatgctgtgtataataagttgcaaacgacgacgagtgctcttcgtcgacttcgatactaaagagtagagagttatgcatcatagctatttctaggccttttgtttgttgtattttaataatgcaccctcttttcgtttgttgatttatcctcaaattctgatttgtttgtatttatcccaaatggtttctcttttatgggtgcaatgtttaaacagatagttctttttgtgagag

SEQ ID NO: 19782 - protein, 304 aa, Glycine max
VDTGNTRIDQAGSWKNPYGVTFPGKPAGRFSDGRVLTDFIAKYLGIKSPVPYKFRKLMLKQLKSGMNFAYGGTGVFDTPSKNPNMTIQIDFLKQLIKEHVYTTSDLNNSVAYVSVAGNDYNFYLATNGSIEGFPSFIASVVNQTVTNLLHIQRLGVRKIVVGGLQPLGCLPSSTALSSFQQCNSTFNDLIGLHNKLLNQAVTKLNQKSKDNSTFIVLDLFDTFMSVLNHPSTNNIKDPLKPCCVGLSSQDFCGSVDERNVKQYKVCDSPKSAFFWDLLHPTQAGWHAVYNKLQTTTSALRRLRY

SEQ ID NO: 19783 - protein, 247 aa, Glycine max
MLKQLKSGMNFAYGGTGVFDTPSKNPNMTIQIDFLKQLIKEHVYTTSDLNNSVAYVSVAGNDYNFYLATNGSIEGFPSFIASVVNQTVTNLLHIQRLGVRKIVVGGLQPLGCLPSSTALSSFQQCNSTFNDLIGLHNKLLNQAVTKLNQKSKDNSTFIVLDLFDTFMSVLNHPSTNNIKDPLKPCCVGLSSQDFCGSVDERNVKQYKVCDSPKSAFFWDLLHPTQAGWHAVYNKLQTTTSALRRLRY

SEQ ID NO: 19784 - protein, 239 aa, Glycine max
MNFAYGGTGVFDTPSKNPNMTIQIDFLKQLIKEHVYTTSDLNNSVAYVSVAGNDYNFYLATNGSIEGFPSFIASVVNQTVTNLLHIQRLGVRKIVVGGLQPLGCLPSSTALSSFQQCNSTFNDLIGLHNKLLNQAVTKLNQKSKDNSTFIVLDLFDTFMSVLNHPSTNNIKDPLKPCCVGLSSQDFCGSVDERNVKQYKVCDSPKSAFFWDLLHPTQAGWHAVYNKLQTTTSALRRLRY

SEQ ID NO: 19785 - DNA, 1228 bp, Glycine max
gttcgcacgccttgttcggtgaagtgagtagtgagtgctgaatcgaatcgaatcgattctccgaacatggcggcgagcgatcgcacagtgttgcaattctcttcatcatcttcttcttcttcgcagatcttgtccgcgaaggtccaccctctggtcatcttcaacatctgcgattgctatgttcgacgccctgaccaagccgaccgcgtcatcggaaccctactcggctccgtccttcccgacggaaccgtcgatatccgaaattcctatgctgttcctcacaacgagtctatcgaacaggttgcattggatatagagtaccaccacaatatgttaatatcccaccaaaaagtgaatccaaaggaaatcatagtaggatggtattcaaccggtcttggagtaactggtggtagtgcattaatccacgagttttattctcgagaagtgcccaatcccatacacttgactgttgatacaggatttacaaatggagcgggtacgattaaagcatacgtgtctaacaatttatctcttggagaacgtcaaattgctgcacagtttcaagaaattccattagatcttcgtatggtggaagctgagcgaattggatttgatatgctgaaggcaactgcagttgacaaaattccctcagatttagaagggatggaagcatcaatgcaacatctgctagtcttgattgatgacatctacaaatatgttgacgatgttgtggaaggacgagtggcaccagacaacaaaatcgggagatttatatcagaagctgtaggttcccttcccaaattgtccccatcagtttttgataagcttgtgaatgacagtttgcaggatcacttgcttttgctgtatttatctagtatcacaagaacgcagcttagcttggctgaaaaattgaacacagctgctcagattctgtgattcttccgcttgtttatcgccgaagtcaaatttttctgagtttcttttcttgtcttatttccagaaacgtggaatgtcagcgttttatacttcacttttacttcgcttatttttttatttatgttttgtgctggtctttgctaggtaagttcacttattgtccaaggtatgcagtgtagcgttcacttgttatttttcatgtaatctgtatttgaaagaaaatgagcaaaaagctttctctccattatctatttatttcttatttattgagattggaaaaaaaaaaaaaaac

SEQ ID NO: 19786 - protein, 289 aa, Glycine max
MAASDRTVLQFSSSSSSSSQILSAKVHPLVIFNICDCYVRRPDQADRVIGTLLGSVLPDGTVDIRNSYAVPHNESIEQVALDIEYHHNMLISHQKVNPKEIIVGWYSTGLGVTGGSALIHEFYSREVPNPIHLTVDTGFTNGAGTIKAYVSNNLSLGERQIAAQFQEIPLDLRMVEAERIGFDMLKATAVDKIPSDLEGMEASMQHLLVLIDDIYKYVDDVVEGRVAPDNKIGRFISEAVGSLPKLSPSVFDKLVNDSLQDHLLLLYLSSITRTQLSLAEKLNTAAQIL

SEQ ID NO: 19787 - protein, 201 aa, Glycine max
MLISHQKVNPKEIIVGWYSTGLGVTGGSALIHEFYSREVPNPIHLTVDTGFTNGAGTIKAYVSNNLSLGERQIAAQFQEIPLDLRMVEAERIGFDMLKATAVDKIPSDLEGMEASMQHLLVLIDDIYKYVDDVVEGRVAPDNKIGRFISEAVGSLPKLSPSVFDKLVNDSLQDHLLLLYLSSITRTQLSLAEKLNTAAQIL

SEQ ID NO: 19788 - DNA, 1568 bp, Glycine max
agcactagcactgcaattcactgtaatgggtcaagtgttacaagatcagagaggtttgtggactcagatacagagacctttttggacacaatgcagaggagttggtccatgttgccatggaatagaagcttcgagggatggactttcaaaagaacctcctcaagtaaacgagagcctttgacctcacattcaactcattccatgggaccatactttgatcacaataaatgcactgcaagtggctgggaaaatagggaactttggagtagagatgggaaaacaaagctcaaaaccaatgtgttctttgcttcctttgatcaaagaagcaaaaaagcatgtggtgagagtgcatgtacagcactagcagtgtgcatagctcactggcttcattccaaccacaacatgccaacaagggctcaatttgatagcctcatcaaaaagggttcctctaaatggagaaagctgagtcatagtgatcactacctaaagcttttccctgataagcattttgatttagagacaatcttggaagccaacattaggccactagttgttatccctcaaaattcctacacaggatttttctcccctgagaagtttaaatgcttagaaggagccatgtcctttgatgatatttgggatgagataactagaaatgatggtgtggttgatcatgagccaagaatttacatagtgagttggaatgaccatttctttgttctgaaagtggaagttgatgcttgttatgtgattgacactttgggggagaggctttttgagggatgcaaaaaggctttcatgttgaagtttgatggttcaagtttgatgcatgcaaagggaagtaagaaaggaagaggtgagatagtttgcaaaggaaaagagtgttgtaaagagttcatcaaacgctttcttgctgccataccacttaggcaactagaagaggaagagcaaaataaagggactgtctataatccttattttcacaggaaattgcagattgacttccattatagtttgttatcatccttgtcttcagtttcttcaattggtgaacctttacaacctaattatatagcaagacattagttatataactcaattgctaaccttgtgagtcttgagcaattgttacaattagaaaaccaaaaaacccggcttcttgtctgaagacaaaatgttcaggtgagataagtcctaagcactcattaggataaggtaagcctcaaagcttgaagagtgtttatagaaatacttatagataacctatcaacaagttccttgcattggtaataggcttcgaacttaaattcttgtaagatgagtcttattcttaaaaactagaccaactttcgttggcaaaaactcagcttcttttctagcagagtttgctggcagcttctttttggtgacaactactactaaccctttacaaagtgtgattttactggattgagcaacccaaatatccattagcatcactcagagaataaaacctttgaggctgattcttgttaacgttgctgtatttagtggagtggatctgaatgaaaaagaaaagaaattggtct

SEQ ID NO: 19789 - protein, 361 aa, Glycine max
STSTAIHCNGSSVTRSERFVDSDTETFLDTMQRSWSMLPWNRSFEGWTFKRTSSSKREPLTSHSTHSMGPYFDHNKCTASGWENRELWSRDGKTKLKTNVFFASFDQRSKKACGESACTALAVCIAHWLHSNHNMPTRAQFDSLIKKGSSKWRKLSHSDHYLKLFPDKHFDLETILEANIRPLVVIPQNSYTGFFSPEKFKCLEGAMSFDDIWDEITRNDGVVDHEPRIYIVSWNDHFFVLKVEVDACYVIDTLGERLFEGCKKAFMLKFDGSSLMHAKGSKKGRGEIVCKGKECCKEFIKRFLAAIPLRQLEEEEQNKGTVYNPYFHRKLQIDFHYSLLSSLSSVSSIGEPLQPNYIARH

SEQ ID NO: 19790 - protein, 331 aa, Glycine max
MQRSWSMLPWNRSFEGWTFKRTSSSKREPLTSHSTHSMGPYFDHNKCTASGWENRELWSRDGKTKLKTNVFFASFDQRSKKACGESACTALAVCIAHWLHSNHNMPTRAQFDSLIKKGSSKWRKLSHSDHYLKLFPDKHFDLETILEANIRPLVVIPQNSYTGFFSPEKFKCLEGAMSFDDIWDEITRNDGVVDHEPRIYIVSWNDHFFVLKVEVDACYVIDTLGERLFEGCKKAFMLKFDGSSLMHAKGSKKGRGEIVCKGKECCKEFIKRFLAAIPLRQLEEEEQNKGTVYNPYFHRKLQIDFHYSLLSSLSSVSSIGEPLQPNYIARH

SEQ ID NO: 19791 - protein, 325 aa, Glycine max
MLPWNRSFEGWTFKRTSSSKREPLTSHSTHSMGPYFDHNKCTASGWENRELWSRDGKTKLKTNVFFASFDQRSKKACGESACTALAVCIAHWLHSNHNMPTRAQFDSLIKKGSSKWRKLSHSDHYLKLFPDKHFDLETILEANIRPLVVIPQNSYTGFFSPEKFKCLEGAMSFDDIWDEITRNDGVVDHEPRIYIVSWNDHFFVLKVEVDACYVIDTLGERLFEGCKKAFMLKFDGSSLMHAKGSKKGRGEIVCKGKECCKEFIKRFLAAIPLRQLEEEEQNKGTVYNPYFHRKLQIDFHYSLLSSLSSVSSIGEPLQPNYIARH

SEQ ID NO: 19792 - DNA, 776 bp, Glycine max
aaagtgtattcaggtaaaaaaaacatggttctaagtgaaatatggtactcgtctcatttggcagacaattaaattgaaagaaaacagtgtgtggatactgcaagatagctgcacaaacctttatgagtcaatggtggcatatgcttgtgtggacattactggcattcagtctgtgatgacaggatgtgattctagcaatcttgccatactgccctcaggattctccattattcctgatggtcttgagtcaaggccattggtgattagttcaaggcaggaagaaaaaaatactgagggaggatctttgtttacaatggcattccagattcttaccaatgcttctcccacagccaagttaacattggaatctgtggactcggtcaacactcttgtatcttgtacattgagaaatatcagaacaagtttacaatgtgaagatggttagttaaaatcagataatcacttgatagagagccatagactttaattagctgtgataatcttgggctctgtattccctttttggatggtattcggtttggcaaaaatagcttgcgtttgtccccttattctgttctgggttagttttaatcattattccattaccaaggagggttggttgagtttgtatatctgtatctgcagttctgtaggtggaaagatagacaagaagcttttagaacctagatattaagtatggcgagtatagaaattatcatttgttaattcctcatgcagttggtattttttgtagtaattttgattattcctgcctt

SEQ ID NO: 19793 - protein, 104 aa, Glycine max
MVAYACVDITGIQSVMTGCDSSNLAILPSGFSIIPDGLESRPLVISSRQEEKNTEGGSLFTMAFQILTNASPTAKLTLESVDSVNTLVSCTLRNIRTSLQCEDG

SEQ ID NO: 19794 - protein, 89 aa, Glycine max
MTGCDSSNLAILPSGFSIIPDGLESRPLVISSRQEEKNTEGGSLFTMAFQILTNASPTAKLTLESVDSVNTLVSCTLRNIRTSLQCEDG

SEQ ID NO: 19795 - protein, 55 aa, Glycine max
MVFGLAKIACVCPLILFWVSFNHYSITKEGWLSLYICICSSVGGKIDKKLLEPRY

SEQ ID NO: 19796 - DNA, 1524 bp, Glycine max
acgtatgttagggacaaaaattaagcagcatgagaacaacctatatcatttaaactctgaaaaaaacaaattagatgactccattcttcacttgcaagttactattgggaaatcagagtcttcaagtaaggccacaattggtgatatggacaatcccaaccctacaaatgatgaggaagtaaataaacagatattgcagcatgaaaaatctgctgctggtattttgtgccagcttaagattcgtcatggagctcaggcttctcatcttacattgacaaaggatgttgtgggtattgttgctactctgggcaaagttgaggatgacaatcttagcagacttttctcggagtatctaggtgtggagactatgctggcaattgtttgcaaaacttatgaaggggttaaagctcttgaaatgtatgatatggaaggctgcataaataaaagttgtggtcttcatgggctaggtgcttctattggaagggctttggatggtcgatttctagtgatatgtcttgaatatctgaggccttatgctggtaattacgtggttaatgatgcacaacggaagttggattttttaatcccaagattgcccaatggggagcttccatctggatttcttggttttgcagtgaatatgattaatttagatagctcaaacctattttgtgtaactcccagcggttatggcctcagagaaactctgttttataatctcttttctcgtctacaagtatataagacaagggctgaaatgatacaagcacttccttgcataagtgaaggagctctttctttagatggaggaatggttaggagttgtggtgtattttctttgggcaatagggaagatgttgatgtgagattccccagaccagaaagatcaatgagacttgataaccaccacattgaaattgagagacaattgaaggatgtcaaatggaagaaagaaaagattatggaggaattaaaaagggaacaaatattgttggacacgacgaggttcaattacaataaaaagaaggctgattatcttaagtttttggcacaaagttcatcagatgcaactcaggctcagactgctcctgacagatttgcttgtagatgattgaatcatggctgacagcatacaatgaagaagagagcctgtggctggcaactttgtttttgttcttgagcttgtagttatccattttgtaatctggctctggaatgagaattttctcattttgatttcttaaattggaagataaattttggatagtaaaacaagcacattgatttttgaagctggagacctctccagtttaagactttgtttttcttccaagttttgctgtaaagcaaaatcagattagccttcatgacaccggtataagatttacctttcagtttgcttggtttctagaccagacatacaggctaggacaacctttttcttggttccttgtgtatctgttagctcttcgtactcatgtattgagtgttgattagaggctgtgaatattgtacatctctgtc

SEQ ID NO: 19797 - protein, 369 aa, Glycine max
RMLGTKIKQHENNLYHLNSEKNKLDDSILHLQVTIGKSESSSKATIGDMDNPNPTNDEEVNKQILQHEKSAAGILCQLKIRHGAQASHLTLTKDVVGIVATLGKVEDDNLSRLFSEYLGVETMLAIVCKTYEGVKALEMYDMEGCINKSCGLHGLGASIGRALDGRFLVICLEYLRPYAGNYVVNDAQRKLDFLIPRLPNGELPSGFLGFAVNMINLDSSNLFCVTPSGYGLRETLFYNLFSRLQVYKTRAEMIQALPCISEGALSLDGGMVRSCGVFSLGNREDVDVRFPRPERSMRLDNHHIEIERQLKDVKWKKEKIMEELKREQILLDTTRFNYNKKKADYLKFLAQSSSDATQAQTAPDRFACR

SEQ ID NO: 19798 - protein, 368 aa, Glycine max
MLGTKIKQHENNLYHLNSEKNKLDDSILHLQVTIGKSESSSKATIGDMDNPNPTNDEEVNKQILQHEKSAAGILCQLKIRHGAQASHLTLTKDVVGIVATLGKVEDDNLSRLFSEYLGVETMLAIVCKTYEGVKALEMYDMEGCINKSCGLHGLGASIGRALDGRFLVICLEYLRPYAGNYVVNDAQRKLDFLIPRLPNGELPSGFLGFAVNMINLDSSNLFCVTPSGYGLRETLFYNLFSRLQVYKTRAEMIQALPCISEGALSLDGGMVRSCGVFSLGNREDVDVRFPRPERSMRLDNHHIEIERQLKDVKWKKEKIMEELKREQILLDTTRFNYNKKKADYLKFLAQSSSDATQAQTAPDRFACR

SEQ ID NO: 19799 - protein, 321 aa, Glycine max
MDNPNPTNDEEVNKQILQHEKSAAGILCQLKIRHGAQASHLTLTKDVVGIVATLGKVEDDNLSRLFSEYLGVETMLAIVCKTYEGVKALEMYDMEGCINKSCGLHGLGASIGRALDGRFLVICLEYLRPYAGNYVVNDAQRKLDFLIPRLPNGELPSGFLGFAVNMINLDSSNLFCVTPSGYGLRETLFYNLFSRLQVYKTRAEMIQALPCISEGALSLDGGMVRSCGVFSLGNREDVDVRFPRPERSMRLDNHHIEIERQLKDVKWKKEKIMEELKREQILLDTTRFNYNKKKADYLKFLAQSSSDATQAQTAPDRFACR

SEQ ID NO: 19800 - DNA, 1123 bp, Glycine max
tgcaaaccctgctgggtttcctgaattctattatttcccaacgctacaatttgaaccctttgggggcatgccatttttcacacatgcacctcctcctgcaatgttcttcccagttgcagaaactcctctcaccaatacaatagccaaccaaattgattattactttagtgatgctaatttagtgaaggatgagtatttaaggtccaacatggatgaacagggatgggttcctattactctgattgcaagcttcccaagggttagaagtttgacaagcaacattaagttgatattggattcattgagaacttccactgtcgtggaagtgcagggggacaagttaaggaggtgcaatgagtggatgaagtggcttccctccgcccagcttcgggccaactctggttcaatatcccctagcggatcaagttctaataacctagcagctgattttgaaaagatcacagtggatgaagctatttcacataaagttaacactgagcctaccacaaatgaagatgctgcaggagagtcctcaactcagtcccaagtcccaaatgatgctactgtgagcagcaattaaaactcaactcagtttatcttcctcatcccaaaatacttggcccattctagtttttggccctgtgcgactcttgattttgaaagggtttttttggaggggatggtaggataggttgattcctttctacggtgactgagatcgattttggtagcaattgaatcaaatagggaaataaataagaattctttggaattattatggcctaaaaagataaagaaagttaacgagacacaagaaatctagaattttgatggaggtgaattgagttttgggttttgtatagtttttttttgctgcggatgatttattctttattttctggtggcttatggtggtatgtgtgggtaaagtatttgttatgaattgaattgaattgaattgagcacttgagttcgcttgtgccaagttgccctgccattttaacaaattaggccttgatgtttgctctgtcacctctgtgtgctcacataaataggtggtagattgtttgatggtcttgcccgtttatacttgttgccctaagtaatttcttcgttcgttacg

SEQ ID NO: 19801 - protein, 192 aa, Glycine max
ANPAGFPEFYYFPTLQFEPFGGMPFFTHAPPPAMFFPVAETPLTNTIANQIDYYFSDANLVKDEYLRSNMDEQGWVPITLIASFPRVRSLTSNIKLILDSLRTSTVVEVQGDKLRRCNEWMKWLPSAQLRANSGSISPSGSSSNNLAADFEKITVDEAISHKVNTEPTTNEDAAGESSTQSQVPNDATVSSN

SEQ ID NO: 19802 - protein, 170 aa, Glycine max
MPFFTHAPPPAMFFPVAETPLTNTIANQIDYYFSDANLVKDEYLRSNMDEQGWVPITLIASFPRVRSLTSNIKLILDSLRTSTVVEVQGDKLRRCNEWMKWLPSAQLRANSGSISPSGSSSNNLAADFEKITVDEAISHKVNTEPTTNEDAAGESSTQSQVPNDATVSSN

SEQ ID NO: 19803 - protein, 159 aa, Glycine max
MFFPVAETPLTNTIANQIDYYFSDANLVKDEYLRSNMDEQGWVPITLIASFPRVRSLTSNIKLILDSLRTSTVVEVQGDKLRRCNEWMKWLPSAQLRANSGSISPSGSSSNNLAADFEKITVDEAISHKVNTEPTTNEDAAGESSTQSQVPNDATVSSN

SEQ ID NO: 19804 - DNA, 1325 bp, Glycine max
agcaccaatatggctggatttgagactgaaactactattaatactaccaatgactcccaacaaactaataaagatgaacttattgtgaattctatacagaagacgatagagatattagaagagattgagagagaaatcgatcagagtgaaaataaaggagcctccaatgaagaagttgccaatcttattgagtctttgatgaagaattctcccaccaattctgctaacaagactgatttattaagtcctactgatgaagacttgaaacctatcaattggaatgatgagagttcaatagagaatagagatgtcagcgatttagatagctctaagttggatacatcaaagatcgatggtgatgagatgcaattacaattccaatcgttaagtgaggatgataaagttgctgatttacaagctttggtcatgaatcaaagaaagactattactaatcttactaaattgaatgctgaacttactcaaattaaccagaagcatcaagcagcacaagataagaatatccagatttacaagactaaattggatgaattgcaaaagttgaacttggataaagtgaaggaatatgagagtaaattggtgagtatcaagtcattgttggagagaaaagtacgagaaatcgatgagaataagatgttctatgatcgttatctcgaagaaaagaccgaaaatatcaatgaacttaaggatcaaaatgaaaaacttcaagcacttattgaaaataatgatgtagcagtaagaaactacgaacttgaaaacgcagtaagagaggttactaaagaaagaaagaagttggctcaagatatcatgaaactgagaaaagaagctgatgaaaaggatgatcaaatcaccaccaagactgctcaaatcgaacttttacaaaacaacttgggtttggcagctaaggaattgaagatgttgaagcaattgaagccagctcatgctgaaggaaatatcttggatggcaataacaatgataataaatctataagaggaggaaaagccagtggaaataatagaaacaagggtggatttaccttgtttgataagcatgtcgtcaagccaattagaggaggtggtggagatgtgaataatttcgcaagaaataatgcattagtctttgaaagtaaggctccttcagtagaacaaaaggaagaaaaggcaggagagaagaaggagattacagcagtaaaggaagtaaaggagaagattactggattgtttggatttggaacttcggaagagtccaagtctgccaagattaaagaaaaagaagatcagagtttcaagaagtttgatgatttgtt

SEQ ID NO: 19805 - protein, 441 aa, Glycine max
STNMAGFETETTINTTNDSQQTNKDELIVNSIQKTIEILEEIEREIDQSENKGASNEEVANLIESLMKNSPTNSANKTDLLSPTDEDLKPINWNDESSIENRDVSDLDSSKLDTSKIDGDEMQLQFQSLSEDDKVADLQALVMNQRKTITNLTKLNAELTQINQKHQAAQDKNIQIYKTKLDELQKLNLDKVKEYESKLVSIKSLLERKVREIDENKMFYDRYLEEKTENINELKDQNEKLQALIENNDVAVRNYELENAVREVTKERKKLAQDIMKLRKEADEKDDQITTKTAQIELLQNNLGLAAKELKMLKQLKPAHAEGNILDGNNNDNKSIRGGKASGNNRNKGGFTLFDKHVVKPIRGGGGDVNNFARNNALVFESKAPSVEQKEEKAGEKKEITAVKEVKEKITGLFGFGTSEESKSAKIKEKEDQSFKKFDDL

SEQ ID NO: 19806 - protein, 438 aa, Glycine max
MAGFETETTINTTNDSQQTNKDELIVNSIQKTIEILEEIEREIDQSENKGASNEEVANLIESLMKNSPTNSANKTDLLSPTDEDLKPINWNDESSIENRDVSDLDSSKLDTSKIDGDEMQLQFQSLSEDDKVADLQALVMNQRKTITNLTKLNAELTQINQKHQAAQDKNIQIYKTKLDELQKLNLDKVKEYESKLVSIKSLLERKVREIDENKMFYDRYLEEKTENINELKDQNEKLQALIENNDVAVRNYELENAVREVTKERKKLAQDIMKLRKEADEKDDQITTKTAQIELLQNNLGLAAKELKMLKQLKPAHAEGNILDGNNNDNKSIRGGKASGNNRNKGGFTLFDKHVVKPIRGGGGDVNNFARNNALVFESKAPSVEQKEEKAGEKKEITAVKEVKEKITGLFGFGTSEESKSAKIKEKEDQSFKKFDDL

SEQ ID NO: 19807 - protein, 375 aa, Glycine max
MKNSPTNSANKTDLLSPTDEDLKPINWNDESSIENRDVSDLDSSKLDTSKIDGDEMQLQFQSLSEDDKVADLQALVMNQRKTITNLTKLNAELTQINQKHQAAQDKNIQIYKTKLDELQKLNLDKVKEYESKLVSIKSLLERKVREIDENKMFYDRYLEEKTENINELKDQNEKLQALIENNDVAVRNYELENAVREVTKERKKLAQDIMKLRKEADEKDDQITTKTAQIELLQNNLGLAAKELKMLKQLKPAHAEGNILDGNNNDNKSIRGGKASGNNRNKGGFTLFDKHVVKPIRGGGGDVNNFARNNALVFESKAPSVEQKEEKAGEKKEITAVKEVKEKITGLFGFGTSEESKSAKIKEKEDQSFKKFDDL

SEQ ID NO: 19808 - DNA, 1423 bp, Glycine max
aaaatcaagtctgggacgattttgattggaatgaagaagactttggtgttctacactggtcgagcacccaaggggaataggaccaattgggttatgcatgagtatcgccccactttgaaggagcttgatggtaccaatcctggacagaatccatatgtcctttgtcgcttgtttaagaaacatgatgagagccttgaagtttcacactgtgatgaagcagagccgactgcttccactcctgtggctgcctattactccacagaggaaatacaatctgatctggctgttgttgcaggatcgccgtcacaagttacagaagatgataagcatcagtcaatgatccctgcacactctgaggaagcaatatccaatgttgtaaccccggttgatcgctgtactgatggatatgatgcttgtgatgcacaaaatcaaattgagttaccaactgcggaggagtttcaaccattgaactttgatatatattatgacccaagaagcgagctactggatggcaaattattctcccctgtacttgcacatattcaaccagaatttcattatcaagcaaacatcgaatcagatggtcgatatgggcttcaatatggtacaaatgagacaaacatgtcagactttttgaattcagttgttaactgggatcaagtaccctttgaggatcccaattgtcaacagcagagctaccccttgtttaatgttaaggataacatattaaacagcgacttagattctgaacttgccaatatgacatgtatgcaagctggttatgcggagggggcaattgatggaaggattcctttgttgataacttcagaattttgcagcaccactggaatccccgttgactgtgttggtgacgagcagaaaagcaatgttgggttatttcaaaacaattcccagagagcttttactgatgttaatatgggtcaagtatacaatgtagtcgatgattatgagcaacaaagaatctttagtgcagttgctagtggcaatactggaatcataaggaggcatcgtgaggtacgaaatgaacagctaagcataaactcaacacaaggtactgcacagaggagaattcgtttgtcaatggctacacatggctcaaataagacggtgaaaagtgaaagttgtgcacaagaagagctttatgcaaaaccagtcattgctgtgggggagaaaggttcagaaaatcatgcttctgatgaaagtgctactcttactaatgatgggaatgaactgcagaagacacccgagtcaaccggcaaaagaaagatttctcaacaagttacaaaagcaggctccaccttggggttgaaagatcttttcttgctcagaagggtccctcacatttcaaaggcttcctcaaatcgcaccaagtgctcttctgtttttgtactttctgcctttg

SEQ ID NO: 19809 - protein, 474 aa, Glycine max
KIKSGTILIGMKKTLVFYTGRAPKGNRTNWVMHEYRPTLKELDGTNPGQNPYVLCRLFKKHDESLEVSHCDEAEPTASTPVAAYYSTEEIQSDLAVVAGSPSQVTEDDKHQSMIPAHSEEAISNVVTPVDRCTDGYDACDAQNQIELPTAEEFQPLNFDIYYDPRSELLDGKLFSPVLAHIQPEFHYQANIESDGRYGLQYGTNETNMSDFLNSVVNWDQVPFEDPNCQQQSYPLFNVKDNILNSDLDSELANMTCMQAGYAEGAIDGRIPLLITSEFCSTTGIPVDCVGDEQKSNVGLFQNNSQRAFTDVNMGQVYNVVDDYEQQRIFSAVASGNTGIIRRHREVRNEQLSINSTQGTAQRRIRLSMATHGSNKTVKSESCAQEELYAKPVIAVGEKGSENHASDESATLTNDGNELQKTPESTGKRKISQQVTKAGSTLGLKDLFLLRRVPHISKASSNRTKCSSVFVLSAF

SEQ ID NO: 19810 - protein, 464 aa, Glycine max
MKKTLVFYTGRAPKGNRTNWVMHEYRPTLKELDGTNPGQNPYVLCRLFKKHDESLEVSHCDEAEPTASTPVAAYYSTEEIQSDLAVVAGSPSQVTEDDKHQSMIPAHSEEAISNVVTPVDRCTDGYDACDAQNQIELPTAEEFQPLNFDIYYDPRSELLDGKLFSPVLAHIQPEFHYQANIESDGRYGLQYGTNETNMSDFLNSVVNWDQVPFEDPNCQQQSYPLFNVKDNILNSDLDSELANMTCMQAGYAEGAIDGRIPLLITSEFCSTTGIPVDCVGDEQKSNVGLFQNNSQRAFTDVNMGQVYNVVDDYEQQRIFSAVASGNTGIIRRHREVRNEQLSINSTQGTAQRRIRLSMATHGSNKTVKSESCAQEELYAKPVIAVGEKGSENHASDESATLTNDGNELQKTPESTGKRKISQQVTKAGSTLGLKDLFLLRRVPHISKASSNRTKCSSVFVLSAF

SEQ ID NO: 19811 - protein, 443 aa, Glycine max
MHEYRPTLKELDGTNPGQNPYVLCRLFKKHDESLEVSHCDEAEPTASTPVAAYYSTEEIQSDLAVVAGSPSQVTEDDKHQSMIPAHSEEAISNVVTPVDRCTDGYDACDAQNQIELPTAEEFQPLNFDIYYDPRSELLDGKLFSPVLAHIQPEFHYQANIESDGRYGLQYGTNETNMSDFLNSVVNWDQVPFEDPNCQQQSYPLFNVKDNILNSDLDSELANMTCMQAGYAEGAIDGRIPLLITSEFCSTTGIPVDCVGDEQKSNVGLFQNNSQRAFTDVNMGQVYNVVDDYEQQRIFSAVASGNTGIIRRHREVRNEQLSINSTQGTAQRRIRLSMATHGSNKTVKSESCAQEELYAKPVIAVGEKGSENHASDESATLTNDGNELQKTPESTGKRKISQQVTKAGSTLGLKDLFLLRRVPHISKASSNRTKCSSVFVLSAF

SEQ ID NO: 19812 - DNA, 680 bp, Glycine max
aaatagcaagaatttcagaaatattttacatcatcacataaatggacgccggattcaagaccaccgaagaatgtattcaagctttcgacaagctcaagatgcataagaacgttagataccttgttttcaaagttgtcggcagtgaagtcgttttggaatcccaaggtgaaagaaacactgattgggaagaattcgttaaagccttacccagagaacaatccagatacgttgtctatgacttcagctacaagaccgaagacaagccccctagagacgtcagcaagttgatcttcatctactggtctcccgatgaggcacccgcaaaggataagatgctctccgccactgctaagggagctttcagaaaggctcttatgggagttgctagagatttccaagcaaaagatattagcgatctcgaatacaaggaagtcagagaaaagttgtaagtgtgaatatgggaatatttcacataaatatcctatgagatgaatcttggaggatttatttgtcttcttacggaagagtaatataaaaaccatttatttgaaactttgagatatatatgctataatcttatatgatacagtcttgcatacagtaaattttttgcaaggctcttatataagtatcctctctccctaaatctctcatgttaaaaaaagataaccctctaatac

SEQ ID NO: 19813 - protein, 135 aa, Glycine max
MDAGFKTTEECIQAFDKLKMHKNVRYLVFKVVGSEVVLESQGERNTDWEEFVKALPREQSRYVVYDFSYKTEDKPPRDVSKLIFIYWSPDEAPAKDKMLSATAKGAFRKALMGVARDFQAKDISDLEYKEVREKL

SEQ ID NO: 19814 - protein, 116 aa, Glycine max
MHKNVRYLVFKVVGSEVVLESQGERNTDWEEFVKALPREQSRYVVYDFSYKTEDKPPRDVSKLIFIYWSPDEAPAKDKMLSATAKGAFRKALMGVARDFQAKDISDLEYKEVREKL

SEQ ID NO: 19815 - DNA, 485 bp, Glycine max
atctctctagctgatgttgctaaaaaactgaggctgaactctgcaagtcctgttgcagatgctgagagcattgtatcaaaggctattcgtgatggtgcaattgatgctacattggatcatgccaatggttggatggtgtccaaagaaactggagatatttactccacaaatgagcctcagttagcctttaattctcggattgctttctgtcttaacatgcacaatgaggcggttcgagcacttcgatttccaccaaacacacacaaagagaaggaaagtgctgaaaagagaagagagagacaacagcaagagcaagagctggctaagcatattgcagaggaggatgacgatgatttctgataattgtttttttcaccctatgaattgctatctggataccttcatttccaacgtttgctcatcttttccttttgaagaactttcattatcatttcctttttcaaaaagtgaatttttcatttcct

SEQ ID NO: 19816 - protein, 119 aa, Glycine max
ISLADVAKKLRLNSASPVADAESIVSKAIRDGAIDATLDHANGWMVSKETGDIYSTNEPQLAFNSRIAFCLNMHNEAVRALRFPPNTHKEKESAEKRRERQQQEQELAKHIAEEDDDDF

SEQ ID NO: 19817 - protein, 87 aa, Glycine max
MRRFEHFDFHQTHTKRRKVLKREERDNSKSKSWLSILQRRMTMISDNCFFHPMNCYLDTFISNVCSSFPFEELSLSFPFSKSEFFIS

SEQ ID NO: 19818 - protein, 75 aa, Glycine max
MVSKETGDIYSTNEPQLAFNSRIAFCLNMHNEAVRALRFPPNTHKEKESAEKRRERQQQEQELAKHIAEEDDDDF

SEQ ID NO: 19819 - DNA, 1388 bp, Glycine max
gaagaaaacatctagctgaagattccaatcggagctcagaaaaaagaaacctaatcgccgatcgcgtcgccgtcgcgccgaaagtcaccggactactgcctgcttctaaatagcttataatcttatctgaagatagagatatcatcatgggagaggtggcagtaatgcattctgagcctctgcagtttgattgcaatgacatgaagcatatcactgagaaagatgtatataatctattgtcaaacgaagagcacatacttggagaagaatcaagtcaatcatcaaatgacaaaaagatcaatgatttgagagagagaggatacatgaagtatggatgtcaacattaccgaagaagatgccgtattagggccccctgttgtgatgagatttttgattgccgccattgtcacaatgaggcaaaaaataatatcaacattgaccagaagcatagacacgatattccccgccatcaagttaaacaggtgatatgttctctttgtgagacagaacaagaggttcagcaaaattgtattaactgtggcgtttgtatgggcaagtacttctgtgggacgtgtaagctctttgatgatgatgtatctaagcagcagtatcattgcagtggctgtggaatttgcagaactggaggatgtgaaaatttcttccactgccacaaatgtggttgttgctactcaactcagctgaaaaacagccacccttgcgtggaaggagcaatgcatcatgattgccccatttgctttgagtatttgtttgaatctgtgaatgatgtcactgttctgctctgtggacatacaatacataagagctgcctaaaggaaatgagggaacatttccagtatgcatgccctctctgcttgaagtcggtttgtgatatgtcaaaggtttgggagaaatttgacttggagattgctgctacaccaatgcctgaaccgtatcaaaacaaaatggtttggatcctttgcaatgattgtggcaaaagttctcacgtgcagttccatcttgttgctcaaaagtgcttgaactgcaagtcctacaacacacgggaaacaagaggctgagcaagtggtaatggttatttataggaccacttttgctctcacttcattgctgtgtaggtgtagtggcaatccaagtgcatcctttattgaggaaaatgcatgtgggaattgtcatttaattgcaggcaggccgaaccacatccaagagaaaaacggtttatcacgttgatgtggtgtcgagggtagtgtagagtcagcaattgtcgtgttggttatttcgtgttggggaaacccttttagtgttccagtgttcactcctgtaatgtttgtttgggattaatgccaactttcaaattagctgttactttatag

SEQ ID NO: 19820 - protein, 309 aa, Glycine max
MGEVAVMHSEPLQFDCNDMKHITEKDVYNLLSNEEHILGEESSQSSNDKKINDLRERGYMKYGCQHYRRRCRIRAPCCDEIFDCRHCHNEAKNNINIDQKHRHDIPRHQVKQVICSLCETEQEVQQNCINCGVCMGKYFCGTCKLFDDDVSKQQYHCSGCGICRTGGCENFFHCHKCGCCYSTQLKNSHPCVEGAMHHDCPICFEYLFESVNDVTVLLCGHTIHKSCLKEMREHFQYACPLCLKSVCDMSKVWEKFDLEIAATPMPEPYQNKMVWILCNDCGKSSHVQFHLVAQKCLNCKSYNTRETRG

SEQ ID NO: 19821 - protein, 303 aa, Glycine max
MHSEPLQFDCNDMKHITEKDVYNLLSNEEHILGEESSQSSNDKKINDLRERGYMKYGCQHYRRRCRIRAPCCDEIFDCRHCHNEAKNNINIDQKHRHDIPRHQVKQVICSLCETEQEVQQNCINCGVCMGKYFCGTCKLFDDDVSKQQYHCSGCGICRTGGCENFFHCHKCGCCYSTQLKNSHPCVEGAMHHDCPICFEYLFESVNDVTVLLCGHTIHKSCLKEMREHFQYACPLCLKSVCDMSKVWEKFDLEIAATPMPEPYQNKMVWILCNDCGKSSHVQFHLVAQKCLNCKSYNTRETRG

SEQ ID NO: 19822 - protein, 291 aa, Glycine max
MKHITEKDVYNLLSNEEHILGEESSQSSNDKKINDLRERGYMKYGCQHYRRRCRIRAPCCDEIFDCRHCHNEAKNNINIDQKHRHDIPRHQVKQVICSLCETEQEVQQNCINCGVCMGKYFCGTCKLFDDDVSKQQYHCSGCGICRTGGCENFFHCHKCGCCYSTQLKNSHPCVEGAMHHDCPICFEYLFESVNDVTVLLCGHTIHKSCLKEMREHFQYACPLCLKSVCDMSKVWEKFDLEIAATPMPEPYQNKMVWILCNDCGKSSHVQFHLVAQKCLNCKSYNTRETRG

SEQ ID NO: 19823 - DNA, 1245 bp, Glycine max
gaagcaaacaagagcatatggatctgtggagcctaaatgcctaaaccatgctgctcaatgcacaagcattactataagacaaacctcgccaaccccggaccggacgccaaccggtccaaccaaacatcacaccggttcgaaccggccttttccttccttatatcaatcactctcctacatccccccacttcatcaagctccaattatcaactctttcaaaagggagaagaaaaggaaaggaaacaaaacgcacaaaggattattatagcaatggcagaacaaaaccaaaaccagacaactgaagctggaaggcaccaagaggttggccacaagagccttctccagagtgatgctctttaccagtatattctggagaccagtgtctacccaagagaacctgaatccatgaaagaactgagagagttgacagcaaaacacccatggaacatcatgacaacctctgcagacgaagggcaattcttgaacatgctccttaagctcatcaatgccaagaacaccatggaaattggtgtctacactggatattcacttcttgccaccgctctcgctcttcctgaagatggaaagatcttggccatggatattaacagggagaattatgaattgggtttgccagtaattaagaaagctggtgttgaccacaaaattgaattcagagaaggtcctgctctcccagttcttgatgaaatggttaaagatgagaagaaccatgggagctatgacttcatctttgtggacgcagacaaggacaactacctcaactaccacaagaggttgatagagcttgtcaaagttgggggagtgatcgggtacgacaacaccctatggaacggctctgtggtggcacccccagatgctcctctcaggaagtacgttagatactacagggacttcgtgctcgagctcaacaaggcactcgctgtggaccccaggatcgagatttgcatgctcccggttggtgatggaatcactatatgccgtcggatcaagtgattctgattttctgataatcacacaatcgtggaccaagaccaccgttgcttcttctgcaccctagtgatgattggtcatcattgagtggcacctgctaatgcatttaaaagcaatcgatattttccttttatttttttttcttcaaaatatttgtgtttgtacttttcttttctctattattcatgtggaaaacggtggacaattaattatatgcaaatgactttttttctc

SEQ ID NO: 19824 - protein, 325 aa, Glycine max
MPKPCCSMHKHYYKTNLANPGPDANRSNQTSHRFEPAFSFLISITLLHPPTSSSSNYQLFQKGEEKERKQNAQRIIIAMAEQNQNQTTEAGRHQEVGHKSLLQSDALYQYILETSVYPREPESMKELRELTAKHPWNIMTTSADEGQFLNMLLKLINAKNTMEIGVYTGYSLLATALALPEDGKILAMDINRENYELGLPVIKKAGVDHKIEFREGPALPVLDEMVKDEKNHGSYDFIFVDADKDNYLNYHKRLIELVKVGGVIGYDNTLWNGSVVAPPDAPLRKYVRYYRDFVLELNKALAVDPRIEICMLPVGDGITICRRIK

SEQ ID NO: 19825 - protein, 318 aa, Glycine max
MHKHYYKTNLANPGPDANRSNQTSHRFEPAFSFLISITLLHPPTSSSSNYQLFQKGEEKERKQNAQRIIIAMAEQNQNQTTEAGRHQEVGHKSLLQSDALYQYILETSVYPREPESMKELRELTAKHPWNIMTTSADEGQFLNMLLKLINAKNTMEIGVYTGYSLLATALALPEDGKILAMDINRENYELGLPVIKKAGVDHKIEFREGPALPVLDEMVKDEKNHGSYDFIFVDADKDNYLNYHKRLIELVKVGGVIGYDNTLWNGSVVAPPDAPLRKYVRYYRDFVLELNKALAVDPRIEICMLPVGDGITICRRIK

SEQ ID NO: 19826 - protein, 247 aa, Glycine max
MAEQNQNQTTEAGRHQEVGHKSLLQSDALYQYILETSVYPREPESMKELRELTAKHPWNIMTTSADEGQFLNMLLKLINAKNTMEIGVYTGYSLLATALALPEDGKILAMDINRENYELGLPVIKKAGVDHKIEFREGPALPVLDEMVKDEKNHGSYDFIFVDADKDNYLNYHKRLIELVKVGGVIGYDNTLWNGSVVAPPDAPLRKYVRYYRDFVLELNKALAVDPRIEICMLPVGDGITICRRIK

SEQ ID NO: 19827 - DNA, 1148 bp, Glycine max
tatgagagcaaaagtggtgactattctaatccatggagactttgcaccgtgacacaggtggaagaattgaaaagtttgattcacatgtttccaatttgggctactgggatcatttttgctgcggtttatgcccagatgtcaacgttgtttgtggagcaaggaacaatgatgaacacatgtattggttccttcaaactacccccagcttccctctcaatttttgatgtcataagtgtggttttgtgggtccctctctatgacaggataattgttccaatcttaaggaagttcacaggcaaagaaaggggcctctcaatgctgcaaagaatgggaattggccttttcatttcagtcctgtgcatgttagcagctgctgttgttgagattatgcgtctgcagcttgcaagagagcttgaccttgttgataaacctgttgatgtgccccttagtgtactttggcaaatccctcagtatttctttttaggggcagcagaagtattcacatttgtggggcagcttgagttcttatatgaccaatctccatatggtatgaagactttaggtactgcactgacacttctgaatttttcattgggaaattacttgagctctttcattcttactatggtaacttacttcaccacactagatggaaagcctggttggattccagataacttgaacaaaggtcatctcgattactttttcttgcttttagctggacttagcttcttaaatatgtctttgtacatagttgctgccaaaaggtacaagcagaagaaggcttgttaagatttttcagggagtggaagcatgttctgaaatttccttctgtcattgattgttctgtttgtatatatgctacgcataaaagtaaacttggcttctctcaagagcctctaagggtgtatttggttcagaggagaaaaatagaagaattttttttaattaaaatagaatggaagaggtgtgagtctcaaaataaaatacaaaatttctcttgtatattatttctctccttcaaaacaaatacaccctaagtgagaaggttcacataggtaaattgttggcagtaaatgttcacattctgtacggtgcaaaactcacatatgtaacttgtatatggcatcagattatttgagctcagc

SEQ ID NO: 19828 - protein, 263 aa, Glycine max
YESKSGDYSNPWRLCTVTQVEELKSLIHMFPIWATGIIFAAVYAQMSTLFVEQGTMMNTCIGSFKLPPASLSIFDVISVVLWVPLYDRIIVPILRKFTGKERGLSMLQRMGIGLFISVLCMLAAAVVEIMRLQLARELDLVDKPVDVPLSVLWQIPQYFFLGAAEVFTFVGQLEFLYDQSPYGMKTLGTALTLLNFSLGNYLSSFILTMVTYFTTLDGKPGWIPDNLNKGHLDYFFLLLAGLSFLNMSLYIVAAKRYKQKKAC

SEQ ID NO: 19829 - protein, 235 aa, Glycine max
MFPIWATGIIFAAVYAQMSTLFVEQGTMMNTCIGSFKLPPASLSIFDVISVVLWVPLYDRIIVPILRKFTGKERGLSMLQRMGIGLFISVLCMLAAAVVEIMRLQLARELDLVDKPVDVPLSVLWQIPQYFFLGAAEVFTFVGQLEFLYDQSPYGMKTLGTALTLLNFSLGNYLSSFILTMVTYFTTLDGKPGWIPDNLNKGHLDYFFLLLAGLSFLNMSLYIVAAKRYKQKKAC

SEQ ID NO: 19830 - protein, 218 aa, Glycine max
MSTLFVEQGTMMNTCIGSFKLPPASLSIFDVISVVLWVPLYDRIIVPILRKFTGKERGLSMLQRMGIGLFISVLCMLAAAVVEIMRLQLARELDLVDKPVDVPLSVLWQIPQYFFLGAAEVFTFVGQLEFLYDQSPYGMKTLGTALTLLNFSLGNYLSSFILTMVTYFTTLDGKPGWIPDNLNKGHLDYFFLLLAGLSFLNMSLYIVAAKRYKQKKAC

SEQ ID NO: 19831 - DNA, 1428 bp, Glycine max
taaatgaatttcttcacgagcatcactatagtgttactgatgaatttgatgtctctgatcacattcaaatcagtgttgaggggaaaataaagcagacaatggagaaggccttttgggatggtatcatggaatctgtggaggtggaccatcccaactatgaccgaattgttcaacttatgggagaggttagggatgaaatttgtgagatggctccaaaaagctggaaggaggatatttttgctgcaatcgatttagaaattcttttgcaggtgctgaaatcaggtaacctggacattgattaccttgcaaaaattctcgagttttcactcgtcagtttgcagaagctctcagctccagcgaatgaggagatgatgaaggccgctcacaagaaactatttcatgaattgagtgaaatttgtcattcaagggatgagtcaaacaattcatgtgttgtagccttggtgaagggcttgcaatttgtcttcggacagattcagattcttaagaaagagataagcaaagcacgaataagattaatggagtctttggtgaaggggtctgctggtctggactaccttaggaatgcctttgctaacaaatatggatctccatctgatgccaatacctctctgccttcaacattgagatggatttcatctgtttggaattgcaaagatcaggaatgggaagaacatgtgagttcctcatcagcattggcttctaattcatcccaagaatggcttccttcaactactctcagaactgggggaagtattctgctcaaaacaactggcagtccgatggccttttctcctgatagtgcaaatgctaaaggtgatcagcagccagaatgtaaaggagaacaacttgatctaggtgtgaggcttggtttgctgaaattagtaagtggaatatctggcttgacacaagatgatctcccagaaactttatctcttaacttcccgaggctgaggtctgttcaggctcaaattcagaagattattgtgatttctacaagcattcttattcgcggtcaggttctcttgagtgaaaaggcagtagctaaccctgcagatatggaaaacttattgtctaagtgtgctgcacaactcttggatctcctaaaccgtgttgaagatgctgatattgaagacattgtagaagtgctctgcaattttcccacagttgaagttgaagatacggggaaacttgagtcaaggaaggtagttgctgctagtatgctaggaaagagcttacaagctggggatgttgttttcgagagggtgtttaatgctgtctattcagctttgcgcggcgttgtgcttggtggaagtgggatccgtgggaggaaattagcagaaatggctctcatgaaagttggggctggtattctgactgataaggtagtggaaactgctggtgttttga

SEQ ID NO: 19832 - protein, 475 aa, Glycine max
NEFLHEHHYSVTDEFDVSDHIQISVEGKIKQTMEKAFWDGIMESVEVDHPNYDRIVQLMGEVRDEICEMAPKSWKEDIFAAIDLEILLQVLKSGNLDIDYLAKILEFSLVSLQKLSAPANEEMMKAAHKKLFHELSEICHSRDESNNSCVVALVKGLQFVFGQIQILKKEISKARIRLMESLVKGSAGLDYLRNAFANKYGSPSDANTSLPSTLRWISSVWNCKDQEWEEHVSSSSALASNSSQEWLPSTTLRTGGSILLKTTGSPMAFSPDSANAKGDQQPECKGEQLDLGVRLGLLKLVSGISGLTQDDLPETLSLNFPRLRSVQAQIQKIIVISTSILIRGQVLLSEKAVANPADMENLLSKCAAQLLDLLNRVEDADIEDIVEVLCNFPTVEVEDTGKLESRKVVAASMLGKSLQAGDVVFERVFNAVYSALRGVVLGGSGIRGRKLAEMALMKVGAGILTDKVVETAGVL

SEQ ID NO: 19833 - protein, 443 aa, Glycine max
MEKAFWDGIMESVEVDHPNYDRIVQLMGEVRDEICEMAPKSWKEDIFAAIDLEILLQVLKSGNLDIDYLAKILEFSLVSLQKLSAPANEEMMKAAHKKLFHELSEICHSRDESNNSCVVALVKGLQFVFGQIQILKKEISKARIRLMESLVKGSAGLDYLRNAFANKYGSPSDANTSLPSTLRWISSVWNCKDQEWEEHVSSSSALASNSSQEWLPSTTLRTGGSILLKTTGSPMAFSPDSANAKGDQQPECKGEQLDLGVRLGLLKLVSGISGLTQDDLPETLSLNFPRLRSVQAQIQKIIVISTSILIRGQVLLSEKAVANPADMENLLSKCAAQLLDLLNRVEDADIEDIVEVLCNFPTVEVEDTGKLESRKVVAASMLGKSLQAGDVVFERVFNAVYSALRGVVLGGSGIRGRKLAEMALMKVGAGILTDKVVETAGVL

SEQ ID NO: 19834 - protein, 434 aa, Glycine max
MESVEVDHPNYDRIVQLMGEVRDEICEMAPKSWKEDIFAAIDLEILLQVLKSGNLDIDYLAKILEFSLVSLQKLSAPANEEMMKAAHKKLFHELSEICHSRDESNNSCVVALVKGLQFVFGQIQILKKEISKARIRLMESLVKGSAGLDYLRNAFANKYGSPSDANTSLPSTLRWISSVWNCKDQEWEEHVSSSSALASNSSQEWLPSTTLRTGGSILLKTTGSPMAFSPDSANAKGDQQPECKGEQLDLGVRLGLLKLVSGISGLTQDDLPETLSLNFPRLRSVQAQIQKIIVISTSILIRGQVLLSEKAVANPADMENLLSKCAAQLLDLLNRVEDADIEDIVEVLCNFPTVEVEDTGKLESRKVVAASMLGKSLQAGDVVFERVFNAVYSALRGVVLGGSGIRGRKLAEMALMKVGAGILTDKVVETAGVL

SEQ ID NO: 19835 - DNA, 1364 bp, Glycine max
gattcatctccgtcggcctcgccgacacgaaaccgtagacgaataactccaacaattctcagttctttctttaatattttgagaggagcaccaggaatcgtttggcactaaagagaaagtgagagagggagatgaaataagttcgtactgaagatggcgtcgaggcaaatggaagagattcggaagaaattggctgaccttaattacccgagagcgaatgcccctgcacagtccctcctatttgctggcatggagcgctatgcccttctagagtggctcttctttcggcttttaggtgataagtcacccttttctcaacaaaacatacaaggggatggccttgatcgtgatgaggagacaggtcgaattcagtatttggctgagattgctaagtttctgggtattacaacaactgtagatacagatgccattcaggggcatggaagctatgaagaccgtactgcaatgcttcgtcttattgtagatctagtggacgcaacaatatgcgcagataatccagaatggagtgttgacgagcaggtagccaaggacatccaattaatagactccattgcagaaaaacaagctcaaatattttctgaagaatgtaaattgtttcctgcagatgttcagattcagtccatatatccattgccagatgtttctgagctggagttgaagttttctgaacaatcaaaaatattgttgaatcttcaacaaaaagttgatgacttggcatccaagcatgcttacaatcctgatgaggagtatactgaggtggaatcccaattgcgggcacatttggaatcttttctagaaacagctagaacattcaatttgatttacaccaaggaaattcgtccatggacacacatgatggaggttccgcaacttcatggatttggaccagctgccaatcgtttattggaggcctataaaatgcttttgaagtttttgggcaacctacggaatcttagggactcacatgcagcacttgccttcggttcttctgagacatccgacgggccttcatctgtcacacgaataatctctgaatgtgaatctgcattgacagtcttaaatcgtgatcttggaattctctctgcttccattgctcgtgaacaggtagagaagatgaacatttgacgaaacatgagaaacaagttattaatccttattcttttggattttgtgaacttgtgcataatgttcatattgttgacatgatgtgtgctgatgtgaagtcagcacggttgtcagactgggtctatgtaaacttgtggagggtctgaagtgtgacacatagacttcacttgtaaactgagaagagtatagctaatacaaaaatattattaaaaaacctg

SEQ ID NO: 19836 - protein, 330 aa, Glycine max
MASRQMEEIRKKLADLNYPRANAPAQSLLFAGMERYALLEWLFFRLLGDKSPFSQQNIQGDGLDRDEETGRIQYLAEIAKFLGITTTVDTDAIQGHGSYEDRTAMLRLIVDLVDATICADNPEWSVDEQVAKDIQLIDSIAEKQAQIFSEECKLFPADVQIQSIYPLPDVSELELKFSEQSKILLNLQQKVDDLASKHAYNPDEEYTEVESQLRAHLESFLETARTFNLIYTKEIRPWTHMMEVPQLHGFGPAANRLLEAYKMLLKFLGNLRNLRDSHAALAFGSSETSDGPSSVTRIISECESALTVLNRDLGILSASIAREQVEKMNI

SEQ ID NO: 19837 - protein, 325 aa, Glycine max
MEEIRKKLADLNYPRANAPAQSLLFAGMERYALLEWLFFRLLGDKSPFSQQNIQGDGLDRDEETGRIQYLAEIAKFLGITTTVDTDAIQGHGSYEDRTAMLRLIVDLVDATICADNPEWSVDEQVAKDIQLIDSIAEKQAQIFSEECKLFPADVQIQSIYPLPDVSELELKFSEQSKILLNLQQKVDDLASKHAYNPDEEYTEVESQLRAHLESFLETARTFNLIYTKEIRPWTHMMEVPQLHGFGPAANRLLEAYKMLLKFLGNLRNLRDSHAALAFGSSETSDGPSSVTRIISECESALTVLNRDLGILSASIAREQVEKMNI

SEQ ID NO: 19838 - protein, 298 aa, Glycine max
MERYALLEWLFFRLLGDKSPFSQQNIQGDGLDRDEETGRIQYLAEIAKFLGITTTVDTDAIQGHGSYEDRTAMLRLIVDLVDATICADNPEWSVDEQVAKDIQLIDSIAEKQAQIFSEECKLFPADVQIQSIYPLPDVSELELKFSEQSKILLNLQQKVDDLASKHAYNPDEEYTEVESQLRAHLESFLETARTFNLIYTKEIRPWTHMMEVPQLHGFGPAANRLLEAYKMLLKFLGNLRNLRDSHAALAFGSSETSDGPSSVTRIISECESALTVLNRDLGILSASIAREQVEKMNI

SEQ ID NO: 19839 - DNA, 1382 bp, Glycine max
gttagaatcgaaactccacagtccagtgagaggaagagaaagcatgaagttcacagactcgccggtgatcgagcttgcggtgaacgacgccgttctgtcgcttcagcaagacaacgggtccatgcacgtgggaaccaccgtgtggccatgctccctcgtcctcgtcaaattcgcggagcgctggggcccaccctctgacaacaacccctacgctcgcgtgctcgacttccaaggcaagcgggccgtggagctcggcacgggctgcggcgtggcgggaatgggcctctacctgttgggcctgacggacctgctcctcaccgacatcgcacccgtcatgccggccctgaagcgcaacctgaaagtcaacaagcccatcctccgcaaggccctcaaacactccgtgctctactggaacaacccgcagcagatcgctgccctaaatcctcccttcgatttcgttatcgcaaccgatgtcgtttacattccggaatctgttccttccttggtttctgcaatggaaaccctcgtctctgacgacggcgtcgttttgcttgggtaccagcttagggcacccgaggcgcacgagcttttctgggaactgtgtcaacaagtcttccacgttgagaaagtcccgcacgagcatctgcatcccgattacgcttacgaagaaaccgatgtttatctgttgaagaagaaaaacaagaaacagtgactgattatagctaatagggtgtgatagaaagttgttagccgtggtgtttatgttgacccttcaaatgattgccaacaaaggatcctggaatatacctgagacgcgtgtgcttgctgctgtttttgtctttgtttttctgagctttaggctcccttgacataagggggaaaaagttagtgaatggagggtattaaatatgagagtaaagctacctatatctaattgttacataaattttattatttaatcatagctcatttaaccttctttttaatcattaatattcggattctggtatatgtcccatgtgtgagtaggagtgtgcagacctggtttgcaatacatctcattgtaaataaatgaatatgcaaatcataggcaaatacaaatttcttatggttgaaggtatggctctgcaagacttggtttggtggcataaagtagtagacttgattgcaccacaagtcaatacaccatcagtattattttattttagtacaaacaagctaccgaatggcagatggtgaatagtctgccactgatgtaagaacaagaccgagaagaagacgcagatgaagagaagctgactatttatgtgtgcactttgccctttctgtatacaaagataattttgatttcatgcatcatcgaatataaatgttagttaatc

SEQ ID NO: 19840 - protein, 236 aa, Glycine max
LESKLHSPVRGRESMKFTDSPVIELAVNDAVLSLQQDNGSMHVGTTVWPCSLVLVKFAERWGPPSDNNPYARVLDFQGKRAVELGTGCGVAGMGLYLLGLTDLLLTDIAPVMPALKRNLKVNKPILRKALKHSVLYWNNPQQIAALNPPFDFVIATDVVYIPESVPSLVSAMETLVSDDGVVLLGYQLRAPEAHELFWELCQQVFHVEKVPHEHLHPDYAYEETDVYLLKKKNKKQ

SEQ ID NO: 19841 - protein, 222 aa, Glycine max
MKFTDSPVIELAVNDAVLSLQQDNGSMHVGTTVWPCSLVLVKFAERWGPPSDNNPYARVLDFQGKRAVELGTGCGVAGMGLYLLGLTDLLLTDIAPVMPALKRNLKVNKPILRKALKHSVLYWNNPQQIAALNPPFDFVIATDVVYIPESVPSLVSAMETLVSDDGVVLLGYQLRAPEAHELFWELCQQVFHVEKVPHEHLHPDYAYEETDVYLLKKKNKKQ

SEQ ID NO: 19842 - protein, 196 aa, Glycine max
MHVGTTVWPCSLVLVKFAERWGPPSDNNPYARVLDFQGKRAVELGTGCGVAGMGLYLLGLTDLLLTDIAPVMPALKRNLKVNKPILRKALKHSVLYWNNPQQIAALNPPFDFVIATDVVYIPESVPSLVSAMETLVSDDGVVLLGYQLRAPEAHELFWELCQQVFHVEKVPHEHLHPDYAYEETDVYLLKKKNKKQ

SEQ ID NO: 19843 - DNA, 1396 bp, Glycine max
ccccgagcaaaagggttgtgattaatcaggaaaagctattgcttgggagaaagaaggacaaccttgtaagatggctcaggctatagtgaacttcatagtgcaaagtcttggtgatttgctcattcaagaagcagtgttcctatatggggtggaagacaaagtgttgcagctgcaaactgaattgaggatgatgaggtcttacttgcaagatgcagatagaaagcaagatggtaatgaaaggctaaggaattggatttcagaaatcagagaagctgcttatgattctgatgatgtcattgagtcatatgccctcagaggagcttcaagaagaaatttgactggtgttttgagcctcatcaaaaggtatgctttaaacatcaacaaattcatagaaacccacaaggtgggatctcatgttgataatgtcatagctaggatttctagcctcacaaagagtttggaaacttatggcataaggcctgaggaaggagaagcctcaaattctatgcatgggaagcaaagatctttgagctcctactcacatgttattgaagaggacataattggtgttcaagatgatgttaggattttggagttatgtttggttgaccccaacaaaggctatagagtagtagccatttgtggaatggggggtttggggaaaacaacattggcaaagaaggtgtaccatagtcttgatgtgaagagcaattttgagagcttggcttgggcctacgtatcacagcattgccaagcaagggatgtgtgggaaggaattttgtttcagcttatctctccttctcaagagcaaagacaagaaattgccaatatgagagatgaggagcttgcaaggacgctttaccaagttcaagaggagaagagttgcttagtggtccttgatgatatttggagtgtagacacatggaggaaactgagtcctgctttccctaatggaatatcaccaccagtagttggtagcaaaatagtgttgactactcgaaacatcgatgttccattgaagatggatcctagttgttatcttcacgaaccaaaatgtttgaatgaacatgacagctgggagttgttccaaaagaaggcatttccaaaaattgatgatccagactacatacagaagcagaacttgggaagggaaatggttggaagatgtggaggtttaccattggccatcattgtgcttggaggactattagcatcaaagactaaattctatgattgggatactgtgtataagaacatcaattcatatttgaggagagcagaaggccaagaacaacgcttaggagaggtgttggctttgagttattacgaattaccataccagttgaagccatgcttcctacacttagcccatttcccagaaaatttagagatacct

SEQ ID NO: 19844 - protein, 442 aa, Glycine max
MAQAIVNFIVQSLGDLLIQEAVFLYGVEDKVLQLQTELRMMRSYLQDADRKQDGNERLRNWISEIREAAYDSDDVIESYALRGASRRNLTGVLSLIKRYALNINKFIETHKVGSHVDNVIARISSLTKSLETYGIRPEEGEASNSMHGKQRSLSSYSHVIEEDIIGVQDDVRILELCLVDPNKGYRVVAICGMGGLGKTTLAKKVYHSLDVKSNFESLAWAYVSQHCQARDVWEGILFQLISPSQEQRQEIANMRDEELARTLYQVQEEKSCLVVLDDIWSVDTWRKLSPAFPNGISPPVVGSKIVLTTRNIDVPLKMDPSCYLHEPKCLNEHDSWELFQKKAFPKIDDPDYIQKQNLGREMVGRCGGLPLAIIVLGGLLASKTKFYDWDTVYKNINSYLRRAEGQEQRLGEVLALSYYELPYQLKPCFLHLAHFPENLEIP

SEQ ID NO: 19845 - protein, 403 aa, Glycine max
MMRSYLQDADRKQDGNERLRNWISEIREAAYDSDDVIESYALRGASRRNLTGVLSLIKRYALNINKFIETHKVGSHVDNVIARISSLTKSLETYGIRPEEGEASNSMHGKQRSLSSYSHVIEEDIIGVQDDVRILELCLVDPNKGYRVVAICGMGGLGKTTLAKKVYHSLDVKSNFESLAWAYVSQHCQARDVWEGILFQLISPSQEQRQEIANMRDEELARTLYQVQEEKSCLVVLDDIWSVDTWRKLSPAFPNGISPPVVGSKIVLTTRNIDVPLKMDPSCYLHEPKCLNEHDSWELFQKKAFPKIDDPDYIQKQNLGREMVGRCGGLPLAIIVLGGLLASKTKFYDWDTVYKNINSYLRRAEGQEQRLGEVLALSYYELPYQLKPCFLHLAHFPENLEIP

SEQ ID NO: 19846 - protein, 402 aa, Glycine max
MRSYLQDADRKQDGNERLRNWISEIREAAYDSDDVIESYALRGASRRNLTGVLSLIKRYALNINKFIETHKVGSHVDNVIARISSLTKSLETYGIRPEEGEASNSMHGKQRSLSSYSHVIEEDIIGVQDDVRILELCLVDPNKGYRVVAICGMGGLGKTTLAKKVYHSLDVKSNFESLAWAYVSQHCQARDVWEGILFQLISPSQEQRQEIANMRDEELARTLYQVQEEKSCLVVLDDIWSVDTWRKLSPAFPNGISPPVVGSKIVLTTRNIDVPLKMDPSCYLHEPKCLNEHDSWELFQKKAFPKIDDPDYIQKQNLGREMVGRCGGLPLAIIVLGGLLASKTKFYDWDTVYKNINSYLRRAEGQEQRLGEVLALSYYELPYQLKPCFLHLAHFPENLEIP

SEQ ID NO: 19847 - DNA, 1049 bp, Glycine max
tttttttattatttgcaaataatgttcagggtttgtgacgtgagacgtttgagatcattgccccctctcttttctagaatgttctcttcggagcctgttcttacacaagagaccatcaaccagcatgtggtgaaggccgaatatgctgttcgtggagagctcgtattacttgctaacaagcaccagaaaaccatgcagcaaaatcctaatcactctctccctttcaaagagatcatttattgcaatattggaaatccacaaatcctaggacagaaacctctcacttttttccgccaggtcaccgcgtgctgtgaatatcctgctcttttggatcttcctaatgtgatgccagaagatgtgaaagagagagctaagaaattactcgcctctatgggaaatagcactggagcttatagcagcagccagggagttcctattgttcttaataacgttgctaaattcatcgaagagagagatggacatccagcaaatgcagaagatatttttctcactgatggtgcgagtgtgggagtgcagagaatgcttcgtttattaataagagatgataaagatggtattttaattcctattcctcaatatcctctctattctgcaacgattgatttgtatggaggtcagcgcgtggggtattatttaaatgaagaggcaaattggagattagatactccccaattggagaaggctttggatgaggccaaaaagaaaggaattaatacaagagctttggttgttattaatcctggaaatcccactggaaataccatggaccgcaaggctatggaagaggtcgtggatttctgctacagaaataaattaatcttaatggctgacgaagtgtaccaagacaatatctacaaagagggccaatcatttatttcatttaaaaaagtattaagagaaatggaagaaaaatatcaaaaattagaacttgtctcttttcactctgtttctaagggattttatggagaatgtggaaagagaggaggatatttagaaatggtaaacatcagcgaacccgtcaaagagca

SEQ ID NO: 19848 - protein, 349 aa, Glycine max
FFYYLQIMFRVCDVRRLRSLPPLFSRMFSSEPVLTQETINQHVVKAEYAVRGELVLLANKHQKTMQQNPNHSLPFKEIIYCNIGNPQILGQKPLTFFRQVTACCEYPALLDLPNVMPEDVKERAKKLLASMGNSTGAYSSSQGVPIVLNNVAKFIEERDGHPANAEDIFLTDGASVGVQRMLRLLIRDDKDGILIPIPQYPLYSATIDLYGGQRVGYYLNEEANWRLDTPQLEKALDEAKKKGINTRALVVINPGNPTGNTMDRKAMEEVVDFCYRNKLILMADEVYQDNIYKEGQSFISFKKVLREMEEKYQKLELVSFHSVSKGFYGECGKRGGYLEMVNISEPVKE

SEQ ID NO: 19849 - protein, 342 aa, Glycine max
MFRVCDVRRLRSLPPLFSRMFSSEPVLTQETINQHVVKAEYAVRGELVLLANKHQKTMQQNPNHSLPFKEIIYCNIGNPQILGQKPLTFFRQVTACCEYPALLDLPNVMPEDVKERAKKLLASMGNSTGAYSSSQGVPIVLNNVAKFIEERDGHPANAEDIFLTDGASVGVQRMLRLLIRDDKDGILIPIPQYPLYSATIDLYGGQRVGYYLNEEANWRLDTPQLEKALDEAKKKGINTRALVVINPGNPTGNTMDRKAMEEVVDFCYRNKLILMADEVYQDNIYKEGQSFISFKKVLREMEEKYQKLELVSFHSVSKGFYGECGKRGGYLEMVNISEPVKE

SEQ ID NO: 19850 - protein, 323 aa, Glycine max
MFSSEPVLTQETINQHVVKAEYAVRGELVLLANKHQKTMQQNPNHSLPFKEIIYCNIGNPQILGQKPLTFFRQVTACCEYPALLDLPNVMPEDVKERAKKLLASMGNSTGAYSSSQGVPIVLNNVAKFIEERDGHPANAEDIFLTDGASVGVQRMLRLLIRDDKDGILIPIPQYPLYSATIDLYGGQRVGYYLNEEANWRLDTPQLEKALDEAKKKGINTRALVVINPGNPTGNTMDRKAMEEVVDFCYRNKLILMADEVYQDNIYKEGQSFISFKKVLREMEEKYQKLELVSFHSVSKGFYGECGKRGGYLEMVNISEPVKE

SEQ ID NO: 19851 - DNA, 1367 bp, Glycine max
atttttgtactctgtgtacttctccttcagagtttgggtttgcaaatttgcattcgtactgaaggatgaggaagaatgggtggcagctaccttatcatcctctccaggtggtggctattgctgtgtttatggctctggggtttgccttctatgtgttctttgctccttttgttgggaagaagatgtatcagtatgttgttatgggtctctacacacccctgatcacttgtgtctttggattgtacatttggtgtgcagcatctgaccctgcagatcctggggttttcaagtccaaaaaatatcttaaaattccagatagcaaaaagcttgatggactcaagaattctaaactaggaggcgaatcaacttcgtcaatgcatgatggaaatgcttcaactgttggaccaaaatcggtcgataaggaagaattgggaactgaagcaagttttaaagatgctgctatttctacagagaagaaaaatgcatcatcaccttctttgtcccgtctcctattggtttgctctccttgtgcttatatatgtggttgctcaagttcaagtaacgaatcttctgatcaacaagcaagtgaagatggcatgttctattgcagtttgtgtgaagttgaggtcttcaagtatagcaagcattgtagagtttgtgacaagtgtgttgatcgctttgatcatcattgcaggtggctgaacaactgtattgggaaaaggaactacagaaaatttttcacccttatggttgcttctctcctcttggtatgtgcatggtttgtgcaccttgggcttgggattgcagcttattcttcagtggttgactgggatacttgtgcttatctgctgttttgttgagaagaagaaattttctgtggatatctcctccaaattggggagcagtttctctctggttcccttcgttattgtggtggcagtttgcaccattttggctatgattgctaccctaccccttgctcagctgttcttctttcatattcttctcattaaaaagggaatcaccacatatgattacatcatagctttgagggagcaggagcaggagcaacaaggcattggaggtcagcagagtccccaaatgtcgcctgttagctcccttactggaatgagcagtgcaagctctttttctactttccatcgtggagcatggtgcacacccccgcgtctgttccttgaagatcagcttgatgtagtgcccccagaaacggcttctgtaagttcactgggaaagaagacaatgagagacgagccggttaagaaaaagaatcccggagcagtcaaaatcagtccatggacgctggcacggttgaatgcagaagaggtttccaaggctgctgcagaagc

SEQ ID NO: 19852 - protein, 264 aa, Glycine max
MRKNGWQLPYHPLQVVAIAVFMALGFAFYVFFAPFVGKKMYQYVVMGLYTPLITCVFGLYIWCAASDPADPGVFKSKKYLKIPDSKKLDGLKNSKLGGESTSSMHDGNASTVGPKSVDKEELGTEASFKDAAISTEKKNASSPSLSRLLLVCSPCAYICGCSSSSNESSDQQASEDGMFYCSLCEVEVFKYSKHCRVCDKCVDRFDHHCRWLNNCIGKRNYRKFFTLMVASLLLVCAWFVHLGLGIAAYSSVVDWDTCAYLLFC

SEQ ID NO: 19853 - protein, 243 aa, Glycine max
MALGFAFYVFFAPFVGKKMYQYVVMGLYTPLITCVFGLYIWCAASDPADPGVFKSKKYLKIPDSKKLDGLKNSKLGGESTSSMHDGNASTVGPKSVDKEELGTEASFKDAAISTEKKNASSPSLSRLLLVCSPCAYICGCSSSSNESSDQQASEDGMFYCSLCEVEVFKYSKHCRVCDKCVDRFDHHCRWLNNCIGKRNYRKFFTLMVASLLLVCAWFVHLGLGIAAYSSVVDWDTCAYLLFC

SEQ ID NO: 19854 - protein, 225 aa, Glycine max
MYQYVVMGLYTPLITCVFGLYIWCAASDPADPGVFKSKKYLKIPDSKKLDGLKNSKLGGESTSSMHDGNASTVGPKSVDKEELGTEASFKDAAISTEKKNASSPSLSRLLLVCSPCAYICGCSSSSNESSDQQASEDGMFYCSLCEVEVFKYSKHCRVCDKCVDRFDHHCRWLNNCIGKRNYRKFFTLMVASLLLVCAWFVHLGLGIAAYSSVVDWDTCAYLLFC

SEQ ID NO: 19855 - DNA, 1319 bp, Glycine max
ggttctctctctctctctcttatttgcttcttcgagtttcacagccaagtcgtaaaagggtttcaagggatggaaaacatgcagagcttctggcaattgggtgatgaactccgtgggcactcaaaagcatcggaggatcacaagtggttaatggttgcctcgaaactggccgaacagacaagattgaagggggagcgtgtgaacaaccttgatctttcaaagggacccattgaaacaaggtcaagggataaatttgggttccaggaagagaacaaatttgattctcttaacttgagcatgttgaacctggactctaaatttactgagaatgtgagcaaaagctcacttcgaaatggtgtttatggtatgaatgcagtgtatcagaaaaacaatgcaaacttggtgagtaatgtgatcagtaacaagtacaatggcagtattcagcataacaaagagatcaacaacaacactggcaacaacatcaacaccaatgaaagcaacaacacaaatgcaactgacaaaaggtttaagaccttgcctgctgcggagacactcccccgcaatgaggtgcttggaggatacatctttgtctgtaacaatgacacaatgcaggaagacttgaaacgtcagctatttggtttgcctccaaggtatcgagattctgttagggcaataacaccagggctacctttatttctttataactatactactcatcagctgcatggtatttttgaggcagcaagttttggtggctctaacatagatccaactgcctgggaggataaaaaatgcaaaggggaatcaaggtttccagctcaggtaagaatccgtgtcaggaagctctgcaaggcattggaagaagattctttcaggccagtattgcatcattatgacgggccaaagtttcgtcttgaactgtcagttccagagactctggatctgttggacctatgtgaacaagctggttcagcagcataagcaagaatcaaacaaagaatgaatgtgcaaaataggtaggttttggtgtgccagctgtgtggttttggcagattttccgtgaagcgtaagcttggaaagtgaatcatcatcatgttttgggggaagtaaagggagcgtgttgttgagagtgagagaccctttgttggtgaataaatggttgttgtggtatctatcccctggaagatgctttgtagctgttacatgacatttaatacctttgtatgattaagtaaagtacagactactgtttgtactgctaaagtatgtatctgttgaaccaagaaaaaaattaaagttaaaaagcttcatgtattacc

SEQ ID NO: 19856 - protein, 326 aa, Glycine max
GSLSLSLICFFEFHSQVVKGFQGMENMQSFWQLGDELRGHSKASEDHKWLMVASKLAEQTRLKGERVNNLDLSKGPIETRSRDKFGFQEENKFDSLNLSMLNLDSKFTENVSKSSLRNGVYGMNAVYQKNNANLVSNVISNKYNGSIQHNKEINNNTGNNINTNESNNTNATDKRFKTLPAAETLPRNEVLGGYIFVCNNDTMQEDLKRQLFGLPPRYRDSVRAITPGLPLFLYNYTTHQLHGIFEAASFGGSNIDPTAWEDKKCKGESRFPAQVRIRVRKLCKALEEDSFRPVLHHYDGPKFRLELSVPETLDLLDLCEQAGSAA

SEQ ID NO: 19857 - protein, 303 aa, Glycine max
MENMQSFWQLGDELRGHSKASEDHKWLMVASKLAEQTRLKGERVNNLDLSKGPIETRSRDKFGFQEENKFDSLNLSMLNLDSKFTENVSKSSLRNGVYGMNAVYQKNNANLVSNVISNKYNGSIQHNKEINNNTGNNINTNESNNTNATDKRFKTLPAAETLPRNEVLGGYIFVCNNDTMQEDLKRQLFGLPPRYRDSVRAITPGLPLFLYNYTTHQLHGIFEAASFGGSNIDPTAWEDKKCKGESRFPAQVRIRVRKLCKALEEDSFRPVLHHYDGPKFRLELSVPETLDLLDLCEQAGSAA

SEQ ID NO: 19858 - protein, 300 aa, Glycine max
MQSFWQLGDELRGHSKASEDHKWLMVASKLAEQTRLKGERVNNLDLSKGPIETRSRDKFGFQEENKFDSLNLSMLNLDSKFTENVSKSSLRNGVYGMNAVYQKNNANLVSNVISNKYNGSIQHNKEINNNTGNNINTNESNNTNATDKRFKTLPAAETLPRNEVLGGYIFVCNNDTMQEDLKRQLFGLPPRYRDSVRAITPGLPLFLYNYTTHQLHGIFEAASFGGSNIDPTAWEDKKCKGESRFPAQVRIRVRKLCKALEEDSFRPVLHHYDGPKFRLELSVPETLDLLDLCEQAGSAA

SEQ ID NO: 19859 - DNA, 1100 bp, Glycine max
aaggagttttatacggattccaatggaagagattttctaaaacgagttcgagatcatagggaagattggcctctgcaagtaactcaaccagtagcaggaaactattatccaattaatcttggaatttatactaaggataagaaatctgagttctcagtcttagttgatcgtgccactggtggagccagcatcaaagatggtgaggtggaattgatgcttcataggcgtattctccatgatgatagtcgaggagttggggaaccacttgatgaacaagtttgcgtgaacaacaataatacatgtgaaggactaacagtcagaggaaattattatatcagcatccacaagcttggagctggttcacgctggcgtcgtacaactggtcaggaaatttattctccattcttagtggctttcacacatgagaactcggaaaactggaagtcctctcatttgacaaaaggaactatcatggatccaaattacagcttgcctcccaatattgctctgataactcttgaggagttggatggtggaattgtgcttctccgtttggcacatctatacgagccaagtgaagatgctgagtattcaactcttaccaaagttgaactaaagaagttgtttgccatgaaaacgataaaggagttgaaggaggtaagtttgtcatctaaccaagagaagtcagaaatgaagaggatgacatggaaggttgaaggggacaaaggacaagaacctctggcaattaggggtggccctgtcagctatcacaatttggttgttgagcttggccccatggaaatacgaactttccttttgaaattttaaaatgggtcaaatcatcattgatgattttatttgaaggaaaaataaacatgtttgatcacatgatttttacccttgtaaaaaatggtagagggagaccaagaatgattttgggggaaaacattaaaagaaatgagtaaagatcctctccaatgacgggaaataatatttttgagaatttggttcttaaccaaatctaactcagataataatgtaaccatcccgtctaatgaaataagattattgttgttgtcatattgttatcgtcaaaaaat

SEQ ID NO: 19860 - protein, 275 aa, Glycine max
KEFYTDSNGRDFLKRVRDHREDWPLQVTQPVAGNYYPINLGIYTKDKKSEFSVLVDRATGGASIKDGEVELMLHRRILHDDSRGVGEPLDEQVCVNNNNTCEGLTVRGNYYISIHKLGAGSRWRRTTGQEIYSPFLVAFTHENSENWKSSHLTKGTIMDPNYSLPPNIALITLEELDGGIVLLRLAHLYEPSEDAEYSTLTKVELKKLFAMKTIKELKEVSLSSNQEKSEMKRMTWKVEGDKGQEPLAIRGGPVSYHNLVVELGPMEIRTFLLKF

SEQ ID NO: 19861 - protein, 204 aa, Glycine max
MLHRRILHDDSRGVGEPLDEQVCVNNNNTCEGLTVRGNYYISIHKLGAGSRWRRTTGQEIYSPFLVAFTHENSENWKSSHLTKGTIMDPNYSLPPNIALITLEELDGGIVLLRLAHLYEPSEDAEYSTLTKVELKKLFAMKTIKELKEVSLSSNQEKSEMKRMTWKVEGDKGQEPLAIRGGPVSYHNLVVELGPMEIRTFLLKF

SEQ ID NO: 19862 - DNA, 940 bp, Glycine max
gtactgcttacattgagaaattagattgaaaatcaaattcatctctatccattaatattcaatactcttttttctttttttctggctcctttggcctctgttctgtgttcagtcttcaaccacctcaacacatagacgacgcgccacttgtttttgctccaaaccgccctctgattcccgaacccaatgacttctccgctggtggcggagggcgccgccgtcacggcgttccgatcggtgatgctccgggtgcagcaggcggcggagagatccgggtccaaacccgaccgggtccgggtcgtggcggtttccaagacgaaacccgtcactctgattcaacaactctacgacgccggtcaccgacacttcggcgaaaactacgtccaagaaatcattgaaaaagctcctcagcttcccccagacgttgagtggcatttcattgggcatttgcaaagcaacaaagtcaaaacacttttgggtggagttccaaatctggccatggttgagagtgtggacaatcagaagatagcaaataatcttgaccgtatggtatcaacccttggaagaaatcctctgaaggttttggtgcaagtaaatacaagtggagaagaatccaaatctggtattgatccttccgattgtgttgagcttgcaaaacatgtgaaattgagctgcccaaacctagtgttctctggcctaatgacgataggaatgccagactatacctcaactccacagaactttcagacactatcaaattgcagaactgaagtatgcaaggcacttgaaatgcccgaggaggaatgtgaactgtcaatgggcatgtctggtgattttgagttagcgattgaaatgggtagtaccaatgtaagaattggatccacaatatttggaccgagggagtatgcaaagaaacagtaatagcaagaagttgtaatcc

SEQ ID NO: 19863 - protein, 244 aa, Glycine max
MTSPLVAEGAAVTAFRSVMLRVQQAAERSGSKPDRVRVVAVSKTKPVTLIQQLYDAGHRHFGENYVQEIIEKAPQLPPDVEWHFIGHLQSNKVKTLLGGVPNLAMVESVDNQKIANNLDRMVSTLGRNPLKVLVQVNTSGEESKSGIDPSDCVELAKHVKLSCPNLVFSGLMTIGMPDYTSTPQNFQTLSNCRTEVCKALEMPEEECELSMGMSGDFELAIEMGSTNVRIGSTIFGPREYAKKQ

SEQ ID NO: 19864 - protein, 226 aa, Glycine max
MLRVQQAAERSGSKPDRVRVVAVSKTKPVTLIQQLYDAGHRHFGENYVQEIIEKAPQLPPDVEWHFIGHLQSNKVKTLLGGVPNLAMVESVDNQKIANNLDRMVSTLGRNPLKVLVQVNTSGEESKSGIDPSDCVELAKHVKLSCPNLVFSGLMTIGMPDYTSTPQNFQTLSNCRTEVCKALEMPEEECELSMGMSGDFELAIEMGSTNVRIGSTIFGPREYAKKQ

SEQ ID NO: 19865 - protein, 140 aa, Glycine max
MVESVDNQKIANNLDRMVSTLGRNPLKVLVQVNTSGEESKSGIDPSDCVELAKHVKLSCPNLVFSGLMTIGMPDYTSTPQNFQTLSNCRTEVCKALEMPEEECELSMGMSGDFELAIEMGSTNVRIGSTIFGPREYAKKQ

SEQ ID NO: 19866 - DNA, 1309 bp, Glycine max
gaaatcattctcccacctcttcgacatggacctcgtcgacaagaaggatgttctcgtcggagactttgtccccagcgtcgccttcaccggaaacatgagagtcggcgtttaccaggacactaccgaacctcaacattccaaggtgaagaactacatcatggatattctgaaaagaagctcaggcatatgggtatcagaactagaatcaaacctagacacactgtgggacaacatcgaagcatcactctcgaaatcctcatcagtttcgtaccttttcccgttacaacagtttctcttcacgttcctctgcaaagtccttgccggtgcagaccctgcacgtgaccctaaaatcgcagagtcaggctattccatgcttaatagttggctcgctcttcagctgctccccacagtcagcgtgggcatccttcaacccctggaagaaatcttcctccactcctttgcctaccctttcttcctcgtcggtggaaactacaacaacctctacaacttcatcaagcaacaaggcaaggacactataaaccggggcgcaatcgggttcgggttaaccgaagaagaagccatccacaatttgctcttcgtgctgggcttcaactcctacggcggattctccatttttctcccctctctgatcgatgccatagccagcaactccgcattgcaggagaagcttaaaaaagaagcgagagaaaagggcgggtcaacgctgaccttcgactcggtcaaagagatggacctgatccaatccgtggtctacgaaacgctgcgcatgaaccctccggttccactccagtacggtcgagcccgaaaggacttccggttgagttcgcacgactcggtcttccacgtcaagaagggcgagttgctgtgcggctttcagaagctcgtcatgagggactccgttatattcgacgaaccggaccggttcaagccggaccggttcacccaagagaaaggggcccagttgttgaactacttgtattggtccaatgggcctcagaccgggtcgcccagtgtgtccaataaacagtgcgcgggtaaggacgttgtcacactcaccgcggctttgattgtggcgtacctttttcgcaggtatgattccatccaaggggatggcagttccatcactgcccttcaaaagaccaagtgaaagaagggtaaatgtgtattttcattgtggagcttgtattttatctaaggtatattatttacttgagaatgatgatctatttatatagaagaggcaggtttatgcaactctttcataaactacaatcttcaattgtaacta

SEQ ID NO: 19867 - protein, 388 aa, Glycine max
KSFSHLFDMDLVDKKDVLVGDFVPSVAFTGNMRVGVYQDTTEPQHSKVKNYIMDILKRSSGIWVSELESNLDTLWDNIEASLSKSSSVSYLFPLQQFLFTFLCKVLAGADPARDPKIAESGYSMLNSWLALQLLPTVSVGILQPLEEIFLHSFAYPFFLVGGNYNNLYNFIKQQGKDTINRGAIGFGLTEEEAIHNLLFVLGFNSYGGFSIFLPSLIDAIASNSALQEKLKKEAREKGGSTLTFDSVKEMDLIQSVVYETLRMNPPVPLQYGRARKDFRLSSHDSVFHVKKGELLCGFQKLVMRDSVIFDEPDRFKPDRFTQEKGAQLLNYLYWSNGPQTGSPSVSNKQCAGKDVVTLTAALIVAYLFRRYDSIQGDGSSITALQKTK

SEQ ID NO: 19868 - protein, 380 aa, Glycine max
MDLVDKKDVLVGDFVPSVAFTGNMRVGVYQDTTEPQHSKVKNYIMDILKRSSGIWVSELESNLDTLWDNIEASLSKSSSVSYLFPLQQFLFTFLCKVLAGADPARDPKIAESGYSMLNSWLALQLLPTVSVGILQPLEEIFLHSFAYPFFLVGGNYNNLYNFIKQQGKDTINRGAIGFGLTEEEAIHNLLFVLGFNSYGGFSIFLPSLIDAIASNSALQEKLKKEAREKGGSTLTFDSVKEMDLIQSVVYETLRMNPPVPLQYGRARKDFRLSSHDSVFHVKKGELLCGFQKLVMRDSVIFDEPDRFKPDRFTQEKGAQLLNYLYWSNGPQTGSPSVSNKQCAGKDVVTLTAALIVAYLFRRYDSIQGDGSSITALQKTK

SEQ ID NO: 19869 - protein, 357 aa, Glycine max
MRVGVYQDTTEPQHSKVKNYIMDILKRSSGIWVSELESNLDTLWDNIEASLSKSSSVSYLFPLQQFLFTFLCKVLAGADPARDPKIAESGYSMLNSWLALQLLPTVSVGILQPLEEIFLHSFAYPFFLVGGNYNNLYNFIKQQGKDTINRGAIGFGLTEEEAIHNLLFVLGFNSYGGFSIFLPSLIDAIASNSALQEKLKKEAREKGGSTLTFDSVKEMDLIQSVVYETLRMNPPVPLQYGRARKDFRLSSHDSVFHVKKGELLCGFQKLVMRDSVIFDEPDRFKPDRFTQEKGAQLLNYLYWSNGPQTGSPSVSNKQCAGKDVVTLTAALIVAYLFRRYDSIQGDGSSITALQKTK

SEQ ID NO: 19870 - DNA, 1486 bp, Glycine max
tgaaattttctattgtctttttcttttttagattttctattttctattccatgggaattggaggttctgctcttggaccacattttgttgcagaagcattggcacctgataatcctccactcaagataagatttgtggacaacacggatcctgctggagttgatcatcagattgcacagcttgggttggagctagcttcaacacttgtgattgtgatttcaaagagtggaggtaccccagagactagaaatggtttattggaagtgcagaaggcctttcgtgaagcaggcttggatcttccaaaacagggtgttgctattacacaagaaaattctttgttggataacactgccagaattgagggctggttagctagacttcctatgtttgattgggtgggaggtagaacgtcagagatgtctgcagttggcctgcttccagcagcccttcagggcattgatattatagaaatgcttgccggtgcatcattgatggatgaggctaatagaagtactgcggatatggctattcttccatacaaggacagcctgttattattcagtagatacttgcagcagctggtcatggaatctctaggcaaggtgtttgacttggatggtaatcgcctatattcaacaattgagggaaggtgtacacaatttctttgtgacattcattgaggtgctacgtgatagacccccccgttcatgattgggaacttgaacctggtgtcacatgcggtgactacttgtttggtatgctacagggaacaaggtcggctttgtatgccaataaccgagagtccatcacagttactgtacaagaagtgacaccaagaacagttggtgctcttattgggctctatgaacgagcagtaggaatttatgcttcccttgtcaacataaatgcttatcatcaacctggtttaggcaatatggcttgtggtagaggtatgctgaattgtatccaaatgaagacctagtttacactgttggcattagtgactacagaaaagattggttctttgcacaggttaacaggaagaaagacaatggcactgacataggaaccacatggcaaattaatttcaagcttgatagtgtgaataccaactgaacctacacactgcgagtggctctggcatctgtgcattctgctgaattagagattcggataaacaatttagaagcaaatccacctttattttcaagtggagtgattggaaaggagaatactatagctagacatggaattcacggtctctactggctattcagcattgatgtacaaggcactcttcttgtgcaggggaacaataccatctttctaacacaaacaagagacactagtcctttaataggaattatgtatgactatattcgtttagaatacaaacggtgaagatcaaaattaacgtttataattatacaaacggtgaatatcattgtaaaagtaattatttgatcaacagattgatttcaaaagt

SEQ ID NO: 19871 - protein, 225 aa, Glycine max
KFSIVFFFFRFSIFYSMGIGGSALGPHFVAEALAPDNPPLKIRFVDNTDPAGVDHQIAQLGLELASTLVIVISKSGGTPETRNGLLEVQKAFREAGLDLPKQGVAITQENSLLDNTARIEGWLARLPMFDWVGGRTSEMSAVGLLPAALQGIDIIEMLAGASLMDEANRSTADMAILPYKDSLLLFSRYLQQLVMESLGKVFDLDGNRLYSTIEGRCTQFLCDIH

SEQ ID NO: 19872 - protein, 209 aa, Glycine max
MGIGGSALGPHFVAEALAPDNPPLKIRFVDNTDPAGVDHQIAQLGLELASTLVIVISKSGGTPETRNGLLEVQKAFREAGLDLPKQGVAITQENSLLDNTARIEGWLARLPMFDWVGGRTSEMSAVGLLPAALQGIDIIEMLAGASLMDEANRSTADMAILPYKDSLLLFSRYLQQLVMESLGKVFDLDGNRLYSTIEGRCTQFLCDIH

SEQ ID NO: 19873 - DNA, 1358 bp, Glycine max
gaatgaacactttactcatcgctttgtcagttatagggcaagcagctgccgaccggctgctggtggcttcatacggaaatgaaactcatgctggcgccatccagacgctcgaagtactgcctagcacaagcgcaaattctagccatgcgatgaaagttacccaagagaaccacgagtgtggaactttgcctacatggttggatgcgtcccttggcctggataggatagtctgtctagacgaatcagctgccaatgctagtctcacaatgttgagccttggtgatgacggcagcctccaaaaggtgtccaataccagtgtgctgggaggagcagtatcctcggcgtcctacaataacaaatccgcattagcccttgctcactacggacccgagccagccatatcactgtttactatcgatggggaaaacaaattttcgtctttgcaaaacatcaccttccaggcgcctgagcaaatccatcaagcggtcgtcgatcctacggggcaatacatgatattccccagtctcggtgcagatacagtccacgtctattgcatcgatcctgtcagccacttgctcacagagcatgcgccactcaaatccaagcaaggatacggtccgcgacatgcagttttctggacaggttccaattctacaaagacgtacctttttgtagtccatgagaagagcaacaaaatcactagttacgaagtttgttatctggagcagggtggcctagcttttaccgaagtcgacgaggtcagcacatacggcaatcaaaccgtcccaccagcgacgttcgcttcggagatgacgctctcgcctgataacaagttcttgatcgcagcaaaccgtaacggcacagttttcaaagcagagaattcggacccaaccaacagcactcaagttccaagtgattcacttgtgacgttcaaaccgtcagccgacgggaagctatcgtttgtccagcttgcaaaatcagggggatggtaccctcgccacttcagtatgaaccagaatggatcgttgattgcggtcgcaaatcaactcagcaaaaacgtcgacatctatgcccgtaacctagaaactggaatcatcgaagacagcaaagcggtggcaagagctaataatctcgggcccggcgatttgatgttcgtgcagtgggtggggcaacaatagatcatgattgaaattctattcaaagctcaagcagatgagcagtagacctgatatttagcgggttactccacccatgttctatatggagatttctcaaccctatttttgtgcatagcatggcggaattttgtattgtagcatagcatcaaggagtgttagctgaagatacccagttttcct

SEQ ID NO: 19874 - protein, 391 aa, Glycine max
MNTLLIALSVIGQAAADRLLVASYGNETHAGAIQTLEVLPSTSANSSHAMKVTQENHECGTLPTWLDASLGLDRIVCLDESAANASLTMLSLGDDGSLQKVSNTSVLGGAVSSASYNNKSALALAHYGPEPAISLFTIDGENKFSSLQNITFQAPEQIHQAVVDPTGQYMIFPSLGADTVHVYCIDPVSHLLTEHAPLKSKQGYGPRHAVFWTGSNSTKTYLFVVHEKSNKITSYEVCYLEQGGLAFTEVDEVSTYGNQTVPPATFASEMTLSPDNKFLIAANRNGTVFKAENSDPTNSTQVPSDSLVTFKPSADGKLSFVQLAKSGGWYPRHFSMNQNGSLIAVANQLSKNVDIYARNLETGIIEDSKAVARANNLGPGDLMFVQWVGQQ

SEQ ID NO: 19875 - protein, 342 aa, Glycine max
MKVTQENHECGTLPTWLDASLGLDRIVCLDESAANASLTMLSLGDDGSLQKVSNTSVLGGAVSSASYNNKSALALAHYGPEPAISLFTIDGENKFSSLQNITFQAPEQIHQAVVDPTGQYMIFPSLGADTVHVYCIDPVSHLLTEHAPLKSKQGYGPRHAVFWTGSNSTKTYLFVVHEKSNKITSYEVCYLEQGGLAFTEVDEVSTYGNQTVPPATFASEMTLSPDNKFLIAANRNGTVFKAENSDPTNSTQVPSDSLVTFKPSADGKLSFVQLAKSGGWYPRHFSMNQNGSLIAVANQLSKNVDIYARNLETGIIEDSKAVARANNLGPGDLMFVQWVGQQ

SEQ ID NO: 19876 - protein, 303 aa, Glycine max
MLSLGDDGSLQKVSNTSVLGGAVSSASYNNKSALALAHYGPEPAISLFTIDGENKFSSLQNITFQAPEQIHQAVVDPTGQYMIFPSLGADTVHVYCIDPVSHLLTEHAPLKSKQGYGPRHAVFWTGSNSTKTYLFVVHEKSNKITSYEVCYLEQGGLAFTEVDEVSTYGNQTVPPATFASEMTLSPDNKFLIAANRNGTVFKAENSDPTNSTQVPSDSLVTFKPSADGKLSFVQLAKSGGWYPRHFSMNQNGSLIAVANQLSKNVDIYARNLETGIIEDSKAVARANNLGPGDLMFVQWVGQQ

SEQ ID NO: 19877 - DNA, 1065 bp, Glycine max
gaaagattagggttttaaagtgacgcaacctctctctcttcttttcttcagttcggtggagggagggagccgtagcagcggaagctctagcttgggtagcgaatcacaatggcgagaggattaaagaagcatctgaagaggcttaatgccccaaagcattggatgcttgacaaactgggtggtgcatttgctcctaagccctcatctggaccacacaaatcgagggaatgcctgccactcatactcattttgcgaaaccggctgaagtatgctctaacataccgtgaagtcattgctattctgatgcagcgacatgtccttgttgatggcaaagtcaggactgacaaaacataccctgctggttttatggatgttgtatcaatccctaaaacaaatgagaacttccgcctgctgtatgacaccaaaggtcgattccgtctccactcagtcagggatgacgaggctaagttcaagctttgcaaagttcgctcagtgcagtttgggcaaaagggtatcccatacttaaatacctacgacggtcgcactatccgctacccagaccctctcatcagggctaatgacaccattaagctggatttggaggagaacaagattgttgatttcatcaaatttgatgttgggaatgtagtcatggtgacgggtggaaggaataggggtcgtgttggagtgatcaagaacagagagaagcataagggaagctttgagactatccatgttcaggatgctactgggcatgaatttgcaactcgaatgggcaatgtgttcaccattggcaagggaacaaaaccgtggatatctcttcccaagggtaaaggtattaagctatcaatcattgaggaagctaggaaaaggattgccgcccaacaagcaactgctgcttaaatctttaggatatgaatagactttgagtgcttggtagtttttattcaatgtttttggtttgtaatttaatttgtcttttgagattttatccgttgaattttgtctcttaaatgcactatagaacttttatcgcgtctgctatattcatgaaggaatctttcc

SEQ ID NO: 19878 - protein, 264 aa, Glycine max
MARGLKKHLKRLNAPKHWMLDKLGGAFAPKPSSGPHKSRECLPLILILRNRLKYALTYREVIAILMQRHVLVDGKVRTDKTYPAGFMDVVSIPKTNENFRLLYDTKGRFRLHSVRDDEAKFKLCKVRSVQFGQKGIPYLNTYDGRTIRYPDPLIRANDTIKLDLEENKIVDFIKFDVGNVVMVTGGRNRGRVGVIKNREKHKGSFETIHVQDATGHEFATRMGNVFTIGKGTKPWISLPKGKGIKLSIIEEARKRIAAQQATAA

SEQ ID NO: 19879 - protein, 246 aa, Glycine max
MLDKLGGAFAPKPSSGPHKSRECLPLILILRNRLKYALTYREVIAILMQRHVLVDGKVRTDKTYPAGFMDVVSIPKTNENFRLLYDTKGRFRLHSVRDDEAKFKLCKVRSVQFGQKGIPYLNTYDGRTIRYPDPLIRANDTIKLDLEENKIVDFIKFDVGNVVMVTGGRNRGRVGVIKNREKHKGSFETIHVQDATGHEFATRMGNVFTIGKGTKPWISLPKGKGIKLSIIEEARKRIAAQQATAA

SEQ ID NO: 19880 - protein, 199 aa, Glycine max
MQRHVLVDGKVRTDKTYPAGFMDVVSIPKTNENFRLLYDTKGRFRLHSVRDDEAKFKLCKVRSVQFGQKGIPYLNTYDGRTIRYPDPLIRANDTIKLDLEENKIVDFIKFDVGNVVMVTGGRNRGRVGVIKNREKHKGSFETIHVQDATGHEFATRMGNVFTIGKGTKPWISLPKGKGIKLSIIEEARKRIAAQQATAA

SEQ ID NO: 19881 - DNA, 1315 bp, Glycine max
gtttggtcattgccttattctcttgtgctaagacatactactgaggaggtactagatgcatgcatggaagcaattgagccggaacatgctgcaataacatctgaactccggaagaaagtaatgaatgatcttatggagggtttgaaggaccacaattggtttaccgggtttgatattgctgatgatctgcctgtgaaattttcattaaggcagtggatcaagctagccaaggaagtccaagcaacagtttttattgcagtgcatggaggcattggagaagatggtacacttcaatctttgctggatgctgaaggagtgccctacacaggtcctggtgcaatggcatcaaagatttgtatggacaaagttgcaacctctgtggctttaaaacatcttgcaaattcgggagttcttaccataaataaggatgtcaggcaaaaagatgatctctctaataagcccataaatgatacatggcatgacctcaccagaaagctacagtgccaaacattatgtgtcaaaccagcaaaagatggatgctcaactggggtagcaagactatgctgtcccgaggaccttgcaatatatgtcaaagctctggaggactgtctactaagaattcctccaaattgcttatcaaaggcacatggtatgattgagatgccaaaccctcctccagaacacttaatcttcgaacctttcatagagacggatgaaataattgtgacatccaaatttgaggatgcaactggtcatggcctcacttggaaaggacacagcagatgggtggaaataactgttggcgtcataggaaaacgtggatcaatgcactcgctaagtcctagtgtaactgtcaaggaatctggtgatattttgtcacttgaggagaagttccaaggtgggactggcatcaatctgactccgcctcccttgtcaattatgagtgagaatgctttgaagagatgtaaacagcatattgaactgattgcaaacactcttcaattggaaggattttcacgcattgatgcatttgtaaatgttgacagtggagaggttttgattatagaggtaaatactgtgcctggaatgacaccttccactgttctgattcatcaggcactagtagagcaaccaccgttgtatcctcatcaattcttccgtaagcttcttgatttggcatctgaaaggtccatgtaaatctatttaatagaatgtttacattgtctatcaaatgttgttaccacttgaagttattgtgaaactttaatttcctatctggaacttgcgtccctttataatgtgaaactttaatttc

SEQ ID NO: 19882 - protein, 398 aa, Glycine max
VWSLPYSLVLRHTTEEVLDACMEAIEPEHAAITSELRKKVMNDLMEGLKDHNWFTGFDIADDLPVKFSLRQWIKLAKEVQATVFIAVHGGIGEDGTLQSLLDAEGVPYTGPGAMASKICMDKVATSVALKHLANSGVLTINKDVRQKDDLSNKPINDTWHDLTRKLQCQTLCVKPAKDGCSTGVARLCCPEDLAIYVKALEDCLLRIPPNCLSKAHGMIEMPNPPPEHLIFEPFIETDEIIVTSKFEDATGHGLTWKGHSRWVEITVGVIGKRGSMHSLSPSVTVKESGDILSLEEKFQGGTGINLTPPPLSIMSENALKRCKQHIELIANTLQLEGFSRIDAFVNVDSGEVLIIEVNTVPGMTPSTVLIHQALVEQPPLYPHQFFRKLLDLASERSM

SEQ ID NO: 19883 - protein, 377 aa, Glycine max
MEAIEPEHAAITSELRKKVMNDLMEGLKDHNWFTGFDIADDLPVKFSLRQWIKLAKEVQATVFIAVHGGIGEDGTLQSLLDAEGVPYTGPGAMASKICMDKVATSVALKHLANSGVLTINKDVRQKDDLSNKPINDTWHDLTRKLQCQTLCVKPAKDGCSTGVARLCCPEDLAIYVKALEDCLLRIPPNCLSKAHGMIEMPNPPPEHLIFEPFIETDEIIVTSKFEDATGHGLTWKGHSRWVEITVGVIGKRGSMHSLSPSVTVKESGDILSLEEKFQGGTGINLTPPPLSIMSENALKRCKQHIELIANTLQLEGFSRIDAFVNVDSGEVLIIEVNTVPGMTPSTVLIHQALVEQPPLYPHQFFRKLLDLASERSM

SEQ ID NO: 19884 - protein, 358 aa, Glycine max
MNDLMEGLKDHNWFTGFDIADDLPVKFSLRQWIKLAKEVQATVFIAVHGGIGEDGTLQSLLDAEGVPYTGPGAMASKICMDKVATSVALKHLANSGVLTINKDVRQKDDLSNKPINDTWHDLTRKLQCQTLCVKPAKDGCSTGVARLCCPEDLAIYVKALEDCLLRIPPNCLSKAHGMIEMPNPPPEHLIFEPFIETDEIIVTSKFEDATGHGLTWKGHSRWVEITVGVIGKRGSMHSLSPSVTVKESGDILSLEEKFQGGTGINLTPPPLSIMSENALKRCKQHIELIANTLQLEGFSRIDAFVNVDSGEVLIIEVNTVPGMTPSTVLIHQALVEQPPLYPHQFFRKLLDLASERSM

SEQ ID NO: 19885 - DNA, 1279 bp, Glycine max
agttctgaagagaaaatctcccttctttcactagtaaaattttcagatattcaaatagatcccgttgctgcattcagtaatcacaaccacctggaacgccattattcaattcaattggaaataaatcatgggtcgacctagaggtgatgaaaagtactggaatgaagtaacgagttttgaagagaacgggaagcagaagtggaagtgcaagcattgtgaaaaaacgtatggtggaggttattcaagaattaaactgcatttagataaagaacaaaaaggacaaggcattactaaatgccccgtttattgtagcaatgaagaagttctcaacatcattgcttccacttcaatccatccacaagaaactgtaaatacactgaatccattacaagtggttgaagatgttgttgctggcgaaatgattgtccctgttggtgctccaattaaccatcaaacaaataatgaatcaacaagtttattcgaaggttgggcaccagagcatgctattgtcggaagcaacaattcgaatggtattttccaaagtaagattagtgtgataaatgagttggtttccgatctatcaagagaggaagatgacatcaaggaacaattagaatggctagaatctcgcggcaagaagcgcaagggtgatgttgatgactggatggatgaactacgagacctgaagaaacatgttgctgatgtggattggttagggttcactaacttttatgcatcggatttggttgataaattgcgaaagcataagattgataagcctctggtgttgtcaaatgaatttgttggtgaacaatttgagttaaatgttggaaagatgtggaagcttctggtggatgaccaagttttcgttattggcataaatggaatggggggagtggggaaaacattcctagcaacttatatggagaatgagataaaaagaaagggaagtttcaggcatgtcttctgggtcactgtttctcatgatttcaccactttcaaattgcaacatcagattgcaaaaaaaataggggtaaaacttgatggagatgatgagagatgtagagcaacaattttgtcatcggagttggagaaaatagaaaattcagtacttattttggatgatgtttggagatatattgatctacaaaaggtgggaattcctcttaaagtaaatggcaaagtaaatggcattaagttgatcatgacaagtcgtttgaaacatgtgtgtcgacagatggattgcctaccagataatacaatacaaatataccctttg

SEQ ID NO: 19886 - protein, 384 aa, Glycine max
MGRPRGDEKYWNEVTSFEENGKQKWKCKHCEKTYGGGYSRIKLHLDKEQKGQGITKCPVYCSNEEVLNIIASTSIHPQETVNTLNPLQVVEDVVAGEMIVPVGAPINHQTNNESTSLFEGWAPEHAIVGSNNSNGIFQSKISVINELVSDLSREEDDIKEQLEWLESRGKKRKGDVDDWMDELRDLKKHVADVDWLGFTNFYASDLVDKLRKHKIDKPLVLSNEFVGEQFELNVGKMWKLLVDDQVFVIGINGMGGVGKTFLATYMENEIKRKGSFRHVFWVTVSHDFTTFKLQHQIAKKIGVKLDGDDERCRATILSSELEKIENSVLILDDVWRYIDLQKVGIPLKVNGKVNGIKLIMTSRLKHVCRQMDCLPDNTIQIYPL

SEQ ID NO: 19887 - protein, 287 aa, Glycine max
MIVPVGAPINHQTNNESTSLFEGWAPEHAIVGSNNSNGIFQSKISVINELVSDLSREEDDIKEQLEWLESRGKKRKGDVDDWMDELRDLKKHVADVDWLGFTNFYASDLVDKLRKHKIDKPLVLSNEFVGEQFELNVGKMWKLLVDDQVFVIGINGMGGVGKTFLATYMENEIKRKGSFRHVFWVTVSHDFTTFKLQHQIAKKIGVKLDGDDERCRATILSSELEKIENSVLILDDVWRYIDLQKVGIPLKVNGKVNGIKLIMTSRLKHVCRQMDCLPDNTIQIYPL

SEQ ID NO: 19888 - protein, 205 aa, Glycine max
MDELRDLKKHVADVDWLGFTNFYASDLVDKLRKHKIDKPLVLSNEFVGEQFELNVGKMWKLLVDDQVFVIGINGMGGVGKTFLATYMENEIKRKGSFRHVFWVTVSHDFTTFKLQHQIAKKIGVKLDGDDERCRATILSSELEKIENSVLILDDVWRYIDLQKVGIPLKVNGKVNGIKLIMTSRLKHVCRQMDCLPDNTIQIYPL

SEQ ID NO: 19889 - DNA, 1206 bp, Glycine max
ttatcttgggagttctgtgcaaggtgccatgaggaacttcttcctcgaaggttggttgcaccacaggtcaaccagttagttcaggtagctaaaaaatgtcaaagtacaattgctgaaagtggttctgatggggtttctcaacaagacatccaaacaaacagcaacatgttgttgacagctgggggtcagcttgcgaagattttggagatgcaatcgctaaatgagttgggcttttctaaaagatacgtgagatgtttgcaaatttcggaggttgtcaatagcatgaaagacctaatagatatctgtgcagatcacaaaattggtgccattggtaattttgcttgtggtttttatgactatacccgattgagttctaatttttatctttctctctcattggactcctaatctttagttgtatgaagctgtttcaattttagattttttggaaataaatttgtatattgtcaatggtctttgtatattgatccaacatttactgcagagagtttgaaaaattttcctcgtctagcaacagcctcaaaggtccagatgcagaagatgcaggaaatggaacagctggcaaatgttcaaggtctgccaactgatcgaaacacactcaataagctaatggcactgaatcctggattgaacaaccatataaacaaccctcataatatggttaatcgtggtgctttgagtgggtcagcccaagctgctttagcactgaacaactaccaaaatcttctcatgaggcaaaattcaatgaactctagccctggctcacttcagcgcgaagggtcctctttcaataattcaaaccagagtccatcttcagctttgcaaggagctggtcctgctttaattccaggcccaatgcagaattcatctgttagtggtttcccaagcccccgtctacccccacagcagcagcaacaccacctacaacagccctcattaagtgcaaatgctttactgcaacaaaatcattcacagggttcccaaggaaatcaagctctgcagcagcagatgatccatcaactactgcaggagatgtcaaataacaacgggggagtgcaaccacagtctcttggtggacccagtgcaaatatggcaaagaatgcactggggtttgggggccattatccatccttaagtggaggttctgccaatgttacaggaaacaatggacctatgtcaaggaat

SEQ ID NO: 19890 - protein, 218 aa, Glycine max
MQKMQEMEQLANVQGLPTDRNTLNKLMALNPGLNNHINNPHNMVNRGALSGSAQAALALNNYQNLLMRQNSMNSSPGSLQREGSSFNNSNQSPSSALQGAGPALIPGPMQNSSVSGFPSPRLPPQQQQHHLQQPSLSANALLQQNHSQGSQGNQALQQQMIHQLLQEMSNNNGGVQPQSLGGPSANMAKNALGFGGHYPSLSGGSANVTGNNGPMSRN

SEQ ID NO: 19891 - protein, 215 aa, Glycine max
MQEMEQLANVQGLPTDRNTLNKLMALNPGLNNHINNPHNMVNRGALSGSAQAALALNNYQNLLMRQNSMNSSPGSLQREGSSFNNSNQSPSSALQGAGPALIPGPMQNSSVSGFPSPRLPPQQQQHHLQQPSLSANALLQQNHSQGSQGNQALQQQMIHQLLQEMSNNNGGVQPQSLGGPSANMAKNALGFGGHYPSLSGGSANVTGNNGPMSRN

SEQ ID NO: 19892 - protein, 212 aa, Glycine max
MEQLANVQGLPTDRNTLNKLMALNPGLNNHINNPHNMVNRGALSGSAQAALALNNYQNLLMRQNSMNSSPGSLQREGSSFNNSNQSPSSALQGAGPALIPGPMQNSSVSGFPSPRLPPQQQQHHLQQPSLSANALLQQNHSQGSQGNQALQQQMIHQLLQEMSNNNGGVQPQSLGGPSANMAKNALGFGGHYPSLSGGSANVTGNNGPMSRN

SEQ ID NO: 19893 - DNA, 1159 bp, Glycine max
tttgctatatctgattgcagcaagtaaaaatgagctcagcaagatgattgagctgcagaaagaaatggaaatgctccttcaaaatgcgaaaggggaactgcaaagtaaagattcacttcttaagccattgaaacaaagtgacacacttgccctttccataactgatattcaagaagtttccagctctagtagtcatctttctattcattcgaatatacaatatgttcaaccagagtcaaaaagcgatacggttcctaatcggtttctggaatataacactagcgaacaagatgaatgtgcagaagagataaatgagctccgggcagaatttgaaattgagttgcagcgcttgcagttgtatttggatggagaagctggatttgatgatgcacaacaagagggagtcaaggtaactcttgaggattctagttcaaaaagccatagttcaagttttggtgaaataataatggaacctcaaggagcaacttatgatgtatcttttggagttcctccaattgaattggagagaaggttgcatgaactgcttgaagcaagactggaagaacggatatcagagctggagtctgcattagaatgtaagacgcaaaagcttattaagaaagagatagaggttacttggtggaaagacactgcacaacttatctcacaacatgttccagaaacttctcggttcacttttccacttgatcctgatatttctttgaagttgagtcaacttgtaggatagtttttatgaaagagtgatgttgattaagccatcaaaatattgttatcagcagtacagtttcatgacctgttgtttcttgttcttcaaaattttggtttagtcctctggagtaaatagtggtttggaggatgattttaaatgagagaacagaaattgaagggagtcaaaattgttttccattgtagagcaatacacaagatgtgtaaaaactgaaaatgttggagtcttttgagatttattcttatgttaagattggagttgggtgactgtagtaagctactgcagtgaaatttgttggatgcaacaaaactcaagcatttgactccctgcagctatttatagacaatcgcatctatattagcttgtaagatccttatcttgttcaaagacagtataattttctttcaccat

SEQ ID NO: 19894 - protein, 248 aa, Glycine max
LLYLIAASKNELSKMIELQKEMEMLLQNAKGELQSKDSLLKPLKQSDTLALSITDIQEVSSSSSHLSIHSNIQYVQPESKSDTVPNRFLEYNTSEQDECAEEINELRAEFEIELQRLQLYLDGEAGFDDAQQEGVKVTLEDSSSKSHSSSFGEIIMEPQGATYDVSFGVPPIELERRLHELLEARLEERISELESALECKTQKLIKKEIEVTWWKDTAQLISQHVPETSRFTFPLDPDISLKLSQLVG

SEQ ID NO: 19895 - protein, 234 aa, Glycine max
MIELQKEMEMLLQNAKGELQSKDSLLKPLKQSDTLALSITDIQEVSSSSSHLSIHSNIQYVQPESKSDTVPNRFLEYNTSEQDECAEEINELRAEFEIELQRLQLYLDGEAGFDDAQQEGVKVTLEDSSSKSHSSSFGEIIMEPQGATYDVSFGVPPIELERRLHELLEARLEERISELESALECKTQKLIKKEIEVTWWKDTAQLISQHVPETSRFTFPLDPDISLKLSQLVG

SEQ ID NO: 19896 - protein, 227 aa, Glycine max
MEMLLQNAKGELQSKDSLLKPLKQSDTLALSITDIQEVSSSSSHLSIHSNIQYVQPESKSDTVPNRFLEYNTSEQDECAEEINELRAEFEIELQRLQLYLDGEAGFDDAQQEGVKVTLEDSSSKSHSSSFGEIIMEPQGATYDVSFGVPPIELERRLHELLEARLEERISELESALECKTQKLIKKEIEVTWWKDTAQLISQHVPETSRFTFPLDPDISLKLSQLVG

SEQ ID NO: 19897 - DNA, 1817 bp, Glycine max
gagcaagagcataaagctagagcgatacaacagctacatcaggagactcaacagcaccaaactcctcaacgcctcctccaaactcctcttccgtgccactatcttagtcgcactcatcctcgtcttcctcttcaccttcaactaccctcccctcgccccagacttcacctcccaccgccacctccactcccactcccacttcctctcctcctcctcctccttcgcctcctgggagaagcaggtccgccactcctccacccctcgccgccccaacggcctcaccgtcctcgtcaccggcgccgctggcttcgtcggcagccactgctcccttgccctcaaaaaacgcggcgacggcgttctcgggctcgacaacttcaacagctactacgatccctccctgaaacgctcccgtcaggcaatgctctggaaacaccaggttttcatcgtggaaggtgaccttaacgacacccccttgcttgagaagctcttcgacgttgtccccttcacccacatccttcacctcgccgctcaggctggcgtccgctacgccatgcagaacccccaatcctacgtcaccgccaacattgctggcttcgtcaacctcctcgaggctgccaaatccgccaatccccaacccgccatagtctgggcttcatccagctccgtctacggcctcaacacccaaaaccctttctccgagctccaccgcaccgaccaacttgccagcctctacgccgccaccaagaaagccggcgaggagatcgcccacacctacaaccacatctacggcctctccctcaccggactccgcttcttcaccgtctacggcccctgggggagacccgacatggcttactttttcttcaccaaggacatcctccaagggaaaaccatcgacgtgtaccagacgcaggaggggaagcaggtggcccgtgacttcacctacatcgacgacatcgttaaaggctgcctgggagccctggacaccgcccagaagagcaccgggagcggcggcaagaagaagggccccgcccagctcagagtatacaatctggggaacacttcaccggtgccggttgggaccttggtgtccattctggaaggtctgctaagcaccaaggccaagaagcacgtcattaagatgccatcaaacggcgacgttcccttcacacacgccaatgtcagcttggcctacagggatttctcttacaatcccaccaccgatctcgccaccggtctcaggaagttcgtcaagtggtacctcggttattacggcctccagcaaaggctaaaaaaggaatatcaccttgacaatgaataatcacctacgtacgtacccaagccttaattatcctcacaccacatgcccttgtttttgtttttacaagaaacaaagaaaaacaaataattcaaatacctaccttggatcatttttcttgttttttcttcaattattactattattttttcttaattattgtggtggtccgtgtccatggatccaaatgcatgttggtgtagcaattatacataatataaatatcgggtatatatagatgagggatatatatgcatatataaatgtcagggaaacaaacagaaagcaaaagcagcaaggaagtgtatgtaatgtaatgtaatgtagatctgtaaggaaagagaaagaaaggtgtaataatgcagggtggggtctgccacaaaggttgcagatctctccccttcttttatccatatgttttcattttcatttcacatcttgtttctctgttctgttattcaacaaattatatatattatctttccttttcaaaaaaaat

SEQ ID NO: 19898 - protein, 439 aa, Glycine max
SKSIKLERYNSYIRRLNSTKLLNASSKLLFRATILVALILVFLFTFNYPPLAPDFTSHRHLHSHSHFLSSSSSFASWEKQVRHSSTPRRPNGLTVLVTGAAGFVGSHCSLALKKRGDGVLGLDNFNSYYDPSLKRSRQAMLWKHQVFIVEGDLNDTPLLEKLFDVVPFTHILHLAAQAGVRYAMQNPQSYVTANIAGFVNLLEAAKSANPQPAIVWASSSSVYGLNTQNPFSELHRTDQLASLYAATKKAGEEIAHTYNHIYGLSLTGLRFFTVYGPWGRPDMAYFFFTKDILQGKTIDVYQTQEGKQVARDFTYIDDIVKGCLGALDTAQKSTGSGGKKKGPAQLRVYNLGNTSPVPVGTLVSILEGLLSTKAKKHVIKMPSNGDVPFTHANVSLAYRDFSYNPTTDLATGLRKFVKWYLGYYGLQQRLKKEYHLDNE

SEQ ID NO: 19899 - protein, 300 aa, Glycine max
MLWKHQVFIVEGDLNDTPLLEKLFDVVPFTHILHLAAQAGVRYAMQNPQSYVTANIAGFVNLLEAAKSANPQPAIVWASSSSVYGLNTQNPFSELHRTDQLASLYAATKKAGEEIAHTYNHIYGLSLTGLRFFTVYGPWGRPDMAYFFFTKDILQGKTIDVYQTQEGKQVARDFTYIDDIVKGCLGALDTAQKSTGSGGKKKGPAQLRVYNLGNTSPVPVGTLVSILEGLLSTKAKKHVIKMPSNGDVPFTHANVSLAYRDFSYNPTTDLATGLRKFVKWYLGYYGLQQRLKKEYHLDNE

SEQ ID NO: 19900 - protein, 256 aa, Glycine max
MQNPQSYVTANIAGFVNLLEAAKSANPQPAIVWASSSSVYGLNTQNPFSELHRTDQLASLYAATKKAGEEIAHTYNHIYGLSLTGLRFFTVYGPWGRPDMAYFFFTKDILQGKTIDVYQTQEGKQVARDFTYIDDIVKGCLGALDTAQKSTGSGGKKKGPAQLRVYNLGNTSPVPVGTLVSILEGLLSTKAKKHVIKMPSNGDVPFTHANVSLAYRDFSYNPTTDLATGLRKFVKWYLGYYGLQQRLKKEYHLDNE

SEQ ID NO: 19901 - DNA, 1758 bp, Glycine max
gcgaccaacttttcctgactcatccacaccactgcttccctttcttccatcacttttcttcctcataacttgcattttctccaaaaaccaaagaaagaaagaaacacacacacacacacctctctctctctctcactcacacatggcagctttttcataccaataccatccttttcttgttgaccctgcattcttccccaacaacttaaacaccccttcccctcctcctcatcagtttcaacaactccctcatgaaacatcatcttttaatgtcacaaaccaggagactagctgtgttgatcagagctccaagatcaccatcagtgacaatgagccttctgtcactgaaaaccttagccctcagtcctccatggtagtggacaagcttgaaactggggagcaggtcactcagaaggtgaacactcctgtggagaagaaaaggaaaaccagaaatggatcttccttgactagtaacccccaatccaaggatgctgcaacagaaaggaaaaacaagaaacaaaggaagggcaatggtgggttgaaagaagaggacaaggcaaaagaagagaagaaggaacagagaaagtgtcccgaagagcctccaacaggctatatccatgtcagagcaagaaggggtcaggcaacggatagccacagccttgctgaaagggtgagaagagagaagataagtgaaaggatgaaggtgttgcaacggcttgtgccaggctgtgacaaggtgactggaaaggcccttatgttggacgaaataatcaattatgttcagtctctacagaatcaagttgagttcttgtcaatgaagcttgcttcagtgaatcccatgttttatgacttggcaacggatctagacaccctcttggttagaccagagaaactaaatagcatggcatcaccatcaccaccactaccatctgtgtcacattgcaacagccctaacaaccaagccactacttttgctgatacaaccaccatgacccccaccaacatcttccacattgctagtgactatcttttggataattcagtctcattttttcttcaagggcagaggtcaaatgtgttctctgaggaggatactggtagtcatttctgggacgcagaggaccagcggcaaaagtttcttcatccatgtggattcagcaacaacttatgttcctttcattaatataaaattcatagagctgccctacaaaactacgaacatgttgatttagcttttacactagctaggtaaggaaattccaaagaggcatgagaatgagccaacaagaagttaggcattaggaggaaaaaccaaagctacgcttggtatcggtatataagtacatcatcattccagggtaattcgtagcgtaaagagtctggcttggttcctagtccatcagattaaagtggcctttgaagatgaataattaaggggcaccaaaattaatggatgaagaaccaaaaggacagaaaataccgaccaaataagaccatatctttttctagatccattgttctgtttcagtgattgttgactctccaaggacttatgatgcacaaattccgagagactatcaatcctatatacagagcagacattgaaattaatttctgttccatgtaaattatatccaagtattgattcttgtggtggcagttattctgttggtacagttaatttcaccattattgagaaatgaggggttgatgcaactgatcatgttcttgacatgactggccatgcatttgtttgtt

SEQ ID NO: 19902 - protein, 393 aa, Glycine max
RPTFPDSSTPLLPFLPSLFFLITCIFSKNQRKKETHTHTPLSLSHSHMAAFSYQYHPFLVDPAFFPNNLNTPSPPPHQFQQLPHETSSFNVTNQETSCVDQSSKITISDNEPSVTENLSPQSSMVVDKLETGEQVTQKVNTPVEKKRKTRNGSSLTSNPQSKDAATERKNKKQRKGNGGLKEEDKAKEEKKEQRKCPEEPPTGYIHVRARRGQATDSHSLAERVRREKISERMKVLQRLVPGCDKVTGKALMLDEIINYVQSLQNQVEFLSMKLASVNPMFYDLATDLDTLLVRPEKLNSMASPSPPLPSVSHCNSPNNQATTFADTTTMTPTNIFHIASDYLLDNSVSFFLQGQRSNVFSEEDTGSHFWDAEDQRQKFLHPCGFSNNLCSFH

SEQ ID NO: 19903 - protein, 346 aa, Glycine max
MAAFSYQYHPFLVDPAFFPNNLNTPSPPPHQFQQLPHETSSFNVTNQETSCVDQSSKITISDNEPSVTENLSPQSSMVVDKLETGEQVTQKVNTPVEKKRKTRNGSSLTSNPQSKDAATERKNKKQRKGNGGLKEEDKAKEEKKEQRKCPEEPPTGYIHVRARRGQATDSHSLAERVRREKISERMKVLQRLVPGCDKVTGKALMLDEIINYVQSLQNQVEFLSMKLASVNPMFYDLATDLDTLLVRPEKLNSMASPSPPLPSVSHCNSPNNQATTFADTTTMTPTNIFHIASDYLLDNSVSFFLQGQRSNVFSEEDTGSHFWDAEDQRQKFLHPCGFSNNLCSFH

SEQ ID NO: 19904 - protein, 270 aa, Glycine max
MVVDKLETGEQVTQKVNTPVEKKRKTRNGSSLTSNPQSKDAATERKNKKQRKGNGGLKEEDKAKEEKKEQRKCPEEPPTGYIHVRARRGQATDSHSLAERVRREKISERMKVLQRLVPGCDKVTGKALMLDEIINYVQSLQNQVEFLSMKLASVNPMFYDLATDLDTLLVRPEKLNSMASPSPPLPSVSHCNSPNNQATTFADTTTMTPTNIFHIASDYLLDNSVSFFLQGQRSNVFSEEDTGSHFWDAEDQRQKFLHPCGFSNNLCSFH

SEQ ID NO: 19905 - DNA, 1519 bp, Glycine max
aggttgcttatcgatagccaggatgcgctggagctgaaacttacttgggaagaggctcaagatttgctccgtcctcctccaactgttaagccaagcattgtcatgattgaggatcatgtatttgaagaatatgaagaacctcctgtctttggaaagaggagtatattcgtagttcgatcaactgggtaagatgagtattgtacattagagttttcttctttttatttcttgtgtcaagttttccctcttttaccatcctcttattttctatttaaccttatgaattcttttacaagttatagcaatgcataaatttatatattttgattatttcaatttggagtgcgatgggatctcagggtaaatgagcagtggatgcagtgtgatagttgctcaaaatggcggaagttgcctgttgatgcacttattcccccaaagtggacatgtgtggagaatttatgggatcagagcaggtgttcatgtgctgctcccaatgaattgaacccaagggaactggataatcttctgaggctgaataaagaattcaagaaacaaagactggcagcaagccagagaccggccctggaatgtgaatcttcaggactggatgctttggcaaatgcagcaatactgggagatgatgcaagtgactctggcagaacaccagttgttaccaccacaaaacatcctcggcatagacctgggtgctcttgcattgtttgtatccagccaccaagtgggaagggcaaacacaaacctacatgcacctgcaatgtgtgcatgacagttaaacgtcggtttaaaaccctgatgatgcgaaagaagaagcggcaatccgaacgtgaagcagagattgctcagagaaatcagttatcatggcggacgaaagatgaatcagaagtagatagcacctctcgccatttaactccagttgacggtttggagaatgaagtaagggtgcaaaatgaattagattcaaggagtccagacgatgcggtggctgaagctgccaagggacaattagacttgaattgccaacctgatcgagaagatgtgcaagctgggccgaacagcttgagcatgacaagtcttcttgaagaagcaaatctcccgctggagacctatctgaagcaaaatggccttactagcttgataacagagcagcaaacaaattcagcttcaaatgtgcaggcacagacaaccaatgatagtgaggtgaaacacaatgaggattgcggaaccgcttcggttattcatgcgcaggaaagcagtcctgaagagaacagtgggcaagataaagagcaaaacaattaactcatgaaatcttgccagttacattttcttttttccttttttttttactccgaaatcattttacaagaatccttgcttaagttataaaattataagagcttcatttgtatgtgtatatatattttctgttgttgtctgtgtcttgtggttgtgaaatttccccccaaaactcaataacatatatacgccaaagcttgtgttttag

SEQ ID NO: 19906 - protein, 312 aa, Glycine max
MQCDSCSKWRKLPVDALIPPKWTCVENLWDQSRCSCAAPNELNPRELDNLLRLNKEFKKQRLAASQRPALECESSGLDALANAAILGDDASDSGRTPVVTTTKHPRHRPGCSCIVCIQPPSGKGKHKPTCTCNVCMTVKRRFKTLMMRKKKRQSEREAEIAQRNQLSWRTKDESEVDSTSRHLTPVDGLENEVRVQNELDSRSPDDAVAEAAKGQLDLNCQPDREDVQAGPNSLSMTSLLEEANLPLETYLKQNGLTSLITEQQTNSASNVQAQTTNDSEVKHNEDCGTASVIHAQESSPEENSGQDKEQNN

SEQ ID NO: 19907 - protein, 177 aa, Glycine max
MTVKRRFKTLMMRKKKRQSEREAEIAQRNQLSWRTKDESEVDSTSRHLTPVDGLENEVRVQNELDSRSPDDAVAEAAKGQLDLNCQPDREDVQAGPNSLSMTSLLEEANLPLETYLKQNGLTSLITEQQTNSASNVQAQTTNDSEVKHNEDCGTASVIHAQESSPEENSGQDKEQNN

SEQ ID NO: 19908 - protein, 167 aa, Glycine max
MMRKKKRQSEREAEIAQRNQLSWRTKDESEVDSTSRHLTPVDGLENEVRVQNELDSRSPDDAVAEAAKGQLDLNCQPDREDVQAGPNSLSMTSLLEEANLPLETYLKQNGLTSLITEQQTNSASNVQAQTTNDSEVKHNEDCGTASVIHAQESSPEENSGQDKEQNN

SEQ ID NO: 19909 - DNA, 1137 bp, Glycine max
agaagcaagtggatatccaatagcagttatgccgtccgggaagggactagtaccagagcatcatccacatttcattgggacatactggggtgctgtcagctctagcttttgtgggaaattgtggagtctgctgatgcatatgtttttgttggccccatcttcaatgactatagctccgttggatactcgttgttgataaagaaggagaaagccataatagtgcagcctaatcgggtaaccattggcaatggtccttccttgggctgggttttcatggctgatttcttaactgcattggctaaaaaagtgaagaccaacaccgcagctgtggagaattaccggcgtatctatgtcccaccaggcattcctctgaggcgagagaaggatgaaccacttagagttaatgttctattcaagcacattcaagaactgctaagcggagatactgctgtaatagctgaaactggagactcatggttcaactgtcagaagctccatctgcctgagaattgcgggtatgaattccagatgcagtatggatccattggttggtcagtaggtgctactcttggatatgcacaggctgcaacagacaagcgtgtaattgcttgcattggtgatggcagttttcaggtaacagcacaggatatttcaacaatgattcgctgtggacaaaagaccatcatctttctcatcaataatggaggttatacaattgaagttgagattcatgatggtccatacaatgtgataaagaattgggactacactcgctttgtggacgctatccataatgggcaaggcaaatgctggactgccaaggtacgtacagaggatgatctgactgaagcaattgcaaaagctactggaccacagaaagattcactatgttttatagaagtttttgtacacaaggatgacaccagcaaagaattgctggaatggggatctcgtgttgctgctgctaacagtcgtcctcctaatcctcaatagaaaatcatttcctaattattggcctgttttgtgtattttgttgaatagagttccactactggatatttacaagagaaaaacgacaaaaatgaaaaataagttgaaataaatgtttgcttttccagatttgtatctggtctcgtg

SEQ ID NO: 19910 - protein, 239 aa, Glycine max
MADFLTALAKKVKTNTAAVENYRRIYVPPGIPLRREKDEPLRVNVLFKHIQELLSGDTAVIAETGDSWFNCQKLHLPENCGYEFQMQYGSIGWSVGATLGYAQAATDKRVIACIGDGSFQVTAQDISTMIRCGQKTIIFLINNGGYTIEVEIHDGPYNVIKNWDYTRFVDAIHNGQGKCWTAKVRTEDDLTEAIAKATGPQKDSLCFIEVFVHKDDTSKELLEWGSRVAAANSRPPNPQ

SEQ ID NO: 19911 - protein, 154 aa, Glycine max
MQYGSIGWSVGATLGYAQAATDKRVIACIGDGSFQVTAQDISTMIRCGQKTIIFLINNGGYTIEVEIHDGPYNVIKNWDYTRFVDAIHNGQGKCWTAKVRTEDDLTEAIAKATGPQKDSLCFIEVFVHKDDTSKELLEWGSRVAAANSRPPNPQ

SEQ ID NO: 19912 - DNA, 2232 bp, Glycine max
tttttttttacaacgcttgactgcaattggataaatatttttgatgttgtagaattaaaattagagtttcatctcctaatttatactgcaatgcaaagtcaaattttggagtaaacactaggttgtagttttttgttttcttaacaaatctttattgtgtgaaataccaaaactccaattcaaacaacaaaatgataccaaaaacatttcaggaattgcatgtacttttttcgttttcaatttaaaaaattaaaaaatgctttaattattaatatctctttgatttcttagagggatttggttgcatggtcagtggattactaatatgatttaacgaaggatagttctttgtaaattcttgatgcctgccccgtgtgttagtttactttctgatgtagaagaagattatgattagcagaacaacattgaaaattttgacttaaagaaagtagaggaacaagcagcagagttggagaaggatttgattgtcaaggaacttgaaacgcttgacgtgcttgaagaattaggagctaccaagaggattgtggaggacttgaagcagcagttacaaaaggaggctatgaaatgtttagcaactcgagatgtaaattcatatgaagaagctggaactcctgttattaaggagaaggatgaggaaaattgtggaaatattgtcaatgatgaagaacaggtgatgcaaattccaagcccatgctctatgtcatcatcacctgatatgatcttaatggagttgaaaaaagccaaattgaatctaggcaaaactataaatgaacttggggtgatacaatcctcgattgaatctttgaataagaagatgaagaaggagaaaaattttctggagaggacacgtgaaaagctagcatcaaagtttgcagcagaatctgctcaagagagggtccaagagcaaacaagattgaatccaccggcccctcatgtagagttcacctttggtaaccctgcaaataatttcaattctgattctgggcagtgcaatggaatggcagagacaagaagacctgaaccttcaaagcccttaagtgtatatgaagaatatggatttagtgttaaaactgctgagataaggtggcttgcggctaaaaagatggaagaagctgcaagggcagcagaagctattgctcttgctgaaatcaaggctctatctaatgcccagagatctttaggatttgttctgccagaacctgagaaagtcacttttgcttttggagagcgctctcccctaaaccccaaggctcagatacccaaggagtcaaccttgaagaaggtaatagattccaagtttcaaattgatgaaacaaaaatttctaagctgacaattttgaagaagttggaggaagcagctgaagaagttctacacagcaaacaagtcttgacagatgctttaaacagaattgaaactgcaaacagaaagcaacatgctgctaaggaggctctaaggagatggattccagaggatgatatgaaggagtatagcactattaattgcaacaagtttaatcaaactggaatttatcaagattctctgcaggatgtaaccaggtcaacaacagcaaacaatgatccaaagcctgctttaaggcccacaatttcaatgagagatgtacttagcagaaagcaggttcctgaaggatatgctacaagaaaggagatggaagagcacactgaacggcaaaaggtagcgttgagtcaaatgcttcaagcattgagggaagatctaactcttccaccaaagactgagaaagatgggaacaatcagaagccgtacgtagcacagaggaagaaatttggattcattcaaatatcactccccttggcaaagccaaataagaaaaggggatgaaatttcgatcctcaatccctatgcatggatgaatagccactacccatgcatctttatgttttcccatgccattctttattggttcatgtgttcacactttcatttgtttatgtagaagtttgagtgggtgtttgattctgtaaaatatatgttgtgcttgagtgattggcttataattctgtagctagctttaatggagctagtagattatgttgctattgttggatgcattggagtgatgaggaatttatccatagggtaggaaggtttttatcattggattgataatcttattgttagaagtatgatctatcatgtggttgtaccaatatataaaattatatttgttgatt

SEQ ID NO: 19913 - protein, 432 aa, Glycine max
MKCLATRDVNSYEEAGTPVIKEKDEENCGNIVNDEEQVMQIPSPCSMSSSPDMILMELKKAKLNLGKTINELGVIQSSIESLNKKMKKEKNFLERTREKLASKFAAESAQERVQEQTRLNPPAPHVEFTFGNPANNFNSDSGQCNGMAETRRPEPSKPLSVYEEYGFSVKTAEIRWLAAKKMEEAARAAEAIALAEIKALSNAQRSLGFVLPEPEKVTFAFGERSPLNPKAQIPKESTLKKVIDSKFQIDETKISKLTILKKLEEAAEEVLHSKQVLTDALNRIETANRKQHAAKEALRRWIPEDDMKEYSTINCNKFNQTGIYQDSLQDVTRSTTANNDPKPALRPTISMRDVLSRKQVPEGYATRKEMEEHTERQKVALSQMLQALREDLTLPPKTEKDGNNQKPYVAQRKKFGFIQISLPLAKPNKKRG

SEQ ID NO: 19914 - protein, 394 aa, Glycine max
MQIPSPCSMSSSPDMILMELKKAKLNLGKTINELGVIQSSIESLNKKMKKEKNFLERTREKLASKFAAESAQERVQEQTRLNPPAPHVEFTFGNPANNFNSDSGQCNGMAETRRPEPSKPLSVYEEYGFSVKTAEIRWLAAKKMEEAARAAEAIALAEIKALSNAQRSLGFVLPEPEKVTFAFGERSPLNPKAQIPKESTLKKVIDSKFQIDETKISKLTILKKLEEAAEEVLHSKQVLTDALNRIETANRKQHAAKEALRRWIPEDDMKEYSTINCNKFNQTGIYQDSLQDVTRSTTANNDPKPALRPTISMRDVLSRKQVPEGYATRKEMEEHTERQKVALSQMLQALREDLTLPPKTEKDGNNQKPYVAQRKKFGFIQISLPLAKPNKKRG

SEQ ID NO: 19915 - protein, 386 aa, Glycine max
MSSSPDMILMELKKAKLNLGKTINELGVIQSSIESLNKKMKKEKNFLERTREKLASKFAAESAQERVQEQTRLNPPAPHVEFTFGNPANNFNSDSGQCNGMAETRRPEPSKPLSVYEEYGFSVKTAEIRWLAAKKMEEAARAAEAIALAEIKALSNAQRSLGFVLPEPEKVTFAFGERSPLNPKAQIPKESTLKKVIDSKFQIDETKISKLTILKKLEEAAEEVLHSKQVLTDALNRIETANRKQHAAKEALRRWIPEDDMKEYSTINCNKFNQTGIYQDSLQDVTRSTTANNDPKPALRPTISMRDVLSRKQVPEGYATRKEMEEHTERQKVALSQMLQALREDLTLPPKTEKDGNNQKPYVAQRKKFGFIQISLPLAKPNKKRG

SEQ ID NO: 19916 - DNA, 1267 bp, Glycine max
atacaaggctcaggaggaagctgatcctttagctgatgtgcccaagaaggaggatggatctcaacatggctctaacaaagatggttctgtgaagggttctttgaatgctgaatcttccacagcttctatttcaaacaatgccgggcaggatgtgacttcaaatgaccagggtggagcagtggatgatgggtcaactaagaatgacccggaagaagatgacgaggatagtgatgctgaagacttggcagaagctgatgaagatgagactgacttggacctggcatggaaaatgcttgatattgccagagccattgctgaaaagcaatctgtcaatacaatagaacaggtggacatattatcaacattggcagatgttgcattggaaagagaggattttgaaacttccctctcggattaccagaaggcactaaccatcttggaacaactggttgaaccagatgatagaaatattgctgacttaaattttcgcatatgcttatgtttggaggttagttctaagcctcaagaagcaattgcttactgccagaaggctacatctgtttgtaaggcacgattacatcgtcttacagatgaagtaaagagttgttcagatttgacatctgcttctgagttagctcaggatttaccagcatgccccaaatctgagtctaataactcaattttggataaacaatcagagattgaaactctcaaaggtctatcaagtgagctggaaaagaagcttgaagatttgcaacagttagtctcgaacccaaagtcaattcttgctgagatcctaggaatagcagctgccaaggtaggcaatgtgaaggaatcatcttcagcaacggtgagttcctcacggttggctactgccaacagcagtggaggttttgactccccaaccatttcaactgcccacaccaatggatctggtggagtcacacaccttggtgtggtgggaagaggagttaagcgagcatcaaatgccactccggcagaaggaagcacaccaaagaaaccggcattagagtctactgaagacaaaggtgatggcaacgcacactgatgtaggtcttggtttgtttgtatggtgtgtttaatttgaactttgaatgcaaccatacaatttggttacacttttgaactattgataaggacattttaaggggattgactgttctcaggggaatagtgttatgccatatattatccttattgattttatgtgcagctaattgatattgtcaaaactttcaagttactt

SEQ ID NO: 19917 - protein, 355 aa, Glycine max
YKAQEEADPLADVPKKEDGSQHGSNKDGSVKGSLNAESSTASISNNAGQDVTSNDQGGAVDDGSTKNDPEEDDEDSDAEDLAEADEDETDLDLAWKMLDIARAIAEKQSVNTIEQVDILSTLADVALEREDFETSLSDYQKALTILEQLVEPDDRNIADLNFRICLCLEVSSKPQEAIAYCQKATSVCKARLHRLTDEVKSCSDLTSASELAQDLPACPKSESNNSILDKQSEIETLKGLSSELEKKLEDLQQLVSNPKSILAEILGIAAAKVGNVKESSSATVSSSRLATANSSGGFDSPTISTAHTNGSGGVTHLGVVGRGVKRASNATPAEGSTPKKPALESTEDKGDGNAH

SEQ ID NO: 19918 - protein, 259 aa, Glycine max
MLDIARAIAEKQSVNTIEQVDILSTLADVALEREDFETSLSDYQKALTILEQLVEPDDRNIADLNFRICLCLEVSSKPQEAIAYCQKATSVCKARLHRLTDEVKSCSDLTSASELAQDLPACPKSESNNSILDKQSEIETLKGLSSELEKKLEDLQQLVSNPKSILAEILGIAAAKVGNVKESSSATVSSSRLATANSSGGFDSPTISTAHTNGSGGVTHLGVVGRGVKRASNATPAEGSTPKKPALESTEDKGDGNAH

SEQ ID NO: 19919 - DNA, 1145 bp, Glycine max
acactcgttcagcttgttggagcagagtttctctgttctcccgcctcaacgcaaaaatgagtgatataaggaagtggttcatgaaaacacatgacaagggcaacaatgccgcttcttccaagccttcttccgataaaccccagtccgagaaaacggtggctggaggtcaggaaagttcagggaggaggataactagcaaatattttaattcgaacaagcaaaaggggaaagatgagaaagaaaagcaggagctccctgctaaaagaaagaatgcgaaggacagtgaggaaattcatgaagacgatggagatgactctgtcttgcccactaataaaaagaagttagctgacaccactccaacaaaaaaattgaagagtggatcaggtagggggattccaaagaaatctgcagttttggaagaaagtgatgaagatgatgacaaagatgctgtgtctgctgctaaatctgctggaaggggtggtggtggtggtggaagaggagcaccggggcgatcaactggtgggagaggtagagggggtggtaggggtggattcatgaattttggagaaagaaaagatcctccacacaaaggagaaaaggaagtccctgaaggtgctcctgactgtttagctggcttgacttttgtgatcagtggaacactggacagtttggaacgagaagaagcagaagatttgattaaacgccatggtggccgtgtcactggatcagtcagcaagaaaacgaattatctgttatgtgacgaagatattgggggacggaagtctgaaaaagccaaagagctaggaacttccttcctcacagaggatggattgtttgatatgattcgtgcctcaaaacctgcaaaagcttcttcacaagaagacaagaaacttgtgaacaaggctgttgcagtagcatcccagtcaaaagtttctccgaaatcacaagttaaggtccctctgtcttcacgctcaccttctaaacaagccaagccgaaaactgctactactgttcagtcttcttcgatgtggacagaaaaatatcgacctaaagatccaaaggatatcatagggaatcagtcacttgttttacagcttcgtaattggttgaaagcttggaatgagcattttttggacactggtaac

SEQ ID NO: 19920 - protein, 381 aa, Glycine max
TRSACWSRVSLFSRLNAKMSDIRKWFMKTHDKGNNAASSKPSSDKPQSEKTVAGGQESSGRRITSKYFNSNKQKGKDEKEKQELPAKRKNAKDSEEIHEDDGDDSVLPTNKKKLADTTPTKKLKSGSGRGIPKKSAVLEESDEDDDKDAVSAAKSAGRGGGGGGRGAPGRSTGGRGRGGGRGGFMNFGERKDPPHKGEKEVPEGAPDCLAGLTFVISGTLDSLEREEAEDLIKRHGGRVTGSVSKKTNYLLCDEDIGGRKSEKAKELGTSFLTEDGLFDMIRASKPAKASSQEDKKLVNKAVAVASQSKVSPKSQVKVPLSSRSPSKQAKPKTATTVQSSSMWTEKYRPKDPKDIIGNQSLVLQLRNWLKAWNEHFLDTGN

SEQ ID NO: 19921 - protein, 363 aa, Glycine max
MSDIRKWFMKTHDKGNNAASSKPSSDKPQSEKTVAGGQESSGRRITSKYFNSNKQKGKDEKEKQELPAKRKNAKDSEEIHEDDGDDSVLPTNKKKLADTTPTKKLKSGSGRGIPKKSAVLEESDEDDDKDAVSAAKSAGRGGGGGGRGAPGRSTGGRGRGGGRGGFMNFGERKDPPHKGEKEVPEGAPDCLAGLTFVISGTLDSLEREEAEDLIKRHGGRVTGSVSKKTNYLLCDEDIGGRKSEKAKELGTSFLTEDGLFDMIRASKPAKASSQEDKKLVNKAVAVASQSKVSPKSQVKVPLSSRSPSKQAKPKTATTVQSSSMWTEKYRPKDPKDIIGNQSLVLQLRNWLKAWNEHFLDTGN

SEQ ID NO: 19922 - protein, 355 aa, Glycine max
MKTHDKGNNAASSKPSSDKPQSEKTVAGGQESSGRRITSKYFNSNKQKGKDEKEKQELPAKRKNAKDSEEIHEDDGDDSVLPTNKKKLADTTPTKKLKSGSGRGIPKKSAVLEESDEDDDKDAVSAAKSAGRGGGGGGRGAPGRSTGGRGRGGGRGGFMNFGERKDPPHKGEKEVPEGAPDCLAGLTFVISGTLDSLEREEAEDLIKRHGGRVTGSVSKKTNYLLCDEDIGGRKSEKAKELGTSFLTEDGLFDMIRASKPAKASSQEDKKLVNKAVAVASQSKVSPKSQVKVPLSSRSPSKQAKPKTATTVQSSSMWTEKYRPKDPKDIIGNQSLVLQLRNWLKAWNEHFLDTGN

SEQ ID NO: 19923 - DNA, 1280 bp, Glycine max
agataatttgaccagagaaaagatagaagatgaactcaatgaacttaaagaagcacatgctgcagatgaggagtttccggatgaagtggatacaccattggatgttcctgctaggaagaggtttgcaaaatacaggggactcaagtcctttaggacttcttcatgggatcctaaagaatctctaccccaagattatgccagaatttttgaattcgataattttaaaagaacacaaaaacatgttcttgctaaagctttagaactggatcatgaaaaccgggaggactgtatttcagttggctcatatgctaggttgcatatcatgggagtgcccagtgctgttgcttcaaagttatctttgcttgcaaagacaatcccagttacagcatgtggcctgctgaaacatgagtccaaagtatctgtccttcatttcagtgtgaagaagcatgaagcatatgatgcacccatcaaatccaaggaagagttaattttccatgttgggtttcggcaatttgttggctggcccaattttctctagtgagttcataaatacagacaagaacaagatggagaggtttctccatgctgggcgtttttcagttgcttcaatctatgcaccaatttcctttcctcctcttcctacgataatcctaaagagagatggagagaatactgcccctgcagtggctgctgttggctcactgaaaactgttgatgcagataggataatccttaagcgagttattttgacaggttatccccaaagagtgtcgaaacgtaaagcttctgtgagacacatgttttataatccggaggatgttaaatggtttaagcctgttgagctttataccaaacgtggtcttcgtgggcgaatcaaagaacctgttggtacacatggaacaatgaagtgccttctcaacggggttcttgaacagcgtgatactgtatgtatgaatttatttaaacgtgcatacccgaagtggccaacccatcattttcctctatccgaataaaggaattcagaagtgtatattgattgggaatgaagctctggttcagattgacttcctcgtatggaggatgcagttttgtgacaatttatttttcgttttctccaccgccagtttccccttgcccatgtgcacttgtgagagaaattagacgttttctattttttatttatttatttgcatacaaaatactgagatgtaatagttattcacatgtcggttaaaaggtgcttgggtaaaatttattaattttttgttagtgtagtactg

SEQ ID NO: 19924 - protein, 178 aa, Glycine max
DNLTREKIEDELNELKEAHAADEEFPDEVDTPLDVPARKRFAKYRGLKSFRTSSWDPKESLPQDYARIFEFDNFKRTQKHVLAKALELDHENREDCISVGSYARLHIMGVPSAVASKLSLLAKTIPVTACGLLKHESKVSVLHFSVKKHEAYDAPIKSKEELIFHVGFRQFVGWPNFL

SEQ ID NO: 19925 - protein, 172 aa, Glycine max
MLGFGNLLAGPIFSSEFINTDKNKMERFLHAGRFSVASIYAPISFPPLPTIILKRDGENTAPAVAAVGSLKTVDADRIILKRVILTGYPQRVSKRKASVRHMFYNPEDVKWFKPVELYTKRGLRGRIKEPVGTHGTMKCLLNGVLEQRDTVCMNLFKRAYPKWPTHHFPLSE

SEQ ID NO: 19926 - protein, 148 aa, Glycine max
MERFLHAGRFSVASIYAPISFPPLPTIILKRDGENTAPAVAAVGSLKTVDADRIILKRVILTGYPQRVSKRKASVRHMFYNPEDVKWFKPVELYTKRGLRGRIKEPVGTHGTMKCLLNGVLEQRDTVCMNLFKRAYPKWPTHHFPLSE

SEQ ID NO: 19927 - DNA, 1503 bp, Glycine max
gcaggaagcacataagatccaagccatttacaaaaatggtaaccattaaagcatcttacacagtccttccaaatgaaccaactccggagggccttttatggctatctgatattgatcaagtggcacgtctacgccacacacccaccatctacattttccatgcaaaacacaaccatgatacattaattgagaggatgagaaactctcttagcaagattttggttcactactatccaatagccggtcgattgagaaggatagaaggtagtggtcgattggaattggattgcaatgcaaaaggggtggtgttgcttgaagctgaatccacaaaaacattggatgattatggagactttttacgtgagtccatcaaggacttggttccaacggttgattacacaagccctatagaggaacttccctcgctactagttcaagtaacaacattccatggtggtaaatcctttgccattggagttgccttatgccatatcttgtgtgatggggttggtgccattcagtttatcaactcttgggcaaagttagctcgaggagacacattggagccacatgagatgccatttctggatcgaacagtgctcaagttcccacaccctctgtcgccgccgcgctttgatcacctggagttcaagcctttgccacttatattgggaagatctgacaacacagtagagaaaaacaagaaggttgatgccaccttgctgaagctaacaccagaacaagtggggaagctgaagaagaaggccaatgatgactcaacaaaagaagggtcaagaccttatagcagatttgaagctattgctgcacatatatggagatgtgcctctaaggctcgtaaactagataagaatcaaccaactctagttcggttcaatgccgatattcgcaatagactaattccacctctccctaagaattattttgggaatgctttgtccttaacaacagcatcatgtcacgttggagatgtcatatcaaattctttgagttatgctgctcagaagataagggaagcaattgaagtggttacatatgagtatatatggtcacagatagatgtgattagaggtcaggagcaactggataatgcaagggctttgttctttggacaaaatgaaggaaaggatgccttgttttatgggaaccctaaccttcttattacaagttggatgagcatgccaatgcacgaagcagattttggctggggaaagcctgtgtatttaggtctaggaagtgtatctacacaagatagggcactgattattcaaagccctgatggtgacggctctattattctgtccatacactttcagatggaacatatgcagcttttcaagaaatatttttatgaagatatgtgaactatattcacatcgctactatcttgaacttcttgtatgggagcttaatttacgtgtgatctgcaatttctcatgtttaataaatttagttaaccatgtgggttaactataagcttgaatg

SEQ ID NO: 19928 - protein, 459 aa, Glycine max
RKHIRSKPFTKMVTIKASYTVLPNEPTPEGLLWLSDIDQVARLRHTPTIYIFHAKHNHDTLIERMRNSLSKILVHYYPIAGRLRRIEGSGRLELDCNAKGVVLLEAESTKTLDDYGDFLRESIKDLVPTVDYTSPIEELPSLLVQVTTFHGGKSFAIGVALCHILCDGVGAIQFINSWAKLARGDTLEPHEMPFLDRTVLKFPHPLSPPRFDHLEFKPLPLILGRSDNTVEKNKKVDATLLKLTPEQVGKLKKKANDDSTKEGSRPYSRFEAIAAHIWRCASKARKLDKNQPTLVRFNADIRNRLIPPLPKNYFGNALSLTTASCHVGDVISNSLSYAAQKIREAIEVVTYEYIWSQIDVIRGQEQLDNARALFFGQNEGKDALFYGNPNLLITSWMSMPMHEADFGWGKPVYLGLGSVSTQDRALIIQSPDGDGSIILSIHFQMEHMQLFKKYFYEDM

SEQ ID NO: 19929 - protein, 448 aa, Glycine max
MVTIKASYTVLPNEPTPEGLLWLSDIDQVARLRHTPTIYIFHAKHNHDTLIERMRNSLSKILVHYYPIAGRLRRIEGSGRLELDCNAKGVVLLEAESTKTLDDYGDFLRESIKDLVPTVDYTSPIEELPSLLVQVTTFHGGKSFAIGVALCHILCDGVGAIQFINSWAKLARGDTLEPHEMPFLDRTVLKFPHPLSPPRFDHLEFKPLPLILGRSDNTVEKNKKVDATLLKLTPEQVGKLKKKANDDSTKEGSRPYSRFEAIAAHIWRCASKARKLDKNQPTLVRFNADIRNRLIPPLPKNYFGNALSLTTASCHVGDVISNSLSYAAQKIREAIEVVTYEYIWSQIDVIRGQEQLDNARALFFGQNEGKDALFYGNPNLLITSWMSMPMHEADFGWGKPVYLGLGSVSTQDRALIIQSPDGDGSIILSIHFQMEHMQLFKKYFYEDM

SEQ ID NO: 19930 - protein, 395 aa, Glycine max
MRNSLSKILVHYYPIAGRLRRIEGSGRLELDCNAKGVVLLEAESTKTLDDYGDFLRESIKDLVPTVDYTSPIEELPSLLVQVTTFHGGKSFAIGVALCHILCDGVGAIQFINSWAKLARGDTLEPHEMPFLDRTVLKFPHPLSPPRFDHLEFKPLPLILGRSDNTVEKNKKVDATLLKLTPEQVGKLKKKANDDSTKEGSRPYSRFEAIAAHIWRCASKARKLDKNQPTLVRFNADIRNRLIPPLPKNYFGNALSLTTASCHVGDVISNSLSYAAQKIREAIEVVTYEYIWSQIDVIRGQEQLDNARALFFGQNEGKDALFYGNPNLLITSWMSMPMHEADFGWGKPVYLGLGSVSTQDRALIIQSPDGDGSIILSIHFQMEHMQLFKKYFYEDM

SEQ ID NO: 19931 - DNA, 1214 bp, Glycine max
tagaactgcgacgagcagggagaggatgaagatgaaagatgtgccgataaaacatgtcagcacctaagaatgggttgctggtgaagagccttataccgactgcatataatgtgtataatgctactaggatcactttgatcaacaatctgaagaagctgctcaaagtggtgcctgtgcatgcttgtgggtggtgcagtgaaatccatttaggatctgttggacattcattcaagtcatgtaaaggcacacaggccaacatccgctagggcctccacgaatggacgaatgcacatgttgaagacatattaattccaattgaagcctatcacctctttgatcgtcttggaaaacggattactcatgaagagagattctctatccctcgaattccagcagtggttgagctccgcattcaagccagtgttgaaattccagagtttcccaccaaaaggagaagaaagcctatcatccgtatttggaggaaggaattcattgatgctgatgaaagtaatctaccagataaaatctcagagggccctttaaaaccattactagctgaaatacctgattaattaagtatagtccctcttgccgaggaaactctccaagcatggaacgggtgaggaaaggtgcgaagagactaatgaggatgtacaatgtgagggtgtgtggatattgccctgaaattcatgttggtgcccagggtctcaaagctaaaaactgtgaagcccataaacaccaacaacgcaatgggcagcatggttggcagtctgcagttctggatgatttgatccctccaagatttgtatggcatgttcctgatgtaaatgcactgctagaacgagagcttaggaattcttatggccaggcgcatgtagaagtggaaatgtgcattcaggctggtgctgccttaccagaacagtataaatcgaccatgcggctggatgtggggatcccatcaactttgaaagaagctgacatggtagtttgagattaatttcccttatagacaaaccccaacttttgaatatagtgtaaattgtgtcaaactggatgcaatgataatttactgatttatttagggactagaataagcatcactttggttagttctatttgggggtatatatgccatctagacaaacgctgtcattttctatcctctgcatgcaggcaaaagatatataaaattgtcagtgtaagattgatgttgc

SEQ ID NO: 19932 - protein, 126 aa, Glycine max; identical to SEQ ID NO: 12044

SEQ ID NO: 19933 - protein, 115 aa, Glycine max; identical to SEQ ID NO: 12045

SEQ ID NO: 19934 - protein, 113 aa, Glycine max; identical to SEQ ID NO: 12046

SEQ ID NO: 19935 - DNA, 1467 bp, Glycine max
gaagcaatggattcaacgaataactgcatcttggccaacttatttgagaaggcaatgacatttgatctattgtctggcattttagattctgaggtaagagagctggacagtttcatggacactctccaagaagaaattgttgatgctcgtcataaaatattttcatgcaaacatttgactgaggttttctttatgatggacaaaaaattgcatgactctgaagagtctgtgaagcagtttcaacagcagttattggagttgaaaatgcagtcatcccagttacagaaaaccattgaggcttttcgacatgagaattgcgaagcggggaaggccttgaatttatcaggaaatggtcaactgacaaatgtgaaagcaaaatccaatgaacagatggttgaacaacgaagatatattctgcgaatgcttgagaaatctctagcaagggaactcgagcttgaaaggaagttagcagagtcaagaaacaatgaagacctaaagttgaaactccattacacagaacaagtggcattttatatggaagaagctgcagaagtagtttggggaagatttctagaggcagacaataccacagaggtgttaatggggatttctaaaggtataatgggacgccttcaagtaactgagttcaacctcaatggttctatgcaacgagaaaatgagctgagatcaaaagttcaaattttgatagatcaactcaaggctaaagatgctgctttagagaagcttgagaaatgtaatgttgagagtgttaaggaaaaatctgaggtgttggctttaagggaaaaggtgaaatttcttgaggaagagcaaaaagaatttgagcttcagataaataatgtgactgcagagaatgaagcatgtcacgaacacctaattgaaatggaaaattttgttgactctttgaaagaaagcattgacatagcagaaaatcgggctgagagtgcagaagcaaaggttacacagttaactgagaccaacttggaacttactgaagaggtgagttttcttaaagggagtgccagtactgcagagaaaaaggttggttcacttgagaagcaactaagggaattagatatccaactacaaaatgcaaaggcatcttctgaagcaagtcaagaacagcagaacatgttatacacagctatatgggatatggaaatattgattgaagagctaaaatcaaaggttgcaaaagctgaaactaataaagaaagtgctgcagagcaatgctttgtgctgtctgaaactaacttggaacttaataaagaattggatctccttaggtccagaacagtaagcttgaaaacatctttggatcaagctagcaatacaagatcatcaagggcaaaagaaattgattgtaaagctaagcttatcatggatatggtaatgcaactagcctctgaaagagagcgcatcaataaccagttacatgctttaaaacag

SEQ ID NO: 19936 - protein, 489 aa, Glycine max
EAMDSTNNCILANLFEKAMTFDLLSGILDSEVRELDSFMDTLQEEIVDARHKIFSCKHLTEVFFMMDKKLHDSEESVKQFQQQLLELKMQSSQLQKTIEAFRHENCEAGKALNLSGNGQLTNVKAKSNEQMVEQRRYILRMLEKSLARELELERKLAESRNNEDLKLKLHYTEQVAFYMEEAAEVVWGRFLEADNTTEVLMGISKGIMGRLQVTEFNLNGSMQRENELRSKVQILIDQLKAKDAALEKLEKCNVESVKEKSEVLALREKVKFLEEEQKEFELQINNVTAENEACHEHLIEMENFVDSLKESIDIAENRAESAEAKVTQLTETNLELTEEVSFLKGSASTAEKKVGSLEKQLRELDIQLQNAKASSEASQEQQNMLYTAIWDMEILIEELKSKVAKAETNKESAAEQCFVLSETNLELNKELDLLRSRTVSLKTSLDQASNTRSSRAKEIDCKAKLIMDMVMQLASERERINNQLHALKQ

SEQ ID NO: 19937 - protein, 487 aa, Glycine max
MDSTNNCILANLFEKAMTFDLLSGILDSEVRELDSFMDTLQEEIVDARHKIFSCKHLTEVFFMMDKKLHDSEESVKQFQQQLLELKMQSSQLQKTIEAFRHENCEAGKALNLSGNGQLTNVKAKSNEQMVEQRRYILRMLEKSLARELELERKLAESRNNEDLKLKLHYTEQVAFYMEEAAEVVWGRFLEADNTTEVLMGISKGIMGRLQVTEFNLNGSMQRENELRSKVQILIDQLKAKDAALEKLEKCNVESVKEKSEVLALREKVKFLEEEQKEFELQINNVTAENEACHEHLIEMENFVDSLKESIDIAENRAESAEAKVTQLTETNLELTEEVSFLKGSASTAEKKVGSLEKQLRELDIQLQNAKASSEASQEQQNMLYTAIWDMEILIEELKSKVAKAETNKESAAEQCFVLSETNLELNKELDLLRSRTVSLKTSLDQASNTRSSRAKEIDCKAKLIMDMVMQLASERERINNQLHALKQ

SEQ ID NO: 19938 - protein, 471 aa, Glycine max
MTFDLLSGILDSEVRELDSFMDTLQEEIVDARHKIFSCKHLTEVFFMMDKKLHDSEESVKQFQQQLLELKMQSSQLQKTIEAFRHENCEAGKALNLSGNGQLTNVKAKSNEQMVEQRRYILRMLEKSLARELELERKLAESRNNEDLKLKLHYTEQVAFYMEEAAEVVWGRFLEADNTTEVLMGISKGIMGRLQVTEFNLNGSMQRENELRSKVQILIDQLKAKDAALEKLEKCNVESVKEKSEVLALREKVKFLEEEQKEFELQINNVTAENEACHEHLIEMENFVDSLKESIDIAENRAESAEAKVTQLTETNLELTEEVSFLKGSASTAEKKVGSLEKQLRELDIQLQNAKASSEASQEQQNMLYTAIWDMEILIEELKSKVAKAETNKESAAEQCFVLSETNLELNKELDLLRSRTVSLKTSLDQASNTRSSRAKEIDCKAKLIMDMVMQLASERERINNQLHALKQ

SEQ ID NO: 19939 - DNA, 1295 bp, Glycine max
atgtgtggcaggctccttccactgcgcaccatttggtggcatgatatagataacagctagtaattaggaagttggcgttacaagaacaagaacaaaaccccactcactcaatgcacataataatacaataatttcttagggagtgaatggcgaacttgccccaatccatctccacaagcggcgcgacgtcgtttggagcttcttctgccaccgccaaggatcgcagcaggatagcgtctgtggaacacctcgttctccaactcaacaaccccgatctccgagaaaacgctctccatgaactctccaagaagagagagttatttcaggatcttgctccattattgtggaattcttttggtaccatgtcagcacttttacaggaaatagtttcaatattccctgttatttcacctccaaaccttactccagcacaatcaactcgagtgtgcaatgctcttgctctttttcagtgtgtggcatctcaccttgatacaaggatgcaattcctccatgctcatatacctctatatctgtatcccttccttaatacaaccagtaagtccagaccatttgagtatttgaggcttaccagtcttggagtcattggtgccttagtgaaggttgatgatacaaaagttataagtttccttctttcaacagagattattccgttgtgcctgcgcagtatggaaatgggcagtgaattgtcaaaaactgttgcaacctttatagttcaaaaaattctgttggacgaaattggtttgaaatatatttgtactacagcagagcgcttttatgcagtagctcaagttttgggaaacatggtggaaactcttgttgagcaaccttcaagtcgtcttttgaagcacattattcgttgttatcttcgtctgtcagataatcagagtgcttgcaaggcattaagaacctgtcttccagacatgttaagagatgctacattcagtaattgccttcgtgaagacccaacagctaggatgtggctacagcagttgcttcataatattggagacaatcgggttcctgcactacaaggtggaggaggattcgatcgtatgatggggtcgtgagaacaaagacttgctactttgtgaaaattatcaactagctacatacataaaataggattttcagttgggcatgtattgagaatgaagaattgaatgggaagggaactatctttccgtaagatgttaagagtgaagtatacatgagaatagtgacctcttaattgaatacaaatattaaaatcataatgagccatatattttaaactg

SEQ ID NO: 19940 - protein, 313 aa, Glycine max
MANLPQSISTSGATSFGASSATAKDRSRIASVEHLVLQLNNPDLRENALHELSKKRELFQDLAPLLWNSFGTMSALLQEIVSIFPVISPPNLTPAQSTRVCNALALFQCVASHLDTRMQFLHAHIPLYLYPFLNTTSKSRPFEYLRLTSLGVIGALVKVDDTKVISFLLSTEIIPLCLRSMEMGSELSKTVATFIVQKILLDEIGLKYICTTAERFYAVAQVLGNMVETLVEQPSSRLLKHIIRCYLRLSDNQSACKALRTCLPDMLRDATFSNCLREDPTARMWLQQLLHNIGDNRVPALQGGGGFDRMMGS

SEQ ID NO: 19941 - protein, 241 aa, Glycine max
MSALLQEIVSIFPVISPPNLTPAQSTRVCNALALFQCVASHLDTRMQFLHAHIPLYLYPFLNTTSKSRPFEYLRLTSLGVIGALVKVDDTKVISFLLSTEIIPLCLRSMEMGSELSKTVATFIVQKILLDEIGLKYICTTAERFYAVAQVLGNMVETLVEQPSSRLLKHIIRCYLRLSDNQSACKALRTCLPDMLRDATFSNCLREDPTARMWLQQLLHNIGDNRVPALQGGGGFDRMMGS

SEQ ID NO: 19942 - protein, 196 aa, Glycine max
MQFLHAHIPLYLYPFLNTTSKSRPFEYLRLTSLGVIGALVKVDDTKVISFLLSTEIIPLCLRSMEMGSELSKTVATFIVQKILLDEIGLKYICTTAERFYAVAQVLGNMVETLVEQPSSRLLKHIIRCYLRLSDNQSACKALRTCLPDMLRDATFSNCLREDPTARMWLQQLLHNIGDNRVPALQGGGGFDRMMGS

SEQ ID NO: 19943 - DNA, 1259 bp, Glycine max
gatgttacttctattccaaatggcatttctaattcacacatcttgaattttgctgagaggttccctttcacaccaacaacaacatacaatatcttgctgaaggcctgtggtactgattattaccatgcaaaagcattaatcaaagagatggaaacagtaggtctttcccctaatcagataagctggtcaattttgatagatatatgtggagcatcatcaaatgtggagggtgccattgagattttgaaaaccatgggtgatgctggaattaaacctgatgttattgcatatacaacagccattaaggtttgtgttgaaagtaagaattttatgcaagcattaacattatatgaagaaatgaaatgctaccagatacgtccaaattgggtgacatataacacacttctgaaggcacgcagtaaatatggcttcctacatgaggtgcaacaatgcctggctatataccaggatatgcgaaaggcagggtacaaacccaatgactactatctagaagaactgattgaggagtggtgtgaaggagtaatacaaaataacagagagaagcaaggagaattttcttccagcaataaatctgaatcagagagaccccaaagtttacttcttgaaaaaattgcagctcaccttctaaagagggtggctgatatcctagctattgatgttcaagggttcacaaaggttgaagctcgtttggttgttcttgcagttcttcgaatgatcaaagagaattacggtttaggacattctgtaaatgatgatatcttgatcatcataggagctactaaagtagacgaaaatccatccaaacacatattagaagtgcaagaggcaataataaaacttcttaggaatgagttggggcttgaagtttttccagccaaaaccagattagcactaagtgacacagcaaatttagagtaccccaacttttctaatctgagcatagaagcacaacctggagagaatgcattggggtttcagacaaggaggcctggagttctagtaaggttgaaggtcaccaaaaaatcattataccgttggttgcacaggaagtaagcgttaaatagttctattataacttacagaaattttgtacaaatattagataagatatgccattttttttctcccaaccctgtatatattgcatttgggtatagctgcctatgtatctgtaataaaataggtgtaacataatgaatgatacctagtaccgtggaatcaaatcattttcttaattg

SEQ ID NO: 19944 - protein, 357 aa, Glycine max
DVTSIPNGISNSHILNFAERFPFTPTTTYNILLKACGTDYYHAKALIKEMETVGLSPNQISWSILIDICGASSNVEGAIEILKTMGDAGIKPDVIAYTTAIKVCVESKNFMQALTLYEEMKCYQIRPNWVTYNTLLKARSKYGFLHEVQQCLAIYQDMRKAGYKPNDYYLEELIEEWCEGVIQNNREKQGEFSSSNKSESERPQSLLLEKIAAHLLKRVADILAIDVQGFTKVEARLVVLAVLRMIKENYGLGHSVNDDILIIIGATKVDENPSKHILEVQEAIIKLLRNELGLEVFPAKTRLALSDTANLEYPNFSNLSIEAQPGENALGFQTRRPGVLVRLKVTKKSLYRWLHRK

SEQ ID NO: 19945 - protein, 308 aa, Glycine max
METVGLSPNQISWSILIDICGASSNVEGAIEILKTMGDAGIKPDVIAYTTAIKVCVESKNFMQALTLYEEMKCYQIRPNWVTYNTLLKARSKYGFLHEVQQCLAIYQDMRKAGYKPNDYYLEELIEEWCEGVIQNNREKQGEFSSSNKSESERPQSLLLEKIAAHLLKRVADILAIDVQGFTKVEARLVVLAVLRMIKENYGLGHSVNDDILIIIGATKVDENPSKHILEVQEAIIKLLRNELGLEVFPAKTRLALSDTANLEYPNFSNLSIEAQPGENALGFQTRRPGVLVRLKVTKKSLYRWLHRK

SEQ ID NO: 19946 - protein, 273 aa, Glycine max
MGDAGIKPDVIAYTTAIKVCVESKNFMQALTLYEEMKCYQIRPNWVTYNTLLKARSKYGFLHEVQQCLAIYQDMRKAGYKPNDYYLEELIEEWCEGVIQNNREKQGEFSSSNKSESERPQSLLLEKIAAHLLKRVADILAIDVQGFTKVEARLVVLAVLRMIKENYGLGHSVNDDILIIIGATKVDENPSKHILEVQEAIIKLLRNELGLEVFPAKTRLALSDTANLEYPNFSNLSIEAQPGENALGFQTRRPGVLVRLKVTKKSLYRWLHRK

SEQ ID NO: 19947 - DNA, 888 bp, Glycine max
gtctgtctaccaagcaatcagatgcatgtcatccaagctctttgttggagggatttcttatcaaactgatgatcacagtctcagggacgagtttgccaaatatgggcaagtcattgaagctaggattatcattgaccgtgaatctgggaggtctagaggttttggctttgtaacttacacgtcttctgaggaggcttcagctgccattactgccttggatggaaagactctcgatggacggagcatacgtgttaatcatgctaacgagaagacaggtggctttcgtggcggcggtggctatggtggcggcggctacggtggtggtggaggatatggtggtggtggcggtggctatggtggtggtggaggctatggtggtggtggcggcggcggtggatacggtggcggcgactatggtggcaaccgcaacaggggtggtggtggtgattatggagttgctggtggaggtggaggcacctttactgctggaggtagcgacagctttgccaacagtaactttggttctgacagtagttttggtggaaacggtgctggtggctttgatgcaaccggcggttccacaggcgatgatgggttctctggcacacctgatgataactttggtggtaacaagaatgaagaaaccatggatgatatcttcaaggacgatgagccggacagctacgccgacaagaggagctagtttgtgccctctccaaagagtgctcatcaatacgattccagaacgatatgtattggctagtgtttgctgttaacatcatagcggcctgtatgttcaaataatggagcgagtatttctgatgagtttgagttgtcgggggctgtggaactttcaaacatggcgatacgttataatgtcgttttgct

SEQ ID NO: 19948 - protein, 233 aa, Glycine max
SVYQAIRCMSSKLFVGGISYQTDDHSLRDEFAKYGQVIEARIIIDRESGRSRGFGFVTYTSSEEASAAITALDGKTLDGRSIRVNHANEKTGGFRGGGGYGGGGYGGGGGYGGGGGGYGGGGGYGGGGGGGGYGGGDYGGNRNRGGGGDYGVAGGGGGTFTAGGSDSFANSNFGSDSSFGGNGAGGFDATGGSTGDDGFSGTPDDNFGGNKNEETMDDIFKDDEPDSYADKRS

SEQ ID NO: 19949 - protein, 225 aa, Glycine max
MSSKLFVGGISYQTDDHSLRDEFAKYGQVIEARIIIDRESGRSRGFGFVTYTSSEEASAAITALDGKTLDGRSIRVNHANEKTGGFRGGGGYGGGGYGGGGGYGGGGGGYGGGGGYGGGGGGGGYGGGDYGGNRNRGGGGDYGVAGGGGGTFTAGGSDSFANSNFGSDSSFGGNGAGGFDATGGSTGDDGFSGTPDDNFGGNKNEETMDDIFKDDEPDSYADKRS

SEQ ID NO: 19950 - protein, 185 aa, Glycine max
MERLSMDGAYVLIMLTRRQVAFVAAVAMVAAATVVVEDMVVVAVAMVVVEAMVVVAAAVDTVAATMVATATGVVVVIMELLVEVEAPLLLEVATALPTVTLVLTVVLVETVLVALMQPAVPQAMMGSLAHLMITLVVTRMKKPWMISSRTMSRTATPTRGASLCPLQRVLINTIPERYVLASVCC

SEQ ID NO: 19951 - DNA, 1291 bp, Glycine max
aatatgacgcgctccggcgccgccaggggtggtaagaccctgccgccgcgggcttcagcccgcgatgatgagatcaatgacacgattccgactttgggatcggagactaattttaggaatgggaagtatttgtattactcgagaggtggggattactgcaagggaatgaatcattatttgtggagtttcttgtgtggattgggggaagctatgtttttgaacaggacttttgttatggatttgagtgtttgtttggcttcaacttataaccctagtaacaaggatgaggaggggaaggattttaggtactacttcgatttcgagcatttgaaggagacggcttcgtttgtggaggaaggtgagtttttgagggattggaagaattgggataaaacgcatttgaagaagaagaagattcctgttaggaaggttgtcaatcacaaggtgactcctatgcagcttaagaaggataagagtacgattatatggaggcagtttgatgcgccggagcctgaaaattattggtatagggtttgtgaaggtgaggccgctaagaatattcagaggccttggcatgctgtgtggaaatccaagaggttgatgaatattgttactgagattagtggaaggttggactgggattttgacgccgttcatgtggttcggggagagaaagctcagaacaaggagttgtggcctcatttggattatgatacgtcgccggatgttcttgtcgagaagcttaaatggatggttcagccttggagacatttgtacattgccaccaatgagccttattataattactttgataagttgaggtcaaattacaaggtgcatctgcttgatgactataaggagctgtggggaaatacaagtgagtggtataacgagaccacacttctcaacaatggaaagcctgttgagtttgatgggtacatgagagttgcagtggatactgaggtcttttaccgtggaaagacacgcgtggaaacgttctacaatttgactaaagattgcaaggatggagttaatacatgctgatcaggttggcactactgattatgatgctttttcagaatacatggtacactcgggccttgcttttggattcagtttcagattcataccattgggttagatatgagcttgttgttgtgcttgcttgttcttttattatattgatgatttatattgattatcatgattttgtatacatactatagaatccctttctaccctctttcctttctgttgactcaagctgctaaatccattctcgtattctttc

SEQ ID NO: 19952 - protein, 347 aa, Glycine max
NMTRSGAARGGKTLPPRASARDDEINDTIPTLGSETNFRNGKYLYYSRGGDYCKGMNHYLWSFLCGLGEAMFLNRTFVMDLSVCLASTYNPSNKDEEGKDFRYYFDFEHLKETASFVEEGEFLRDWKNWDKTHLKKKKIPVRKVVNHKVTPMQLKKDKSTIIWRQFDAPEPENYWYRVCEGEAAKNIQRPWHAVWKSKRLMNIVTEISGRLDWDFDAVHVVRGEKAQNKELWPHLDYDTSPDVLVEKLKWMVQPWRHLYIATNEPYYNYFDKLRSNYKVHLLDDYKELWGNTSEWYNETTLLNNGKPVEFDGYMRVAVDTEVFYRGKTRVETFYNLTKDCKDGVNTC

SEQ ID NO: 19953 - protein, 346 aa, Glycine max
MTRSGAARGGKTLPPRASARDDEINDTIPTLGSETNFRNGKYLYYSRGGDYCKGMNHYLWSFLCGLGEAMFLNRTFVMDLSVCLASTYNPSNKDEEGKDFRYYFDFEHLKETASFVEEGEFLRDWKNWDKTHLKKKKIPVRKVVNHKVTPMQLKKDKSTIIWRQFDAPEPENYWYRVCEGEAAKNIQRPWHAVWKSKRLMNIVTEISGRLDWDFDAVHVVRGEKAQNKELWPHLDYDTSPDVLVEKLKWMVQPWRHLYIATNEPYYNYFDKLRSNYKVHLLDDYKELWGNTSEWYNETTLLNNGKPVEFDGYMRVAVDTEVFYRGKTRVETFYNLTKDCKDGVNTC

SEQ ID NO: 19954 - protein, 292 aa, Glycine max
MNHYLWSFLCGLGEAMFLNRTFVMDLSVCLASTYNPSNKDEEGKDFRYYFDFEHLKETASFVEEGEFLRDWKNWDKTHLKKKKIPVRKVVNHKVTPMQLKKDKSTIIWRQFDAPEPENYWYRVCEGEAAKNIQRPWHAVWKSKRLMNIVTEISGRLDWDFDAVHVVRGEKAQNKELWPHLDYDTSPDVLVEKLKWMVQPWRHLYIATNEPYYNYFDKLRSNYKVHLLDDYKELWGNTSEWYNETTLLNNGKPVEFDGYMRVAVDTEVFYRGKTRVETFYNLTKDCKDGVNTC

SEQ ID NO: 19955 - DNA, 1635 bp, Glycine max
gaaactccaacaaaaagacccaaagagtgtgtttttgcgcattcattcatttggtgatgtgcaacaagaacagtccttcttcttcggacattcaagcaacctctattatgaagaggacgcggaagccgaatagaaggtatcatcataataccacttcttcctcttcctcttcttcttcttcttcttcttcttcttcttcctccacgacgtcgtttaagccgcaccggcgcgggaacagaaccaagacgcggaagcccaagtttgtcagcctgcggcttcagttatccgatcctaagaaaaagatgaaaacaacccagcccaagcccaagcccaagcccaagcccaagcctaaggcccaacaacaagaacagcagcagcaacagccgcagctgaatctcttccctctccatccggaccaccatgacatgcacgaggagcagaacgtggcgcttctctttagctccgatggtggggccacactcaacggcctactggaggaggagacgactacgacggaggaagggtcgatgtcggtgctgacgtgtccggcggaggacaccgggaaccggctggtacggaaggcgatgcggcggagggagagcgaggaggggagtgaagagcggtgggtgtgctactcggaggtggtggaggagaagaaggaggccatggaggaggtcacgagttattgcgtcacgggggaaacgaagacgaagacgaagacgaaaacgccgtcgtttggattgttgtcgttgaagctggatcaccaggggatattgaatgcatggtctgataaaggctctctctacgtcgcggcggaggaggaggaggaggggggcccacagactgtccctgacatattcaatggtttcctttttcataatgttgcatgggacgggttggggagtggtggtgttgttgggaatgcatggaatgttcctgaaaattgtggggctaacaagactaatgtgaaggaagaaatgggttggaagttggggcagagagaggcaagtttgcagagatacaaggagaagaggcaaagcaggctcttctataagaaaatccgttatgaagttcgcaagctgaatgctgagaaacggcccaggatgaagggacgatttgtgaagagggaatgacaagtgtagaaggatagacacggttgataataagaatgttgtcatattacagcgttggaatagaagttttcgtgcctttggttttgggtagtgctgggaagctttttcttgatggatacgatataattaattatgcaatgtaaaatcccagtggtacaaatatgaacaccccgggaaaatctatattcagctgctgtgcgacacaacatgtaaggggcagtttctagacctttgattgaatgagtttgacaaagttttcacatgtgttttgatctcaatccaaggctttagaaacagtcaaaagcatgttgtacaagtacaactaccaaaaaaatgtataggttgttctaaagacttgtacaaattctctcacaaaatttaaatatttggaacatcaaacgaactggaaattgaaacattagtcagatcgtcaacactaggggagtgatctctaggaggaagtgttgtgtgactacaacctcccactgatatatcttggcat

SEQ ID NO: 19956 - protein, 376 aa, Glycine max
NSNKKTQRVCFCAFIHLVMCNKNSPSSSDIQATSIMKRTRKPNRRYHHNTTSSSSSSSSSSSSSSSSTTSFKPHRRGNRTKTRKPKFVSLRLQLSDPKKKMKTTQPKPKPKPKPKPKAQQQEQQQQQPQLNLFPLHPDHHDMHEEQNVALLFSSDGGATLNGLLEEETTTTEEGSMSVLTCPAEDTGNRLVRKAMRRRESEEGSEERWVCYSEVVEEKKEAMEEVTSYCVTGETKTKTKTKTPSFGLLSLKLDHQGILNAWSDKGSLYVAAEEEEEGGPQTVPDIFNGFLFHNVAWDGLGSGGVVGNAWNVPENCGANKTNVKEEMGWKLGQREASLQRYKEKRQSRLFYKKIRYEVRKLNAEKRPRMKGRFVKRE

SEQ ID NO: 19957 - protein, 358 aa, Glycine max
MCNKNSPSSSDIQATSIMKRTRKPNRRYHHNTTSSSSSSSSSSSSSSSSTTSFKPHRRGNRTKTRKPKFVSLRLQLSDPKKKMKTTQPKPKPKPKPKPKAQQQEQQQQQPQLNLFPLHPDHHDMHEEQNVALLFSSDGGATLNGLLEEETTTTEEGSMSVLTCPAEDTGNRLVRKAMRRRESEEGSEERWVCYSEVVEEKKEAMEEVTSYCVTGETKTKTKTKTPSFGLLSLKLDHQGILNAWSDKGSLYVAAEEEEEGGPQTVPDIFNGFLFHNVAWDGLGSGGVVGNAWNVPENCGANKTNVKEEMGWKLGQREASLQRYKEKRQSRLFYKKIRYEVRKLNAEKRPRMKGRFVKRE

SEQ ID NO: 19958 - protein, 341 aa, Glycine max
MKRTRKPNRRYHHNTTSSSSSSSSSSSSSSSSTTSFKPHRRGNRTKTRKPKFVSLRLQLSDPKKKMKTTQPKPKPKPKPKPKAQQQEQQQQQPQLNLFPLHPDHHDMHEEQNVALLFSSDGGATLNGLLEEETTTTEEGSMSVLTCPAEDTGNRLVRKAMRRRESEEGSEERWVCYSEVVEEKKEAMEEVTSYCVTGETKTKTKTKTPSFGLLSLKLDHQGILNAWSDKGSLYVAAEEEEEGGPQTVPDIFNGFLFHNVAWDGLGSGGVVGNAWNVPENCGANKTNVKEEMGWKLGQREASLQRYKEKRQSRLFYKKIRYEVRKLNAEKRPRMKGRFVKRE

SEQ ID NO: 19959 - DNA, 1242 bp, Glycine max
aaacatgtggtgtgtcacagctatctttttcatattagtgggagctgttgtttggattttggagcatagggtgaatgatgaatttaggggaccacccaaaaaacaagtagttactgttttatggtttagtttttaacaatgttcttttcccacagggaaaatacagtgagcacacttggccgctttgtgttgattatatggttatttgtagttcttataattaactcgagttacacggcaagtctaacctcaatcctcacagtgcaacaactttattcgcccattaaaggcattgaaagtttagtaattggcaaagagcctattgggtacacacagggttcttttgctagaaattatttagttcaggaattgaatattgatgagtccaggcttgttcctctaacaacaccagaagaagctgctaaagcactgagaaagggtccagaaaatgggggtgtagctgcttacattgatgagcgtgcctacactgacatcttcctctccagccgttgtgatttaactgttataggtcaagagttcaccagaaatggttggggatttgcctttccacgggactcgccattagcagttgacctgtcaactgccatattgcaaatgatagatagtggagatttgcaaaggatccatgacaaatggcttttgagtagcgcttgcttatcacaaggtgcaaagtttgaagtggaaagactccaacttaaaagcttttggggcctctatatgatctgtgggcttgcctgcttgcttgcactcttcatatatcttatacagatttggaggcaataccataagcactacgtctcagaggaacttcattctactgacggccaaaacataggatcaaaatcttcacatctcaagactttcctttcatttgtagatgaaaaagaagagacctttaagagccggtccaagagaaggaaaatggagaggatctcatacagaaacagtgaaggaagcttatccatcagctccaaccagggatatgcttcacgcagaagcgaatgtgctagcgaagtatgatcaatatttctacatcattttctagcctcttatgctagctacaacaccaacgctcttcattcatgctgcaactactgggctactagtacttccttcttttcaagtaaatatatatgttggatactttagaacttttgttagctatatgtaacacttatttttaacacggtctttatacaaaaaatgaaaagttttttattc

SEQ ID NO: 19960 - protein, 300 aa, Glycine max
MFFSHRENTVSTLGRFVLIIWLFVVLIINSSYTASLTSILTVQQLYSPIKGIESLVIGKEPIGYTQGSFARNYLVQELNIDESRLVPLTTPEEAAKALRKGPENGGVAAYIDERAYTDIFLSSRCDLTVIGQEFTRNGWGFAFPRDSPLAVDLSTAILQMIDSGDLQRIHDKWLLSSACLSQGAKFEVERLQLKSFWGLYMICGLACLLALFIYLIQIWRQYHKHYVSEELHSTDGQNIGSKSSHLKTFLSFVDEKEETFKSRSKRRKMERISYRNSEGSLSISSNQGYASRRSECASEV

SEQ ID NO: 19961 - DNA, 1430 bp, Glycine max
acatttgtcagttagttagcagagtgcagtgacttgagaatggccttgccagtggtcgtcgacgcagagtacctcaaagaggtcgacaaggctcgccgcgatctccgcgcactcatcgctaacaggaactgcgctcctctcatgcttcgattggcctggcacgatgccggaacttacgatgctaagaccaagactggtggacctaacggttcgatccgtaacgaggaagagtattctcacggcgccaacaatggcttgaagaaggctattgatttctgtgaggaagtgaaggaaaaacatcctaaaattacatatgcagatctctaccagtgcccacaaatctctatcagctcaaaagggagggggaacaaatccctaaaacaagaattctgggtagctatatctattttgtattagtagcagtaatacacctagaggttgctagttaaggagtgtacaggagtacaattgaagttcaagcttctatcttgcgggtgttgttgcagttgaggttaccgggggtcccacaattgatttcgctcctggtagaagggattcaaaaatatctcctaatgaagggcggcttcctgatgctaaaaaaggtgtttttaaatttttttcagtgataaaactattctcttcacctggactgtgaaagatgttctattttttgtattcccttcacaatggacgaggttatgaatgcgatatgaaagcataaaaatatgtcaatgctgttgttaggtgtttcacatctccatgatatcttttatcgaatgggcttgactgaccgagatattgttgcactatctggaggacatacactggggagagcacatccagagagatcagggtttgatggcccttggacagaggaccctctgaagtttgataactcatactttgtggaacttttgaaagaagattctgctgggctgcttaaacttccaacagacaaggctttattggaggatgctgaatttcgccgttatgttgagctatatgcaaaggacgaggatgcattttttcgagattatgctgaatcacataagaaactttcagagctaggctttgtgccaagttcaaagccgatttctattaaggatgggaccatactggcacaaggtgctgtaggagttgtagttactgccgcagtggtgatcatcagttacttgtatgaagttcgcaaaagagggaagtaaactggacttgttcatttcacttggctgttacgtttgcgtgaccctgacccataatgtgaaaacagggttcatttttgcagcttcagattctgtttacttagtaccaataaagaataatgccacagccattcagacttttttttatatgaatagactaaaactatccctaaatactcaatttggtagcaacttcctaatatgttaatacaaattttagcattcccagtc

SEQ ID NO: 19962 - protein, 158 aa, Glycine max
MSMLLLGVSHLHDIFYRMGLTDRDIVALSGGHTLGRAHPERSGFDGPWTEDPLKFDNSYFVELLKEDSAGLLKLPTDKALLEDAEFRRYVELYAKDEDAFFRDYAESHKKLSELGFVPSSKPISIKDGTILAQGAVGVVVTAAVVIISYLYEVRKRGK

SEQ ID NO: 19963 - protein, 156 aa, Glycine max
MLLLGVSHLHDIFYRMGLTDRDIVALSGGHTLGRAHPERSGFDGPWTEDPLKFDNSYFVELLKEDSAGLLKLPTDKALLEDAEFRRYVELYAKDEDAFFRDYAESHKKLSELGFVPSSKPISIKDGTILAQGAVGVVVTAAVVIISYLYEVRKRGK

SEQ ID NO: 19964 - protein, 141 aa, Glycine max
MGLTDRDIVALSGGHTLGRAHPERSGFDGPWTEDPLKFDNSYFVELLKEDSAGLLKLPTDKALLEDAEFRRYVELYAKDEDAFFRDYAESHKKLSELGFVPSSKPISIKDGTILAQGAVGVVVTAAVVIISYLYEVRKRGK

SEQ ID NO: 19965 - DNA, 1355 bp, Glycine max
ggttttgcaggtgtttgaagcttgtgcttggaaaaacgatatatgttgacatatatttgagttgttatgttctgtctctgttttcgtgagatttacgtttcactatgagaagttaacacaaactagttctgtcctagtttctcggaagattttctaagatggaatctgttaaaccatcagcagtgacgccaagcaagagcaaattggctcgcacttttgccaaagttcttcacgttagagcagtgactggaattgcaccagttgatggactgaagaatgttaaagtcgatgcggatctcaacaatgaagcaaataaatgtaagagtgcactaaacaatgaagaagacgaagagcttcaggaaagaaaggccacagaagctttgcttgcaaaaacttttgctagcatttcaactgtgaaagcttcatatgctcagctacagaatgctcagtctccttatgaccctgatggaattcaagctgctgatcaattgatagtctcagagttcaagaccttgtctgagctaaagcaatgttacttcaaaaaacaatttgatcctttgccagctagagcaattcttgccgctaaattaaaggagctgcagagtgtcaacagaacctttgagatcatggggaagaagttagaatcacaggcgcggctcaaggaatctgagattatatttctccgagaaaagctagaagaagctaatgtgcacaacaggtcaattgagaagaggttaaatcaaagtggatcattatcagttcttgataatctccacatgtcaggactaagtcctagccattttgtcactgttcttcgccacacggttaggtccattcggagcttcgtgaaattgttagtgaatgagatgagatctgctggttgggatattgatgcatcagtcaaggccattatggagcagaatgtggtttactggaaagaagatcacaagtgttttgcaattgagtcctttgtgtgtagggagatgtttgattcattcaacttccccaacttctccctaccaaatgagtccctaccagataggaacaggaggcaactgttctttgggaggttcaacgagctaaaaccagagaaagcaaaggactttcttgcagggaaaccaagatcaccctttgcaaaattctgcaggatcaagtacttgaggcttgttcatcccaagatggaggcatccttcttcggcaacctgaatcagagaagcctgctgaatgccggagagtttcccaacacaaatttcttcacctcgtttgctgagatggcaaagagggtatggctcctacattgcttggccttctcctttgagcctcctcaagcttcaatctttcaagtggggaagtgg

SEQ ID NO: 19966 - protein, 399 aa, Glycine max
MESVKPSAVTPSKSKLARTFAKVLHVRAVTGIAPVDGLKNVKVDADLNNEANKCKSALNNEEDEELQERKATEALLAKTFASISTVKASYAQLQNAQSPYDPDGIQAADQLIVSEFKTLSELKQCYFKKQFDPLPARAILAAKLKELQSVNRTFEIMGKKLESQARLKESEIIFLREKLEEANVHNRSIEKRLNQSGSLSVLDNLHMSGLSPSHFVTVLRHTVRSIRSFVKLLVNEMRSAGWDIDASVKAIMEQNVVYWKEDHKCFAIESFVCREMFDSFNFPNFSLPNESLPDRNRRQLFFGRFNELKPEKAKDFLAGKPRSPFAKFCRIKYLRLVHPKMEASFFGNLNQRSLLNAGEFPNTNFFTSFAEMAKRVWLLHCLAFSFEPPQASIFQVGKW

SEQ ID NO: 19967 - protein, 243 aa, Glycine max
MGKKLESQARLKESEIIFLREKLEEANVHNRSIEKRLNQSGSLSVLDNLHMSGLSPSHFVTVLRHTVRSIRSFVKLLVNEMRSAGWDIDASVKAIMEQNVVYWKEDHKCFAIESFVCREMFDSFNFPNFSLPNESLPDRNRRQLFFGRFNELKPEKAKDFLAGKPRSPFAKFCRIKYLRLVHPKMEASFFGNLNQRSLLNAGEFPNTNFFTSFAEMAKRVWLLHCLAFSFEPPQASIFQVGKW

SEQ ID NO: 19968 - DNA, 1266 bp, Glycine max
gaagtcagactaaactcaataataggaaacacgcaacaagtgggggtggcgagcggaatatgatatatatgatatattgatatatcataacaataatcccaaaatattaagggtactgttttcgattcgatcaactcactcacgcgcacgcctttcattccattccattccgatgcgatgacgacgacgaattccctcttcttctcccttgactggcacaatgaattctatcctacctatcatgatttctaccttctcccccttttcgctctcttcttcccttcccttcgcttctttctcgaccgattcatattcgagaaagtggcgagacggttgattttcggaaaggggcatgcggcgctggactaccattcagacgagagaagaaaaaagattaggaaatttaaggaatcagcttggaaatgtgtttattatctttcagctgagattcttgctttgtctgtaacatacgatgaaccatggtttacaaatactagaaacttttgggtgggcccagggacccaggtctggccagatcaaaagatcaagttgaaattgaaggcagtctatatgtacgctgctggattttactcatactccatttttgctttgatattttgggaaacgaggcgctccgactttggagtgtccatgagtcatcatgttgctactgtaattctcattgttctgtcttacattttcaggtttgcacgtgttggatcagtggttttagcacttcatgatgctagcgatgtgtttctggagatagggaaaatgtccaaatacagtggtgctgaaactatggctagctttgcttttattctatttgttttatcttggatcatattgcgtctcatttactacccattctggattctttggagtacaagctatgaagttctgctcaccttggataaggaaaagcaccaagtggatggtccaatatattattatgtgttcaatagtcttctttactgcttgcttgttatgcatatttattggtgggtgctgatatttcggatgcttgttaaacaaatccaagcaagaggaaaagttagtgaagatgttcgatctgattcagaagatgaagatgaacatgaagattgagtagggaagcaaaagcacaatgtattctttaggcaaaggtgaatctaaaatgatgacaaattgttttacactctaacatgatgaatattgtcgtatgttatgtggatttattttatgttaaattgtccatattttattttatttttttataaaaaaaag

SEQ ID NO: 19969 - protein, 309 aa, Glycine max
MTTTNSLFFSLDWHNEFYPTYHDFYLLPLFALFFPSLRFFLDRFIFEKVARRLIFGKGHAALDYHSDERRKKIRKFKESAWKCVYYLSAEILALSVTYDEPWFTNTRNFWVGPGTQVWPDQKIKLKLKAVYMYAAGFYSYSIFALIFWETRRSDFGVSMSHHVATVILIVLSYIFRFARVGSVVLALHDASDVFLEIGKMSKYSGAETMASFAFILFVLSWIILRLIYYPFWILWSTSYEVLLTLDKEKHQVDGPIYYYVFNSLLYCLLVMHIYWWVLIFRMLVKQIQARGKVSEDVRSDSEDEDEHED

SEQ ID NO: 19970 - protein, 178 aa, Glycine max
MYAAGFYSYSIFALIFWETRRSDFGVSMSHHVATVILIVLSYIFRFARVGSVVLALHDASDVFLEIGKMSKYSGAETMASFAFILFVLSWIILRLIYYPFWILWSTSYEVLLTLDKEKHQVDGPIYYYVFNSLLYCLLVMHIYWWVLIFRMLVKQIQARGKVSEDVRSDSEDEDEHED

SEQ ID NO: 19971 - DNA, 1402 bp, Glycine max
gtcacaagttctttcactggaaggagaacaagaagaaaaaaccgacacaaagatctagtcctagctagaatcaaacaggggcgatctcaccttcaagaacacatcgccatggcaaggaacttgcttcttgtgctttttgcagtagccaccctcctccatggctcagcagcccaaaccagacacatggtcggtgatgccacgggctggatcatccctgctggcggcgctgccacctacaccgcctgggcttccaacaaaaccttcaccgtaaacgacactctcgtgttcaacttcgccaccggccaacacaacgtggccaaggtaacgaaatcggctttcgacgcgtgcaacggcgggagcgccgttttcaccctgacctccggtccagcgaccgtgaccctgaacgaaacaggggagcaatactacatttgctccgttggatcacactgttccgctggccagaaactggcaattaacgttaacagagcttcttctaccggtccttcccctgcacctcaacccagaggaagtggttctccaccaagggctagccctgtccccacacaagcaccacaagccagtagccccactcctccaccaaggtctgcaccagcacctgcttttggtccatcctctgaaccagctactttcattgttggagaaaccgctggctggattgttcctggcaacgcttccttttacacagcttgggcctctggcaaaaacttcagggttggagacgtccttgtgttcaactacgcatcaaatacacacaacgtagaggaggttacaaaggccaacttcgatgcttgcagctcagcctctcctattgccactttcaccactccacctgcgagagtgaccctcaacaaatctggtcaacatttcttcatctgtggaattccagggcactgtttgggaggtcaaaagcttgccatcaacgtcaccggcagcagcaccgccaccccaccttccgccgcggccccccccaccactccttctagcccttctccagccggtgctgtcactcctcccccacagaactctggtgctgcatctcttggagttgttggagtatttgccaccctgctttcagttgccgccacttttttctattagatactccacgagattattctagtcaggagcttccgagtcatcatcatcgctctttgattgtgtttcatgaattcagtttttttcttatttttttgaggatgacaataaagttagctttaatttaatttctcttcatcggctacagttttggttttttgttatgtttttgagtaaaaataaattggtacggtgtgaatatgttaacaagtgtatttctttgatagttaacatcgttgtattacagtgcatatatttggaattggagataaaaaatatttgtgac

SEQ ID NO: 19972 - protein, 372 aa, Glycine max
VTSSFTGRRTRRKNRHKDLVLARIKQGRSHLQEHIAMARNLLLVLFAVATLLHGSAAQTRHMVGDATGWIIPAGGAATYTAWASNKTFTVNDTLVFNFATGQHNVAKVTKSAFDACNGGSAVFTLTSGPATVTLNETGEQYYICSVGSHCSAGQKLAINVNRASSTGPSPAPQPRGSGSPPRASPVPTQAPQASSPTPPPRSAPAPAFGPSSEPATFIVGETAGWIVPGNASFYTAWASGKNFRVGDVLVFNYASNTHNVEEVTKANFDACSSASPIATFTTPPARVTLNKSGQHFFICGIPGHCLGGQKLAINVTGSSTATPPSAAAPPTTPSSPSPAGAVTPPPQNSGAASLGVVGVFATLLSVAATFFY

SEQ ID NO: 19973 - protein, 336 aa, Glycine max
MARNLLLVLFAVATLLHGSAAQTRHMVGDATGWIIPAGGAATYTAWASNKTFTVNDTLVFNFATGQHNVAKVTKSAFDACNGGSAVFTLTSGPATVTLNETGEQYYICSVGSHCSAGQKLAINVNRASSTGPSPAPQPRGSGSPPRASPVPTQAPQASSPTPPPRSAPAPAFGPSSEPATFIVGETAGWIVPGNASFYTAWASGKNFRVGDVLVFNYASNTHNVEEVTKANFDACSSASPIATFTTPPARVTLNKSGQHFFICGIPGHCLGGQKLAINVTGSSTATPPSAAAPPTTPSSPSPAGAVTPPPQNSGAASLGVVGVFATLLSVAATFFY

SEQ ID NO: 19974 - protein, 311 aa, Glycine max
MVGDATGWIIPAGGAATYTAWASNKTFTVNDTLVFNFATGQHNVAKVTKSAFDACNGGSAVFTLTSGPATVTLNETGEQYYICSVGSHCSAGQKLAINVNRASSTGPSPAPQPRGSGSPPRASPVPTQAPQASSPTPPPRSAPAPAFGPSSEPATFIVGETAGWIVPGNASFYTAWASGKNFRVGDVLVFNYASNTHNVEEVTKANFDACSSASPIATFTTPPARVTLNKSGQHFFICGIPGHCLGGQKLAINVTGSSTATPPSAAAPPTTPSSPSPAGAVTPPPQNSGAASLGVVGVFATLLSVAATFFY

SEQ ID NO: 19975 - DNA, 1551 bp, Glycine max
gggagagaaaaacgaagagtgagtcaccgttccgtgttcccgccgagtcggtataaacgagtgagcgagtcacaactcaccgcgctgcatggaccctctagaagctttggtcgcccaaatccaagggctttcgagcactcccggcgacctcactcgcctccacagtgttctgaagcaagccgatgactcgctccgatccgagtcaagtcgcctcgctccgattctcacccagctcgacccctccattcattccctcgggtttctctacatcctagaagcttcaatgaccgatccggtaaccaaaacgcaggctgagaccgtcgttccgatcgttactaggtttattggcgcttgcagcccggagcagattcgcttagcgcctgataaatttttatctgtctgtaagaggttaaaggatcaagtgatgctgctggaagctccgatacggggtgtggctcctttgttcactgctcttcggaaacttcaggtctccacagaacacttgactccactacactcagagtttcttctgctgtgcttgttggcaaagtgctacaaaactggtctatccattttggatgatgatgtttttgaagtagaccaaccacgagacctttttctctactgttattatggaggtatgatatgcattggacagaagcgctttcagaaggcattggacctcctgcataatgttgtaactgctcccatgtctaccataaatgctatagctgttgaagcttacaaaaagtatatattggtttctctcattcgtcatggacagttctcaaccagtcttcctaagtattcttcttcgactgctcaaaggaacctgaagaacttttgtcagccttacgtcgaattggctaatagttatggcactggacaaattgaagaactagaggcatatgccagggcaaatgcagagaagtttgaatctgacaacaaccttggactggttaatcaggttgtatcatccatgtataagcggaatattcagagattgacccagacatacttgaccctttctctccatgatatagccagcacagtgcagttaaatagccccaaagaagctgaaatgcatgtgctacaaatgattcaggatggcgaaatatatgcaactatcaaccagaaggatggaatggtgagattcttggaggatcctgaacagtataaaacctgtgaaatgattgaacatattgattcatcaatccaaagaataatggcactctcaaggaaacttactgcgacagacgaacaaatttcatgcgatcagttgtatttgtctaaggctggaagagagagacaaagatatgactttgatgactttgacgttccacaaaagttcaacatttaaggggctaggaatgatggaagtagatctggttatggtccatcacccgtttcctttatcttttgttattcctggttctgagagtgggggagtgttttatttcagtcccaaatggaagagtgcttgttctgaggatgttgaattgtctcaacttattaactatataaaatctataactgattctttgcacattt

SEQ ID NO: 19976 - protein, 423 aa, Glycine max
MDPLEALVAQIQGLSSTPGDLTRLHSVLKQADDSLRSESSRLAPILTQLDPSIHSLGFLYILEASMTDPVTKTQAETVVPIVTRFIGACSPEQIRLAPDKFLSVCKRLKDQVMLLEAPIRGVAPLFTALRKLQVSTEHLTPLHSEFLLLCLLAKCYKTGLSILDDDVFEVDQPRDLFLYCYYGGMICIGQKRFQKALDLLHNVVTAPMSTINAIAVEAYKKYILVSLIRHGQFSTSLPKYSSSTAQRNLKNFCQPYVELANSYGTGQIEELEAYARANAEKFESDNNLGLVNQVVSSMYKRNIQRLTQTYLTLSLHDIASTVQLNSPKEAEMHVLQMIQDGEIYATINQKDGMVRFLEDPEQYKTCEMIEHIDSSIQRIMALSRKLTATDEQISCDQLYLSKAGRERQRYDFDDFDVPQKFNI

SEQ ID NO: 19977 - protein, 358 aa, Glycine max
MTDPVTKTQAETVVPIVTRFIGACSPEQIRLAPDKFLSVCKRLKDQVMLLEAPIRGVAPLFTALRKLQVSTEHLTPLHSEFLLLCLLAKCYKTGLSILDDDVFEVDQPRDLFLYCYYGGMICIGQKRFQKALDLLHNVVTAPMSTINAIAVEAYKKYILVSLIRHGQFSTSLPKYSSSTAQRNLKNFCQPYVELANSYGTGQIEELEAYARANAEKFESDNNLGLVNQVVSSMYKRNIQRLTQTYLTLSLHDIASTVQLNSPKEAEMHVLQMIQDGEIYATINQKDGMVRFLEDPEQYKTCEMIEHIDSSIQRIMALSRKLTATDEQISCDQLYLSKAGRERQRYDFDDFDVPQKFNI

SEQ ID NO: 19978 - protein, 311 aa, Glycine max
MLLEAPIRGVAPLFTALRKLQVSTEHLTPLHSEFLLLCLLAKCYKTGLSILDDDVFEVDQPRDLFLYCYYGGMICIGQKRFQKALDLLHNVVTAPMSTINAIAVEAYKKYILVSLIRHGQFSTSLPKYSSSTAQRNLKNFCQPYVELANSYGTGQIEELEAYARANAEKFESDNNLGLVNQVVSSMYKRNIQRLTQTYLTLSLHDIASTVQLNSPKEAEMHVLQMIQDGEIYATINQKDGMVRFLEDPEQYKTCEMIEHIDSSIQRIMALSRKLTATDEQISCDQLYLSKAGRERQRYDFDDFDVPQKFNI

SEQ ID NO: 19979 - DNA, 1312 bp, Glycine max
aaaacaaatatattttagaaaccagaaacatgtttaagccaatgtttgattattgtggtttggccactttcaaccaagctcaaaccattgaattgtaatagttttttttttttacacatttatgtgaaagtgatagctttaacctacttattttttgttttcttgttaactatttgtctctgattttatgtactaccttttgtacatggtggctcttaaggttctacaatcaaggacaaatccgacgtttgtgtcttggaagggcggggcggtatgttgaacacttgtgaccttcatgcttggcttcttacttcatgaatttcttcttgttggttattaaatggttcttattgtcactatatgttttttcaattatgaatgagaaatatatgttcatctctttttggatgttaatgttgattcttctttcatggacttggaggaatttgatgtcttaaattattggaaaaataatcttgttaattattcagctttcaaagtcataaaattcatgaatttaaggttgagagggaaacagagggcgagcctagcgaagccaaataaataatatgttttagtagttgtttatttatttatatatgtaaatcattgttattttttaaatacaaattatcaatcaatttcagattcaggtctacggttccagttgattttcaattgtgggatgtggacctttattacaatgtccaagttccacaattgtgggtccattattaattgtaagatgttaaatctggtgggaagtggtcagatattttgttttaaaatcttatacctgaacctgatcatgtataatgtatccttaatttttgcttaacatactgatatgcctttgcagattcttggtgttcttgatttaggcagggatgcatggataagtcgggaggactggattcacaatggggtccatgttggaagtaacaaaaaatacaaggattcatattatcttcaagctcaagctatgtgttatatgaattcttgaaaggatgatgagacactacaatgaaaacaggaagaagaaaaaaaaaatgcaaacaatattagaaggctacgtgtgataattagttaattatatggattacaattccataatccccggctaactaggccatagcaaactcaagtctcacgtcggaagcttaggcaaaagaaatggaaagtagtccttgtgaatataacttatagtctaccttgaaatttaagaaggggtcaattacccggattctcattttgccattgtttttaccttttgaaattttatattaaattaaatattattttgtttagtagc

SEQ ID NO: 19980 - protein, 51 aa, Glycine max
MPLQILGVLDLGRDAWISREDWIHNGVHVGSNKKYKDSYYLQAQAMCYMNS

SEQ ID NO: 19981 - protein, 50 aa, Glycine max
MWTFITMSKFHNCGSIINCKMLNLVGSGQIFCFKILYLNLIMYNVSLIFA

SEQ ID NO: 19982 - protein, 47 aa, Glycine max
MNFFLLVIKWFLLSLYVFSIMNEKYMFISFWMLMLILLSWTWRNLMS

SEQ ID NO: 19983 - DNA, 1271 bp, Glycine max
atatgatttgaatgcactcttgatgtggaaaggttcagaacgaatattcaaaactaatgtgttactacttgtaaaaagcattgatctctcaagcaatcacttttctggagaaattccacaggaaatagagaatttatttggattggtttcattgaatttatcaagaaacaatttgatagggaaaattccctcaaaagttggaaagctaacatcacttgaatctcttgatttgtcaagaaaccagttggctggttcaattcctccgagtcttacacaaatttatggcctcggcgtgttagatttgtcacataaccatctaactggaaaaattccagccagcacacagttacagagtttcaatgcctcgagttatgaagataatcttgatctttgtggacagccacttgagaaattttgtattgatgggagacctacacaaaaaccaaatgttgaagttcaagatgacgaattttcacttttcaatcgtgaattttacatgagtatgacatttggatttgttataagcttttggatggtgtttggctcaatcttattcaagcgttcttggagacatgcctatttcaagttcttgaacaatctatcagacaatatttatgtcaaggtagcagtatttgctaataaaatgtcaaaggtgtatggctgaagcttaactaggtaataatattgcagccctttcatatatatatatatatatatatatatatatatatatatatatatatatatatatatagtttcttttgctttcatatagtttatatacatgaaagattccatatatattataatttggaattgtgacagtaagatttcataatttttaactattttagtataataaattttgaagaaatattgaataagttatattaagattaattaataatataaaattatattgttactgtataatcattaaaattatcattattgatgtataataagcctgaaacatcgttgatctctattattattataaatgtttttcttataagagattttactctatcgttaacttgatgatattattctgattacttcattttctagaaatttcttttttacatgtataagaattttatttattttcagttacacattttgaaaactgacattctgattatattttctttctttccttcctttttttttttcagtaccttgaagacactagccctcttggatcggaagactccaatgtctaagcttgttaatgcttggaaaaggcaattagttggaaattatgattg

SEQ ID NO: 19984 - protein, 220 aa, Glycine max
YDLNALLMWKGSERIFKTNVLLLVKSIDLSSNHFSGEIPQEIENLFGLVSLNLSRNNLIGKIPSKVGKLTSLESLDLSRNQLAGSIPPSLTQIYGLGVLDLSHNHLTGKIPASTQLQSFNASSYEDNLDLCGQPLEKFCIDGRPTQKPNVEVQDDEFSLFNREFYMSMTFGFVISFWMVFGSILFKRSWRHAYFKFLNNLSDNIYVKVAVFANKMSKVYG

SEQ ID NO: 19985 - protein, 213 aa, Glycine max
MWKGSERIFKTNVLLLVKSIDLSSNHFSGEIPQEIENLFGLVSLNLSRNNLIGKIPSKVGKLTSLESLDLSRNQLAGSIPPSLTQIYGLGVLDLSHNHLTGKIPASTQLQSFNASSYEDNLDLCGQPLEKFCIDGRPTQKPNVEVQDDEFSLFNREFYMSMTFGFVISFWMVFGSILFKRSWRHAYFKFLNNLSDNIYVKVAVFANKMSKVYG

SEQ ID NO: 19986 - DNA, 1433 bp, Glycine max
aaaaacaaaacccgaaacagagacagagaaagaaaatacaattccttcaaccaattcagacactgcaccagaaatggaggctccacaaggtggatccggatccggacccgagcgagacaaatccaccgctccctcctcttctccgatctccgtcgtctccgccttctggaaagattttgagttggagaaggagaaatctatactggatgagcaagggcttcgaattgctgagaaccaggaaagcagtcagaaaaatcgccgcaagcttgccgagaacactagagacttcaaaaaggcttcgcctgaggataagttaagtttgttcaattccttgcttaagggctatcaggaagaggttgacaatcttacgaagagagcaaagtttggagaaaatgcttttctcaacatctatcaaaagctctatgaagctccagatccttatccagctcttgcgtcaattgctgagcaagatctcaagatatctgagcttgaatctgaaaaccggaaaatgaaagttgagcttgaggagttcaggacagaggcaactcacttgaagaatcagcaggctacaatacgacgacttgaagagagaaacaggcaattagagcaacagatggaagagaaagtgaaagaaattgtggagattaagcaacgcagtctggcagaagagaatcagaaaacattggaagttttgaaagaaagggaacaggcactgcaagatcagttgcagcatgccaaagacagtgtctctactatgcagaaattgcatgaactcgcacaaaaccagttgtttgaactccgtgcccaatctgaggaagagagggcatctaagcaatcagaagtcaatcttctgatggatgaagtggagcgtgcacaatcaatgcttcttagtttagaaagagagaagggggttctccgatctcagttacaaacggcaaatgaagagactgaaactaagaatagtgataattttgactcaaatagtgcacttgagaattctttaaatgccaaagaaaagcaaatctctgaattgaacatggagctacacaatattgaaacagccttatcaaatgaaagagatcaacacattaatgaagtcaagaaacttactgcaatgctcaatgaaaaggaggctgcccttgaggagatgaagaaagaacttaaagcaaggccaacagaaaaaatggttgatgatctgcgcaagaaagtgaaaattttgcaggcagtgggttataattcaatcgaggctgaagactgggaagtggctacaagtggggaagagatgagcaagatggagtctcttcttcttgataagaaccgtaaaatggaacatgaactaacacagttgaaggtcacactttctgagaaaacatccttactggaaacagctgaacagaagatagcagagcttacagcaaaggttaatgaacaac

SEQ ID NO: 19987 - protein, 477 aa, Glycine max
KTKPETETEKENTIPSTNSDTAPEMEAPQGGSGSGPERDKSTAPSSSPISVVSAFWKDFELEKEKSILDEQGLRIAENQESSQKNRRKLAENTRDFKKASPEDKLSLFNSLLKGYQEEVDNLTKRAKFGENAFLNIYQKLYEAPDPYPALASIAEQDLKISELESENRKMKVELEEFRTEATHLKNQQATIRRLEERNRQLEQQMEEKVKEIVEIKQRSLAEENQKTLEVLKEREQALQDQLQHAKDSVSTMQKLHELAQNQLFELRAQSEEERASKQSEVNLLMDEVERAQSMLLSLEREKGVLRSQLQTANEETETKNSDNFDSNSALENSLNAKEKQISELNMELHNIETALSNERDQHINEVKKLTAMLNEKEAALEEMKKELKARPTEKMVDDLRKKVKILQAVGYNSIEAEDWEVATSGEEMSKMESLLLDKNRKMEHELTQLKVTLSEKTSLLETAEQKIAELTAKVNEQ

SEQ ID NO: 19988 - protein, 453 aa, Glycine max
MEAPQGGSGSGPERDKSTAPSSSPISVVSAFWKDFELEKEKSILDEQGLRIAENQESSQKNRRKLAENTRDFKKASPEDKLSLFNSLLKGYQEEVDNLTKRAKFGENAFLNIYQKLYEAPDPYPALASIAEQDLKISELESENRKMKVELEEFRTEATHLKNQQATIRRLEERNRQLEQQMEEKVKEIVEIKQRSLAEENQKTLEVLKEREQALQDQLQHAKDSVSTMQKLHELAQNQLFELRAQSEEERASKQSEVNLLMDEVERAQSMLLSLEREKGVLRSQLQTANEETETKNSDNFDSNSALENSLNAKEKQISELNMELHNIETALSNERDQHINEVKKLTAMLNEKEAALEEMKKELKARPTEKMVDDLRKKVKILQAVGYNSIEAEDWEVATSGEEMSKMESLLLDKNRKMEHELTQLKVTLSEKTSLLETAEQKIAELTAKVNEQ

SEQ ID NO: 19989 - protein, 308 aa, Glycine max
MKVELEEFRTEATHLKNQQATIRRLEERNRQLEQQMEEKVKEIVEIKQRSLAEENQKTLEVLKEREQALQDQLQHAKDSVSTMQKLHELAQNQLFELRAQSEEERASKQSEVNLLMDEVERAQSMLLSLEREKGVLRSQLQTANEETETKNSDNFDSNSALENSLNAKEKQISELNMELHNIETALSNERDQHINEVKKLTAMLNEKEAALEEMKKELKARPTEKMVDDLRKKVKILQAVGYNSIEAEDWEVATSGEEMSKMESLLLDKNRKMEHELTQLKVTLSEKTSLLETAEQKIAELTAKVNEQ

SEQ ID NO: 19990 - DNA, 1564 bp, Glycine max
aaagcaaaactgtcaagggttctgtaattgccaaaaataatcctaaatcttctggtttaatgaagccaaacaagttaaagtctacacatagaaatgggattttaagcagcacgatatctgagactgtggctgatacaggaaaagatatcaaaattctaaacaaggctcctcatttgcgttctaattttccagcagccactgctccaaatacatatcaccaaataggaaaattttcatcattagccaacccaacatgccatgtttccccccccacaaaccacaggccaaatacctctactaactacagaccaactgggagagtgtctaatgtaaatgatcgagttttgttgggtgacaacaaattcaggagtggacaatctgaaatgtcaatggagatgactcggggtcctcggggtcattacaacaattttcttctacaaccatcacttgttaaggatgcacttgcaatcacaatatgtagagacgaatataacctttcagatttccaaactgaatacgaaattgctaaattttatgtgattaaatctttcaatgaagatgacgttcataagagtgttaaatataatgtttggacaagtactccaaatggaaataagaagttgaacgccgcattccttgatgcagaagctaaattgagacagacagggactaagtgtccagttttcctcttcttctcggttaatgctagcagacagtttgttggagtggctgagatgcttggaccggtggactttaaaaacgacatgaacttttggaaacttgataagtacaacggtttcttcccaattaagtggcacataataaaagatgttcccaacaatcagtttgtgcatatcatccttccaagcaatgagaacaagcctgtaacttacactagggacacacaagagattggattgaaggagggcctggagatgctgaatatttttagaagttatacagctaagacatctctattggatgattttgacttctatgagaggcgagaaaagttatttcgttcccagaggagtactaagcacaagcatgcaaggccggaacaggaagtatatggcaatgacaattatcaaaacactgtcaaagccagagagaagaaaatggagatgcaatcgagtggtaccaagcaaggtactctcatcaaacataccaaaaacctttctctcaacaactctggatttagatagcaagattgggagaggagaaaaagagagcccgatatttatttctacacgtatgtaggcatttaagagttgcagacgcaattgcagtttggtttgtttagagcttctgaagcacacgcacgcttcctttttgatttgtgtgatatgccgataagatgaccacgacaacacattttaagtttgaccaattatttttatattactcaatgagttgatgtttgccattggcaaatgaggaggtatttgatagtatggttcgatgtctccaatatttccgtataactcattggctttggtctgtatttactattttgtttcacgtggatgagcgcccagttccatagttgtgttttgtttggttg

SEQ ID NO: 19991 - protein, 400 aa, Glycine max
SKTVKGSVIAKNNPKSSGLMKPNKLKSTHRNGILSSTISETVADTGKDIKILNKAPHLRSNFPAATAPNTYHQIGKFSSLANPTCHVSPPTNHRPNTSTNYRPTGRVSNVNDRVLLGDNKFRSGQSEMSMEMTRGPRGHYNNFLLQPSLVKDALAITICRDEYNLSDFQTEYEIAKFYVIKSFNEDDVHKSVKYNVWTSTPNGNKKLNAAFLDAEAKLRQTGTKCPVFLFFSVNASRQFVGVAEMLGPVDFKNDMNFWKLDKYNGFFPIKWHIIKDVPNNQFVHIILPSNENKPVTYTRDTQEIGLKEGLEMLNIFRSYTAKTSLLDDFDFYERREKLFRSQRSTKHKHARPEQEVYGNDNYQNTVKAREKKMEMQSSGTKQGTLIKHTKNLSLNNSGFR

SEQ ID NO: 19992 - protein, 381 aa, Glycine max
MKPNKLKSTHRNGILSSTISETVADTGKDIKILNKAPHLRSNFPAATAPNTYHQIGKFSSLANPTCHVSPPTNHRPNTSTNYRPTGRVSNVNDRVLLGDNKFRSGQSEMSMEMTRGPRGHYNNFLLQPSLVKDALAITICRDEYNLSDFQTEYEIAKFYVIKSFNEDDVHKSVKYNVWTSTPNGNKKLNAAFLDAEAKLRQTGTKCPVFLFFSVNASRQFVGVAEMLGPVDFKNDMNFWKLDKYNGFFPIKWHIIKDVPNNQFVHIILPSNENKPVTYTRDTQEIGLKEGLEMLNIFRSYTAKTSLLDDFDFYERREKLFRSQRSTKHKHARPEQEVYGNDNYQNTVKAREKKMEMQSSGTKQGTLIKHTKNLSLNNSGFR

SEQ ID NO: 19993 - protein, 273 aa, Glycine max
MSMEMTRGPRGHYNNFLLQPSLVKDALAITICRDEYNLSDFQTEYEIAKFYVIKSFNEDDVHKSVKYNVWTSTPNGNKKLNAAFLDAEAKLRQTGTKCPVFLFFSVNASRQFVGVAEMLGPVDFKNDMNFWKLDKYNGFFPIKWHIIKDVPNNQFVHIILPSNENKPVTYTRDTQEIGLKEGLEMLNIFRSYTAKTSLLDDFDFYERREKLFRSQRSTKHKHARPEQEVYGNDNYQNTVKAREKKMEMQSSGTKQGTLIKHTKNLSLNNSGFR

SEQ ID NO: 19994 - DNA, 1466 bp, Glycine max
gagaagcaaagcagtcaaaccggattgggtcacttttgcaacatctatccgggcctgcgctgatttggctactataaaacttgggacacaagtcgtatctcatgtgacaaagtttggacttagttcggatgtttcagttgcaaacagtattgtcaccatgtattcaagatgtggacaaatcaaagaagcacggaaagtttttgactcaatacatgtgaaaaacctgatttcctggaatgccatgatggcagcatttgctcaaaatggtttaggcaataaagcaatcgaaacatatgaggatatgttaaggacagaatgcaaacctgaccatataagctatgttgctgttttatctggttgcagccacatggggcttgtagttgaagggaaacattattttgattccatgactcaagtgtttggcatttctccaacaaatgagcactttgcttgtttggtagatctgcttggccgagcagggttactagaccaggccaagaatttaatagacggaatgccttttaagccaaatgccactgtttggggtgctctactaggagcatgccgaatccatcacgattcaatactagcaaaaactgccgcaaagaagttgatggaattaaatgttgaagattctggaggttatgttcttctagcaaatatatatacagagtctggggaactagaaaatgttgctgatatgagaaagttaatgaaagtgaaaggaattcgaaagagtccaggttgtagctggatagaggttgataacaggctacatgtgtttactgtagatgaaaccagtcatccacagataaacgaggtttatgtaaaactggaggagatgatgaagaagatagaagatacaggaagatacgttagtatcgtctcttgtgcccataggagtcagaaataccatagtgaaaagcttgcttttgcttttgggttgcttagtttgccaccttggatgcctatacaagtaacgaagaatctccgcgtctgcaatgattgtcacttggtaataaagttgttgtccatggtcacctcaagggaacttatcatgagagatggatttcgatttcatcatttcaaggatgggttttgctcctgtcgagactactggtaaaatatattgatagttattctgttaccatccaagagttagaatctgtaaccgccaaatttaagttcaattctatgatgcgagcaccattacatggttttgcattttggtttgacgttgaatttaatgggcatgcaatatcatcaaccaattatcaatcaactacttcatttgttgacaatcatcagatgaatggtagtcagagaaaaaggcgaacaaacccaaatgaagcactggtcttgtccactgcgcctgaggaccctccaacacattggcagcagacattgatatacttttatgaccctatagagctggagcaagatcaactaattgaaggttcgctgac

SEQ ID NO: 19995 - protein, 373 aa, Glycine max
RSKAVKPDWVTFATSIRACADLATIKLGTQVVSHVTKFGLSSDVSVANSIVTMYSRCGQIKEARKVFDSIHVKNLISWNAMMAAFAQNGLGNKAIETYEDMLRTECKPDHISYVAVLSGCSHMGLVVEGKHYFDSMTQVFGISPTNEHFACLVDLLGRAGLLDQAKNLIDGMPFKPNATVWGALLGACRIHHDSILAKTAAKKLMELNVEDSGGYVLLANIYTESGELENVADMRKLMKVKGIRKSPGCSWIEVDNRLHVFTVDETSHPQINEVYVKLEEMMKKIEDTGRYVSIVSCAHRSQKYHSEKLAFAFGLLSLPPWMPIQVTKNLRVCNDCHLVIKLLSMVTSRELIMRDGFRFHHFKDGFCSCRDYW

SEQ ID NO: 19996 - protein, 321 aa, Glycine max
MYSRCGQIKEARKVFDSIHVKNLISWNAMMAAFAQNGLGNKAIETYEDMLRTECKPDHISYVAVLSGCSHMGLVVEGKHYFDSMTQVFGISPTNEHFACLVDLLGRAGLLDQAKNLIDGMPFKPNATVWGALLGACRIHHDSILAKTAAKKLMELNVEDSGGYVLLANIYTESGELENVADMRKLMKVKGIRKSPGCSWIEVDNRLHVFTVDETSHPQINEVYVKLEEMMKKIEDTGRYVSIVSCAHRSQKYHSEKLAFAFGLLSLPPWMPIQVTKNLRVCNDCHLVIKLLSMVTSRELIMRDGFRFHHFKDGFCSCRDYW

SEQ ID NO: 19997 - protein, 293 aa, Glycine max
MMAAFAQNGLGNKAIETYEDMLRTECKPDHISYVAVLSGCSHMGLVVEGKHYFDSMTQVFGISPTNEHFACLVDLLGRAGLLDQAKNLIDGMPFKPNATVWGALLGACRIHHDSILAKTAAKKLMELNVEDSGGYVLLANIYTESGELENVADMRKLMKVKGIRKSPGCSWIEVDNRLHVFTVDETSHPQINEVYVKLEEMMKKIEDTGRYVSIVSCAHRSQKYHSEKLAFAFGLLSLPPWMPIQVTKNLRVCNDCHLVIKLLSMVTSRELIMRDGFRFHHFKDGFCSCRDYW

SEQ ID NO: 19998 - DNA, 1247 bp, Glycine max
ggattataccccactttatggattcatatctttgtgtggaagaagacctgagatggaagatgcagttgcaactgtacctcggtttctgaaaattcctattcaaatgctaattggtgatcgggtaattgatggaataaacaagtgttttaatcagcagatgacccatttctttggagtctatgatggtcatggtggctctcaggttgcaaactattgtcgtgatcgtacccattgggccttggctgaggaaatagaatttgtgaaggaaggtctaatcagtggaagtatgaaggatggttgtcaaaatcagtggaaaaaggttttcaccaattgtttcttaaaggtcgatgctgaagttggtgggaaagttaataatgaacctgttgccccagaaactgttggctccactgctgttgttgctgttatttgtgcttctcatatcatagttgcaaattgtggtgattcacgagcagttctatgtcgtggcaaagaacccatggcattatcagtggaccataaacctaaccgagatgatgaatatgcaagaattgaggcagctggaggaaaggtgattcaatggaatggccatcgtgtatttggtgttcttgcaatgtcaaggtctattggcgatagatatttgaagccatggattattccagaaccagaagttacgttcgttccccgtacaaaagacgatgagtgtctcattctggccagcgatggtctgtgggatgttatgacaaatgaggaggtgtgtgacctcgctcggaaacgaataattctctggtacaagaaaaatggcttggaacaaccctcttcagaaaggggagagggaattgatcctgctgcacaagcagcagcagaatacctatcaaaccgcgcccttcagaaaggaagcaaagataacatcagtgtgattgtggttgatttgaaacctcaaagaaaatataagagcaagacatgatgatgaatgatgatgatttcaactgcacttggttatttgaagatgatagaaagcttaatataatccaatatagttttgccctctaatttttcaccagggcatttcccttagctcaacaagattagcacaatgtactataatacatatccaccttccctagaaactcttaactaatcaagagtctccttgttgtttactaatgctgcattggggacttattgtattcattattatgcctccgagtgcaaaggctctgtgaggcataaagagtctccttaatatt

SEQ ID NO: 19999 - protein, 320 aa, Glycine max
DYTPLYGFISLCGRRPEMEDAVATVPRFLKIPIQMLIGDRVIDGINKCFNQQMTHFFGVYDGHGGSQVANYCRDRTHWALAEEIEFVKEGLISGSMKDGCQNQWKKVFTNCFLKVDAEVGGKVNNEPVAPETVGSTAVVAVICASHIIVANCGDSRAVLCRGKEPMALSVDHKPNRDDEYARIEAAGGKVIQWNGHRVFGVLAMSRSIGDRYLKPWIIPEPEVTFVPRTKDDECLILASDGLWDVMTNEEVCDLARKRIILWYKKNGLEQPSSERGEGIDPAAQAAAEYLSNRALQKGSKDNISVIVVDLKPQRKYKSKT

SEQ ID NO: 20000 - protein, 303 aa, Glycine max
MEDAVATVPRFLKIPIQMLIGDRVIDGINKCFNQQMTHFFGVYDGHGGSQVANYCRDRTHWALAEEIEFVKEGLISGSMKDGCQNQWKKVFTNCFLKVDAEVGGKVNNEPVAPETVGSTAVVAVICASHIIVANCGDSRAVLCRGKEPMALSVDHKPNRDDEYARIEAAGGKVIQWNGHRVFGVLAMSRSIGDRYLKPWIIPEPEVTFVPRTKDDECLILASDGLWDVMTNEEVCDLARKRIILWYKKNGLEQPSSERGEGIDPAAQAAAEYLSNRALQKGSKDNISVIVVDLKPQRKYKSKT

SEQ ID NO: 20001 - protein, 286 aa, Glycine max
MLIGDRVIDGINKCFNQQMTHFFGVYDGHGGSQVANYCRDRTHWALAEEIEFVKEGLISGSMKDGCQNQWKKVFTNCFLKVDAEVGGKVNNEPVAPETVGSTAVVAVICASHIIVANCGDSRAVLCRGKEPMALSVDHKPNRDDEYARIEAAGGKVIQWNGHRVFGVLAMSRSIGDRYLKPWIIPEPEVTFVPRTKDDECLILASDGLWDVMTNEEVCDLARKRIILWYKKNGLEQPSSERGEGIDPAAQAAAEYLSNRALQKGSKDNISVIVVDLKPQRKYKSKT

SEQ ID NO: 20002 - DNA, 1153 bp, Glycine max
gaaccaaaacaaaaccattaattccatttgtttccttcatatggctaacaacattcttaccatgacaaacctcaatttcgaacttgattgcaagagaactcatgattctttggggagtttgagtcaattgaccacatctctggcttgtgtaacccaccatgaaagacaacaactcagggagacctttaaggcagtgaatggagaagacttgataagtcatcttcaaagatatgaagatgcgttttattctccttcttcttcttcttcttcttcttcttcttcttcttcttcttcttcttcttcttctatgaactgttctgctatttccttgtggatgcttgacacacatgacagggatgctgttgtggctagagaagctctccaacaagatgagaccaatttcaaggctcttgtggagatttttgtgggtagaaaatcaagtcatgttcttctcatctcacaggcctaccagaaaatgttcaaaagacacttggaccaagatattatcaatttggaccctccacacccctttcaaaagattattgtggcattggctgcatcacacaaagctcatcaagcagatgtcaaccatcatatatccaagtgtgatgctaggaggctctatgagactggggagggaagcttaggaactgtaattgaagctgttgtgttagaaattttaagcaagaggagcattccccaactgaagctaacattttttagttataaacacatttatggacatgactacacaaagtctatcaagagggggaaatacggtcaatttggtaaagctttaaaggtggttgtgaaatgcatttgtaatccagcacactattatgcaaagatactgtactcaagcatcaaaggggaaacaagggacagaagagttttggcacgaacattggtaagcagggctgagatagacatagatgaaattagaagggttttcaaagaaaagtatgggaaggaacttgctgatgctatatgtgaaggctttccatctggtgactactacagagactttcttgttgccttggctacaagatctaagtagaccctgttgcatctgatcttaacttgtattgcaacaaaatttgttgagaatagtataattcatatcaactttttgagtttcttttgtgggtaaaat

SEQ ID NO: 20003 - protein, 351 aa, Glycine max
NQNKTINSICFLHMANNILTMTNLNFELDCKRTHDSLGSLSQLTTSLACVTHHERQQLRETFKAVNGEDLISHLQRYEDAFYSPSSSSSSSSSSSSSSSSSSMNCSAISLWMLDTHDRDAVVAREALQQDETNFKALVEIFVGRKSSHVLLISQAYQKMFKRHLDQDIINLDPPHPFQKIIVALAASHKAHQADVNHHISKCDARRLYETGEGSLGTVIEAVVLEILSKRSIPQLKLTFFSYKHIYGHDYTKSIKRGKYGQFGKALKVVVKCICNPAHYYAKILYSSIKGETRDRRVLARTLVSRAEIDIDEIRRVFKEKYGKELADAICEGFPSGDYYRDFLVALATRSK

SEQ ID NO: 20004 - protein, 338 aa, Glycine max
MANNILTMTNLNFELDCKRTHDSLGSLSQLTTSLACVTHHERQQLRETFKAVNGEDLISHLQRYEDAFYSPSSSSSSSSSSSSSSSSSSMNCSAISLWMLDTHDRDAVVAREALQQDETNFKALVEIFVGRKSSHVLLISQAYQKMFKRHLDQDIINLDPPHPFQKIIVALAASHKAHQADVNHHISKCDARRLYETGEGSLGTVIEAVVLEILSKRSIPQLKLTFFSYKHIYGHDYTKSIKRGKYGQFGKALKVVVKCICNPAHYYAKILYSSIKGETRDRRVLARTLVSRAEIDIDEIRRVFKEKYGKELADAICEGFPSGDYYRDFLVALATRSK

SEQ ID NO: 20005 - protein, 331 aa, Glycine max
MTNLNFELDCKRTHDSLGSLSQLTTSLACVTHHERQQLRETFKAVNGEDLISHLQRYEDAFYSPSSSSSSSSSSSSSSSSSSMNCSAISLWMLDTHDRDAVVAREALQQDETNFKALVEIFVGRKSSHVLLISQAYQKMFKRHLDQDIINLDPPHPFQKIIVALAASHKAHQADVNHHISKCDARRLYETGEGSLGTVIEAVVLEILSKRSIPQLKLTFFSYKHIYGHDYTKSIKRGKYGQFGKALKVVVKCICNPAHYYAKILYSSIKGETRDRRVLARTLVSRAEIDIDEIRRVFKEKYGKELADAICEGFPSGDYYRDFLVALATRSK

SEQ ID NO: 20006 - DNA, 1090 bp, Glycine max
gatcgctataaagaaaatcgttcagcctccgaaagacggtgctgagttagcagaagaggacagcaaggttctgaacaagaaaatgaggcaaattcgatcggagatcaacaccgtgggacaaattagacacagaaaccttctgcctctgctggcgcacgtgtctagaccggaatgtcactaccttgtgtacgagttcatgaaaaatggaagcttgcaagacactctgagcaaggtcgagaggggcgagagcgagttggattggttgtcaaggcacaagatctccctcggtgtggctgctgggcttgtataccttcacatgaatcacaacccacgaatcattcatagagatctcaagcctgctaatatccttcttgacgatgacatggaggcaagaattgctgattttggactcgccaaggctatgcccgattacaagactcacataacaacctccaatgtggctggcactgtgggctatattgctcctgagtatcatcagatactcaagttcactgataagtgtgatatttacagttatggagtgattcttggtgtattggtcattggtaagcttccttctgatgatttctttcagcacactgaagagatgagtttggtcaagtggatgaggaagactttaagctccgagaatcccaaggaggcaattaattcaaagctgctggggaatgggtatgaggagcagatgcttcttgttttgaagattgcatgcttttgcactatggatgatcccaaggagaggcctaacagtaaggatgttaggtgcatgctgtcacagatcaaacactgaatctgctgtatgtttaagtatgtgaaatattgtgtaccatatttgtgccaaagtgtgcttgtttaagaatatagttgataactagaggatcaatgttggttcatagggtaaataatgaaccgatgtaatcttgtttcctttatcacggattgctgaatttctttggaaaaagaaaaattcagcactgcgatgatctatgtataatctagtctgtcacaactagtttccactttacatgtttatggatacaccctgaaaataaaatagttttacgttgtttcc

SEQ ID NO: 20007 - protein, 268 aa, Glycine max
IAIKKIVQPPKDGAELAEEDSKVLNKKMRQIRSEINTVGQIRHRNLLPLLAHVSRPECHYLVYEFMKNGSLQDTLSKVERGESELDWLSRHKISLGVAAGLVYLHMNHNPRIIHRDLKPANILLDDDMEARIADFGLAKAMPDYKTHITTSNVAGTVGYIAPEYHQILKFTDKCDIYSYGVILGVLVIGKLPSDDFFQHTEEMSLVKWMRKTLSSENPKEAINSKLLGNGYEEQMLLVLKIACFCTMDDPKERPNSKDVRCMLSQIKH

SEQ ID NO: 20008 - protein, 241 aa, Glycine max
MRQIRSEINTVGQIRHRNLLPLLAHVSRPECHYLVYEFMKNGSLQDTLSKVERGESELDWLSRHKISLGVAAGLVYLHMNHNPRIIHRDLKPANILLDDDMEARIADFGLAKAMPDYKTHITTSNVAGTVGYIAPEYHQILKFTDKCDIYSYGVILGVLVIGKLPSDDFFQHTEEMSLVKWMRKTLSSENPKEAINSKLLGNGYEEQMLLVLKIACFCTMDDPKERPNSKDVRCMLSQIKH

SEQ ID NO: 20009 - protein, 203 aa, Glycine max
MKNGSLQDTLSKVERGESELDWLSRHKISLGVAAGLVYLHMNHNPRIIHRDLKPANILLDDDMEARIADFGLAKAMPDYKTHITTSNVAGTVGYIAPEYHQILKFTDKCDIYSYGVILGVLVIGKLPSDDFFQHTEEMSLVKWMRKTLSSENPKEAINSKLLGNGYEEQMLLVLKIACFCTMDDPKERPNSKDVRCMLSQIKH

SEQ ID NO: 20010 - DNA, 1228 bp, Glycine max
aaaaccgcctgttgtgccagttacaccaccttatatccctaaaccaccagttgtgacaccaccatatgtccctaaaccaccagtggtgccagttacaccaccatatgtccctaaaccaccagtggtgccagttacaccaccttatgtgccaaaaccacccattgtgaaaccaccaattgtttatccaccagttgtgccaaaaccaccaattgttacaccaccttatgtgccaaaaccacccattgtgaaaccaccaattgtttatccaccagttgtgccaacaccacctattgtgtatccacctgttgtaccaactccaccggtggttactccacccgtggttacaccaccaagtcctccaagtgaaacaccatgtccaccaccaccaccaccagtggtgccatacccaccaccagcacaaccaacatgccccatcgacaccctaaaactgggggcatgtgtggatgtgcttggtggcctcatacacattggcataggcagcagtgcccagcagacctgctgtccggtgcttgcagggcttgtggacttggatgctgctgtgtgcctctgcacaaccattagggctaagattcttaacatcaatatcatcatccccattgctcttcagcttctcattgactgtggcaagaccccaccagatggattcaagtgtgcagatagttagttaatatataattaattattatggaattgcataactcatgcatgaataaaaacaagttgagaagatcgatgtagtgaaggaatggtctttcgtttctctttcatcaagttgttgtatacccaaaggccaaggacaacataattgtactatgactctatgagggccaatattggtatacttgttcaaactacataattttctgatctgccttgtatacaaagtcatgcaatattgccatagcatctttttaattattttctctgtttttctttgtctattgcatgtgtggttctgtgtgcatgtcagcctgtgtaagctttcccgtgagtacgttgggaaatgtacaagttagcgaagctttagatttttcttagaaatggttatcttgtttcacgttttctcttttatgcattgcctttgtacaaattataatactttatagcccagaaaagatataataggtaggacttacgagatagaagagaaaattagtatatataagtttataataattaccaagtaataaaatgttcttcttttcgc

SEQ ID NO: 20011 - protein, 227 aa, Glycine max
KPPVVPVTPPYIPKPPVVTPPYVPKPPVVPVTPPYVPKPPVVPVTPPYVPKPPIVKPPIVYPPVVPKPPIVTPPYVPKPPIVKPPIVYPPVVPTPPIVYPPVVPTPPVVTPPVVTPPSPPSETPCPPPPPPVVPYPPPAQPTCPIDTLKLGACVDVLGGLIHIGIGSSAQQTCCPVLAGLVDLDAAVCLCTTIRAKILNINIIIPIALQLLIDCGKTPPDGFKCADS

SEQ ID NO: 20012 - DNA, 1943 bp, Glycine max
tctctatccttctcccccttcctccaaaactgaccaagtcccatactcttccgccatatcactacttttcaacacgctctaatttaaacaatactcccactaccgcacatggatattttcacttcctatacataaccctattccgccatctcttttttcacacttcatttccttcttcttctctgattttggttcatggcgtgggcgaagaagccaggtgactcaaataatgtaggctttatgagatggttagcgttggtgttggtgttggtgttgttatcgggcttttggtgtgtttcgggtgtgaaagaaggaaaaaggaatgcgtacgcgacaatgatgtacgtaggtacgccgagggactacgaattctacatagccatacgcgtgcttctgaaatcgctggctacgctcgacgctcaagccgatcttgttgtcattgcttcccttgatgttcctcctcgctggattcgtgctcttgaaaaggaagatggtgcgaaagtagtgagagtggaaaatctggacaacccctacaagcatcaagataattttgacaagaggttcaagttatcgttgaacaaactctacgcatggagcttagtggactatgacagggtggtgatgttggacgctgataacctcttccttcaaaacacggacgagttgtttcaatgtggacaattctgtgcggtctttatcaatccttgtgtgttccacacaggactcttcgtcttgcagccatcgatgaccgtgttcaaggacatggttcatgaattacgtaatgggagagaaaatcctgatggtgcagaccagggtttcatagctagctatttcccagagttacttgataagccaatgtttcacccaccacctaatggcaccaagcttgatggaacatataggcttcctttgggttatcagatggatgcttcttactattatcttaaacttcgctggagcataccctgtggaccaaatagtgtgatcacattcccaggggcaccatggttgaagccatggtattggtggtcctggcctgttctgccattaggcctccagtggcatgataaacgtcgccaaactttagggtatggtgcggagatggctgtgatacttattcaatcggcaatatatttgggaataatagcaatgactcgttttgcaaggccaagtctctcaaagctatgctataggcgctctgacaagagcatcaacttggtgcagaacatcctcaaattggtggcattgtggagcatccttgcggcttacacaacacccttcttcatcattcctcacacggttcaccctttgttaggatggcctctctacttgcttggtgtctttgcattgtgctctattgcagtcaatgcctttctgctgccaatgttgccggttctgatgccgtggctcgggatcaccggtgctttgattgtcatggcttttccttggtattcagatggggtggtgagagcattgtgcgtttttggttatgcattctgtgctgcaccgtgtgtgtgggcatctatgactaggataatggcagggcttcaccagtctctagaaagggaagcttttttgccaagattaggagaatcttcaccaccctcttggtttaacaagttatattgagctgtctgattgagcatgattgaatgcttggggacatagatgacaagctcattggaaactgaaggggaggaagtgccatggatttagaaccattatgatgttacggtcgaaattatatacatttttcttggagcgagatggccatgttgcacttactaggaggaggaacaacgcggagttagtgtgtgtatataaagataaagattgttttgctatttttcacatacatatgtatcaattattgcacgattggttcttgtattcaaatttttaaacttgttagacagtgagataagatcagagagttcggcatc

SEQ ID NO: 20013 - protein, 477 aa, Glycine max
MAWAKKPGDSNNVGFMRWLALVLVLVLLSGFWCVSGVKEGKRNAYATMMYVGTPRDYEFYIAIRVLLKSLATLDAQADLVVIASLDVPPRWIRALEKEDGAKVVRVENLDNPYKHQDNFDKRFKLSLNKLYAWSLVDYDRVVMLDADNLFLQNTDELFQCGQFCAVFINPCVFHTGLFVLQPSMTVFKDMVHELRNGRENPDGADQGFIASYFPELLDKPMFHPPPNGTKLDGTYRLPLGYQMDASYYYLKLRWSIPCGPNSVITFPGAPWLKPWYWWSWPVLPLGLQWHDKRRQTLGYGAEMAVILIQSAIYLGIIAMTRFARPSLSKLCYRRSDKSINLVQNILKLVALWSILAAYTTPFFIIPHTVHPLLGWPLYLLGVFALCSIAVNAFLLPMLPVLMPWLGITGALIVMAFPWYSDGVVRALCVFGYAFCAAPCVWASMTRIMAGLHQSLEREAFLPRLGESSPPSWFNKLY

SEQ ID NO: 20014 - protein, 462 aa, Glycine max
MRWLALVLVLVLLSGFWCVSGVKEGKRNAYATMMYVGTPRDYEFYIAIRVLLKSLATLDAQADLVVIASLDVPPRWIRALEKEDGAKVVRVENLDNPYKHQDNFDKRFKLSLNKLYAWSLVDYDRVVMLDADNLFLQNTDELFQCGQFCAVFINPCVFHTGLFVLQPSMTVFKDMVHELRNGRENPDGADQGFIASYFPELLDKPMFHPPPNGTKLDGTYRLPLGYQMDASYYYLKLRWSIPCGPNSVITFPGAPWLKPWYWWSWPVLPLGLQWHDKRRQTLGYGAEMAVILIQSAIYLGIIAMTRFARPSLSKLCYRRSDKSINLVQNILKLVALWSILAAYTTPFFIIPHTVHPLLGWPLYLLGVFALCSIAVNAFLLPMLPVLMPWLGITGALIVMAFPWYSDGVVRALCVFGYAFCAAPCVWASMTRIMAGLHQSLEREAFLPRLGESSPPSWFNKLY

SEQ ID NO: 20015 - protein, 430 aa, Glycine max
MMYVGTPRDYEFYIAIRVLLKSLATLDAQADLVVIASLDVPPRWIRALEKEDGAKVVRVENLDNPYKHQDNFDKRFKLSLNKLYAWSLVDYDRVVMLDADNLFLQNTDELFQCGQFCAVFINPCVFHTGLFVLQPSMTVFKDMVHELRNGRENPDGADQGFIASYFPELLDKPMFHPPPNGTKLDGTYRLPLGYQMDASYYYLKLRWSIPCGPNSVITFPGAPWLKPWYWWSWPVLPLGLQWHDKRRQTLGYGAEMAVILIQSAIYLGIIAMTRFARPSLSKLCYRRSDKSINLVQNILKLVALWSILAAYTTPFFIIPHTVHPLLGWPLYLLGVFALCSIAVNAFLLPMLPVLMPWLGITGALIVMAFPWYSDGVVRALCVFGYAFCAAPCVWASMTRIMAGLHQSLEREAFLPRLGESSPPSWFNKLY

SEQ ID NO: 20016 - DNA, 1480 bp, Glycine max
atcacttcaagaggttaatgttaatgttccggtgccaaatggaaccaaatcaagagttttgcctctaaaatttgaaattcaatcaagctattatcaaaccattatcctaattttttcacacccatttatttacaagatggagaggcctatgcttatctgcttaatgtccttgctcctgaacattgcagtccggtcaccttggataccaaggatggcaatgaaagggcaaatctggttcttgatcacgcagagagaatgggctgcaaaagatacttgaccccaagggatgttgcagagggagtggtctatctacagacactaaaaagatgtcctatgctgagatgatgacggatgatgtacaaacatctagagaagagagatgcttccaactgtggatcaatagtcttggaatttctacacatgtaaataatatgtttgaggatgtcagaaatggatggatacttttagaagtggtagacaacatatttccaagatcagttaactggaaacatgcaacaagacctccaattagaatgccattcagaaaagtcgagaactgcaatcaggtcataaaaattggtaaacaactgagattctcactagtcaatctagctggtaatgacattgtgcaagaaaataagaagctcattcttgctttattgtggcagctcatgcgattcacaatgcttcaactgttgaaaattttgagatctgattcccaaggaaaggagatcactgatgctgatatcctgaaatgggtgaacagaaaagtgaagagcactggcagaacttctcaaatagagagcttcaaggcctggacagaggcatcatctattccaagagcactagtttcaattattttaagattgccaagacttaaatttacgattgtaaccttgggaaaagatggctgcataatgcttgagaaatgtgtggatgatggtaaaaatactttcccccctcttgttttagccttatcaagttaaattcatatgcaaatggataaatattttttttcttttttacatttaatatccttatataacctaagtagcaatttaatttctggaagctgttttgtatcattaacaatgagaaaggaagatagcacagccatgccaacttgcatagcatcggtaataacctaacatttattattataactctagagtaagctctgattgtgcaatatctcctctgatttcttttgttttatttttggtgtgggagtgggatggatgttctaccatatttattacagtaattctttgatattaatgacgaatcattaattttttcttacagtaatatagttaaatcaaagttatttaacttgactacgtactgagaaattaattttaaaaatgttaagttaattgtctgtttcagttgatgatataggcatattgtatgtcctatagttaacttacacattagttatatatctcatcaaaatgtttgctgtcaccacacatttaac

SEQ ID NO: 20017 - protein, 219 aa, Glycine max
MSYAEMMTDDVQTSREERCFQLWINSLGISTHVNNMFEDVRNGWILLEVVDNIFPRSVNWKHATRPPIRMPFRKVENCNQVIKIGKQLRFSLVNLAGNDIVQENKKLILALLWQLMRFTMLQLLKILRSDSQGKEITDADILKWVNRKVKSTGRTSQIESFKAWTEASSIPRALVSIILRLPRLKFTIVTLGKDGCIMLEKCVDDGKNTFPPLVLALSS

SEQ ID NO: 20018 - protein, 214 aa, Glycine max
MMTDDVQTSREERCFQLWINSLGISTHVNNMFEDVRNGWILLEVVDNIFPRSVNWKHATRPPIRMPFRKVENCNQVIKIGKQLRFSLVNLAGNDIVQENKKLILALLWQLMRFTMLQLLKILRSDSQGKEITDADILKWVNRKVKSTGRTSQIESFKAWTEASSIPRALVSIILRLPRLKFTIVTLGKDGCIMLEKCVDDGKNTFPPLVLALSS

SEQ ID NO: 20019 - protein, 213 aa, Glycine max
MTDDVQTSREERCFQLWINSLGISTHVNNMFEDVRNGWILLEVVDNIFPRSVNWKHATRPPIRMPFRKVENCNQVIKIGKQLRFSLVNLAGNDIVQENKKLILALLWQLMRFTMLQLLKILRSDSQGKEITDADILKWVNRKVKSTGRTSQIESFKAWTEASSIPRALVSIILRLPRLKFTIVTLGKDGCIMLEKCVDDGKNTFPPLVLALSS

SEQ ID NO: 20020 - DNA, 1371 bp, Glycine max
atatcagttagctgaaatcctccgaacacctttgcaagagttgtgccttcatattaaaagtttgcagcttgggactgtaggatcatttttagaaaaggcacttcagccaccagatcctttagctgttaagaatgctattgaacttctcaaaacaattggggcgttagatgaacaggaggagctcactccactgggtcggcatctttgtaacatacctttggacccaaatatagggaagatgcttctcatgggctctatatttcagtgcctaaatcctgccttaactattgctgctgctcttgcataccgcaacccatttgtcttacccataaacagaaaagaggaagccgatgcagcaaaacaatcttttgcaggtgattcttgcagtgatcacttagcccttctcaaagcttttgaaggatggaaggaggcaaagcgaagtgggaacgaaaaacaatttggttgggataatttcctatcccttgcaaccttgcggttgattgacgatatgagaatgcagtttctcaatttattatctgacatcggatttgttgacaagtccaggggtgctactgcttacaaccagtatagtcatgatttggagatggtttgtgcaattctttgtgctgggctctaccctaacgttgtgcagtgcaaaagaagaggaaaacggacagcattctacactaaagaagtagggaaggttgacatccatccggcttctgttaatgctggggttcatctcttccctcttccctacatggtgtatagtgaaaaggtgaaaacaaccagcatctatattagagactctaccaacatttcagattatgccctacttctgtttggtggtaatcttgtccctagcaaaagtggtgagggcattgacatgcttggaggttaccttcatttctctgcttcaaaaagtgtcattgagttaataaggaaattgcgtggggagcttgacaagcttctgaacagaaaaattgaagaaccaggatttgatgtttcgtctgaaggaaagggagtggttgctgctgctgttgaattgctgcacagttaagtcatgagataatttctttttttccagggctaacatcatgttggtctgagtcctggcattcattagatattataattagcataattttggtagcagtttttattgattgctagcaatagtatttttctggaatgtgtatgtgcaatatctgatttctttggttaaaaaggagatagtgttttgataaggaaaggagacaaggtcatgatcgaatttcacagtggattcttctgcttgaaggaacactgtagccttgggctacatatagcaatatttgactcagcatgcagtagttatatttctttcactag

SEQ ID NO: 20021 - protein, 352 aa, Glycine max
YQLAEILRTPLQELCLHIKSLQLGTVGSFLEKALQPPDPLAVKNAIELLKTIGALDEQEELTPLGRHLCNIPLDPNIGKMLLMGSIFQCLNPALTIAAALAYRNPFVLPINRKEEADAAKQSFAGDSCSDHLALLKAFEGWKEAKRSGNEKQFGWDNFLSLATLRLIDDMRMQFLNLLSDIGFVDKSRGATAYNQYSHDLEMVCAILCAGLYPNVVQCKRRGKRTAFYTKEVGKVDIHPASVNAGVHLFPLPYMVYSEKVKTTSIYIRDSTNISDYALLLFGGNLVPSKSGEGIDMLGGYLHFSASKSVIELIRKLRGELDKLLNRKIEEPGFDVSSEGKGVVAAAVELLHS

SEQ ID NO: 20022 - protein, 273 aa, Glycine max
MLLMGSIFQCLNPALTIAAALAYRNPFVLPINRKEEADAAKQSFAGDSCSDHLALLKAFEGWKEAKRSGNEKQFGWDNFLSLATLRLIDDMRMQFLNLLSDIGFVDKSRGATAYNQYSHDLEMVCAILCAGLYPNVVQCKRRGKRTAFYTKEVGKVDIHPASVNAGVHLFPLPYMVYSEKVKTTSIYIRDSTNISDYALLLFGGNLVPSKSGEGIDMLGGYLHFSASKSVIELIRKLRGELDKLLNRKIEEPGFDVSSEGKGVVAAAVELLHS

SEQ ID NO: 20023 - protein, 270 aa, Glycine max
MGSIFQCLNPALTIAAALAYRNPFVLPINRKEEADAAKQSFAGDSCSDHLALLKAFEGWKEAKRSGNEKQFGWDNFLSLATLRLIDDMRMQFLNLLSDIGFVDKSRGATAYNQYSHDLEMVCAILCAGLYPNVVQCKRRGKRTAFYTKEVGKVDIHPASVNAGVHLFPLPYMVYSEKVKTTSIYIRDSTNISDYALLLFGGNLVPSKSGEGIDMLGGYLHFSASKSVIELIRKLRGELDKLLNRKIEEPGFDVSSEGKGVVAAAVELLHS

SEQ ID NO: 20024 - DNA, 1953 bp, Glycine max
aaaattttcaaagtcgaagcgagaacttgccatttcgagggttttagggttagggttttctaaaattgcaagaacatgggtttcaacattcaaccctatgggattcagtccatgctcaaggaaggccataagcacctttctggcctggatgaagcggttctcaagaacatcgacgcctgcaaacaactttccactatcactcgaacttccctcggtcccaatgggatgaataagatggttataaatcacttggacaagctttttgtcacgaacgatgctgggacgattgtgaatgaacttgaagttcagcatcctgctgccaaggttttggttttggctgggaaggctcaacaagaggagattggggatggagctaatttaactatttcatttgctggggagctcctgcagggtgccgaggaacttatcaggatgggtttgcatccgagcgagatcatcagtggatacactaaagcaatcaacaagactgttcaaatattggatgaactagttgaggatggttctgagaatatggatgttcgtgataaggaacaagttatttcaagaatgaaagcagccgttgccagcaagcaatttggtcaagaagatatcatatgttcgcttgttgctgatgcatgcatccaagtgtgccccaaaaaccctgcaaactttaatgtggacaacgttcgtgttgcaaagctcttgggagggggcttgcataacagtactgtagttcgaggattggttctgaaaagtgatgctgtcgggactataaagcaagcagaaaaggcgaaggttgctgtgtttgctagtggtgttgatacatctgcaactgagactaaaggaactgtcctcatacatacagctgagcagctagaaaattattcaaaaactgaagaggctaaagtagaggagctcatcaaggcagtagcagattctggcgccaaagtgattgtcagtggaggagcagtaggagaaatggctttgcatttctgtgagcgttacaagcttatggttctgaaaatcagctcaaagtttgaactacgtcgattttgccggacaaccggctctgttgccatgctaaaactttgccaaccaaacccagatgatcttggatatgtagattccgtttcagttcaggaaattggtggtgtcagggtgaccattgtgaaaaatgaagagggtggaaattctgtagccactgttgttttacgaggaagtactgatagtatactagatgatcttgaaagagcagtggatgatggagtgaacacttacaaggcaatgtgcagggatagccgctttgtacctggagctgcagctactgaaattgagttagctaaaagggtgaaagacttttccttcaaggagacagggttggatcagtatgctattgcaaaatttgctgaaagttttgaaatgattcctagaactttggctgagaatgctggcctaaatgcaatggagatcatatcttctctgtatgcagaacatgcatctggaaatgccaaagttggcattgatttggaagaaggcatatgcaaggatgtctcaaccctgagcatttgggatctccatgtgactaagttatttgctcttaaatatgctgcagatgctgcatgcactgtactacgtgtggaccagattattatggcaaaaccagctggtggtccaaggagagaacagcctgctggtggtatggatgaagactaaaattattgtgggaattgatggtttgctttggtcatgtttgtatctcagcatgatggcttgaatttgccttaggcatgttttcttgatttagactttttagtagtggtggcgatcttaacaaattttgaattttgttttgctatgaaatactaagagatgtggtctgtaaatttacattttattcatagcgttattgtgagtgatgttaatttgctgagcatggcctttgtttgagatttc

SEQ ID NO: 20025 - protein, 545 aa, Glycine max
MGFNIQPYGIQSMLKEGHKHLSGLDEAVLKNIDACKQLSTITRTSLGPNGMNKMVINHLDKLFVTNDAGTIVNELEVQHPAAKVLVLAGKAQQEEIGDGANLTISFAGELLQGAEELIRMGLHPSEIISGYTKAINKTVQILDELVEDGSENMDVRDKEQVISRMKAAVASKQFGQEDIICSLVADACIQVCPKNPANFNVDNVRVAKLLGGGLHNSTVVRGLVLKSDAVGTIKQAEKAKVAVFASGVDTSATETKGTVLIHTAEQLENYSKTEEAKVEELIKAVADSGAKVIVSGGAVGEMALHFCERYKLMVLKISSKFELRRFCRTTGSVAMLKLCQPNPDDLGYVDSVSVQEIGGVRVTIVKNEEGGNSVATVVLRGSTDSILDDLERAVDDGVNTYKAMCRDSRFVPGAAATEIELAKRVKDFSFKETGLDQYAIAKFAESFEMIPRTLAENAGLNAMEIISSLYAEHASGNAKVGIDLEEGICKDVSTLSIWDLHVTKLFALKYAADAACTVLRVDQIIMAKPAGGPRREQPAGGMDED

SEQ ID NO: 20026 - protein, 533 aa, Glycine max
MLKEGHKHLSGLDEAVLKNIDACKQLSTITRTSLGPNGMNKMVINHLDKLFVTNDAGTIVNELEVQHPAAKVLVLAGKAQQEEIGDGANLTISFAGELLQGAEELIRMGLHPSEIISGYTKAINKTVQILDELVEDGSENMDVRDKEQVISRMKAAVASKQFGQEDIICSLVADACIQVCPKNPANFNVDNVRVAKLLGGGLHNSTVVRGLVLKSDAVGTIKQAEKAKVAVFASGVDTSATETKGTVLIHTAEQLENYSKTEEAKVEELIKAVADSGAKVIVSGGAVGEMALHFCERYKLMVLKISSKFELRRFCRTTGSVAMLKLCQPNPDDLGYVDSVSVQEIGGVRVTIVKNEEGGNSVATVVLRGSTDSILDDLERAVDDGVNTYKAMCRDSRFVPGAAATEIELAKRVKDFSFKETGLDQYAIAKFAESFEMIPRTLAENAGLNAMEIISSLYAEHASGNAKVGIDLEEGICKDVSTLSIWDLHVTKLFALKYAADAACTVLRVDQIIMAKPAGGPRREQPAGGMDED

SEQ ID NO: 20027 - protein, 495 aa, Glycine max
MNKMVINHLDKLFVTNDAGTIVNELEVQHPAAKVLVLAGKAQQEEIGDGANLTISFAGELLQGAEELIRMGLHPSEIISGYTKAINKTVQILDELVEDGSENMDVRDKEQVISRMKAAVASKQFGQEDIICSLVADACIQVCPKNPANFNVDNVRVAKLLGGGLHNSTVVRGLVLKSDAVGTIKQAEKAKVAVFASGVDTSATETKGTVLIHTAEQLENYSKTEEAKVEELIKAVADSGAKVIVSGGAVGEMALHFCERYKLMVLKISSKFELRRFCRTTGSVAMLKLCQPNPDDLGYVDSVSVQEIGGVRVTIVKNEEGGNSVATVVLRGSTDSILDDLERAVDDGVNTYKAMCRDSRFVPGAAATEIELAKRVKDFSFKETGLDQYAIAKFAESFEMIPRTLAENAGLNAMEIISSLYAEHASGNAKVGIDLEEGICKDVSTLSIWDLHVTKLFALKYAADAACTVLRVDQIIMAKPAGGPRREQPAGGMDED

SEQ ID NO: 20028 - DNA, 1566 bp, Glycine max
gagaatgcgtactacaatcacgtagaacatcataggcatgaagagtacacgtgtgcaagataatcaaatagaaccaccttgaagttgagacaagagtaatggcagccctatagtaattagacaatatcaggacaaattactattcaagagatattatgatcactatggatgtgaaaggtataaaatgggttggaaatatgtaccagaaatttgagaatatgttcctggaggtggaagacgtgatgtacgaggatacagttaaatacatagagaatcagatgcaagctgttggggaaagtgttaaaaagttatattcagaaattgtgggagatttacttcccccagaaaaggtaggcattgaattgcctatagataagcgtgcggatgctgggctctgtaggaagccattccatgtatataaggaaagacatgcaaaagctgataccaagcaaagaactgaggattcaaggattgttcatggtgttgataatgttgcaacacttgctgctttatatgatggaacttccaaggctgatgcttcatccatgttatctttgagaaattctgtcaaagaaggaaaatttagttcaccttcaagacagtatgttcgaagaatggatgttaaatcaaacgttcgtattgatgaaaatccagtaaataagaaaatggatgcgaccaagataatcaacaaaaccaatttggcagaaacagatgcatgcaggacatcacaatcttatgagatctcaaacaaaaatcaaaatcagaatcatggagttactattgcaaagccagcttcagaagaagtggcaaggcttgcctctgacacacactgttctaatgaaattgaaaattcttgtaccaaacagttccccaatgttccactactacttaaatcagctgaagagaaaccggttgatacaatttcttcttcctcttgtgccccatttggagagccagttgaacaaggccatgaaaccatgcaagaagatcatctgaagcttgaggaagcctgtgttatggtgaatggagatgaaattcaattacctcccaaagaaggtggtaatttaaatactaaaaagaaaaaggcacggcaaaccttttctttgtctaagaagtctgcaagaaagcaagagtataaggagcttgtagcatggcatatgaacagtgaaaaagtaaagggagattgcatgaagaatttagatccaactttaccacaagaacaaaacaaattactgcttcctagtatgtctgaaccagaatgggagcttctctaattctaaatgccaggatgatcaagttgtgttgatacacaaaagccaatcctacaagtttggattcactcataagtccttgtggagattaagatgcccaactggaaatttaagatgctgaaatgatataaattcatacaatacttatgctatctttagttctttcctagctcctgaactttcctacacaacctttttctttttcctgctcacagaaaatagaaaagggtagctgtaattaggccattgaaatgagaatgtctaatagaataaatgaaactgttatctattttac

SEQ ID NO: 20029 - protein, 372 aa, Glycine max
MITMDVKGIKWVGNMYQKFENMFLEVEDVMYEDTVKYIENQMQAVGESVKKLYSEIVGDLLPPEKVGIELPIDKRADAGLCRKPFHVYKERHAKADTKQRTEDSRIVHGVDNVATLAALYDGTSKADASSMLSLRNSVKEGKFSSPSRQYVRRMDVKSNVRIDENPVNKKMDATKIINKTNLAETDACRTSQSYEISNKNQNQNHGVTIAKPASEEVARLASDTHCSNEIENSCTKQFPNVPLLLKSAEEKPVDTISSSSCAPFGEPVEQGHETMQEDHLKLEEACVMVNGDEIQLPPKEGGNLNTKKKKARQTFSLSKKSARKQEYKELVAWHMNSEKVKGDCMKNLDPTLPQEQNKLLLPSMSEPEWELL

SEQ ID NO: 20030 - protein, 369 aa, Glycine max
MDVKGIKWVGNMYQKFENMFLEVEDVMYEDTVKYIENQMQAVGESVKKLYSEIVGDLLPPEKVGIELPIDKRADAGLCRKPFHVYKERHAKADTKQRTEDSRIVHGVDNVATLAALYDGTSKADASSMLSLRNSVKEGKFSSPSRQYVRRMDVKSNVRIDENPVNKKMDATKIINKTNLAETDACRTSQSYEISNKNQNQNHGVTIAKPASEEVARLASDTHCSNEIENSCTKQFPNVPLLLKSAEEKPVDTISSSSCAPFGEPVEQGHETMQEDHLKLEEACVMVNGDEIQLPPKEGGNLNTKKKKARQTFSLSKKSARKQEYKELVAWHMNSEKVKGDCMKNLDPTLPQEQNKLLLPSMSEPEWELL

SEQ ID NO: 20031 - protein, 358 aa, Glycine max
MYQKFENMFLEVEDVMYEDTVKYIENQMQAVGESVKKLYSEIVGDLLPPEKVGIELPIDKRADAGLCRKPFHVYKERHAKADTKQRTEDSRIVHGVDNVATLAALYDGTSKADASSMLSLRNSVKEGKFSSPSRQYVRRMDVKSNVRIDENPVNKKMDATKIINKTNLAETDACRTSQSYEISNKNQNQNHGVTIAKPASEEVARLASDTHCSNEIENSCTKQFPNVPLLLKSAEEKPVDTISSSSCAPFGEPVEQGHETMQEDHLKLEEACVMVNGDEIQLPPKEGGNLNTKKKKARQTFSLSKKSARKQEYKELVAWHMNSEKVKGDCMKNLDPTLPQEQNKLLLPSMSEPEWELL

SEQ ID NO: 20032 - DNA, 1136 bp, Glycine max
gaactcaacatggagggaagctttcatgaaggcatacaaggctatggacaaagagctcaggtctcatccgaatctggattgcttctgtagtgggagcactgctgtgactatagtgaagcagggttcaaatctgttcatgggctatatcggggattctcgagcaatcatgggatccaaggatagcaatgactccatggtggctattcagttgactgttgatttaaagcctgatttgccaagggaagcagagagaattaagaagtgcagaggtggggtatttgctttgcaagatgagcctgaagtgcctagggtgtggttgccttttgatgatgcgccgggattagccatggctagagcatttggtgatttctgcttgaaggagtatggtgtgatttctatacctgaattttctcaccggcagcttacagacagagatcagttcattgttcttgcctcagatggggtgtgggatgttttaagcaacgaggaggtggttgagatagtatcttcagcgccaacgcgatcatcagcggcaaggattctggtagattctgctgctagggagtggaaacacaaataccctacatcaaagatggatgactgtgctgtagtatgcttatttttggatgggaaaatggactcggaatctgattacgaggaacaaggcttttcttctgcaaccatccaaagcaaccattcaggtaaccccattgagtcagatgatggacaaaaatctgagccatcattgcaaagcaaaacaggcgtaaaaattgccatcccaacagcattgcatattgatgctctcggaatatcaatgaaggaaacacttgataaatgcaaagagattcttggcggagaaaccataattgcatctactcgtcgcgaaccgctttcatccggcacagtatcaaggtattttatgcgcgcacgaaaagcatcaggtctttccttcgaaggggatccgcctacctttcacgagttgcgcagtttgtctgcaagactctatgagaagcagataagcgataagtttgctcaacatcttctcgggcataagtcggacaccatggcatcacagtatcgtgatgacagaggcagggagtgggacaaaattgaaatcaaataatgattttattttg

SEQ ID NO: 20033 - protein, 373 aa, Glycine max
NSTWREAFMKAYKAMDKELRSHPNLDCFCSGSTAVTIVKQGSNLFMGYIGDSRAIMGSKDSNDSMVAIQLTVDLKPDLPREAERIKKCRGGVFALQDEPEVPRVWLPFDDAPGLAMARAFGDFCLKEYGVISIPEFSHRQLTDRDQFIVLASDGVWDVLSNEEVVEIVSSAPTRSSAARILVDSAAREWKHKYPTSKMDDCAVVCLFLDGKMDSESDYEEQGFSSATIQSNHSGNPIESDDGQKSEPSLQSKTGVKIAIPTALHIDALGISMKETLDKCKEILGGETIIASTRREPLSSGTVSRYFMRARKASGLSFEGDPPTFHELRSLSARLYEKQISDKFAQHLLGHKSDTMASQYRDDRGREWDKIEIK

SEQ ID NO: 20034 - protein, 365 aa, Glycine max
MKAYKAMDKELRSHPNLDCFCSGSTAVTIVKQGSNLFMGYIGDSRAIMGSKDSNDSMVAIQLTVDLKPDLPREAERIKKCRGGVFALQDEPEVPRVWLPFDDAPGLAMARAFGDFCLKEYGVISIPEFSHRQLTDRDQFIVLASDGVWDVLSNEEVVEIVSSAPTRSSAARILVDSAAREWKHKYPTSKMDDCAVVCLFLDGKMDSESDYEEQGFSSATIQSNHSGNPIESDDGQKSEPSLQSKTGVKIAIPTALHIDALGISMKETLDKCKEILGGETIIASTRREPLSSGTVSRYFMRARKASGLSFEGDPPTFHELRSLSARLYEKQISDKFAQHLLGHKSDTMASQYRDDRGREWDKIEIK

SEQ ID NO: 20035 - protein, 359 aa, Glycine max
MDKELRSHPNLDCFCSGSTAVTIVKQGSNLFMGYIGDSRAIMGSKDSNDSMVAIQLTVDLKPDLPREAERIKKCRGGVFALQDEPEVPRVWLPFDDAPGLAMARAFGDFCLKEYGVISIPEFSHRQLTDRDQFIVLASDGVWDVLSNEEVVEIVSSAPTRSSAARILVDSAAREWKHKYPTSKMDDCAVVCLFLDGKMDSESDYEEQGFSSATIQSNHSGNPIESDDGQKSEPSLQSKTGVKIAIPTALHIDALGISMKETLDKCKEILGGETIIASTRREPLSSGTVSRYFMRARKASGLSFEGDPPTFHELRSLSARLYEKQISDKFAQHLLGHKSDTMASQYRDDRGREWDKIEIK

SEQ ID NO: 20036 - DNA, 2460 bp, Glycine max
atcattcgagaagattatatgaatgaactgtgcattcttcaagatgatgttccttcatttcccaatgaaattgccttcagaatcatagaggaggatctgggtcaaccccttgaagctgttttcagcaaaatctcatcagagacaatagcagctgcaagtttaggtcaagtttacagagctactttacgtgcaactggcgaggatgttgctatcaaggttcagaggccagggatagagcccattatatatcgagaccttttcctattccgcactttggcttcattcttaaacggcattagcatacagaaattgggatgtaatgctgagctgattgttgatgaatttggtgaaaagcttttggaagagcttgattataccctggaagcccgtaatcttgaagactttcttgagaattttaaaaatgaccctactgtcaaaattcctcaggtttacaaacaattttctggtcaacgtgtgctggtaatggaatggattgatggtatcaggtgtaccaatccacaggccatcaaagaagccggtattgacgtagatggatttttaacaattggagtgagtgctgccctacgacaattgttggaatttggattatttcatggagaccctcaccctggaaatatttttgccatgcgtgatgggagaattgcatatgtagactttggcaatgttgctgttctcagtcagcaaaataaacagattttaattgatgccgttgtccatgctgtgaatgaggactatgctgagatggctaatgatttcaccagattaggcttcctgaccccagggactgatgtgactcctataattcctgctttggaagcaatttggcagaactctgctggaaaaggactgtcagattttaattttcgtagtgtcacaggaaagtttaaccagttggtttacaattatcccattcgaatcccagaaaggttttcacttgtaattcgttctttattgacccaagaaggcatctgttttaccatgaaacctgacttcaaatttcttgaggttgcctatccttatgtggctaagcgactactgacagacccaaatccagctctacgtgaacgcctcatacaggttctattcaaagatggccttttccagtggaaacggcttgaaaaccttattgttcttgcaaaggaaaatgtggccaatatgagcaacaatccagcattgcaagtgaaaaacacgcaaagccagagagacttaaaagttgaaagaaaactggacctcacaggcacaatcaaagatggagctcgccttttctttgttgatgaaggaatacgtagacagcttctccttgctttgactgaagattcaaagcttcatattgaagagcttgtcgatgtgtataggttggttgaagatcagatagacataccttctgtggctgtagaagtagctagaggtaaagttcttgtgaaccttgaatatgacttagttcaattagatttaattatcctttttgtctcaaaatatcatgatttttcatttggtccctcatttttctgttgttatttagttctcgaagtgttttccccatatagtcacttagatttttgtttggtttatctgttgagtgtctgcatgggctctaaaaaacgaggaatcaaatgcaaaatgtgtgatatttaaagacgggaatatagacaagtcatgattttaaagggattagagaattaaacaagcaagtttaatttccctgcagtgtcagtatagaaaaaattgcattgtcaaccaatcagaaatcatggtaaatataaatttaaaggttgttactataaaagtcaataaacttgtcacatataacaatgtgtgattggatgacaatgtaaaaccttttgaactgatagtgcataaactattttttctggacaaaaaacaataatactcaatggacaaactaaccaaagaataagacgagttatatggaaaaatgaaaaaaattctatgaagactagattgtatcttttaacaataggaaccaaaggagaaaaccattatattttccaaaacaataatttaaccattagatgatgaagctgtaatctgccattactgcatgatggctcgacgcatgtcgaatacaaatatctttttggtgcagactttccaacagttgtcagggatctcctactttcatggagtgaatcaatcttgtctgatagatagctaaatctttggactacctgcacatagcaaatacaatactgtttcagtcagatgagtatactgtacacatgttctatatttcctcttcatttttcttttgccttttctatagtgccgaaggtttactatatgaaattttgaatgaatgtgtaggaaatgagtaaatattaagttgtaatttcacggggaaaagtccaaaaaattcatgtagtctttgggcctcttcaactttgtttattgaataaatctagcttatgtttaattttc

SEQ ID NO: 20037 - protein, 551 aa, Glycine max
IIREDYMNELCILQDDVPSFPNEIAFRIIEEDLGQPLEAVFSKISSETIAAASLGQVYRATLRATGEDVAIKVQRPGIEPIIYRDLFLFRTLASFLNGISIQKLGCNAELIVDEFGEKLLEELDYTLEARNLEDFLENFKNDPTVKIPQVYKQFSGQRVLVMEWIDGIRCTNPQAIKEAGIDVDGFLTIGVSAALRQLLEFGLFHGDPHPGNIFAMRDGRIAYVDFGNVAVLSQQNKQILIDAVVHAVNEDYAEMANDFTRLGFLTPGTDVTPIIPALEAIWQNSAGKGLSDFNFRSVTGKFNQLVYNYPIRIPERFSLVIRSLLTQEGICFTMKPDFKFLEVAYPYVAKRLLTDPNPALRERLIQVLFKDGLFQWKRLENLIVLAKENVANMSNNPALQVKNTQSQRDLKVERKLDLTGTIKDGARLFFVDEGIRRQLLLALTEDSKLHIEELVDVYRLVEDQIDIPSVAVEVARGKVLVNLEYDLVQLDLIILFVSKYHDFSFGPSFFCCYLVLEVFSPYSHLDFCLVYLLSVCMGSKKRGIKCKMCDI

SEQ ID NO: 20038 - protein, 545 aa, Glycine max
MNELCILQDDVPSFPNEIAFRIIEEDLGQPLEAVFSKISSETIAAASLGQVYRATLRATGEDVAIKVQRPGIEPIIYRDLFLFRTLASFLNGISIQKLGCNAELIVDEFGEKLLEELDYTLEARNLEDFLENFKNDPTVKIPQVYKQFSGQRVLVMEWIDGIRCTNPQAIKEAGIDVDGFLTIGVSAALRQLLEFGLFHGDPHPGNIFAMRDGRIAYVDFGNVAVLSQQNKQILIDAVVHAVNEDYAEMANDFTRLGFLTPGTDVTPIIPALEAIWQNSAGKGLSDFNFRSVTGKFNQLVYNYPIRIPERFSLVIRSLLTQEGICFTMKPDFKFLEVAYPYVAKRLLTDPNPALRERLIQVLFKDGLFQWKRLENLIVLAKENVANMSNNPALQVKNTQSQRDLKVERKLDLTGTIKDGARLFFVDEGIRRQLLLALTEDSKLHIEELVDVYRLVEDQIDIPSVAVEVARGKVLVNLEYDLVQLDLIILFVSKYHDFSFGPSFFCCYLVLEVFSPYSHLDFCLVYLLSVCMGSKKRGIKCKMCDI

SEQ ID NO: 20039 - protein, 390 aa, Glycine max
MEWIDGIRCTNPQAIKEAGIDVDGFLTIGVSAALRQLLEFGLFHGDPHPGNIFAMRDGRIAYVDFGNVAVLSQQNKQILIDAVVHAVNEDYAEMANDFTRLGFLTPGTDVTPIIPALEAIWQNSAGKGLSDFNFRSVTGKFNQLVYNYPIRIPERFSLVIRSLLTQEGICFTMKPDFKFLEVAYPYVAKRLLTDPNPALRERLIQVLFKDGLFQWKRLENLIVLAKENVANMSNNPALQVKNTQSQRDLKVERKLDLTGTIKDGARLFFVDEGIRRQLLLALTEDSKLHIEELVDVYRLVEDQIDIPSVAVEVARGKVLVNLEYDLVQLDLIILFVSKYHDFSFGPSFFCCYLVLEVFSPYSHLDFCLVYLLSVCMGSKKRGIKCKMCDI

SEQ ID NO: 20040 - DNA, 1684 bp, Glycine max
gaaagactgtcttcaagggactctttagtggacgagttgaccaatgaattaaacctgataaagacttcagaaacacaggtaaaggaagacatgttagcacttcaaaatctgttggcctctacaaaggaagaactggaagaaaaaatttcggagttggaaactgcaaggtccaagttgcaggaggaggaaaaattgagggaatcaattgaagctgcactcaagagtcaggaagcacagtttctcactgtacaagaggaactgactaaatttaaaacagaaaaagaaactcttgaagcaaccatggaagatctaactcgtagttcgaagaagtttgaggagctgtgcgctgatttagaggaaaagctaaagctctcaggcgaaaattttcttagaacagattctcttttatcccaggcactttcaaacaatgcagagcttgagcagaaggtgaagtctttggaagatctccataatgaatctggagctgctgcagctactgctactcaaaggagtcttgaacttgagggacatattcagacatcaactgcagctgcagaagaggcaaaatcacaattgagggagctggaaacacgcttcatagcagcagagcagaggaacgtggagcttgagcaacaattaaacttagtacaattgaaaaccagtgatgctgagagagaagtggctgaattatctgagcaaatatctaatctcaacgctaaattagaagaggccaaggaagagaagagtcttcttaatagccagctacaggagtacaccgaaaaagtagctctacttgaatccgacttaaatcagtcatctttgcggagttcacaattagaagaggagttgaagaatgtcaacgaaaaatgtgccgagcacgaagaccgagccagtatgaaccatgagcgtagccgagaactggaagatttaatccagagctctcactccaaattggaagattctgataaaaaggtgagtgagttggagttgttacttgaagcagagaaatacagaattcaggaactagaacaacaaataagcacactagaagagaagcgtggtgcttcagaagggcaagccaataaataccttgatgatgtatctaatctgacatcagaacttgaggcaattcaagcacgagcctcaaccctcgaaactactctgcaagcggctaatgaaagaggaaaggaattagaagattctttgaatgcagtgacagaagaaaagaaaaatttagaagatgcttctatcagtttgaatgagaagcttgctgagaaagaaaacctattggaaattttgagggatgatttaaatcttacacaagataaattgcaaagcactgaaagtgatctcagggaagctgaattgagagagagtgaaataattgagaaacttaaagcttcagaagaaaaccttgtcgtaagaggaagagatatagaggagacagctgcaagacactcagaacttcaattgttgcacgagtctctgacgagagattcagaacagaaattccaagaagctatagaaaaattcaacaacaaggactctgaggttcagtccctgcttgagaaaattaagattttggaggaacagatagcaaaggctggggaacaatctacatctgtgaagaatgaatttgaagagagtttgagcaaactggcttctttggaaagtgaaaatgaag

SEQ ID NO: 20041 - protein, 561 aa, Glycine max
ERLSSRDSLVDELTNELNLIKTSETQVKEDMLALQNLLASTKEELEEKISELETARSKLQEEEKLRESIEAALKSQEAQFLTVQEELTKFKTEKETLEATMEDLTRSSKKFEELCADLEEKLKLSGENFLRTDSLLSQALSNNAELEQKVKSLEDLHNESGAAAATATQRSLELEGHIQTSTAAAEEAKSQLRELETRFIAAEQRNVELEQQLNLVQLKTSDAEREVAELSEQISNLNAKLEEAKEEKSLLNSQLQEYTEKVALLESDLNQSSLRSSQLEEELKNVNEKCAEHEDRASMNHERSRELEDLIQSSHSKLEDSDKKVSELELLLEAEKYRIQELEQQISTLEEKRGASEGQANKYLDDVSNLTSELEAIQARASTLETTLQAANERGKELEDSLNAVTEEKKNLEDASISLNEKLAEKENLLEILRDDLNLTQDKLQSTESDLREAELRESEIIEKLKASEENLVVRGRDIEETAARHSELQLLHESLTRDSEQKFQEAIEKFNNKDSEVQSLLEKIKILEEQIAKAGEQSTSVKNEFEESLSKLASLESENE

SEQ ID NO: 20042 - protein, 531 aa, Glycine max
MLALQNLLASTKEELEEKISELETARSKLQEEEKLRESIEAALKSQEAQFLTVQEELTKFKTEKETLEATMEDLTRSSKKFEELCADLEEKLKLSGENFLRTDSLLSQALSNNAELEQKVKSLEDLHNESGAAAATATQRSLELEGHIQTSTAAAEEAKSQLRELETRFIAAEQRNVELEQQLNLVQLKTSDAEREVAELSEQISNLNAKLEEAKEEKSLLNSQLQEYTEKVALLESDLNQSSLRSSQLEEELKNVNEKCAEHEDRASMNHERSRELEDLIQSSHSKLEDSDKKVSELELLLEAEKYRIQELEQQISTLEEKRGASEGQANKYLDDVSNLTSELEAIQARASTLETTLQAANERGKELEDSLNAVTEEKKNLEDASISLNEKLAEKENLLEILRDDLNLTQDKLQSTESDLREAELRESEIIEKLKASEENLVVRGRDIEETAARHSELQLLHESLTRDSEQKFQEAIEKFNNKDSEVQSLLEKIKILEEQIAKAGEQSTSVKNEFEESLSKLASLESENE

SEQ ID NO: 20043 - protein, 461 aa, Glycine max
MEDLTRSSKKFEELCADLEEKLKLSGENFLRTDSLLSQALSNNAELEQKVKSLEDLHNESGAAAATATQRSLELEGHIQTSTAAAEEAKSQLRELETRFIAAEQRNVELEQQLNLVQLKTSDAEREVAELSEQISNLNAKLEEAKEEKSLLNSQLQEYTEKVALLESDLNQSSLRSSQLEEELKNVNEKCAEHEDRASMNHERSRELEDLIQSSHSKLEDSDKKVSELELLLEAEKYRIQELEQQISTLEEKRGASEGQANKYLDDVSNLTSELEAIQARASTLETTLQAANERGKELEDSLNAVTEEKKNLEDASISLNEKLAEKENLLEILRDDLNLTQDKLQSTESDLREAELRESEIIEKLKASEENLVVRGRDIEETAARHSELQLLHESLTRDSEQKFQEAIEKFNNKDSEVQSLLEKIKILEEQIAKAGEQSTSVKNEFEESLSKLASLESENE

SEQ ID NO: 20044 - DNA, 1648 bp, Glycine max
aaataacttaaacaaatgaacaaatcttccatcagtaacactctcaaaatcggagataacactccttctgcctacagtgcttccaaaaactactcccaaactttttctcccaacagaaacaatatgagcagccctcaaagaggaactacctctatgatccacagtgaacttgatcgtttacgtcgtgctaacgctgaactcagtcaggagtttcaaaagaatggaaaggataaaaccactctttatgaggagagaataagcattatccaagctgaaaatagaaacttggaaaatcttctcaacgcctatgctaaagatagagaacttcttaagcaaaaagatgccaagattgcagacttagaaaacagattggtccttgttgccactgaaaatgaaagacaagcctctgttatcgccaagttagaagaagaaaacgaagaattaagagccagatgctctgaacttggccaagttcagttcttattaaatgaatctcagtccaagattaacagactgaactctgaagtcgaaagattgagcgcagcagctgatgccaacagcagagaagctcaaggctggaagcataagcatgctgaaatcgaagctgctttgagatctcagaaaaacgaaagtgagagactcaagagattggctgatgacaatgctagtcaagctgagaactggagagccaagtacaatgaattagaaaagagattggctcaactctctgcttctgatagccaaaagcaaagattggaagctgaagtccaaaaattgaacgatgctctcagagaaaagaacagagaaatcgaacatcttagagctagaatccaagaattagaaagagaaaactctgctatccctgatcttcaaagaaaagtcaactccttgaccaatgaacttcaaagaatcaccaaccaacttggtcaagttcaacaagataatgaagaaaagacgagagaaatcaataacttgagacataagaatggtgatctggaagctactttgagacaactcgcttctgaaactgatagattaaacaatgttgttgtttataaggatagagaaatcgaagccttgaaccacaatattgctgaacttcaaagacaaagagctgaacttgaggatcttaaaaagagattcggcaagcttggtgatgaaaaccaaagactgaacaacatcatcagtgaaatgagcagagaaagagaagctttgttcaagagatgtgccgaattggaagaacttaacaatactgttagagtcctccaagaaaaggtcaagatcctcatcgatgaaaatgaaagattaaatgacattattgtggataaggatagagctcttgatggattgagatcaagatgtgctgaattagaaagaatgcagaaggatcttggtgatgctcaagctaagcttgctttactcttgactgaaaaggaaagactttccagagaaatcgaagaaagaagaagagaagctgaacaatggagaaataagcatgctgaaattgaaggcaggaatgctaatttgaacagagaagtcgaaaagaccaagagaagctctaacaactatgaaaacaaggtcaactatcttgttggtgaaaatgaaagattaaacgaacatatgaatgaaaagaaaaaaaaaaaaaaaa

SEQ ID NO: 20045 - protein, 544 aa, Glycine max
MNKSSISNTLKIGDNTPSAYSASKNYSQTFSPNRNNMSSPQRGTTSMIHSELDRLRRANAELSQEFQKNGKDKTTLYEERISIIQAENRNLENLLNAYAKDRELLKQKDAKIADLENRLVLVATENERQASVIAKLEEENEELRARCSELGQVQFLLNESQSKINRLNSEVERLSAAADANSREAQGWKHKHAEIEAALRSQKNESERLKRLADDNASQAENWRAKYNELEKRLAQLSASDSQKQRLEAEVQKLNDALREKNREIEHLRARIQELERENSAIPDLQRKVNSLTNELQRITNQLGQVQQDNEEKTREINNLRHKNGDLEATLRQLASETDRLNNVVVYKDREIEALNHNIAELQRQRAELEDLKKRFGKLGDENQRLNNIISEMSREREALFKRCAELEELNNTVRVLQEKVKILIDENERLNDIIVDKDRALDGLRSRCAELERMQKDLGDAQAKLALLLTEKERLSREIEERRREAEQWRNKHAEIEGRNANLNREVEKTKRSSNNYENKVNYLVGENERLNEHMNEKKKKKK

SEQ ID NO: 20046 - protein, 508 aa, Glycine max
MSSPQRGTTSMIHSELDRLRRANAELSQEFQKNGKDKTTLYEERISIIQAENRNLENLLNAYAKDRELLKQKDAKIADLENRLVLVATENERQASVIAKLEEENEELRARCSELGQVQFLLNESQSKINRLNSEVERLSAAADANSREAQGWKHKHAEIEAALRSQKNESERLKRLADDNASQAENWRAKYNELEKRLAQLSASDSQKQRLEAEVQKLNDALREKNREIEHLRARIQELERENSAIPDLQRKVNSLTNELQRITNQLGQVQQDNEEKTREINNLRHKNGDLEATLRQLASETDRLNNVVVYKDREIEALNHNIAELQRQRAELEDLKKRFGKLGDENQRLNNIISEMSREREALFKRCAELEELNNTVRVLQEKVKILIDENERLNDIIVDKDRALDGLRSRCAELERMQKDLGDAQAKLALLLTEKERLSREIEERRREAEQWRNKHAEIEGRNANLNREVEKTKRSSNNYENKVNYLVGENERLNEHMNEKKKKKK

SEQ ID NO: 20047 - protein, 498 aa, Glycine max
MIHSELDRLRRANAELSQEFQKNGKDKTTLYEERISIIQAENRNLENLLNAYAKDRELLKQKDAKIADLENRLVLVATENERQASVIAKLEEENEELRARCSELGQVQFLLNESQSKINRLNSEVERLSAAADANSREAQGWKHKHAEIEAALRSQKNESERLKRLADDNASQAENWRAKYNELEKRLAQLSASDSQKQRLEAEVQKLNDALREKNREIEHLRARIQELERENSAIPDLQRKVNSLTNELQRITNQLGQVQQDNEEKTREINNLRHKNGDLEATLRQLASETDRLNNVVVYKDREIEALNHNIAELQRQRAELEDLKKRFGKLGDENQRLNNIISEMSREREALFKRCAELEELNNTVRVLQEKVKILIDENERLNDIIVDKDRALDGLRSRCAELERMQKDLGDAQAKLALLLTEKERLSREIEERRREAEQWRNKHAEIEGRNANLNREVEKTKRSSNNYENKVNYLVGENERLNEHMNEKKKKKK

SEQ ID NO: 20048 - DNA, 1351 bp, Glycine max
tatccttctatctttacgaatcttcttcattacatggcttcttcagatcccatctcttctcgccactacacttacaacagaaaacaaaaatctctaggccttctctgcactaatttcttgagcttgtacaaccgagacaccgttcacttgattggcctagacgatgctgccacccgattaggcgttgagagacggcggatctatgacattgtgaatgtcctggagagtatcggggtactctcaaggaaagcaaaaaatcaatacacatggagagggtttgccgcaatccctctcactctacaggatctcaaggaagaggggttgaaggagaattctaattccctacgtgggcctggaaaccatgataaagtttccgacgacgaagatgacgaggaaacacagtccaatcccgccgctactggaagtcaaagtgacaagttgaaccctaattcaactcttcctaaacctctgaaaaatgaaaatcgaagagaaaaatctctggctctgcttacccagaattttgtcaagctctttgtctgctctaatgtggaattgatctcccttgacgaggctgcaaaattgctacttggggatgcccataatacgtctgtaatgagaactaaagttagacgcctgtatgacatcgcaaatgtgctatcctccatgaaccttattgagaagacccatacaatggatacacgaaaaccagcattcaggtggctcggttctgaagggaagacatgggatgagacacttcacaaatcaaacctaaacgactctaggaaaagggcgtttggaagtgatatcacaaacatcagttttgagaggaataaagtggaattgttcacgagtggggacttgaatccgaatcctaagaagccaagaatggaaaatggtagtgggctgggtgaggcagatgaaaacaatttaaaacaaggcataaaacaagcttcgaagagctatgaatttggtcctttcgctccagcttgcgtgcccaaagttggagcctctcagaataataatatgaagcaggtgcatgactggggcagtcttgcaactgcacatagccctcagtatcaaaatgaagccttgagagaactcttctcccattacatggaagcatggaaattgtggtactcagaaattgctaggaagaggccattacaaattttgtaaacgtatgccaaagtcaaactataggtatgtttggatttagtaaaatttagtctggaaacttggtttcagagaagcaagacttgggatactagtgtaaacttaagtttgcaaattttaatccaaacatggggtgtaactttcctcactagagaatatctgtagtatgcattctctc

SEQ ID NO: 20049 - protein, 391 aa, Glycine max
YPSIFTNLLHYMASSDPISSRHYTYNRKQKSLGLLCTNFLSLYNRDTVHLIGLDDAATRLGVERRRIYDIVNVLESIGVLSRKAKNQYTWRGFAAIPLTLQDLKEEGLKENSNSLRGPGNHDKVSDDEDDEETQSNPAATGSQSDKLNPNSTLPKPLKNENRREKSLALLTQNFVKLFVCSNVELISLDEAAKLLLGDAHNTSVMRTKVRRLYDIANVLSSMNLIEKTHTMDTRKPAFRWLGSEGKTWDETLHKSNLNDSRKRAFGSDITNISFERNKVELFTSGDLNPNPKKPRMENGSGLGEADENNLKQGIKQASKSYEFGPFAPACVPKVGASQNNNMKQVHDWGSLATAHSPQYQNEALRELFSHYMEAWKLWYSEIARKRPLQIL

SEQ ID NO: 20050 - protein, 380 aa, Glycine max
MASSDPISSRHYTYNRKQKSLGLLCTNFLSLYNRDTVHLIGLDDAATRLGVERRRIYDIVNVLESIGVLSRKAKNQYTWRGFAAIPLTLQDLKEEGLKENSNSLRGPGNHDKVSDDEDDEETQSNPAATGSQSDKLNPNSTLPKPLKNENRREKSLALLTQNFVKLFVCSNVELISLDEAAKLLLGDAHNTSVMRTKVRRLYDIANVLSSMNLIEKTHTMDTRKPAFRWLGSEGKTWDETLHKSNLNDSRKRAFGSDITNISFERNKVELFTSGDLNPNPKKPRMENGSGLGEADENNLKQGIKQASKSYEFGPFAPACVPKVGASQNNNMKQVHDWGSLATAHSPQYQNEALRELFSHYMEAWKLWYSEIARKRPLQIL

SEQ ID NO: 20051 - DNA, 1226 bp, Glycine max
tttgttcattggagccgggaactgagcaatcaatgactggaaaggatttggaaattgaaggatacacagttggggggctgtccattggaggccatgaaacatgcgtcattttccccacacttaaagtagcctttgatattggtcgctgcccacctcgcgctgtttcccagaactttcttttaatcacccatgctcacatggatcacattggaggacttcctatgtatgttgccacacgtggtttgtatcgtatgaagccccctacgattattgtgccaatttcagtaaaggaggatgtagagaagctttttgagattcacaggaaaatggatcaatcagaacttaagcacaacctgattggcttggatgagaagagttttatttgagaaaggatcttaaagtaaaagctttccggacttaccatgttatacctagccagggttatatactatattctgaaaaacagaaatttaaaccagagtatgttggcctttctggaaatgaaataaagaatttgaagtcatctggcgtggagataacgtacactttgacagaaccagaaattgctttcacgggagataccatgtcagatttcatagttgatgaaaataacacagatgtcttacgggctagaattcttgtattggagtgcacctttgttaacaattcaatcactgtggaacatgccagagattatggacacactcatctgtccgagataataagttatgctgagagtttacagaacagagcaatccttttgattcacttttcggctcgttacacagtagaggaaattcaacacgctgtaagtgcattgcctcccagtttatctggtcgaacttttgcgcttaccgaaggtttctgagtccctgacaagttgggagtttggttgatacataaaaatgactatggagctgtttttgcctcctccaaacccacctgagactattggacgcagttagaatgtactgtcatcattgatgacaaatgtgggagaagtggagtgcaaagcctaatccactgatgcatagtgtgtttggattaccatatgaatcaccaaaaacgtttatttgcacatttcaagagagaaaacggagaagcaacaccagtgtttcgttgaatataatgtatgtttgcgttggaacgaaccattttccaaacatacactatcactctatcagctaccttctttattaagttgtttctagtaatatttatttggc

SEQ ID NO: 20052 - protein, 127 aa, Glycine max
CSLEPGTEQSMTGKDLEIEGYTVGGLSIGGHETCVIFPTLKVAFDIGRCPPRAVSQNFLLITHAHMDHIGGLPMYVATRGLYRMKPPTIIVPISVKEDVEKLFEIHRKMDQSELKHNLIGLDEKSFI

SEQ ID NO: 20053 - protein, 117 aa, Glycine max
MTGKDLEIEGYTVGGLSIGGHETCVIFPTLKVAFDIGRCPPRAVSQNFLLITHAHMDHIGGLPMYVATRGLYRMKPPTIIVPISVKEDVEKLFEIHRKMDQSELKHNLIGLDEKSFI

SEQ ID NO: 20054 - protein, 94 aa, Glycine max
MSDFIVDENNTDVLRARILVLECTFVNNSITVEHARDYGHTHLSEIISYAESLQNRAILLIHFSARYTVEEIQHAVSALPPSLSGRTFALTEGF

SEQ ID NO: 20055 - DNA, 1991 bp, Glycine max
aattgccagggcctatctctcagtctcgggacactcatgccttctaatgcatccgtctctccatttcaataccaatatcacgacacgggtctcttaccactaatgaatgattttccaaatataaagggaaccatgtctctcaaagatgatgaggccaataacctacatggagagtttagaagtgttgaatgcatggcatctgtgtcctctggaggctttcatgacatgataaaaaaggagggtttttacaaccccaaccacccctcaatgtgtcttaaagaagtcccctctgatctaccaggttactcaaacagcattttgaactcccaataccttaaggcggcacaggagttacttgatgaaatagttagtgtccaaaaggctttgaagcaatctggaatggaaaaacaagagaacaaccgtgacattggattagatggctctaaagatgctgatggaaaatctaccagtcaatctatgcaaatgtcttctgcccctaatggttccagtgccaatgcttctagtgacctatcgtctgcagaacgccagaccttgttggacaagaaaacaaagcttttgtccatgttggatgaggtagataaaagatacagacagtactgccatcagatgcagattgtggtgtcatcttttgacatggttgccgggtgtggagcagcagaaccatatactacacttgctttaagaacaatttctcgccactttcggtgtttgcgtgatgccatcagtggccaaattcaagtgacacaaagaagccttggggagcaagagggaataccccgtctccgctatgtggatcagcaacttagacaacaaaaggcccttcagcaacttggtgtaatgcgacaagcttggaggcctcagagggggcttcctgaaagctctgtttcaatactccgtgcttggctctttgaacattttcttcatccttaccccaaggattctgagaaaattatgctggctaggcaaacaggcttgaccagaaaccaggtggcaaattggttcatcaatgcaagggtgcgtctctggaagccaatggttgaggaaatgtacaaagaggagtttggagattccgagatgaactgcaacctttcatctgagaacaacacggtcaaaggtaaaagagatgatgttcaagagtctgataacattaacaataataataataaatgggaagagtcacaggacaatttagtaactgttgacagtgtgcaagtccaacctcaagcagaaatggatagagtggtcaatgtagaaaatgtggtgatgaattctggaactgggaaattgcagggtgaccaaaaccaacaaaggcttggcttgaacaacaacaacaacagcagcagcaacttttattctatctcaaccaacgagaatggtggggatggaggcctaatgggtacttctactcatgccacatatgatttatcagagttgggtaactttactgtgggtagccacgtttcccttgcattggagttgaggaactgtgaaaatgatgggtttgccatgtctgatgatgccatacagaaacgacgtaagcaaacattgtcctcttccccggagactgatttgctagattatcatttcacggattcaggaaagcaacagcacaggtttggcaatccccatttgctgcatgagtttgtcgtatgaaatctagcaaaaaatatttgatgattttaatggatctctgaagaggtgtacctcaacaaagctgaaagagaaagcctatgcggtgttgctgctgctgctgatgctacctttttttttcttcctcattcttgttgcccattgttcgtaaaagtgatgtaaatcacgaaaccgtacaaaatatacaggtagacatgtgtagatattttcgcttgtaatattttacagatgattggttgtatgtatgtgcaggcaatttttgtaaggataaaagaaaaactctcgtgcattatgttgaataataaggaatcttgtaaaag

SEQ ID NO: 20056 - protein, 557 aa, Glycine max
NCQGLSLSLGTLMPSNASVSPFQYQYHDTGLLPLMNDFPNIKGTMSLKDDEANNLHGEFRSVECMASVSSGGFHDMIKKEGFYNPNHPSMCLKEVPSDLPGYSNSILNSQYLKAAQELLDEIVSVQKALKQSGMEKQENNRDIGLDGSKDADGKSTSQSMQMSSAPNGSSANASSDLSSAERQTLLDKKTKLLSMLDEVDKRYRQYCHQMQIVVSSFDMVAGCGAAEPYTTLALRTISRHFRCLRDAISGQIQVTQRSLGEQEGIPRLRYVDQQLRQQKALQQLGVMRQAWRPQRGLPESSVSILRAWLFEHFLHPYPKDSEKIMLARQTGLTRNQVANWFINARVRLWKPMVEEMYKEEFGDSEMNCNLSSENNTVKGKRDDVQESDNINNNNNKWEESQDNLVTVDSVQVQPQAEMDRVVNVENVVMNSGTGKLQGDQNQQRLGLNNNNNSSSNFYSISTNENGGDGGLMGTSTHATYDLSELGNFTVGSHVSLALELRNCENDGFAMSDDAIQKRRKQTLSSSPETDLLDYHFTDSGKQQHRFGNPHLLHEFVV

SEQ ID NO: 20057 - protein, 545 aa, Glycine max
MPSNASVSPFQYQYHDTGLLPLMNDFPNIKGTMSLKDDEANNLHGEFRSVECMASVSSGGFHDMIKKEGFYNPNHPSMCLKEVPSDLPGYSNSILNSQYLKAAQELLDEIVSVQKALKQSGMEKQENNRDIGLDGSKDADGKSTSQSMQMSSAPNGSSANASSDLSSAERQTLLDKKTKLLSMLDEVDKRYRQYCHQMQIVVSSFDMVAGCGAAEPYTTLALRTISRHFRCLRDAISGQIQVTQRSLGEQEGIPRLRYVDQQLRQQKALQQLGVMRQAWRPQRGLPESSVSILRAWLFEHFLHPYPKDSEKIMLARQTGLTRNQVANWFINARVRLWKPMVEEMYKEEFGDSEMNCNLSSENNTVKGKRDDVQESDNINNNNNKWEESQDNLVTVDSVQVQPQAEMDRVVNVENVVMNSGTGKLQGDQNQQRLGLNNNNNSSSNFYSISTNENGGDGGLMGTSTHATYDLSELGNFTVGSHVSLALELRNCENDGFAMSDDAIQKRRKQTLSSSPETDLLDYHFTDSGKQQHRFGNPHLLHEFVV

SEQ ID NO: 20058 - protein, 523 aa, Glycine max
MNDFPNIKGTMSLKDDEANNLHGEFRSVECMASVSSGGFHDMIKKEGFYNPNHPSMCLKEVPSDLPGYSNSILNSQYLKAAQELLDEIVSVQKALKQSGMEKQENNRDIGLDGSKDADGKSTSQSMQMSSAPNGSSANASSDLSSAERQTLLDKKTKLLSMLDEVDKRYRQYCHQMQIVVSSFDMVAGCGAAEPYTTLALRTISRHFRCLRDAISGQIQVTQRSLGEQEGIPRLRYVDQQLRQQKALQQLGVMRQAWRPQRGLPESSVSILRAWLFEHFLHPYPKDSEKIMLARQTGLTRNQVANWFINARVRLWKPMVEEMYKEEFGDSEMNCNLSSENNTVKGKRDDVQESDNINNNNNKWEESQDNLVTVDSVQVQPQAEMDRVVNVENVVMNSGTGKLQGDQNQQRLGLNNNNNSSSNFYSISTNENGGDGGLMGTSTHATYDLSELGNFTVGSHVSLALELRNCENDGFAMSDDAIQKRRKQTLSSSPETDLLDYHFTDSGKQQHRFGNPHLLHEFVV

SEQ ID NO: 20059 - DNA, 1286 bp, Glycine max
aaaacccaaaacctcttcttcttactctcttacgttaattcttcgttgtctatgatggcattggatatgattgatgttgttcccaggacgaggatggaagaagaaaatatagcaatacaagaagcagcttccgctgggttaaagagcatggagcatctcattcgtctcctttctccttcttcttctcttcacaacaacgttaataatctcaatctcaaccacctcgactgctccgaaatcaccggcttcactgtctccaagttcaaacaagtcatcaaccttctcaaccgcaccggccacgcccgcttccgccgctctccaccccaagcccaagcccaagcccaagcccaagcccaagcccaaactaatcctcaaccacaacctcagatccaacaacaagggttcagtttagatttcgtgaagcccaccattctaaactcaaagcccatcaacaaagacgaaactttgactctttcaacaacctcttcttccttcatgtcctccgtcaccaacgacgccagcgtctccgacggcaagatcggacctttcctccctccctccgccgccaaaccccctctctcctccgcccaccggaaaaagtgccgcgacgccgccgcagcactctccgccaaaccctcctgccactgctccaagaaaaggaaatcacgcgtgaaacgaacgattcgggtgccggcgataagctcaaagatcgcagatatcccaccggacgagtattcgtggagaaaatacggtcaaaaaccgatcaagggctcaccttaccctcgagggtactacaagtgcagcaccgtgagagggtgtccggcgaggaagcacgtggagcgagcgcaggatgaccccaagatgctaatagtgacttacgagggtgagcaccgtcacgtgctgccgttaacttccgccgccggcgttagtttcggccattgagttaatcgacggcgtcttttggaaacttgacgggggacgttaaatgagcgtcggatcgtgaagtaacggcggatgcgaacaaggatcgattcggttcgaggacggaaaaagaaaagtggcaactaaagtcaactttcgcgttgtggaatgattttgttgacgaggacttttgtgtaaatttgaccccaagtaaagtagtgcaggtctcaaagaatgaaaattatagtgatctcatctgtttttctttatttctattttttttttaaaagagacatttatttatttatttatttgatgttagagttgaattggttgaaggatggggctgcaataattttcttggt

SEQ ID NO: 20060 - protein, 313 aa, Glycine max
KTQNLFFLLSYVNSSLSMMALDMIDVVPRTRMEEENIAIQEAASAGLKSMEHLIRLLSPSSSLHNNVNNLNLNHLDCSEITGFTVSKFKQVINLLNRTGHARFRRSPPQAQAQAQAQAQAQTNPQPQPQIQQQGFSLDFVKPTILNSKPINKDETLTLSTTSSSFMSSVTNDASVSDGKIGPFLPPSAAKPPLSSAHRKKCRDAAAALSAKPSCHCSKKRKSRVKRTIRVPAISSKIADIPPDEYSWRKYGQKPIKGSPYPRGYYKCSTVRGCPARKHVERAQDDPKMLIVTYEGEHRHVLPLTSAAGVSFGH

SEQ ID NO: 20061 - protein, 296 aa, Glycine max
MMALDMIDVVPRTRMEEENIAIQEAASAGLKSMEHLIRLLSPSSSLHNNVNNLNLNHLDCSEITGFTVSKFKQVINLLNRTGHARFRRSPPQAQAQAQAQAQAQTNPQPQPQIQQQGFSLDFVKPTILNSKPINKDETLTLSTTSSSFMSSVTNDASVSDGKIGPFLPPSAAKPPLSSAHRKKCRDAAAALSAKPSCHCSKKRKSRVKRTIRVPAISSKIADIPPDEYSWRKYGQKPIKGSPYPRGYYKCSTVRGCPARKHVERAQDDPKMLIVTYEGEHRHVLPLTSAAGVSFGH

SEQ ID NO: 20062 - protein, 295 aa, Glycine max
MALDMIDVVPRTRMEEENIAIQEAASAGLKSMEHLIRLLSPSSSLHNNVNNLNLNHLDCSEITGFTVSKFKQVINLLNRTGHARFRRSPPQAQAQAQAQAQAQTNPQPQPQIQQQGFSLDFVKPTILNSKPINKDETLTLSTTSSSFMSSVTNDASVSDGKIGPFLPPSAAKPPLSSAHRKKCRDAAAALSAKPSCHCSKKRKSRVKRTIRVPAISSKIADIPPDEYSWRKYGQKPIKGSPYPRGYYKCSTVRGCPARKHVERAQDDPKMLIVTYEGEHRHVLPLTSAAGVSFGH

SEQ ID NO: 20063 - DNA, 1842 bp, Glycine max
ttaatcaatactttatgcacttttgttactagcacatgtgattgatattgaattgctctgctgttggatctctgcactggaaatttgtttcattttatatgttctaaacacggcttaggaaacctggcatgggagttattactgtttctacctcagctgctaggactccattaagattgaatacaaggttgatcagtcatcagcaggagaaaattcctctacccctagaaacagcgaagaaacaccagaaaagagtaggaaagactagtgagtcactgaagagagtgagagccgtctctactgttgaaacctctccatgcaccttggatgtggactacaatgaagctgcagccaaacttgaaaatatatataaactcagccctgtatctgatacctgtaatgtggaagatatagatagtaaaatcgagagagtcttgcggaggaggaagaaggttagtgaggaacgtgatgatggaaattgtgataatgtggttagaaaccagaataagaaggccaaacgattgagtcttgataagaggattgcattgaaaaataatgcaaaggaggaggtgattgatcaaactcagaagaaaaggaatgttaagaatagagtacaaaatattgatgtgcttatcagggattattcagcatcaactgatttagttagcatggactggaagaaaatgaagattccgccagttcttccttcttcagaacatgcatggttgttcaagttgatgcagccaatgaaggcactcctacaagcaaaagaagatttaaaggaagtggataaagaaattacaggtggtgaactagctgatgcaacaaacatgagtattattcaagtaaggaaagctatagaggttggtcgagctgcgagaaacaaactcataaagcacaatctccggcttgtattgttcgtgatcaacaaatattttcaagattttgcaagtggcccgaggtttcaagatctttgtcaggcaggagttaagggacttatcacagcaattgatcgttttgagccaaaaagaagacttcagctatctacatacagtttattttggataagacattctatcgttcgttccataaccctctcaagcttcacacgtgttccttttggacttgaaagggttagagtagatatccaaagaacaaaacttaagttaacatttgagctccagaggtcaccaacggaagaagagttagtagaaagaattgggatctcacttgaaagatatcatgaagtaatgaaggcatcaaaacccattttatcccttcattcaagacatataaccacgcaagaggagtatattaatgggattactgatgttgatggtgttaatggtgataataggaggcaacttgctgttctaagacttgctcttgatgatgtgcttgattccctgaagccaaaggagagcctagtgatcaggcagagatatggacttgatggcaagggtgacagaacattgggagaaattgctgggaacttgaatatttctagggaaattgtccggaagcatgaagtcaaagctctcatgaagcttaagcatccagctcggttggattatcttcgtcgttatgttgtataaattaacaaatatatatatatgcttccattggtgtcattttagtcccacgtacgctacctatagccatgcccttgataattctcataacaattatttaagtatacaaaattataatcatttgtcatgtaatttgtatatgaaggagttattgctcataagaaataacaacccaatacatgttacatgtaatgtgttgtgttcatgaattacattccaaattatataatagttgctagagttcatgtcg

SEQ ID NO: 20064 - protein, 488 aa, Glycine max
MGVITVSTSAARTPLRLNTRLISHQQEKIPLPLETAKKHQKRVGKTSESLKRVRAVSTVETSPCTLDVDYNEAAAKLENIYKLSPVSDTCNVEDIDSKIERVLRRRKKVSEERDDGNCDNVVRNQNKKAKRLSLDKRIALKNNAKEEVIDQTQKKRNVKNRVQNIDVLIRDYSASTDLVSMDWKKMKIPPVLPSSEHAWLFKLMQPMKALLQAKEDLKEVDKEITGGELADATNMSIIQVRKAIEVGRAARNKLIKHNLRLVLFVINKYFQDFASGPRFQDLCQAGVKGLITAIDRFEPKRRLQLSTYSLFWIRHSIVRSITLSSFTRVPFGLERVRVDIQRTKLKLTFELQRSPTEEELVERIGISLERYHEVMKASKPILSLHSRHITTQEEYINGITDVDGVNGDNRRQLAVLRLALDDVLDSLKPKESLVIRQRYGLDGKGDRTLGEIAGNLNISREIVRKHEVKALMKLKHPARLDYLRRYVV

SEQ ID NO: 20065 - protein, 308 aa, Glycine max
MDWKKMKIPPVLPSSEHAWLFKLMQPMKALLQAKEDLKEVDKEITGGELADATNMSIIQVRKAIEVGRAARNKLIKHNLRLVLFVINKYFQDFASGPRFQDLCQAGVKGLITAIDRFEPKRRLQLSTYSLFWIRHSIVRSITLSSFTRVPFGLERVRVDIQRTKLKLTFELQRSPTEEELVERIGISLERYHEVMKASKPILSLHSRHITTQEEYINGITDVDGVNGDNRRQLAVLRLALDDVLDSLKPKESLVIRQRYGLDGKGDRTLGEIAGNLNISREIVRKHEVKALMKLKHPARLDYLRRYVV

SEQ ID NO: 20066 - protein, 303 aa, Glycine max
MKIPPVLPSSEHAWLFKLMQPMKALLQAKEDLKEVDKEITGGELADATNMSIIQVRKAIEVGRAARNKLIKHNLRLVLFVINKYFQDFASGPRFQDLCQAGVKGLITAIDRFEPKRRLQLSTYSLFWIRHSIVRSITLSSFTRVPFGLERVRVDIQRTKLKLTFELQRSPTEEELVERIGISLERYHEVMKASKPILSLHSRHITTQEEYINGITDVDGVNGDNRRQLAVLRLALDDVLDSLKPKESLVIRQRYGLDGKGDRTLGEIAGNLNISREIVRKHEVKALMKLKHPARLDYLRRYVV

SEQ ID NO: 20067 - DNA, 1066 bp, Glycine max
atatgcatgctgccttgaaatgtgcaaaggagttcattgatgtcactggtggatctgtctctaaaggctggaggttgctattgttggttctttctgcacaacaaaggtattcagaagctgaagttgtaactgatgctgcattagatgagaccgcgaagtgggaacaagggccattgcttagaataagggctaaactgaaggttgctcaagcattgcctatggaagcagttgaagcatatcgcacccttcttgctcttgttcaggcacaacggaaggcttatggatctgtcaaaaatggcacagaggataatgaggataaagtgagggaagttgaagtttggcatggtcttgccaacctgtactctagtctttcctattggagagatgcagaaatttgcttacagaaggctaaagccctcaaaacatactctgcgacaacccttcatgtagaaggaaacaaacacgaactgcatgagaagatacaggacgcggtagctgcatacttcaatgccatctctatggaggtagagcacgtcccatccaaggtctctatcggtgctctcctctctaaacaagggcccaagttcctaccagtggcgaggtgttttctctccgatgccctgaggcttgaacccacgaaccgcatggcctggttctaccttggggaggttcacaagcaggacggcaggctagctgatgccgccgactgcttccaggcggcctcaatgctcgaggactcggatcctgtagaaagtttcagatcactctgatgggtcatctgcaacagcgtgaggttccctttttttgtcggccggttttctcttcgtcttcccccattttcgaggcacagctgggcagagaccaggtgcccagctatctgtaacttgttgtatctacagttgtcagtgtgtaccaacagatgctgtaattggttgttgagtggcctacatgattcttcaaccgatagctccatcaggatcagagtggcactggaacagctatgcaatcatatgagccattattattacgtgtattacacagtatgaatatatgattataatgagtc

SEQ ID NO: 20068 - protein, 255 aa, Glycine max
MHAALKCAKEFIDVTGGSVSKGWRLLLLVLSAQQRYSEAEVVTDAALDETAKWEQGPLLRIRAKLKVAQALPMEAVEAYRTLLALVQAQRKAYGSVKNGTEDNEDKVREVEVWHGLANLYSSLSYWRDAEICLQKAKALKTYSATTLHVEGNKHELHEKIQDAVAAYFNAISMEVEHVPSKVSIGALLSKQGPKFLPVARCFLSDALRLEPTNRMAWFYLGEVHKQDGRLADAADCFQAASMLEDSDPVESFRSL

SEQ ID NO: 20069 - protein, 183 aa, Glycine max
MEAVEAYRTLLALVQAQRKAYGSVKNGTEDNEDKVREVEVWHGLANLYSSLSYWRDAEICLQKAKALKTYSATTLHVEGNKHELHEKIQDAVAAYFNAISMEVEHVPSKVSIGALLSKQGPKFLPVARCFLSDALRLEPTNRMAWFYLGEVHKQDGRLADAADCFQAASMLEDSDPVESFRSL

SEQ ID NO: 20070 - DNA, 1277 bp, Glycine max
attactaatcaaaattttgagtgcatctttgattatttctctgttttcttcactacctaccgtctttcatgacaaactgtctagtctttatggcggcatgtgctgattgatgtctcaataagatccaagagaccaagattgtcattaatccggttgattatgatgtagggctttgccaggatcttttaattccagtaaccaactttcataatgaagacaagggctatatggttttacctggagatgtttttgatttgcctattcggaaggacattattcatcgtgttgttaggtggcagcttgcaaaacgacaacaggggactcactcaacaaaaactatcagtgaggtcagtggcactgggagaaaaccttggaatcaaaagggaactggtagagcaaggcatggttcattgcgtgggcctcaggtagtgaagcattctgctcattacttgctagtccatctttattccttctttcttctcatttttttgtgttcttattgtccatttttagcagttgaaattaacaaacttaatgaatggtaacagttcaggggtggtgccaccatgcatggccctaagccccgaagccatgctttcaaagtcaataagaaggttcgacgtctagggctgaagattgctttatcagctcgtgcagcagaaggaaagcttcttgtttttgaggatctggcggttcccacacataaaaccaagaatattgtgaattattacaatcaaatggaggataccaagaaactgctgcttgtagatggcgctatagatgaaaagttaaaattatctacacaaaatctacactatgttaacgtacttccctccattggcttgaatgtctacagcattttgctgcatgatacattggtgatgtcccgagctgctgtgagcaaaattgttgagcgcatgcatactccaataaatcgttgaggctgtaactttttattgtgcttcgcttcatttactcggaaataggaacatttctgtagcaacataaaaagatccaatgagaatatctttggtacgaggtgtctgttttaattacataagttaggcaagttatgccattttgcccatgttgaaggttggaacttaggaacttgatgatcgaaatttgacgttcatgtgattaggtttatcttgttttccggtggttgaatctcatttttcaattctttcacatgcataggatctgataaacctgtacatcattcatgacctagtgtccttcattcatgaatttaaccaatatagtttgtctttggc

SEQ ID NO: 20071 - protein, 124 aa, Glycine max
MHGPKPRSHAFKVNKKVRRLGLKIALSARAAEGKLLVFEDLAVPTHKTKNIVNYYNQMEDTKKLLLVDGAIDEKLKLSTQNLHYVNVLPSIGLNVYSILLHDTLVMSRAAVSKIVERMHTPINR

SEQ ID NO: 20072 - protein, 105 aa, Glycine max
MVLPGDVFDLPIRKDIIHRVVRWQLAKRQQGTHSTKTISEVSGTGRKPWNQKGTGRARHGSLRGPQVVKHSAHYLLVHLYSFFLLIFLCSYCPFLAVEINKLNEW

SEQ ID NO: 20073 - protein, 72 aa, Glycine max
MKTRAIWFYLEMFLICLFGRTLFIVLLGGSLQNDNRGLTQQKLSVRSVALGENLGIKRELVEQGMVHCVGLR

SEQ ID NO: 20074 - DNA, 1108 bp, Glycine max
tttgtgttttcaaccgaaaacttggccttcatttttatttgatttgttacacataagctaagcaagtgccaattcactcgtccatctgtagatttttcttcacatgaacacttttgtttttatacttgctttacataagaatatttggccatataacttcccttttaaccctccctttcaggtcttcttcgttgtggtaagagctgccggttaagatggacaaactacctcagaccagatattaaacgtggttcctttacacttgaggatgaaaaactaatcatacagcttcatggtatccttggaaataggtgggctgctatagcctctcagctaccaggaagaacagacaatgagataaaaaacttatggaacacccacttgaagaaacgtctcatttgcatgggccttgacccacaaacccaccaaccactagcctctccacataaccctaatgacaaggctcatgcatcatcatccacttcaacccgccacatggcccagtgggagagtgcaaggcttgaagcagaggcaaggctctcaagggaaccacacttatactacaacaacaacaaaactgactctgactacttcctacgaatttggaactctgatcttggagaatcttttcgtgatgtccacaaattagaatcttcaatcaaatgtgagtcacagtctgccacaacggatttggcttccttaaccccagcaagcattgtgaaagaggagtttctgtggggtgttaagaaaattgtctcggattcatcatcaagctctagtgaactacaccatgactcttgtgacacttctttgcagctcttgttagactttcctatgaacaatgacatgagcttcttagaattatgagacaccaacagccccttccttacccttaattagtgcatgtatgatgttgttgatatgctgacatgtagctttttgttggctattttgtagacttatagcatgttaggataattaactatcataattgattttggaaggaaattatgctgaaaattgaaaaaagtgaaagcaactatttgttgcttggactttcaatgagaatttggaattgattcggggaaaaaaaaaaaaaaaaaaaaag

SEQ ID NO: 20075 - protein, 154 aa, Glycine max
MGLDPQTHQPLASPHNPNDKAHASSSTSTRHMAQWESARLEAEARLSREPHLYYNNNKTDSDYFLRIWNSDLGESFRDVHKLESSIKCESQSATTDLASLTPASIVKEEFLWGVKKIVSDSSSSSSELHHDSCDTSLQLLLDFPMNNDMSFLEL

SEQ ID NO: 20076 - protein, 123 aa, Glycine max
MAQWESARLEAEARLSREPHLYYNNNKTDSDYFLRIWNSDLGESFRDVHKLESSIKCESQSATTDLASLTPASIVKEEFLWGVKKIVSDSSSSSSELHHDSCDTSLQLLLDFPMNNDMSFLEL

SEQ ID NO: 20077 - DNA, 1589 bp, Glycine max
atttcaaggggtacccacttttgagaaacctgaagtggacccaaaaagtgtggcttccatcatattgggtggaggtgcaggaactcgactctttcctcttactggcagaagagccaagccagcggttccaattggagggtgttatagactcatagatatccccatgagcaattgcatcaatagtggcatcagaaaaattttcatcttgacgcagttcaattctttctctctcaaccgccacctgtcccgtgcatacagcttcggaaatggcatgacttttggagatgggtttgtggaggtcttggcagctactcaaacaccgggtgaggctgggaagaagtggttccaagggacagctgatgctgtaagacaatttatatgggtttttgaggatgccaagaacaagaatgttgagcatatattgatactttctggcgatcatctttaccgtatggactatatggactttgtacagagacatgttgacacaaatgccgatatcacagtttcatgtgtacccatggatgacagtcgggcatcagactatggactgatgaaaattgataaaacaggacggattatacagtttgcagaaaaacctaagggatcagatctaaaggcaatgcgtgttgacaccactcttttagggttattgccacaagaagcagaaaaacatccttatattgcatccatgggtgtctacgtgtttagaactgaaaccttgctgcaactattaagatggaaatgttcttcatgcaatgactttggatctgaaattatcccatctgctgtgaatgagcacaatgtccaggcatatttgttcaatgactactgggaagatattggaactataaagtccttctttgatgcaaatcttgctctaacagaacagcctcctaaatttgaattctatgatccaaagacacctttcttcacttcccccagattcctaccacctaccaaagtagaaaaatgcaagattgtggatgcaattatatctcatggttgcttcttgagggagtgcagcgttcaacattctattgttggagtacgctcacgtttggagtctggtgtggagcttcaggatacgatgatgatgggtgctgactattatcaaactgagtatgaaattgcatctctggtggcagaagggaaggttccaattggtgtcggggcaaatactaaaatcaggaattgcataatcgacaagaatgccaagataggaagaaatgtgatcatagcaaacaccgatggtgttcaagaagctgacagggcaaaggaaggattctacattaggtcgggcatcacagttacattaaaaaatgcaacaatcaaagatggaacagttatatgaagcacttcaagttatccagcaggccactttataatagttttgacataagtacattcacttccgacataatagtagatgaaatgctagctcgtacattacaaagtttctctcgatatatctctataatagttatgtttattgcatttgtaggacacttcacttgtaataacaggcaattcttgccactacgattaagttataaattaaagtttctaactcaaaaaaaaaaaaaaag

SEQ ID NO: 20078 - protein, 450 aa, Glycine max
FQGVPTFEKPEVDPKSVASIILGGGAGTRLFPLTGRRAKPAVPIGGCYRLIDIPMSNCINSGIRKIFILTQFNSFSLNRHLSRAYSFGNGMTFGDGFVEVLAATQTPGEAGKKWFQGTADAVRQFIWVFEDAKNKNVEHILILSGDHLYRMDYMDFVQRHVDTNADITVSCVPMDDSRASDYGLMKIDKTGRIIQFAEKPKGSDLKAMRVDTTLLGLLPQEAEKHPYIASMGVYVFRTETLLQLLRWKCSSCNDFGSEIIPSAVNEHNVQAYLFNDYWEDIGTIKSFFDANLALTEQPPKFEFYDPKTPFFTSPRFLPPTKVEKCKIVDAIISHGCFLRECSVQHSIVGVRSRLESGVELQDTMMMGADYYQTEYEIASLVAEGKVPIGVGANTKIRNCIIDKNAKIGRNVIIANTDGVQEADRAKEGFYIRSGITVTLKNATIKDGTVI

SEQ ID NO: 20079 - protein, 396 aa, Glycine max
MSNCINSGIRKIFILTQFNSFSLNRHLSRAYSFGNGMTFGDGFVEVLAATQTPGEAGKKWFQGTADAVRQFIWVFEDAKNKNVEHILILSGDHLYRMDYMDFVQRHVDTNADITVSCVPMDDSRASDYGLMKIDKTGRIIQFAEKPKGSDLKAMRVDTTLLGLLPQEAEKHPYIASMGVYVFRTETLLQLLRWKCSSCNDFGSEIIPSAVNEHNVQAYLFNDYWEDIGTIKSFFDANLALTEQPPKFEFYDPKTPFFTSPRFLPPTKVEKCKIVDAIISHGCFLRECSVQHSIVGVRSRLESGVELQDTMMMGADYYQTEYEIASLVAEGKVPIGVGANTKIRNCIIDKNAKIGRNVIIANTDGVQEADRAKEGFYIRSGITVTLKNATIKDGTVI

SEQ ID NO: 20080 - protein, 360 aa, Glycine max
MTFGDGFVEVLAATQTPGEAGKKWFQGTADAVRQFIWVFEDAKNKNVEHILILSGDHLYRMDYMDFVQRHVDTNADITVSCVPMDDSRASDYGLMKIDKTGRIIQFAEKPKGSDLKAMRVDTTLLGLLPQEAEKHPYIASMGVYVFRTETLLQLLRWKCSSCNDFGSEIIPSAVNEHNVQAYLFNDYWEDIGTIKSFFDANLALTEQPPKFEFYDPKTPFFTSPRFLPPTKVEKCKIVDAIISHGCFLRECSVQHSIVGVRSRLESGVELQDTMMMGADYYQTEYEIASLVAEGKVPIGVGANTKIRNCIIDKNAKIGRNVIIANTDGVQEADRAKEGFYIRSGITVTLKNATIKDGTVI

SEQ ID NO: 20081 - DNA, 1232 bp, Glycine max
aaagaatgcaatgactcaactccagatagtagatagtgagtgagtgaagctaaagctacaaaaacaacaaccaaacaaaaaactcaattctcttctgttcttggtttttgcttttcctcattctctcattctcaacaccaccaaaatgggccttgtttcccaggatgccctcaaccaactccaagctctcatggatcaagtgctacttgaggaggagccactgcagagaacgtttcagaatgttcatcaaggatgtgtcgccgaaaccttaacgcggtttctaaaagcaagggagtggaatgctaccaaggcccataaaatgatagtcgattgtttaaagtggagagtacaaaatgagattgacaacatattatctaaaccaataatccctactgatttatacagaggcattcgtgattcacaacttataggattgtccgggtactccagagagggtctgccagtctttgcaattggtgttgggcttagcacatttgacaaagcgtctgtccattattatgtgcagtctcacattcaaattaatgaatatcgtgatcgtgtaatcttgccttcagcatcaaagaagcatgagcggcctattaccacatgtgtaaaggttttggatatgactggtctgaagttgtcagccctgaatcagataaagttgttaacaataatatcatccattgatgatctgaactaccccgagaaaacaaatacttattacattgtaaatgccccatacatattttcagcttgttggaaggttgtgaagccacttttacaagagaggacaagaagaaaagtacaagtcttacaaggttgtgggcgagatgagctattaaagatcatggattacacgtctctgccacatttctgtagaagagaaggctctggatcatcaagacattcagagaatggaaatgaaaattgctattccgtggatcatcctttccataagcagctctacaactacatcaaggagcaatccagaatccatgaagctgttgaacccatcaagcagggatcgttccatgtagattttcccgaacctcctgccgagaaagcagagattgtcaagactttagagtctgagctacacaagtttaagatcagcaatgagaatggtgattgaagattgatactgttaccaatggtgtcttggccatgttgtcttttacctgtcctactaaccatttgaaccaaactaatgatgtaacaacggttcttcc

SEQ ID NO: 20082 - protein, 329 aa, Glycine max
MGLVSQDALNQLQALMDQVLLEEEPLQRTFQNVHQGCVAETLTRFLKAREWNATKAHKMIVDCLKWRVQNEIDNILSKPIIPTDLYRGIRDSQLIGLSGYSREGLPVFAIGVGLSTFDKASVHYYVQSHIQINEYRDRVILPSASKKHERPITTCVKVLDMTGLKLSALNQIKLLTIISSIDDLNYPEKTNTYYIVNAPYIFSACWKVVKPLLQERTRRKVQVLQGCGRDELLKIMDYTSLPHFCRREGSGSSRHSENGNENCYSVDHPFHKQLYNYIKEQSRIHEAVEPIKQGSFHVDFPEPPAEKAEIVKTLESELHKFKISNENGD

SEQ ID NO: 20083 - protein, 314 aa, Glycine max
MDQVLLEEEPLQRTFQNVHQGCVAETLTRFLKAREWNATKAHKMIVDCLKWRVQNEIDNILSKPIIPTDLYRGIRDSQLIGLSGYSREGLPVFAIGVGLSTFDKASVHYYVQSHIQINEYRDRVILPSASKKHERPITTCVKVLDMTGLKLSALNQIKLLTIISSIDDLNYPEKTNTYYIVNAPYIFSACWKVVKPLLQERTRRKVQVLQGCGRDELLKIMDYTSLPHFCRREGSGSSRHSENGNENCYSVDHPFHKQLYNYIKEQSRIHEAVEPIKQGSFHVDFPEPPAEKAEIVKTLESELHKFKISNENGD

SEQ ID NO: 20084 - protein, 271 aa, Glycine max
MIVDCLKWRVQNEIDNILSKPIIPTDLYRGIRDSQLIGLSGYSREGLPVFAIGVGLSTFDKASVHYYVQSHIQINEYRDRVILPSASKKHERPITTCVKVLDMTGLKLSALNQIKLLTIISSIDDLNYPEKTNTYYIVNAPYIFSACWKVVKPLLQERTRRKVQVLQGCGRDELLKIMDYTSLPHFCRREGSGSSRHSENGNENCYSVDHPFHKQLYNYIKEQSRIHEAVEPIKQGSFHVDFPEPPAEKAEIVKTLESELHKFKISNENGD

SEQ ID NO: 20085 - DNA, 1361 bp, Glycine max
gtgttgtggttcgaaacctctgactctgtctgttgccaacaccagtttgaacccgatggtcgactctccgtagtgattgttgatgattccaggcccctataccaaaggatggctggatctttcatgaataaatttttcccctcaggatatccgtacagtgtgaatgaaggctatcttagatacacgcagtttcgagctttgcaacatgttaccagtgcagcactatcggtgctatcaactcagtccttgctattcgctgcagggttgcggcccactcctgcgcaagcaactgctgttagttggattttaaaggatggaatgcaacatgtagggaagctaatatgtagcaattggggtgctagaatggattctgaacctaaacgttggagactactagctgatgtgctctatgatattggcattggcttggaagtgctttctccattatgcccgcatctttttcttgaaatggcaggcttaggaaattttgcaaaggggatggctgttgttgcagcaagagcaacaaggttgcctatatattcttcatttgctaaagaaggaaatctcagcgacctatttgctaaaggagaggctttttcaactctctttaatgttgttggaattggagtaggaattcaattagcatctaccatttgtgcatcaatacagggaaagttggttgcgggtcctctcctttcaattatacatttatacagtgtgtctgaagaaatgagagcaactcctatcaatacgttgaatccacgaagaactgcaatggttgtggctgattttctcaaggcaggaattgtatcaagccctgctgatttgagatatcgagaaaatctgctgttcaatgtgcaagtcaaagaagacactggaaacgtaagagtggggaagaatgtgcacaaggtcattaagccttccaggcttcttgaattaaaacaagtgttccccgaggagaaatttctcttaaatttagggaataaatgcattgacatggtattggaacaagatgctagtggtgaagatgcactgagagggtggctagttgctgcatatgctgcacgaactgagagttcctctcatgagctcagtgctactagtgtcctgcatgaggcttatgagaaaatgaatggtgtctttcctgtattcttaagggaattacagaacaaagggtggcacactgatcggtttttggatggaactgggagccgtttttcattctagtgcttgtataaatttaatgttgctttaaataggttttatccattctctgagaattttttatgagctatgggtggagtaaatccaatggttcacattacctgttcttaattgtgtattttacctattatttttcg

SEQ ID NO: 20086 - protein, 408 aa, Glycine max
VLWFETSDSVCCQHQFEPDGRLSVVIVDDSRPLYQRMAGSFMNKFFPSGYPYSVNEGYLRYTQFRALQHVTSAALSVLSTQSLLFAAGLRPTPAQATAVSWILKDGMQHVGKLICSNWGARMDSEPKRWRLLADVLYDIGIGLEVLSPLCPHLFLEMAGLGNFAKGMAVVAARATRLPIYSSFAKEGNLSDLFAKGEAFSTLFNVVGIGVGIQLASTICASIQGKLVAGPLLSIIHLYSVSEEMRATPINTLNPRRTAMVVADFLKAGIVSSPADLRYRENLLFNVQVKEDTGNVRVGKNVHKVIKPSRLLELKQVFPEEKFLLNLGNKCIDMVLEQDASGEDALRGWLVAAYAARTESSSHELSATSVLHEAYEKMNGVFPVFLRELQNKGWHTDRFLDGTGSRFSF

SEQ ID NO: 20087 - protein, 372 aa, Glycine max
MAGSFMNKFFPSGYPYSVNEGYLRYTQFRALQHVTSAALSVLSTQSLLFAAGLRPTPAQATAVSWILKDGMQHVGKLICSNWGARMDSEPKRWRLLADVLYDIGIGLEVLSPLCPHLFLEMAGLGNFAKGMAVVAARATRLPIYSSFAKEGNLSDLFAKGEAFSTLFNVVGIGVGIQLASTICASIQGKLVAGPLLSIIHLYSVSEEMRATPINTLNPRRTAMVVADFLKAGIVSSPADLRYRENLLFNVQVKEDTGNVRVGKNVHKVIKPSRLLELKQVFPEEKFLLNLGNKCIDMVLEQDASGEDALRGWLVAAYAARTESSSHELSATSVLHEAYEKMNGVFPVFLRELQNKGWHTDRFLDGTGSRFSF

SEQ ID NO: 20088 - protein, 367 aa, Glycine max
MNKFFPSGYPYSVNEGYLRYTQFRALQHVTSAALSVLSTQSLLFAAGLRPTPAQATAVSWILKDGMQHVGKLICSNWGARMDSEPKRWRLLADVLYDIGIGLEVLSPLCPHLFLEMAGLGNFAKGMAVVAARATRLPIYSSFAKEGNLSDLFAKGEAFSTLFNVVGIGVGIQLASTICASIQGKLVAGPLLSIIHLYSVSEEMRATPINTLNPRRTAMVVADFLKAGIVSSPADLRYRENLLFNVQVKEDTGNVRVGKNVHKVIKPSRLLELKQVFPEEKFLLNLGNKCIDMVLEQDASGEDALRGWLVAAYAARTESSSHELSATSVLHEAYEKMNGVFPVFLRELQNKGWHTDRFLDGTGSRFSF

SEQ ID NO: 20089 - DNA, 1450 bp, Glycine max
accgatattcaaaagatgggcatccaacatgtgctggttttgccatttcctgctcaagggcatgtcaatcctctgatgctcttgtcaaaaaaactagctgaacatggcttcaaagtcacttttgtcaacacagatttcaaccacaagagagtgttgagtgcaacaaatgaggagggatcagcagtgagattaatctcaatcccagatggtttaggccctgaggatgacagaaataacgtggtcaatttatgttcggaatccttaagcagtaccatgacttctgcccttgagaaggtcataaaggatattgatgcacttgatagtgctagtgagaaaatcacaggtatagtggctgatgtgaacatggcatgggccttggaactcacagataagctaggaatcaaaggtgctgtcttctgccctgcttcagcagctgttttagtcttgggtgagaacattccaaacctcattcaagatgggatcataaataccgaagggttcccgattataaaagggaaatttcaactatccccagaaatgccaattatggacacagctgacattccatggtgcagcttaggtgacccaaccatgcacaaggttatatataatcatgcgtcaaagattatacgatattcacatttaacagattggtggcttggaaacaccacaagtgaccttgaacctggtgctatatctttgtctccaaagatcctaccaattggtccactcatagggagtggtaatgacattagatcattggggcaattctgggaagaagacgtctcttgcttgacctggcttgatcaacaaccaccttgttctgtcatatacgttgcctttggtagctctactatttttgaccctcatcaactcaaggaactagctcttggacttgacctcacaaacaggccttttctgtgggttgttcgtgaggatgccagtggaagcaccaaaatcacatacccagatgaattccaaggcacttgtggtaaaattgttaaatgggcacctcaacaaaaggtgttaagccaccctgcaatagcttgttttattagtcactgtggttggaattctaccttggaaggtgtgtccaatggggtacctttcttgtgttggccatattatactgaccaattagttgacaaggcttacatttgtgatatgtggaaggtgggtttgggattcgatttggatgacaaagggctgatatcacgttgggagataaagaagaaagtagaccaaatccttggagatgagaacataaggggaaggtctcaaaaactgaaggaaatggttctaagtaacattgcagaagggggacaatcctatgagaattttaacaagtttgtggagtggctcaaggaataaaaatgtatttgttgatgccctgatgttgtgaacaatgtttatgatgttcctgaaaaatattgaacatttaaatttagcc

SEQ ID NO: 20090 - protein, 456 aa, Glycine max
TDIQKMGIQHVLVLPFPAQGHVNPLMLLSKKLAEHGFKVTFVNTDFNHKRVLSATNEEGSAVRLISIPDGLGPEDDRNNVVNLCSESLSSTMTSALEKVIKDIDALDSASEKITGIVADVNMAWALELTDKLGIKGAVFCPASAAVLVLGENIPNLIQDGIINTEGFPIIKGKFQLSPEMPIMDTADIPWCSLGDPTMHKVIYNHASKIIRYSHLTDWWLGNTTSDLEPGAISLSPKILPIGPLIGSGNDIRSLGQFWEEDVSCLTWLDQQPPCSVIYVAFGSSTIFDPHQLKELALGLDLTNRPFLWVVREDASGSTKITYPDEFQGTCGKIVKWAPQQKVLSHPAIACFISHCGWNSTLEGVSNGVPFLCWPYYTDQLVDKAYICDMWKVGLGFDLDDKGLISRWEIKKKVDQILGDENIRGRSQKLKEMVLSNIAEGGQSYENFNKFVEWLKE

SEQ ID NO: 20091 - protein, 451 aa, Glycine max
MGIQHVLVLPFPAQGHVNPLMLLSKKLAEHGFKVTFVNTDFNHKRVLSATNEEGSAVRLISIPDGLGPEDDRNNVVNLCSESLSSTMTSALEKVIKDIDALDSASEKITGIVADVNMAWALELTDKLGIKGAVFCPASAAVLVLGENIPNLIQDGIINTEGFPIIKGKFQLSPEMPIMDTADIPWCSLGDPTMHKVIYNHASKIIRYSHLTDWWLGNTTSDLEPGAISLSPKILPIGPLIGSGNDIRSLGQFWEEDVSCLTWLDQQPPCSVIYVAFGSSTIFDPHQLKELALGLDLTNRPFLWVVREDASGSTKITYPDEFQGTCGKIVKWAPQQKVLSHPAIACFISHCGWNSTLEGVSNGVPFLCWPYYTDQLVDKAYICDMWKVGLGFDLDDKGLISRWEIKKKVDQILGDENIRGRSQKLKEMVLSNIAEGGQSYENFNKFVEWLKE

SEQ ID NO: 20092 - protein, 431 aa, Glycine max
MLLSKKLAEHGFKVTFVNTDFNHKRVLSATNEEGSAVRLISIPDGLGPEDDRNNVVNLCSESLSSTMTSALEKVIKDIDALDSASEKITGIVADVNMAWALELTDKLGIKGAVFCPASAAVLVLGENIPNLIQDGIINTEGFPIIKGKFQLSPEMPIMDTADIPWCSLGDPTMHKVIYNHASKIIRYSHLTDWWLGNTTSDLEPGAISLSPKILPIGPLIGSGNDIRSLGQFWEEDVSCLTWLDQQPPCSVIYVAFGSSTIFDPHQLKELALGLDLTNRPFLWVVREDASGSTKITYPDEFQGTCGKIVKWAPQQKVLSHPAIACFISHCGWNSTLEGVSNGVPFLCWPYYTDQLVDKAYICDMWKVGLGFDLDDKGLISRWEIKKKVDQILGDENIRGRSQKLKEMVLSNIAEGGQSYENFNKFVEWLKE

SEQ ID NO: 20093 - DNA, 1392 bp, Glycine max
aaaatatcacattgacgaagaagcccatacttgtgggagatagatggcacgcttgtcactgctcattttcgcgttctgcgccgtcgccgtcgccgtcgccgtcgcgggctcctccttcgatgatgccaaccctatccgtttagcgtcggacttggagtcgcaggtgctggacgtgatcggacagagccgccacgctctctccttcgcccgcttcgctcgccgccacggcaagcgctaccgttccgtcgacgagatccgcaaccgcttccggatcttctctgataatcttaaactcatcagatccaccaacaggaggtctctcacctacacgctcggcgtcaatcattttgctgactggacttgggaggagttcaccagacacaagctcggcgctcctcagaattgctctgccacgctcaaaggcaaccacaggctcaccgatgctgttcttcctgacgagaaagactggagaaaagaaggtatagtcagccaagttaaagatcaaggcaactgcggatcttgctggacattcagcacaactggtgcattggaggcagcttacgcacaggcctttgggaagaatatcagtctttctgagcagcagctagtggactgtgccggtgctttcaataactttggctgtaatggtggtttgccatcccaagcctttgaatacattaaatacaatggtggcctcgacacagaagaagcatatccctacaccggaaaagatggtgtctgcaaatttacagctaaaaacgttgctgttcgagtcattgactctatcaatatcactttgggtgctgaggatgaattgaaacaagcggttgcttttgttcggccagttagtgtggcatttgaggtagcgaaggacttccgattctacaataatggagtttacactagtaccatttgtggtagcacgcccatggatgtaaatcatgctgttcttgctgttgggtatggagttgaagatggtgttccatattggatcattaaaaattcatggggaagcaactggggtgacaatggttacttcaagatggaattagggaagaatatgtgcggtgttgcaacttgtgcatcttatcctgttgtggcttaaatgtatgcagagagatgtggtgcccgatatgcccgtgtaactgcaccttgcacgtcatgcttcgtatcgtccatcttaaagggtgaaacattgtactgcgataaaaatttacagtatatgttgatgtttatctgtaaaataagtttggaattgggatgttcattctccttgagctgaatcacattacaaaatcgtactgtaaatcatttgtcacatagaggtatcatagaaattataaactgtgttatgctccccaatctctagcaatgtaaggatagcgtgctgtg

SEQ ID NO: 20094 - protein, 353 aa, Glycine max
MARLSLLIFAFCAVAVAVAVAGSSFDDANPIRLASDLESQVLDVIGQSRHALSFARFARRHGKRYRSVDEIRNRFRIFSDNLKLIRSTNRRSLTYTLGVNHFADWTWEEFTRHKLGAPQNCSATLKGNHRLTDAVLPDEKDWRKEGIVSQVKDQGNCGSCWTFSTTGALEAAYAQAFGKNISLSEQQLVDCAGAFNNFGCNGGLPSQAFEYIKYNGGLDTEEAYPYTGKDGVCKFTAKNVAVRVIDSINITLGAEDELKQAVAFVRPVSVAFEVAKDFRFYNNGVYTSTICGSTPMDVNHAVLAVGYGVEDGVPYWIIKNSWGSNWGDNGYFKMELGKNMCGVATCASYPVVA

SEQ ID NO: 20095 - DNA, 1189 bp, Glycine max
gagcagccagtgtgaaccagtctcacctcattgattcattctccgtcagaaatacctttcctttgcgaaagagaagagatctgaaaccctaaccctaaccctaaccagaggtaatggattcagtgcctcgaagaagcagaggaggaggcgttttggaaaacctcgacaaggtcctaatgcgtcgcaactgagtctacgtcaccttcgtcatcgcaggcgccttcctcggagaacgggctgtggattacggagctcacaagatcggggagcacaataacgttgggtccaaatggcacctagatggaaaggaaaagatgcaaaagctaaaaaggatgcacaagctgaagcgctcaaggaacccatgtcaaagattgtatctcaacttcagtcttctctagttcaatcaaatacttgtggatttctctctggtagtagtgtacacttagcagtgggagcagaacaacttcatttgctcgataaagcatgctttggctcacctgtgagaacagttgaaaaggacaaacctcggtttcaattaagctttgaggaggcattctacctatgctattccttgaaatgccttaagattaataatgacagtgatgatactagtccccaaaacagtgaagagctgtggcattacatgaagtcaaagaaagaaacattcccttgtttctacaaggcttattcccacctgagaatgaaaaactgggtagtgaggtcaggagctcagtatggtgcagatttcgttgtctattgtcaccatccagctcgggtccattccgagtatggtgtgcttgttttatcagatggagaagataaagatctaaatggaaggttgagagtatggtctgatgttcattgcacaactcgacttcttggaggtgttgcaaaaatcttattggttttgtatgtcaatagaaatggtagcagcaatgagtctccattatgtttggcaaactacaccattgaagagcacacaatcaccagatggaatccagaacagtgccgcgaaaagatggtaattcatgctaattctgataatggaactgggtaaatacttcatcatatggacgcaacaaaatatatcaaacatgaaaaaaaaagtattttttttattgtctttgtccaaagatattagttattcaagcataacaatattcttaaagatttgattccttttccgttt

SEQ ID NO: 20096 - protein, 255 aa, Glycine max
MAPRWKGKDAKAKKDAQAEALKEPMSKIVSQLQSSLVQSNTCGFLSGSSVHLAVGAEQLHLLDKACFGSPVRTVEKDKPRFQLSFEEAFYLCYSLKCLKINNDSDDTSPQNSEELWHYMKSKKETFPCFYKAYSHLRMKNWVVRSGAQYGADFVVYCHHPARVHSEYGVLVLSDGEDKDLNGRLRVWSDVHCTTRLLGGVAKILLVLYVNRNGSSNESPLCLANYTIEEHTITRWNPEQCREKMVIHANSDNGTG

SEQ ID NO: 20097 - protein, 231 aa, Glycine max
MSKIVSQLQSSLVQSNTCGFLSGSSVHLAVGAEQLHLLDKACFGSPVRTVEKDKPRFQLSFEEAFYLCYSLKCLKINNDSDDTSPQNSEELWHYMKSKKETFPCFYKAYSHLRMKNWVVRSGAQYGADFVVYCHHPARVHSEYGVLVLSDGEDKDLNGRLRVWSDVHCTTRLLGGVAKILLVLYVNRNGSSNESPLCLANYTIEEHTITRWNPEQCREKMVIHANSDNGTG

SEQ ID NO: 20098 - protein, 137 aa, Glycine max
MKSKKETFPCFYKAYSHLRMKNWVVRSGAQYGADFVVYCHHPARVHSEYGVLVLSDGEDKDLNGRLRVWSDVHCTTRLLGGVAKILLVLYVNRNGSSNESPLCLANYTIEEHTITRWNPEQCREKMVIHANSDNGTG

SEQ ID NO: 20099 - DNA, 1664 bp, Glycine max
agagtatcttccaccagacggtgctttgtcaaacgcaaacggttgcggagcatcaaagtaaggttagttccttggaggtgagtgcgaacaaaggaaagaagaacctctttttggctcctacaaattttcgcgggagcaggctgtgtgtgaggaaacgcaaattaaccatgggaaggcaccaccaccgccacgttgacgctgttccacgcgctgttttaaccaccaatctggcttctgagctttctgggaagttcaaccttgacggaaatattgagttgcagattgctgttagttcttcagaaccaggagctgcaagacaagtagattttaaggtttcatataatagtgagtctctgcttttacattggggagttgtgcgtgatcagccagggaagtgggttcttccttctcgtcacccagatggaactaaaaattataagggcagagctcttagaactccttttgtgaaatccgactcaggatctttccttaaaatagaaattgacgatcctgctgcacaagccattgagttcctcatacttgatgaggctaagaataagtggtttaagaataatggtgagaactttcacatcaagttaccagtaaaaagcaagctatctcaagaagtttcagttcctgaagaccttgtacagattcaagcatatcttaggtgggaacgaaagggtaagcagatgtacactccagagcaagagaaggaggaatatgaagcagctcggaatgaactattggaggaagtagccaggggtacttctgtgcaagatctccatgcaaggttaactaagaaaactaaagctgccgaagtaaaggagccttctgtttctgaaacaaagaccatccctgatgaacttgtacagattcaagcttttatacgatgggaaaaagctgggaagcctaactactctcgggaacaacaacttatggaatttgaggaagcaagaaaagaattgttagaagagcttgagaagggggcttctctggatgcgatacggaagaagattgtcaaaggagagatacaaactaaagttgccaagcaattgaaaaccaaaaaatactttcgtgctgaaagaatacagaggaaaaagagagatttgatgcagcttatcaaccgaaatgttgcacaaaatatagttgaacaagttatagatgctccaaaagccttgacagtaattgaacattatgccaatgcaagggaagaatatgaaagtggtcctgttttgaataagacaatatacaagcttggtgataattatcttctggtccttgttaccaaggatgctggcaagattaaggttcacctagctacagactcgaaaaaaccttttacacttcactgggccttatctagaacatctgaagagtggttggtaccacctgaaactgctctgccccctggatctgttactatgaatgaggccgctgaaacacctttcaaagctggttcttcgtctcatccttcttatgaggtccagtccttggatatagaggttgatgatgatacttttaaaggaataccttttgtcattctgtcggatggagaatggataaagaacaatggatcaaatttttatattgaatttggagggaagaagcagaaacagaaggattttgacaatggcaaaggtacagccaagttcttgttgaat

SEQ ID NO: 20100 - protein, 554 aa, Glycine max
SIFHQTVLCQTQTVAEHQSKVSSLEVSANKGKKNLFLAPTNFRGSRLCVRKRKLTMGRHHHRHVDAVPRAVLTTNLASELSGKFNLDGNIELQIAVSSSEPGAARQVDFKVSYNSESLLLHWGVVRDQPGKWVLPSRHPDGTKNYKGRALRTPFVKSDSGSFLKIEIDDPAAQAIEFLILDEAKNKWFKNNGENFHIKLPVKSKLSQEVSVPEDLVQIQAYLRWERKGKQMYTPEQEKEEYEAARNELLEEVARGTSVQDLHARLTKKTKAAEVKEPSVSETKTIPDELVQIQAFIRWEKAGKPNYSREQQLMEFEEARKELLEELEKGASLDAIRKKIVKGEIQTKVAKQLKTKKYFRAERIQRKKRDLMQLINRNVAQNIVEQVIDAPKALTVIEHYANAREEYESGPVLNKTIYKLGDNYLLVLVTKDAGKIKVHLATDSKKPFTLHWALSRTSEEWLVPPETALPPGSVTMNEAAETPFKAGSSSHPSYEVQSLDIEVDDDTFKGIPFVILSDGEWIKNNGSNFYIEFGGKKQKQKDFDNGKGTAKFLLN

SEQ ID NO: 20101 - protein, 499 aa, Glycine max
MGRHHHRHVDAVPRAVLTTNLASELSGKFNLDGNIELQIAVSSSEPGAARQVDFKVSYNSESLLLHWGVVRDQPGKWVLPSRHPDGTKNYKGRALRTPFVKSDSGSFLKIEIDDPAAQAIEFLILDEAKNKWFKNNGENFHIKLPVKSKLSQEVSVPEDLVQIQAYLRWERKGKQMYTPEQEKEEYEAARNELLEEVARGTSVQDLHARLTKKTKAAEVKEPSVSETKTIPDELVQIQAFIRWEKAGKPNYSREQQLMEFEEARKELLEELEKGASLDAIRKKIVKGEIQTKVAKQLKTKKYFRAERIQRKKRDLMQLINRNVAQNIVEQVIDAPKALTVIEHYANAREEYESGPVLNKTIYKLGDNYLLVLVTKDAGKIKVHLATDSKKPFTLHWALSRTSEEWLVPPETALPPGSVTMNEAAETPFKAGSSSHPSYEVQSLDIEVDDDTFKGIPFVILSDGEWIKNNGSNFYIEFGGKKQKQKDFDNGKGTAKFLLN

SEQ ID NO: 20102 - protein, 324 aa, Glycine max
MYTPEQEKEEYEAARNELLEEVARGTSVQDLHARLTKKTKAAEVKEPSVSETKTIPDELVQIQAFIRWEKAGKPNYSREQQLMEFEEARKELLEELEKGASLDAIRKKIVKGEIQTKVAKQLKTKKYFRAERIQRKKRDLMQLINRNVAQNIVEQVIDAPKALTVIEHYANAREEYESGPVLNKTIYKLGDNYLLVLVTKDAGKIKVHLATDSKKPFTLHWALSRTSEEWLVPPETALPPGSVTMNEAAETPFKAGSSSHPSYEVQSLDIEVDDDTFKGIPFVILSDGEWIKNNGSNFYIEFGGKKQKQKDFDNGKGTAKFLLN

SEQ ID NO: 20103 - DNA, 1413 bp, Glycine max
gagggacaacaacaacaattctgcaccaattagctcacaaaactttcaagggtttgatgatcataataataactcttcttctgatcatcatcacaccactttcactgactgcttacatggttccatggattacaacaccctctctagagtctttgacatgtcttgttcatcttctgaagtgatctcctccattgatgaaaaccccaagaagcctagtgcaggaggagactctgtgggggtcagggggaaccaatcaacacctaattcatctgtctcttcgccatccaatgaagctgaagcaattatagaagaagactcaaccaagagccagaaagataagcagccaaaagcgtgtgaagctgatggagatgaaaagcctaagaaagagaacaaacccaaaaagaaagagaaaaagccaagggagcctcgttttgccttcttgactaaaagtgagatcgatcatcttgaagatggatacagatggagaaaatatggacagaaagcggtcaagaatagtccatacccaaggagctattatagatgcacgagtcagaagtgcggtgtaaagaaaagggtggagaggtcattccaggacccaacaattgtgatcacaacatacgaagggcaacacaaccatcactgtccagcaactctgaggggcagtgctgcaagcatgttgtcatcaccttccttttttggttcctcttatatggcgtcaagcttaccccaagattttcttgctcagttggttccaagttatagccaaattaatgatcaccaaagtccaatgtttcaccaaaacctttcccataatctccatccacagcctcaacagcagcaccagttccaactctctcatgaccatggtttgttgcaagacctactaccatcattccctggcaaacacgagccatgaactcactaaaaacctagtgcatgttttgatttatttattttaggaaaaataatggttttatatttcatcactactagaaaaattaaaattagtaacggaataatctatgtaggttttttaaaaaatccgttactaaaatttggtgatctgatctcaaattaattagtgaaggaaaattaattttctatcactaattttgatcaccaatttattgatttttagaagtatttctaggagtttttaaaagaaaaaacaattgctttttcaagataaaccagaatcaaacatgcacttaacccatttctattagcgtatggtggagcttgcagtgtattgcacactgtctatatataagtatgtgtagtaattaagtagtagtagattccctcttggttaattacctcctctctttaagtcacatgtatgtacctagatttgtatggaaatgaaaaacattgattattcttaaatgagtatttagaattacttcagatggc

SEQ ID NO: 20104 - protein, 304 aa, Glycine max
RDNNNNSAPISSQNFQGFDDHNNNSSSDHHHTTFTDCLHGSMDYNTLSRVFDMSCSSSEVISSIDENPKKPSAGGDSVGVRGNQSTPNSSVSSPSNEAEAIIEEDSTKSQKDKQPKACEADGDEKPKKENKPKKKEKKPREPRFAFLTKSEIDHLEDGYRWRKYGQKAVKNSPYPRSYYRCTSQKCGVKKRVERSFQDPTIVITTYEGQHNHHCPATLRGSAASMLSSPSFFGSSYMASSLPQDFLAQLVPSYSQINDHQSPMFHQNLSHNLHPQPQQQHQFQLSHDHGLLQDLLPSFPGKHEP

SEQ ID NO: 20105 - protein, 263 aa, Glycine max
MDYNTLSRVFDMSCSSSEVISSIDENPKKPSAGGDSVGVRGNQSTPNSSVSSPSNEAEAIIEEDSTKSQKDKQPKACEADGDEKPKKENKPKKKEKKPREPRFAFLTKSEIDHLEDGYRWRKYGQKAVKNSPYPRSYYRCTSQKCGVKKRVERSFQDPTIVITTYEGQHNHHCPATLRGSAASMLSSPSFFGSSYMASSLPQDFLAQLVPSYSQINDHQSPMFHQNLSHNLHPQPQQQHQFQLSHDHGLLQDLLPSFPGKHEP

SEQ ID NO: 20106 - protein, 252 aa, Glycine max
MSCSSSEVISSIDENPKKPSAGGDSVGVRGNQSTPNSSVSSPSNEAEAIIEEDSTKSQKDKQPKACEADGDEKPKKENKPKKKEKKPREPRFAFLTKSEIDHLEDGYRWRKYGQKAVKNSPYPRSYYRCTSQKCGVKKRVERSFQDPTIVITTYEGQHNHHCPATLRGSAASMLSSPSFFGSSYMASSLPQDFLAQLVPSYSQINDHQSPMFHQNLSHNLHPQPQQQHQFQLSHDHGLLQDLLPSFPGKHEP

SEQ ID NO: 20107 - DNA, 1284 bp, Glycine max
atcctcactcttcaatatccaccaggagttggatactggtcgtgctagctagcgggccaaagtagtgcctaagtcttcctcatatcttccaccctttggcttattagtgggagcaatacatatcattcattcagaggcaacaaaggagttgtaaattaagagcatggctgcacaagctcttgtatcatcatcatctcttaccttctcagccgaggctacaagacaaagtcttggaccaagatcactccaatctccatttggcttctcaagaaaagcctcctttcttgttaaggcagctgctactccccctgtcaagcaaggatcagacagacctttgtggtttgcatcaaagcaaagtctttcctacttggatggcagccttccgggtgactatggatttgaccctctgggactttcggaccctgaaggaacaggagggttcattgagccgaaatggctagcatatggtgagataatcaatggtcgttatgcaatgttgggtgcagttggtgcaatagcacctgaaattctaggcaaggctggtctgatccctcaggagacagcactcccatggttcagaaccggtgtgttcccacctgcaggaacctacaactactgggcagactcctacacactgttcgtgtttgagatggcactgatgggatttgcagagcacagaagattccaagactgggccaaaccaggctctatgggcaaacaatacttcctaggactagagaagggtcttggaggttctggtgagccagcttacccaggaggacctttcttcaacccacttggctttggtaaggatgagaagtccttgaaggatttgaagctcaaggaagtgaagaatggaaggttggctatgttggcaatcttgggttactttgttcaagctcttgtcacaggtgttggcccataccaaaacctcctagatcatttggctgaccccgtgcacaacaacatcttgaccagtctcaagttccactaaatgtattatatcatattctttaccctcttggtcttggttcttgttcgcttcgcagttaccaaagctcaaccacctttctatatcctctctttgctctttgggactctaccatcatctggacattttgttccttggtgtgccgctgtaagaattgacatgtaaaacaactagaaacattcgacatctttatctttttgctcgttagattaaccgtacccaagtttttatttatttgaattgcacaagtctgaataatgttacaattttataaactgtatatgttgtgagag

SEQ ID NO: 20108 - protein, 276 aa, Glycine max
MAAQALVSSSSLTFSAEATRQSLGPRSLQSPFGFSRKASFLVKAAATPPVKQGSDRPLWFASKQSLSYLDGSLPGDYGFDPLGLSDPEGTGGFIEPKWLAYGEIINGRYAMLGAVGAIAPEILGKAGLIPQETALPWFRTGVFPPAGTYNYWADSYTLFVFEMALMGFAEHRRFQDWAKPGSMGKQYFLGLEKGLGGSGEPAYPGGPFFNPLGFGKDEKSLKDLKLKEVKNGRLAMLAILGYFVQALVTGVGPYQNLLDHLADPVHNNILTSLKFH

SEQ ID NO: 20109 - protein, 166 aa, Glycine max; identical to SEQ ID NO: 16478

SEQ ID NO: 20110 - DNA, 1597 bp, Glycine max
aaaaaaaaaaaaaaagtctacacactactatgatgtatctaacattctaaatttctaactttcctctctctctctctctctctccgaggtcttagatctctgctctgtctctatctctacttgaggcctttccctctgttccgttggcgggtgggtctttcttctctcaaaatggccaccggagtgaccagaaaaatttctgctgcatcagctcgggcccacaccagaagggcgaagaaaaccaattctctaccccttccttcaggaattcttggaacagcactagcagtgttgtttattgggtttctagcatgggcttatcaggttattcaacctccccctcccaagatatgcggcactcctgatggaccacctataacagcaccaagaatcaaattaagagacggaaggcatttggcatacaaagagcatggtgttccaaaagatgcagccaagtataaaatcatctctgtacatggttttaatagttgcaggcatgatgctgtgattgccgataccctatcaccggatgttgttgaggagctggggatctacattgtatctttcgacagacctggttatggggaaagtgatcctgatccaaatcgtacactaaaaagcattgctctagatatacaagagcttgcagatcagctgggattgggctccaaattctatgtagttggtgtctccatgggtggacaagttgtttggaactgccttaagtacatacctcacaggctgacaggtgcagtacttgtcgccccagttgtcaactactggtggcctggtctacctgcaaacttaactactgaagcctatgaccaacaaaaattacaagaccaatgggcacttcgtgttgctcactacgtaccatggctaacttactggtggaacactcagcgatggttcccaggatctagtgtaattgctcatagtccacatatcttttctcatcaagacaaagaacttctgcctaagttgttgtccgatagaaagagttatgcggcacaggtaatacagcaaggtgattatgaaaccatccacctcgacataaatattggatttggtaactgggaatatagtccccttgatcttgaaaacccatttccaaataacgaaggctctgtccatctttggcaaggagatgaggatatgatggttccagttacactgcaacgatacatagcacaaaaccttccatggattaactatcatgaactccaaggttctggtcacatttttgctcatgctgatggtatgagtgatactatcatcaagtcacttttacgtgcgaagtaggcttcttttatgttagttactgtctgtgagaagttggcggcttctatattggttacggtctatctcaggtcagtttcagcatttaatatctcagttttggaggattcaaactgttgaacagaatgatgtatgatcaactttgaacaacattgtgtacacttaatggtagggagaattcaattactcaataattgtatgaactatattcttttgtgtgggaagttgtttaacagaaattggcttgtttaagttactctgaagctgacactatggcgatgagtagcactatttttgc

SEQ ID NO: 20111 - protein, 376 aa, Glycine max
MATGVTRKISAASARAHTRRAKKTNSLPLPSGILGTALAVLFIGFLAWAYQVIQPPPPKICGTPDGPPITAPRIKLRDGRHLAYKEHGVPKDAAKYKIISVHGFNSCRHDAVIADTLSPDVVEELGIYIVSFDRPGYGESDPDPNRTLKSIALDIQELADQLGLGSKFYVVGVSMGGQVVWNCLKYIPHRLTGAVLVAPVVNYWWPGLPANLTTEAYDQQKLQDQWALRVAHYVPWLTYWWNTQRWFPGSSVIAHSPHIFSHQDKELLPKLLSDRKSYAAQVIQQGDYETIHLDINIGFGNWEYSPLDLENPFPNNEGSVHLWQGDEDMMVPVTLQRYIAQNLPWINYHELQGSGHIFAHADGMSDTIIKSLLRAK

SEQ ID NO: 20112 - protein, 202 aa, Glycine max
MGGQVVWNCLKYIPHRLTGAVLVAPVVNYWWPGLPANLTTEAYDQQKLQDQWALRVAHYVPWLTYWWNTQRWFPGSSVIAHSPHIFSHQDKELLPKLLSDRKSYAAQVIQQGDYETIHLDINIGFGNWEYSPLDLENPFPNNEGSVHLWQGDEDMMVPVTLQRYIAQNLPWINYHELQGSGHIFAHADGMSDTIIKSLLRAK

SEQ ID NO: 20113 - DNA, 2112 bp, Glycine max
gaccttgtgttgtttcagattgcatttgcagatagattgaatgttgtgaacaaacaatgggttcatccaaggccttatgcagtgtttctctgctccatttgttcatagtggtttgccttgtcttccaatgctttgctactaaaaaccatgctgacctgaccacaactctaactgtgaatgcttctgatgcatctggaaagccaataccagagacactttttggcatattctttgaggagattaatcatgctggagctgggggattgtgggctgagcttgtgagcaacagaggatttgaagctggcggtcctaacactccttcaaatattgatccttggtcaattattggaaatgaatcattgataaatgttgaaactgatcgtacctcttgctttgaccgtaataaggttgcacttcgattggaggtatcatgtgacagcgaaggtgacaacatctgcccagctgatggtgttggtgtttataatcctggtttctggggcatgaatattgagcaagggaagaaatacaaagtggtcttctatgttcgttcaactgaatcacttaatctaacagtttcattgactggatccaatggtgtaggaaacctggcttcatctgtgatcacaggttctgcacttgatttttcaaactggacaaaggtggagaagatactggttgccaaggcaacagataataactcaagacttcaattaacaaccaccaccaaaggtgtgatatggttggaccaagtgtctgctatgccactggacacatataagggacatggtttccgaactgaccttgttgaaatgctgacagctttgaaaccaagatttatcagatttccgggcggttgttttgttgaaggagaatggttaagaaatgcatttcgatggaaaacatccattggaccatgggaggagagacctgggcactttggtgatgtttggatgtactggactgatgatggacttggttattatgagtttctccaacttgcagaggacttgggtgcttcaccaatatgggtatttaataatggtgtcagtcataatgatcaagttgatacatcggcggtcttacctcttgtgcaagaagcccttgatggaattgagttcgcgagaggtgatcccacttcaaaatggggttcccttagagctgctatgggacatcctgagccatttgacctcagatatgttgctgttgggaatgaagattgtggaaaaaagaattatcgaggaaactacctgaaattctatagtgcaataaaaagtgcttatccagatatccaaattatctcaaactgtgatggttcttctcgacctttagatcatccagctgatatgtatgattatcatgtttatacaaatgcgaatgacatgttttatagagctaacacatttgatcatacatcacgaaatggtccaaaggcttttgtaagtgagtatgccgtgactggaaaagatgctgggacaggaagcctcttggcagccctagctgaagctggcttcctaattggactggaaaagaacagtgatgttatccaaatggccagctatgctccactttttgttaatgccaatgataggaggtggaacctggatgcaattgtattcaactcctttcagctctatggaactcctagctattgggtgcaactatttttctcagagtcaagtggagcaacacttctaagtacatcacttcaagcaccttcctcaaattcacttgttgcatcagcaattacatttcaaaattctgtagataagaaaaattacatacgaataaaggttgtgaacttcggtaccactgccgtgaacctcaaaatctctcttgatggactggaaccaaactcattgcagttatctgggtcaacaaagactgtgcttacatctgcaaatgtaatggatgagaactccttctcacagccaaagaaggtggtgccaatccaaagtctacttcagaatgttgagaaggacatgaatgtcacagtcccacctcgttcgttcacatcatttgatctgctgaaacaatccagtaatttgaagatggcagggagcgattcttccacgtggtcttctatttaacgttattaaaaatttgaccaaaagc

SEQ ID NO: 20114 - protein, 676 aa, Glycine max
MGSSKALCSVSLLHLFIVVCLVFQCFATKNHADLTTTLTVNASDASGKPIPETLFGIFFEEINHAGAGGLWAELVSNRGFEAGGPNTPSNIDPWSIIGNESLINVETDRTSCFDRNKVALRLEVSCDSEGDNICPADGVGVYNPGFWGMNIEQGKKYKVVFYVRSTESLNLTVSLTGSNGVGNLASSVITGSALDFSNWTKVEKILVAKATDNNSRLQLTTTTKGVIWLDQVSAMPLDTYKGHGFRTDLVEMLTALKPRFIRFPGGCFVEGEWLRNAFRWKTSIGPWEERPGHFGDVWMYWTDDGLGYYEFLQLAEDLGASPIWVFNNGVSHNDQVDTSAVLPLVQEALDGIEFARGDPTSKWGSLRAAMGHPEPFDLRYVAVGNEDCGKKNYRGNYLKFYSAIKSAYPDIQIISNCDGSSRPLDHPADMYDYHVYTNANDMFYRANTFDHTSRNGPKAFVSEYAVTGKDAGTGSLLAALAEAGFLIGLEKNSDVIQMASYAPLFVNANDRRWNLDAIVFNSFQLYGTPSYWVQLFFSESSGATLLSTSLQAPSSNSLVASAITFQNSVDKKNYIRIKVVNFGTTAVNLKISLDGLEPNSLQLSGSTKTVLTSANVMDENSFSQPKKVVPIQSLLQNVEKDMNVTVPPRSFTSFDLLKQSSNLKMAGSDSSTWSSI

SEQ ID NO: 20115 - protein, 528 aa, Glycine max
MNIEQGKKYKVVFYVRSTESLNLTVSLTGSNGVGNLASSVITGSALDFSNWTKVEKILVAKATDNNSRLQLTTTTKGVIWLDQVSAMPLDTYKGHGFRTDLVEMLTALKPRFIRFPGGCFVEGEWLRNAFRWKTSIGPWEERPGHFGDVWMYWTDDGLGYYEFLQLAEDLGASPIWVFNNGVSHNDQVDTSAVLPLVQEALDGIEFARGDPTSKWGSLRAAMGHPEPFDLRYVAVGNEDCGKKNYRGNYLKFYSAIKSAYPDIQIISNCDGSSRPLDHPADMYDYHVYTNANDMFYRANTFDHTSRNGPKAFVSEYAVTGKDAGTGSLLAALAEAGFLIGLEKNSDVIQMASYAPLFVNANDRRWNLDAIVFNSFQLYGTPSYWVQLFFSESSGATLLSTSLQAPSSNSLVASAITFQNSVDKKNYIRIKVVNFGTTAVNLKISLDGLEPNSLQLSGSTKTVLTSANVMDENSFSQPKKVVPIQSLLQNVEKDMNVTVPPRSFTSFDLLKQSSNLKMAGSDSSTWSSI

SEQ ID NO: 20116 - protein, 442 aa, Glycine max
MPLDTYKGHGFRTDLVEMLTALKPRFIRFPGGCFVEGEWLRNAFRWKTSIGPWEERPGHFGDVWMYWTDDGLGYYEFLQLAEDLGASPIWVFNNGVSHNDQVDTSAVLPLVQEALDGIEFARGDPTSKWGSLRAAMGHPEPFDLRYVAVGNEDCGKKNYRGNYLKFYSAIKSAYPDIQIISNCDGSSRPLDHPADMYDYHVYTNANDMFYRANTFDHTSRNGPKAFVSEYAVTGKDAGTGSLLAALAEAGFLIGLEKNSDVIQMASYAPLFVNANDRRWNLDAIVFNSFQLYGTPSYWVQLFFSESSGATLLSTSLQAPSSNSLVASAITFQNSVDKKNYIRIKVVNFGTTAVNLKISLDGLEPNSLQLSGSTKTVLTSANVMDENSFSQPKKVVPIQSLLQNVEKDMNVTVPPRSFTSFDLLKQSSNLKMAGSDSSTWSSI

SEQ ID NO: 20117 - DNA, 1186 bp, Glycine max
gctttggcatggaagagagtagtggggcatgccgaggaaaaggacggtggcatccgaacgaaagcggtagcaaaatccgtttaagttaattcttttgacgcatacaaaggaaaacattttcttattcaaatactcaccaataccaaatccaacacccacacccacaccaataacaagcttggttggtacttatctacaatctgcatcatggaaggtgttattctgagaagggtcattccttcggataacagttgcctcttcaatgcagttggatatgttatggatcatgacaaaaagaaagctgctgagttgagacaggttatagcagcaacagtagcaagtgatccacagaaatattgtgaagcatttcttgggaagccaaacgctgagtattgtaactggattcttgactcggagaagtggggaggtgcaattgaactttcaatattagcagattattatggacgtgaaattgcagcatatgatatccaaacaactcgatgtgatttgtatggtcaggaaagtaactattctgaaagagtgatgctgatttatgatggtctccactacgatgcattagtgatgtctccctttgaggaagctcctgaggagtttgatcagaccatatttgctgtacagaaaaacagaagcattggacctgttgaggggcttgctctaacttttgtgaaggaccagcagaggaaacggagttacactgacacatccaacttcactctccgctgtggggtatgccaaattggagtaattggtgagaaggaggcagtggagcatgcacaagcaactggtcatgttaacttccaagagtacagataatgcactccgttgatttgaatgggatacaaattcatgtgtaatctccgttgatttgaatgagcatcatcgatagaaggtagttgctttgttgcagacaaaaaaaactgaataatttctgcatgagaattgttgtggcaacttgtgttgtaataatagttccttggtcttgttccacaatgactgtgattataagaaactcacctctagtgactctagttgcagactagataaagaaattagtaatcaattattttttttatatttcacttcctttatataacttttagtgcaataactatgtaaacttacgccactattttaaccttgacgagtgttgaatgcttttgatacc

SEQ ID NO: 20118 - protein, 208 aa, Glycine max
MEGVILRRVIPSDNSCLFNAVGYVMDHDKKKAAELRQVIAATVASDPQKYCEAFLGKPNAEYCNWILDSEKWGGAIELSILADYYGREIAAYDIQTTRCDLYGQESNYSERVMLIYDGLHYDALVMSPFEEAPEEFDQTIFAVQKNRSIGPVEGLALTFVKDQQRKRSYTDTSNFTLRCGVCQIGVIGEKEAVEHAQATGHVNFQEYR

SEQ ID NO: 20119 - protein, 184 aa, Glycine max
MDHDKKKAAELRQVIAATVASDPQKYCEAFLGKPNAEYCNWILDSEKWGGAIELSILADYYGREIAAYDIQTTRCDLYGQESNYSERVMLIYDGLHYDALVMSPFEEAPEEFDQTIFAVQKNRSIGPVEGLALTFVKDQQRKRSYTDTSNFTLRCGVCQIGVIGEKEAVEHAQATGHVNFQEYR

SEQ ID NO: 20120 - DNA, 1381 bp, Glycine max
tgtaactcccgtagtcccgctgtatgttgtgttgaattgcttgctcaggcagcttgaaggagcacattgctaaggttaaaatagctgaaattgcatttatggtgcaattatgcaatttgctgtaagcagtgttgtggtagtaatgttctaaatcttgaaagtgttgtttcctaggtttatagcatctatttaaggactcatgagaaatcccagtttattggaacatgtttgtctcgctgacatctatctgctgtagcattcaactagtctgtgttttggtaactgtgtggacatgccattcaatccctgagtaaaatgtgaaaacattttacatttattgccactgctaatagtttccaaggataacgaaagcaataatctaattttgtttttgtaccctctactctagaaggtacaaagaaaatgcatgcttgaataaatttttaattgttctcatttgtagaaaaaagttggaattccattttacttgaagatgtttgagctaataacttctcttctaagttcgaacttacatggtttcttaaatggcaatcacaggcagcattgcatgctctaggaaacatctcgggagaaaccagatctgagaacaacatcatactcaatgccgaagaagaagaaaacctgcgacgcttaatttatgaaacagcatccagaagctcaaagctgactccatcgggtctttttctgtcagtattgcagcaggattcagaaatacgtctagcgggctatagaatgctaagtggattggttgcccgaccatggtgcttgatggagatatgttcaaaacaagagattataaataaagttacggacccaagtactgaaacgacaaaaataggtatggaaggcagatataactgctgcaaggcaatacacaaatcattgacagtgtctagtagagtttctgctaatcctgcttttgcaggaatagctgcaaagtttcaggaagctgttggaatgggtccatatcttgttaaaaggcatgttgaagctcaacctgctgtgataacggctgatagattttagttttcacacctgagtggtcaagcaatacctgtaatggagcagttttttttctcttctcaaatacaatgtggagtgttatagaacaaaaaccttttccccctcaaatgttgaaacttgatggaatgagtatattaatcatagttttttagtgtattatatttcaatggcttttgtcaactctagcaaatagatattctttttggctttggatgtgtgttgcatgtgtgaagtagtagtctttgtcaacaattacattgtctactaactggcatatatactgaacttgcattcagctataatttagcttattcaagttcgactgcagcatgttgtt

SEQ ID NO: 20121 - protein, 97 aa, Glycine max
MLSGLVARPWCLMEICSKQEIINKVTDPSTETTKIGMEGRYNCCKAIHKSLTVSSRVSANPAFAGIAAKFQEAVGMGPYLVKRHVEAQPAVITADRF

SEQ ID NO: 20122 - protein, 85 aa, Glycine max
MEICSKQEIINKVTDPSTETTKIGMEGRYNCCKAIHKSLTVSSRVSANPAFAGIAAKFQEAVGMGPYLVKRHVEAQPAVITADRF

SEQ ID NO: 20123 - protein, 61 aa, Glycine max
MEGRYNCCKAIHKSLTVSSRVSANPAFAGIAAKFQEAVGMGPYLVKRHVEAQPAVITADRF

SEQ ID NO: 20124 - DNA, 1665 bp, Glycine max
ataaagtattttccggaaaaagaaaaaccaaattggtggtcctaaacaaaaaaaaattacatagaaatcaaatactgtactatgatctcactcagacaataatttagctctggagactcaggtggttctaacgtgtgcagctgaaacctccgtgtcccacgaaaaccttacaaaattgaattgtggtattacagtatccaacagcaccatgctggattctgccactccccatgacaaaatcaccacagcagcttctggcttcgtacttgaggatgttcctcatctatctgcttacatccctcacctccaaacatatcctgacccgttgcaagacaatccttcctattctgttgttgcgcaatattacgtgaatgtggatgatacaattgcacaacagatagttgtacacaaaaatagtccaagaggggacccattttcgtcgtgctgggcctgctcagaaggtatattttgattcagaggaagtacacgcttgtattgtcacgtgcggtggactttgtcctggtctaaatacagtgataagagaaatagtatgcggcttatatcatatgtatggggtgcacaaagttttgggaatacagggaggatatccaggtttttattctcgaaatacagttcctttgacaccaaaggttgtgaatgatatccacaaacgtggtggaagcatccttgggacatcatatggaggccatgacacctcaaagattgttgatagcattcaggaccggggaattaatcaggtttatatacttggaggatatggaactcagtatgaagcagctatgatttttgaggaagttagaaggcgtggcttgaaagttgcagtggtcggaattccaaaaactattgacaatgatatcccagttattgacaaatcaattggtttcgacactgctgttgaagaggcacaacgagcaatcaattctgctcatgtggaagcagaaagcgcggagaatggaattggtgttgtaaaattaatggggcgttacagtggatttatcgccatgtatgcaactcttgccagccgtgatgttgattgttgcttgattccagaatcacccttttacctggagggtccaggaggactgttggagttcattgagaaaagactcaaagagcaaggtcacatggttatagtcatagctgaaggtgcaggtcaggagcttctttctggcaacccctccattgttaataagccagatgcttctgcagacaaattatttccagatgttggcctgtggttgtcccagaaaattaaggatcactttgaaaaacgtcaaaaaatggctataaatctgaagtacataggtgagctctcttttttaaactgtatatttttattaaagaacaaaaaattgataccgataaaaaaaattgtctcgcagatcctacttacatgatccgtgctatcccaagtaatgcatctgataatgtatactgcaccctccttgcccaaagtgctgttcatggtgcaatggcaggatacacaggcttcaccgtgggcccagttaatggcagaaattgttacattccattccatctgataaacgatggagagaagagggttgtgataactgatcggatgtgggcaaggttgctatcttcaacccatcagccttgcttcttgaacccaaaagaaatcacagg

SEQ ID NO: 20125 - protein, 283 aa, Glycine max
MYGVHKVLGIQGGYPGFYSRNTVPLTPKVVNDIHKRGGSILGTSYGGHDTSKIVDSIQDRGINQVYILGGYGTQYEAAMIFEEVRRRGLKVAVVGIPKTIDNDIPVIDKSIGFDTAVEEAQRAINSAHVEAESAENGIGVVKLMGRYSGFIAMYATLASRDVDCCLIPESPFYLEGPGGLLEFIEKRLKEQGHMVIVIAEGAGQELLSGNPSIVNKPDASADKLFPDVGLWLSQKIKDHFEKRQKMAINLKYIGELSFLNCIFLLKNKKLIPIKKIVSQILLT

SEQ ID NO: 20126 - protein, 205 aa, Glycine max
MIFEEVRRRGLKVAVVGIPKTIDNDIPVIDKSIGFDTAVEEAQRAINSAHVEAESAENGIGVVKLMGRYSGFIAMYATLASRDVDCCLIPESPFYLEGPGGLLEFIEKRLKEQGHMVIVIAEGAGQELLSGNPSIVNKPDASADKLFPDVGLWLSQKIKDHFEKRQKMAINLKYIGELSFLNCIFLLKNKKLIPIKKIVSQILLT

SEQ ID NO: 20127 - DNA, 1215 bp, Glycine max
agcaatacatgtaacaaagcttcagttcaaattgaagccagaaaatcaggtgcagtttctagtgcttctgagaaatatgattgccatagagactatgcagacaggggaatggttgattcttttcaaggttcaattcagtcatcagagcaagcatcatccaagaatgggtccatgtttatcaaggaaaagaagagggaaatgttggtcaatggtggtgtcagtggttcttcctcaagagcatcaaatcttgatggtgctgttcatggtggagtgaagggaaagagaagcgagagggagaggaatcaaagccgggatcagagcagacaaaattctattggcagagctggacgcatgtcactggacagtagccaaaatgagaacaaaccaaaagctaagaagcaaaagagtactgctagtggacatgataggtttatggaagcaaaggaatctgctcgtttaccaattcatgatacaatcaataatgatagcaaagatggggctacgttatctggtaaccaggacacttctcaaataaaggaatccaatgactttgggaatttgccgctacctgacttaagttcaatagaagaatttggtggtgcgcaagatcttagttcatggttgaactttgaagaagatggtttgccagaccatgattctattggccttgatattccaatggatgacctatcggatttaaatatgcttatgtgaagggatgtacacgtgttatatctgaaggagagtttgtatgtactcagtgaaccttgtggggcgtcaagatcttgatggtatacttgggtttctctggaggggaaatttttgtgattggaattatgaattttgacacatttatagggtgaacgggagatggggagtgacttaaaattgcaatttgatatttttgtggacgttgtatagaggaagctacaatcatggatttcatgaaattgctgtcagatatctcccttctcccatgaatcaaactagttttgctgtgttaaagtcatgatctcagaaatggcttttctataggagattagattaattaaagtgctatagcctgagagtggtttcatttctgaagctgtgacttcagctaccatactatgtaaaatgtttattgttcttgtagaccgaaactcgcacaattttgattgttttctcctgaataatggagaatgagtttttaattaagtttttctaggattaaag

SEQ ID NO: 20128 - protein, 237 aa, Glycine max
SNTCNKASVQIEARKSGAVSSASEKYDCHRDYADRGMVDSFQGSIQSSEQASSKNGSMFIKEKKREMLVNGGVSGSSSRASNLDGAVHGGVKGKRSERERNQSRDQSRQNSIGRAGRMSLDSSQNENKPKAKKQKSTASGHDRFMEAKESARLPIHDTINNDSKDGATLSGNQDTSQIKESNDFGNLPLPDLSSIEEFGGAQDLSSWLNFEEDGLPDHDSIGLDIPMDDLSDLNMLM

SEQ ID NO: 20129 - protein, 201 aa, Glycine max
MVDSFQGSIQSSEQASSKNGSMFIKEKKREMLVNGGVSGSSSRASNLDGAVHGGVKGKRSERERNQSRDQSRQNSIGRAGRMSLDSSQNENKPKAKKQKSTASGHDRFMEAKESARLPIHDTINNDSKDGATLSGNQDTSQIKESNDFGNLPLPDLSSIEEFGGAQDLSSWLNFEEDGLPDHDSIGLDIPMDDLSDLNMLM

SEQ ID NO: 20130 - protein, 180 aa, Glycine max
MFIKEKKREMLVNGGVSGSSSRASNLDGAVHGGVKGKRSERERNQSRDQSRQNSIGRAGRMSLDSSQNENKPKAKKQKSTASGHDRFMEAKESARLPIHDTINNDSKDGATLSGNQDTSQIKESNDFGNLPLPDLSSIEEFGGAQDLSSWLNFEEDGLPDHDSIGLDIPMDDLSDLNMLM

SEQ ID NO: 20131 - DNA, 1500 bp, Glycine max
tttgcaatggaatatggcgagttctggctgctagctcagcatcaaccaacagaccctattgccaaatctgtggctgttctgaacggagttccagtgctcacaagacctgcagcagtgcaaaagcatcgccaagccatcactgagctcaacaatctggtcaaaacaacgttgctagtcattgagttaatctttgagttggagaagcttacaacttttgacacaaaggatgtgcctgctttgttgcccgcaatagaacaaattcctgttgatgtctactgggctatcatcaccattgtggctattgttactcagattgattacctcactactgagtcagggaacaagcaagacctgtcccactatggtcaaaagatcaacatcatacttagcaaactgaggaagcaaatcatgctgtgcagacaacagattgaggaggcagagtatcaccacaggctcaggaaattttttcaaacgcctactgaaattatggaagtgtttaagtttctagtttattcgaaggatgctccacagctactgtttgatggtgccgctaagaccacggtcgaaatcactgagctcaagaagaagcatgtttacttgctgatttccactctagacatcacggaggaagagatttcagtactccgaccagtttatgattctattaaagctaatgatcagtataagattgtgtggattcccattgtagaagaatggaccgaaaagctgcacaagaaatttgagtttttgaaaagcaagatgccttggtatgtggtgcagcattctggacccatagcagggtacaaatacatcaaggaggaatggcacttcaaaaagaagcctatggttgtggtgttgaatcctcaaggaaaagtgcagcatgcaaacgcattccatctcattcatgtttatggaatgaaggccttcccctttactattgcggatcaagagagaattgatagagaaattcactggattggttctgtagtcggggattctcacccccacataagcacatgggtaagtacatttcacaaaccaattaggatacacatattataaacctatataaattaagtactcatttgaaaatattttagttgttaagttttgagcaatcatattttgaatatttcgttagcctttatgttgtgcaaagtatcatacaattaatacacaggaatcttaaaatttctttttcaagatgaatttcagattatagagagtttttctagaaagagaatagaaaaagaatcgatacctaatctaaagaatagctgaattatttataccaatttttaacaaatggacatcacactatttttaatagtttgttataactgttttaactaccagcttaaaataaaaagacgtaggaatgagaagttttagttatgtgaatcgactgatcaacactttacaaggttttgtttggtattgtttaagttagcattgacaaggacatgagcttaatggagatataaggttgattgagtaatt

SEQ ID NO: 20132 - protein, 353 aa, Glycine max
FAMEYGEFWLLAQHQPTDPIAKSVAVLNGVPVLTRPAAVQKHRQAITELNNLVKTTLLVIELIFELEKLTTFDTKDVPALLPAIEQIPVDVYWAIITIVAIVTQIDYLTTESGNKQDLSHYGQKINIILSKLRKQIMLCRQQIEEAEYHHRLRKFFQTPTEIMEVFKFLVYSKDAPQLLFDGAAKTTVEITELKKKHVYLLISTLDITEEEISVLRPVYDSIKANDQYKIVWIPIVEEWTEKLHKKFEFLKSKMPWYVVQHSGPIAGYKYIKEEWHFKKKPMVVVLNPQGKVQHANAFHLIHVYGMKAFPFTIADQERIDREIHWIGSVVGDSHPHISTWVSTFHKPIRIHIL

SEQ ID NO: 20133 - protein, 351 aa, Glycine max
MEYGEFWLLAQHQPTDPIAKSVAVLNGVPVLTRPAAVQKHRQAITELNNLVKTTLLVIELIFELEKLTTFDTKDVPALLPAIEQIPVDVYWAIITIVAIVTQIDYLTTESGNKQDLSHYGQKINIILSKLRKQIMLCRQQIEEAEYHHRLRKFFQTPTEIMEVFKFLVYSKDAPQLLFDGAAKTTVEITELKKKHVYLLISTLDITEEEISVLRPVYDSIKANDQYKIVWIPIVEEWTEKLHKKFEFLKSKMPWYVVQHSGPIAGYKYIKEEWHFKKKPMVVVLNPQGKVQHANAFHLIHVYGMKAFPFTIADQERIDREIHWIGSVVGDSHPHISTWVSTFHKPIRIHIL

SEQ ID NO: 20134 - protein, 217 aa, Glycine max
MLCRQQIEEAEYHHRLRKFFQTPTEIMEVFKFLVYSKDAPQLLFDGAAKTTVEITELKKKHVYLLISTLDITEEEISVLRPVYDSIKANDQYKIVWIPIVEEWTEKLHKKFEFLKSKMPWYVVQHSGPIAGYKYIKEEWHFKKKPMVVVLNPQGKVQHANAFHLIHVYGMKAFPFTIADQERIDREIHWIGSVVGDSHPHISTWVSTFHKPIRIHIL

SEQ ID NO: 20135 - DNA, 1060 bp, Glycine max
attttgctgtggaagaagaataagaccaaggttttaattagagcctcgtttgtgcaagtgaaaaataggatcacattgacctattcttttttcaagctcttttaattgtcttgggaagaaaatgaacccagaaatgaatggggttgaggctgagaagaggcaagagaatggacatgagaaagtggattatgatgtgcaagagaaaatagactatgtttttaaggtggtggtgataggggactcagcagttggaaagactcaaatactctcaaggtttgcaaagaatgagttctgctttgactcaaagtccaccattggggttgaattccagactaggactgtcactattaatgccaaagtcatcaaagctcagatctgggacactgctggccaggaaaggtacagggctgtaacaagtgcatactacagaggtgcattaggggcaatgcttgtctacgacataacgaagaggcaatcgtttgatcatgtagcgagatgggtggaggagctgcgtgcgcacgcagatagctccattgtgatcatgttggttgggaacaaagctgatcttgtggaccagagaatggtaccaactgaggatgcagtggagtttgctgaggaccaaggcctcttcttctccgagacttcagctctcagtggtgacaatgtggagagtgcatttctcaaattgctagaagagatcaatagggtagtgtccaaaaaggctttggaatgtggtttagggaaggagaatggtgacaccaatgttgcctcactcaaaggaacaaaggttgatataatcttaggtcctgaattggaaattagtgagatgaagaaattgtcttcgtgctcttgttaatattggtagtgagatttaagtttgtgtattttgattttgagtttgggaaaaagagcagagtgagtgaaaagtatatatacatgagtatccttaacggtgagtgtggaaggctaagttgattttatttgctattgctttccatgctgagttgaagagtaatagttatcctgtttcgttatgattatgaattattacagttatggc

SEQ ID NO: 20136 - protein, 244 aa, Glycine max
MNPEMNGVEAEKRQENGHEKVDYDVQEKIDYVFKVVVIGDSAVGKTQILSRFAKNEFCFDSKSTIGVEFQTRTVTINAKVIKAQIWDTAGQERYRAVTSAYYRGALGAMLVYDITKRQSFDHVARWVEELRAHADSSIVIMLVGNKADLVDQRMVPTEDAVEFAEDQGLFFSETSALSGDNVESAFLKLLEEINRVVSKKALECGLGKENGDTNVASLKGTKVDIILGPELEISEMKKLSSCSC

SEQ ID NO: 20137 - protein, 240 aa, Glycine max
MNGVEAEKRQENGHEKVDYDVQEKIDYVFKVVVIGDSAVGKTQILSRFAKNEFCFDSKSTIGVEFQTRTVTINAKVIKAQIWDTAGQERYRAVTSAYYRGALGAMLVYDITKRQSFDHVARWVEELRAHADSSIVIMLVGNKADLVDQRMVPTEDAVEFAEDQGLFFSETSALSGDNVESAFLKLLEEINRVVSKKALECGLGKENGDTNVASLKGTKVDIILGPELEISEMKKLSSCSC

SEQ ID NO: 20138 - protein, 136 aa, Glycine max
MLVYDITKRQSFDHVARWVEELRAHADSSIVIMLVGNKADLVDQRMVPTEDAVEFAEDQGLFFSETSALSGDNVESAFLKLLEEINRVVSKKALECGLGKENGDTNVASLKGTKVDIILGPELEISEMKKLSSCSC

SEQ ID NO: 20139 - DNA, 1240 bp, Glycine max
aaaattgttttgatagagctcctcctgttccttttgaggaaattgaatctatattgcgcaaggaattaggaaagccattagaaagtgtttatgaatacattgacccaacacccattgcttctgcgtctatagcacaggttcatggagcaaggctaaaaggctctagggaggatgtggttataaaggtcttaaaacccggaatagaggacatattagtggcagatcttaattttgtttatgttgttgctaggatattggagttcttgagtcctgaaataagccgaacatcactggttggtattgtcaaagatatacgtgagtctatgcttgaagaagttgacttttacaaggaggctgcaaatattgaggcttttaggagatatttagaaacaatgggacttactgggaatgcaacagctccaaaagtgtatcgatactgcagtacaatgaaagttttaactatgcaaagactatatggagttcctcttactgacctagactccataagttcattagtttctaatccagaaaccagccttataactgctctcaatgtgtggtttggaagtttgcttgcatgtgaatcttttcatgcagatgtacatgcaggaaatctgtggcttctacgtgatggccgtattgggtttcttgacttcggaattgttggtcgtatatcccctaaaacatgggctgctatggaagtcttcttaggatcaattgccattgaagattatgactcaatggcatcttccttaattgaaatgggtgctacaaaccaggatgttgatgctaaggcctttgcaagagatttggaaaaagtattctcatcaattaaggaattggacactgaaatagttgtagcaactacaactggaacagccacaaatgcaactgctgttgctgctaatatagttgttgatgagaggcagatgaatgcactctttcttgatgtggttcgggttagtgaatcatatggattgaagtttcctagagaatttgctcttctcctgaaacagctcttgtactttgaccggtacacacggttgctggctcccaacttgaacatgcttcaggatcagaggatttccattgcttccaatagcagaagcagggtatagagacaatttttaaggagttggtacacaaaatctagatgtaccccatcttagttcaaaatattttatttgtatgattactttggtatataaataaaataatccatagttgtcatgtgagagcc

SEQ ID NO: 20140 - protein, 371 aa, Glycine max
NCFDRAPPVPFEEIESILRKELGKPLESVYEYIDPTPIASASIAQVHGARLKGSREDVVIKVLKPGIEDILVADLNFVYVVARILEFLSPEISRTSLVGIVKDIRESMLEEVDFYKEAANIEAFRRYLETMGLTGNATAPKVYRYCSTMKVLTMQRLYGVPLTDLDSISSLVSNPETSLITALNVWFGSLLACESFHADVHAGNLWLLRDGRIGFLDFGIVGRISPKTWAAMEVFLGSIAIEDYDSMASSLIEMGATNQDVDAKAFARDLEKVFSSIKELDTEIVVATTTGTATNATAVAANIVVDERQMNALFLDVVRVSESYGLKFPREFALLLKQLLYFDRYTRLLAPNLNMLQDQRISIASNSRSRV

SEQ ID NO: 20141 - protein, 264 aa, Glycine max
MLEEVDFYKEAANIEAFRRYLETMGLTGNATAPKVYRYCSTMKVLTMQRLYGVPLTDLDSISSLVSNPETSLITALNVWFGSLLACESFHADVHAGNLWLLRDGRIGFLDFGIVGRISPKTWAAMEVFLGSIAIEDYDSMASSLIEMGATNQDVDAKAFARDLEKVFSSIKELDTEIVVATTTGTATNATAVAANIVVDERQMNALFLDVVRVSESYGLKFPREFALLLKQLLYFDRYTRLLAPNLNMLQDQRISIASNSRSRV

SEQ ID NO: 20142 - protein, 241 aa, Glycine max
MGLTGNATAPKVYRYCSTMKVLTMQRLYGVPLTDLDSISSLVSNPETSLITALNVWFGSLLACESFHADVHAGNLWLLRDGRIGFLDFGIVGRISPKTWAAMEVFLGSIAIEDYDSMASSLIEMGATNQDVDAKAFARDLEKVFSSIKELDTEIVVATTTGTATNATAVAANIVVDERQMNALFLDVVRVSESYGLKFPREFALLLKQLLYFDRYTRLLAPNLNMLQDQRISIASNSRSRV

SEQ ID NO: 20143 - DNA, 1172 bp, Glycine max
aagagacaatctgaggcacttcaagccctagaaactgctggaagaacgggaaacccctttgtactataccatctcagtttagaatatgcagaacaaaggaagctggatgctgcactttattatgcaaaatgctttctaaaactggaaggtggttctaatgttaaaggatggttattgttagcccggatattgtctgctctaaaacagtttttggatgctgaatctattatcaatactgctttggatcaaactggaaaatgggatcaaggtgatttgttgcgaacaaaagctaaacttcaaattgcacagggccagttaaggaatgcaattgagacatatacgcagttgcttgctgttcttcaaatccagagtaaaggttttggttctgggaagaagctatacaaggaaaacagagatcgtgctaggaacttggaagtggaaatatggcatgatattgcttatgtttatatcagtcttttacagtggcatgatgcagaggtgtgcctttcaaaatccaaagccatcaaaccactctctgcttctagatgtcatgcaataggcataatgtacgaagcaaagggccattacaaagaggctctaaaagcttttggtgatgccttggacgttgatcctggccatgtccctagcttaatctccactgctgtagttcttaaacgatgtagtaataaatcaaatccagcagttaaaagctttctggtggatgcgctacggcatgacagattcaatgcttctgcttggtataatcttggccttcttcacaaggctgagggtacagcatcatcattagttgaagctgcagaatgttttcaagcagcacactttcttgaagaatctgcacctgttgaacctttcagatgactcattctatgaaggttggtccactggtagaagcaaaagagcaagcatgtttctttagagattaaatagcaaggaattttcctgtgaatccttctgcctcaggatagctaggagagagatattgatcatggtttggaaggctagttcataagaattaatagtaataaacaaaagaaaaagatggctaactctacaagcagttttgtgatgcaaggattcatgcttgatgtattcaactattctataattttcacatgtcttctttagaggtcaattcagaaaataataaaatg

SEQ ID NO: 20144 - protein, 292 aa, Glycine max
KRQSEALQALETAGRTGNPFVLYHLSLEYAEQRKLDAALYYAKCFLKLEGGSNVKGWLLLARILSALKQFLDAESIINTALDQTGKWDQGDLLRTKAKLQIAQGQLRNAIETYTQLLAVLQIQSKGFGSGKKLYKENRDRARNLEVEIWHDIAYVYISLLQWHDAEVCLSKSKAIKPLSASRCHAIGIMYEAKGHYKEALKAFGDALDVDPGHVPSLISTAVVLKRCSNKSNPAVKSFLVDALRHDRFNASAWYNLGLLHKAEGTASSLVEAAECFQAAHFLEESAPVEPFR

SEQ ID NO: 20145 - DNA, 1673 bp, Glycine max
tttcaaggatgctattgatgacatggctgctcgcagcttgcgttgtgtagccattgcatacagatcctatgaattagacaaagttccatctagtgagcaggatttagaccaatggtccttaccagaacatgagcttgttttgcttgctattgttggaataaaggatccttgtcgccctggtgtcaaagatgctgtaaaagtatgctctgatgctggtgttaaggtacgcatggttactggagacaaccttcaaacagcaaaggcaatagctttggagtgtggcatactggcttcaattgaagatgctgttgagccaaatataattgaaggaaagaaattccgtgaactatctgaaaaggaaagagaagatattgccaagaaaataactgtgatggggaggtcttctcctaatgacaagcttttgcttgtgcaagctctacgtaaaggaggggaagttgttgcggtcacaggagacggcaccaatgatgctcctgccctacatgaggctgatattggtctttctatgggcatccaaggaactgaagttgcaaaagaaagctcagatattataatcctagacgataactttgcatcagtggtaaaggttgtccgatggggccgctctgtatatgcaaatattcagaaatttatccagtttcagctcacggttaatgttgctgctcttgtaataaatgttgtggcagcaataacttctggtgatgttcctttaaatgcagtgcagcttttgtgggtcaaccttatcatggatacacttggggcgcttgcactggctactgaaccgccaacagaccgcctaatgcacagatcaccagttggccgaagagaatctcttataacaaatatcatgtggagaaacttgatcgtacaggctgtctatcaaatcgcagttcttctcgttcttaacttttgtggtgaaagtattctaccaaaacaagataccaaagctgatgcctttcaagtgaagaatactttaatattcaacgcgttcgtcctgtgccaaatattcaatgaattcaatgctcggaaacccgatgaaatgaatgttttccgtggagtgacgaataacaaacttttcatgggaattgttggagtgacctttatacttcagataatcatcatcgagttccttggaaagttcacctcaacagtgagacttgattggaagctatggcttgcttctcttggtattggccttgtcagctggccccttgctatagtcggcaaattcattccagttcccaaaacaccattggctcgttacttcttgaaaccactcaggcgattgaagaggtctaggtctcgtgctacgcaataggcatcgcttcctcaagtggataaccagccatgcatgcatattaagctaacgcctcacaggttacaatatagtatatattattactgctccatattgctgaaccatccttctagaattccaatgaaatgtatattatccaattaatcccaaagggtttaagcataaagcagtcattacgtgattccttttacttttaacatcatttcattttttggttcagctgtacattgtaacatttctagatattgttagagttgccccttgccactttataaatagtgaaatactatcaaactgactttttagcattggcaaggttcgattccccaaacaaatc

SEQ ID NO: 20146 - protein, 444 aa, Glycine max
FKDAIDDMAARSLRCVAIAYRSYELDKVPSSEQDLDQWSLPEHELVLLAIVGIKDPCRPGVKDAVKVCSDAGVKVRMVTGDNLQTAKAIALECGILASIEDAVEPNIIEGKKFRELSEKEREDIAKKITVMGRSSPNDKLLLVQALRKGGEVVAVTGDGTNDAPALHEADIGLSMGIQGTEVAKESSDIIILDDNFASVVKVVRWGRSVYANIQKFIQFQLTVNVAALVINVVAAITSGDVPLNAVQLLWVNLIMDTLGALALATEPPTDRLMHRSPVGRRESLITNIMWRNLIVQAVYQIAVLLVLNFCGESILPKQDTKADAFQVKNTLIFNAFVLCQIFNEFNARKPDEMNVFRGVTNNKLFMGIVGVTFILQIIIIEFLGKFTSTVRLDWKLWLASLGIGLVSWPLAIVGKFIPVPKTPLARYFLKPLRRLKRSRSRATQ

SEQ ID NO: 20147 - protein, 437 aa, Glycine max
MAARSLRCVAIAYRSYELDKVPSSEQDLDQWSLPEHELVLLAIVGIKDPCRPGVKDAVKVCSDAGVKVRMVTGDNLQTAKAIALECGILASIEDAVEPNIIEGKKFRELSEKEREDIAKKITVMGRSSPNDKLLLVQALRKGGEVVAVTGDGTNDAPALHEADIGLSMGIQGTEVAKESSDIIILDDNFASVVKVVRWGRSVYANIQKFIQFQLTVNVAALVINVVAAITSGDVPLNAVQLLWVNLIMDTLGALALATEPPTDRLMHRSPVGRRESLITNIMWRNLIVQAVYQIAVLLVLNFCGESILPKQDTKADAFQVKNTLIFNAFVLCQIFNEFNARKPDEMNVFRGVTNNKLFMGIVGVTFILQIIIIEFLGKFTSTVRLDWKLWLASLGIGLVSWPLAIVGKFIPVPKTPLARYFLKPLRRLKRSRSRATQ

SEQ ID NO: 20148 - protein, 368 aa, Glycine max
MVTGDNLQTAKAIALECGILASIEDAVEPNIIEGKKFRELSEKEREDIAKKITVMGRSSPNDKLLLVQALRKGGEVVAVTGDGTNDAPALHEADIGLSMGIQGTEVAKESSDIIILDDNFASVVKVVRWGRSVYANIQKFIQFQLTVNVAALVINVVAAITSGDVPLNAVQLLWVNLIMDTLGALALATEPPTDRLMHRSPVGRRESLITNIMWRNLIVQAVYQIAVLLVLNFCGESILPKQDTKADAFQVKNTLIFNAFVLCQIFNEFNARKPDEMNVFRGVTNNKLFMGIVGVTFILQIIIIEFLGKFTSTVRLDWKLWLASLGIGLVSWPLAIVGKFIPVPKTPLARYFLKPLRRLKRSRSRATQ

SEQ ID NO: 20149 - DNA, 1335 bp, Glycine max
atttgtgccatacatggatcccacacaagattggtactttaagacatacatggatgctggtgagtatggatttgggttgcaggcaatgccactagaccccttgaatgattgccccaagaatgcttactacatggatggtgtctttgcctcttccgatggaacaccatatctccaacccaacatgatttgcatttttgagagttatgctggtgacattgcgtggcgacatgcagagtgccccatcactgacctcaaggttacagaagtgaggccaaaggtgacactagtggttaggatggcagcagcagtagcaaactatgactatatcgtggattgggaatttcaaactgatgggctaatcagagcaaaggttggactgagtggtatcttgatggtgaaaggaactacctatgagaatatggatcaagttcccaaccaagaatatctttatggaacccttttgagtgaaaacattataggtgtaatccatgaccactttatcacatattacctagatatggacgttgatggctctgacaattcatttgttgaggtaaacataaagaagcaagagacctctccaggagaatcacccagaaagagttatctaaaagctgttaaaaaagtggcaaagacagagaaagatgctcaaataagacttcaactctatgacccatcggaatttcatgtggtgaacccattgaagaagacaaggatagggaaccctgttgggtacaaattggttccaggtgccacagcagctagcctgctggatccagaagatcctccacagaaaagagcagcttttacaaacaatcaaatatgggttactccttacaacaaaagtgagcaatgggctggtggtttatttgcttaccagagcaaaggggatgatactcttcaagtctggtccaacagggatcgtccaattgagaataaagacattgttttgtggtacacagtagggttccatcatataccctgtcaagaggactatcctgtcatgcctactgtatcatcaagttttgatttgaagcctgctaatttctttgagagaaatccaatccttggagtccctcccaatttcgaagatgatttacctgtttgcaaggctcgtgattcagcttgagatcccatcagttggtttttagtctaattagatacatgctttatttatgcatgtagcaaatgatgatgcccagactgaactttaaacctaacttaaagtaaagagggtctagttctgttgattaaacagaatgtataaatattgtaaaaccttttgataccatgtttaattcttatgtataagaaaaattatgatgttaaaaatct

SEQ ID NO: 20150 - protein, 375 aa, Glycine max
FVPYMDPTQDWYFKTYMDAGEYGFGLQAMPLDPLNDCPKNAYYMDGVFASSDGTPYLQPNMICIFESYAGDIAWRHAECPITDLKVTEVRPKVTLVVRMAAAVANYDYIVDWEFQTDGLIRAKVGLSGILMVKGTTYENMDQVPNQEYLYGTLLSENIIGVIHDHFITYYLDMDVDGSDNSFVEVNIKKQETSPGESPRKSYLKAVKKVAKTEKDAQIRLQLYDPSEFHVVNPLKKTRIGNPVGYKLVPGATAASLLDPEDPPQKRAAFTNNQIWVTPYNKSEQWAGGLFAYQSKGDDTLQVWSNRDRPIENKDIVLWYTVGFHHIPCQEDYPVMPTVSSSFDLKPANFFERNPILGVPPNFEDDLPVCKARDSA

SEQ ID NO: 20151 - protein, 371 aa, Glycine max
MDPTQDWYFKTYMDAGEYGFGLQAMPLDPLNDCPKNAYYMDGVFASSDGTPYLQPNMICIFESYAGDIAWRHAECPITDLKVTEVRPKVTLVVRMAAAVANYDYIVDWEFQTDGLIRAKVGLSGILMVKGTTYENMDQVPNQEYLYGTLLSENIIGVIHDHFITYYLDMDVDGSDNSFVEVNIKKQETSPGESPRKSYLKAVKKVAKTEKDAQIRLQLYDPSEFHVVNPLKKTRIGNPVGYKLVPGATAASLLDPEDPPQKRAAFTNNQIWVTPYNKSEQWAGGLFAYQSKGDDTLQVWSNRDRPIENKDIVLWYTVGFHHIPCQEDYPVMPTVSSSFDLKPANFFERNPILGVPPNFEDDLPVCKARDSA

SEQ ID NO: 20152 - protein, 359 aa, Glycine max
MDAGEYGFGLQAMPLDPLNDCPKNAYYMDGVFASSDGTPYLQPNMICIFESYAGDIAWRHAECPITDLKVTEVRPKVTLVVRMAAAVANYDYIVDWEFQTDGLIRAKVGLSGILMVKGTTYENMDQVPNQEYLYGTLLSENIIGVIHDHFITYYLDMDVDGSDNSFVEVNIKKQETSPGESPRKSYLKAVKKVAKTEKDAQIRLQLYDPSEFHVVNPLKKTRIGNPVGYKLVPGATAASLLDPEDPPQKRAAFTNNQIWVTPYNKSEQWAGGLFAYQSKGDDTLQVWSNRDRPIENKDIVLWYTVGFHHIPCQEDYPVMPTVSSSFDLKPANFFERNPILGVPPNFEDDLPVCKARDSA

SEQ ID NO: 20153 - DNA, 1194 bp, Glycine max
gaattttactttggctgtgaaaatgtatcaaaactgcttgcggaagttttatcataacacagactctcaaatacttctatatttagctcgtacacattacgaggctgaacagtggcaagactgtataaaaactctactgagggccatacatttggcaccctcaaactataccttaaggtttgatgcaggggttgcaatgcaaaagttttcagcatcaacactacaaaaagcaaagaggactgcagatgaggtaagagcaactgttgctgagcttcaaaatgctgttcgtgtatttagtcagttgtctgctgcttccaatctacatattcacgggtttgatgagaagaaaattgacacacatgttggatactgcaaccacttactttcggctgcaaaagttcatcttgaagcagctgagcatgaagagcagcaagtacggcaaagacaagaacttgctcgtcaggttgcattggctgaggaagcccggcgaaaggctgaagagcaaaggaaatttcagatggaaaggggaaaacaagaagacgagctaaagcgtgtgcaaaaacaggaggaacattttaggcgtgttaaggagcaatggaagagcagcagtcattcaaaacggagagaaagatcagacgatgaagagggagggactggtgagaagaagagaaaaaaaggtggaaaacggagaaaaaaggataagcactctaaattgcgctatgacgcagaggaaccagaagatgatttgatggatgaacagggaatggaggatgaagaagctgatataaactacagagaggagccccaaactcagatgaatgatgatgctgaggaaaatgctcagggtcttcttgcagcggctgggcttgaagattctgatgcagatgaggaaacagctgcaccttcctcaagcatagcccgacgaaggcaagcattatcggaatctgatgatgacgaaccattattacaaaggcagtcaagtccagtaagacaaaactctgctgatatgcagttgagtgatggagaaataagggatggggataagacaaatggagatgatggcaatgatgaggagaaacaatattgaccctacaggttagtctttaatatccgccaagtgattttgtaagagtgataacattatttaaattttatgtatatatacttgaaaaattttaaaaaaaggttttattc

SEQ ID NO: 20154 - protein, 361 aa, Glycine max
NFTLAVKMYQNCLRKFYHNTDSQILLYLARTHYEAEQWQDCIKTLLRAIHLAPSNYTLRFDAGVAMQKFSASTLQKAKRTADEVRATVAELQNAVRVFSQLSAASNLHIHGFDEKKIDTHVGYCNHLLSAAKVHLEAAEHEEQQVRQRQELARQVALAEEARRKAEEQRKFQMERGKQEDELKRVQKQEEHFRRVKEQWKSSSHSKRRERSDDEEGGTGEKKRKKGGKRRKKDKHSKLRYDAEEPEDDLMDEQGMEDEEADINYREEPQTQMNDDAEENAQGLLAAAGLEDSDADEETAAPSSSIARRRQALSESDDDEPLLQRQSSPVRQNSADMQLSDGEIRDGDKTNGDDGNDEEKQY

SEQ ID NO: 20155 - protein, 354 aa, Glycine max
MYQNCLRKFYHNTDSQILLYLARTHYEAEQWQDCIKTLLRAIHLAPSNYTLRFDAGVAMQKFSASTLQKAKRTADEVRATVAELQNAVRVFSQLSAASNLHIHGFDEKKIDTHVGYCNHLLSAAKVHLEAAEHEEQQVRQRQELARQVALAEEARRKAEEQRKFQMERGKQEDELKRVQKQEEHFRRVKEQWKSSSHSKRRERSDDEEGGTGEKKRKKGGKRRKKDKHSKLRYDAEEPEDDLMDEQGMEDEEADINYREEPQTQMNDDAEENAQGLLAAAGLEDSDADEETAAPSSSIARRRQALSESDDDEPLLQRQSSPVRQNSADMQLSDGEIRDGDKTNGDDGNDEEKQY

SEQ ID NO: 20156 - protein, 296 aa, Glycine max
MQKFSASTLQKAKRTADEVRATVAELQNAVRVFSQLSAASNLHIHGFDEKKIDTHVGYCNHLLSAAKVHLEAAEHEEQQVRQRQELARQVALAEEARRKAEEQRKFQMERGKQEDELKRVQKQEEHFRRVKEQWKSSSHSKRRERSDDEEGGTGEKKRKKGGKRRKKDKHSKLRYDAEEPEDDLMDEQGMEDEEADINYREEPQTQMNDDAEENAQGLLAAAGLEDSDADEETAAPSSSIARRRQALSESDDDEPLLQRQSSPVRQNSADMQLSDGEIRDGDKTNGDDGNDEEKQY

SEQ ID NO: 20157 - DNA, 1323 bp, Glycine max
attatgtttattattttcttaaatcacaaacttatcttttgcttctctctcatcactccactaccccttcttcctctttatatctcttgtgtctataataacctaatccattctacgcgatcatatatcatatcccccgattcctttttcccaccctctcaccatgactcatccctactgctctaatgacttgaatgcttggtttgacctcaattctccatgccttttttccaattcttcatcaccttgctccaataacccaccattctactttcctactactaatattagttaccgtcataactgcacaaataatggcatctcttttactcagcatattcaatcttctcccagctcctttcctcctccaaaagaagcacttactcttaacctaagccccgcaagaggtgaagatcttgatcttgaatcttccttcagtgccatgaaagtcaacaaagagaaggagaaagaattactaagcatcatgtcttctaataataactctttggatgatgaaactgtgacggtggctttgcacttagggcttccaagcactactgctacttcatcagctgatttaacttcaaacatgtactcagaaaaagaagaaaaagccacttttgcttctgagtattctccgactagaattaacaagggtcagtattggatccctacccctgctcaaattctgatcggtccaacacggttctcatgccccctttgttgcaagacgttcaacagatacaacaacatgcagatgcatatgtgggggcatggatctcaatatagaaaggggccagagtctctaaggggaactcaaccaacagcaatgcttagactcccttgctattgctgtgcacaaggatgcaagaacaacattgaccatccaagagcaaagccactcaaagactttaggaccctccaaacccattacaagagaaagcatggaatcaagcctttcatgtgtagaaaatgttgcaaagcatttgctgtgaggggtgattggaggactcacgagaaaaactgtgggaagctatggtattgctcttgtgggtccgattttaagcacaagagatctctcaaagatcatatcaaggcatttgggaatggacatagagcttatggaatcgactcatgtcttgatcaagatgatgaaccgggctcagaaattgagcaggaaaataatgaatctttaatttccaatcatagttgacgtgtaatttcaactatgaagactagacaattgaggattctcatgttttgaactaattaaattgttgactatgactaccatctctaattaacgagttctccactcccccc

SEQ ID NO: 20158 - protein, 349 aa, Glycine max
MTHPYCSNDLNAWFDLNSPCLFSNSSSPCSNNPPFYFPTTNISYRHNCTNNGISFTQHIQSSPSSFPPPKEALTLNLSPARGEDLDLESSFSAMKVNKEKEKELLSIMSSNNNSLDDETVTVALHLGLPSTTATSSADLTSNMYSEKEEKATFASEYSPTRINKGQYWIPTPAQILIGPTRFSCPLCCKTFNRYNNMQMHMWGHGSQYRKGPESLRGTQPTAMLRLPCYCCAQGCKNNIDHPRAKPLKDFRTLQTHYKRKHGIKPFMCRKCCKAFAVRGDWRTHEKNCGKLWYCSCGSDFKHKRSLKDHIKAFGNGHRAYGIDSCLDQDDEPGSEIEQENNESLISNHS

SEQ ID NO: 20159 - protein, 256 aa, Glycine max
MKVNKEKEKELLSIMSSNNNSLDDETVTVALHLGLPSTTATSSADLTSNMYSEKEEKATFASEYSPTRINKGQYWIPTPAQILIGPTRFSCPLCCKTFNRYNNMQMHMWGHGSQYRKGPESLRGTQPTAMLRLPCYCCAQGCKNNIDHPRAKPLKDFRTLQTHYKRKHGIKPFMCRKCCKAFAVRGDWRTHEKNCGKLWYCSCGSDFKHKRSLKDHIKAFGNGHRAYGIDSCLDQDDEPGSEIEQENNESLISNHS

SEQ ID NO: 20160 - protein, 242 aa, Glycine max
MSSNNNSLDDETVTVALHLGLPSTTATSSADLTSNMYSEKEEKATFASEYSPTRINKGQYWIPTPAQILIGPTRFSCPLCCKTFNRYNNMQMHMWGHGSQYRKGPESLRGTQPTAMLRLPCYCCAQGCKNNIDHPRAKPLKDFRTLQTHYKRKHGIKPFMCRKCCKAFAVRGDWRTHEKNCGKLWYCSCGSDFKHKRSLKDHIKAFGNGHRAYGIDSCLDQDDEPGSEIEQENNESLISNHS

SEQ ID NO: 20161 - DNA, 1367 bp, Glycine max
attcaattcccttcaaattcttccaccaccccttttccttattcttcctcaattctcccaaaaatcatatttttaccgttctgattggtttttcagcttgtgggtcgatgtcaactgtgtcgaaagatgacaacttggtgctgtcttcggaggactcttcgtgcccagaagagtctgagcttgaattgggtcttggcttgagcctctcttctggcccttcatcaaagtctcatcaccaccatgttcatttcctacaactctttatgctagaatttacactgctaaggattttccttcttccgcagcagcagcatcatcatcaccttcctcttcttcctcttcgtctcccaacatcactgccggcaccaagagagctgctgctgattctcttgttgccaataaccgtcccagtcaagtagttggatggcctccacttcgaacatatagagtgaatagcttcaatagccatgcaaaatcaactgaagtattcaactctgtggctgagaagagtaagataaataatactgtggtcaggaagactaatgacaatgacaatgataataacataaatgccaaagaaaaaagacacctcaggagttccctgttcgtcaaggtaaatatggacgggataccaattggaaggaaggttgatttgagtgcccatagttcctatgaaaccttagcacaaacattggaggatatgtttaatgaatcaactacagtcaccacttgcaaaggatcaaatggtgaggattatggcattattatcggaggagaaagacattcaaaattgttggatggatcttccaagtttgtgctcacttatgaagacaaggaaggagattggatgcttgttggggatgttccctgggggatgttccttagctcggtgaggaggctaagaatcatgaggacatctgaggctaatggacttgcaccaagattggaagaaaacatcaaacagagatgcaagcccatatagatactgttttcatggctaaggacacgaagaacctgtcaaatagatgaagagaaaaaacagaacagaaaagtaaaggaatattgcaagtatatgaagttttgagatttgaatgataaaatctcgcacttttgtttaattaattcagtttgtttgtttgtttaatttggtatatttgtcgctgcctctctattcatctcacttggagggtgcaggcatcatagattttcatgcaatactactaatcatacaagtcagcctgcttgttagtgttgtaaatgtgggatgtttgctaactatctcagctataaagtattgtttgaactttatttccctgctacagtaattcaaatttcctttgaatgaatacctattttaaaaaatgact

SEQ ID NO: 20162 - protein, 138 aa, Glycine max
SIPFKFFHHPFSLFFLNSPKNHIFTVLIGFSACGSMSTVSKDDNLVLSSEDSSCPEESELELGLGLSLSSGPSSKSHHHHVHFLQLFMLEFTLLRIFLLPQQQHHHHLPLLPLRLPTSLPAPRELLLILLLPITVPVK

SEQ ID NO: 20163 - protein, 120 aa, Glycine max
MDGIPIGRKVDLSAHSSYETLAQTLEDMFNESTTVTTCKGSNGEDYGIIIGGERHSKLLDGSSKFVLTYEDKEGDWMLVGDVPWGMFLSSVRRLRIMRTSEANGLAPRLEENIKQRCKPI

SEQ ID NO: 20164 - protein, 103 aa, Glycine max
MSTVSKDDNLVLSSEDSSCPEESELELGLGLSLSSGPSSKSHHHHVHFLQLFMLEFTLLRIFLLPQQQHHHHLPLLPLRLPTSLPAPRELLLILLLPITVPVK

SEQ ID NO: 20165 - DNA, 1616 bp, Glycine max
agttatcgttactcctaaagcagtttctgattcccaaaactcacaaacgtgccttgatcccgatgctagcagaagtgtgcttggcattatacttggaggtggtgctgggactcggctttatccactcaccaagaagagggcaaagccagctgttcctcttggagctaactataggcttattgatattcctgttagcaactgcttgaatagcaatgtctccaagatctatgttctcactcaattcaattctgcgtcgttaaaccgacacctttctcgtgcttatgcaagcaacatgggtggctacaaaaatgagggatttgttgaggttcttgctgctcagcagagtcctgagaatcctaattggttccagggtactgcagatgctgtgaggcagtatttgtggctttttgaagagcacaatgttttggaattcttggttctggctggtgaccatttgtatcgaatggattacgagaaatttatccaagcgcatagggaaactgatgctgatatcactgtggctgcattgccaatggatgaagcgcgtgccactgcatttggtttgatgaagattgatgaagaggggcgtataattgaatttgctgaaaagccaaaaggagaacagttgaaagctatgaaggttgatactacaattttgggtcttgatgacgagagagcaaaagaaatgccttatattgctagcatgggtatatatgttgttagcaaaaatgtgatgttagacctgctccgtgagaagtttcctggtgcaaatgactttgggagtgaagtgattcctggtgctacttctattggaatgagagtgcaagcttacttgtatgatggctactgggaagacattggtacaatcgaggctttctataatgcaaatctgggaatcaccaaaaagcctgtgcctgacttcagtttctatgatcgttcatctccaatctacacccaaccacgatatttgcctccctctaagatgcttgatgctgatgtcactgatagtgttattggtgaaggatgtgtgattaagaactgcaaaattcaccattctgtggttgggctgcgatcttgcatatcagaaggtgcaattattgaagacacgttattaatgggggcagattattacgagacggaggctgataagaggtttctggctgccaaaggcagtgttccaattggtataggcaggaactctcatatcaaaagggcaattattgacaagaatgctcgaattggggaaaatgtcaagattattaacagtgacaatgtccaagaagctgcaagggaaacagatgggtatttcataaaaagtgggattgtcacagtaatcaaggatgctttaattcctagtggaacagtcatctaaacacaaccacctccccaaaaaatttcttgtaccccaaatcctaatggtgactgcgaagctcattaccaccgcaggagagtttatcaagctctgcttccacgtctaagataggcttttgtgtttcatgatatatatttttgggcagtggcttgtaaataatagcggaagagaaggcccgctatgagcaatcacgctgtaaagttcgttaatcaattcaataaaacaagtttctttatttcgtact

SEQ ID NO: 20166 - protein, 456 aa, Glycine max
VIVTPKAVSDSQNSQTCLDPDASRSVLGIILGGGAGTRLYPLTKKRAKPAVPLGANYRLIDIPVSNCLNSNVSKIYVLTQFNSASLNRHLSRAYASNMGGYKNEGFVEVLAAQQSPENPNWFQGTADAVRQYLWLFEEHNVLEFLVLAGDHLYRMDYEKFIQAHRETDADITVAALPMDEARATAFGLMKIDEEGRIIEFAEKPKGEQLKAMKVDTTILGLDDERAKEMPYIASMGIYVVSKNVMLDLLREKFPGANDFGSEVIPGATSIGMRVQAYLYDGYWEDIGTIEAFYNANLGITKKPVPDFSFYDRSSPIYTQPRYLPPSKMLDADVTDSVIGEGCVIKNCKIHHSVVGLRSCISEGAIIEDTLLMGADYYETEADKRFLAAKGSVPIGIGRNSHIKRAIIDKNARIGENVKIINSDNVQEAARETDGYFIKSGIVTVIKDALIPSGTVI

SEQ ID NO: 20167 - protein, 359 aa, Glycine max
MGGYKNEGFVEVLAAQQSPENPNWFQGTADAVRQYLWLFEEHNVLEFLVLAGDHLYRMDYEKFIQAHRETDADITVAALPMDEARATAFGLMKIDEEGRIIEFAEKPKGEQLKAMKVDTTILGLDDERAKEMPYIASMGIYVVSKNVMLDLLREKFPGANDFGSEVIPGATSIGMRVQAYLYDGYWEDIGTIEAFYNANLGITKKPVPDFSFYDRSSPIYTQPRYLPPSKMLDADVTDSVIGEGCVIKNCKIHHSVVGLRSCISEGAIIEDTLLMGADYYETEADKRFLAAKGSVPIGIGRNSHIKRAIIDKNARIGENVKIINSDNVQEAARETDGYFIKSGIVTVIKDALIPSGTVI

SEQ ID NO: 20168 - protein, 302 aa, Glycine max
MDYEKFIQAHRETDADITVAALPMDEARATAFGLMKIDEEGRIIEFAEKPKGEQLKAMKVDTTILGLDDERAKEMPYIASMGIYVVSKNVMLDLLREKFPGANDFGSEVIPGATSIGMRVQAYLYDGYWEDIGTIEAFYNANLGITKKPVPDFSFYDRSSPIYTQPRYLPPSKMLDADVTDSVIGEGCVIKNCKIHHSVVGLRSCISEGAIIEDTLLMGADYYETEADKRFLAAKGSVPIGIGRNSHIKRAIIDKNARIGENVKIINSDNVQEAARETDGYFIKSGIVTVIKDALIPSGTVI

SEQ ID NO: 20169 - DNA, 1208 bp, Glycine max
gctcctctcccattgtagcttcgtattagcacaaaacaaacaaaccctaactctaacccttgtcgaaaccccttatccgatcatggctactgatgcccgtgactcgcgtcgcaagtatcgccgatcatcctctccggaggacgtggacagatcctcgaagcgccacaagcaccgccaccacagccaccgccaccgccacgggagcaaaaaacgcgacgaagagattaaattcgatgatcgaacaattggtgcggttccttctccaactccgcacgggcatctccctgacgacgatgatgtggaggagggagagatccttgaagatgaggctctcgacggcgaggttgggaaaaaggagacggaatctgatgctgaacccggtgaaatcaaggtgacgggagatcgagatgttcgatctgataatcaaaattcgggacaccttactaaaatttcagtaactagaaatgaggacattagggatgataaatttattagtcctgcaatcaatgcagaagatgatgtctctcctaattgttcaagttctgagactcgggatggaaagcatgctcaagctcgtacagatggcgtgggcaatggttttttggatcctaaatcttccaaaggggataagtggcacaatggggaacttggacattttaaaggtaatgagaaactaaaaggagactttgatgatgaaacactggaggctaatgtgaggaaagcacattacaataggaattcatcctctgaaagtggagggggaaaatatagaatgtcaggaagttctccttctcatggtagatatagaagtcgatcaagatcaattggtcatactagagacaggtctcgctctcgtagtatcatagatgaatatgctcattccaagagaaggcgctctgactatgaccatgatgaggaaagagtgagggtacgtggaagggagcatggtcatggcagtgtggtagatgatagaagggaatacagtaccagatatcacaatcgagaggccagggatagagataggagtagggatagagatgtggatagagacttgcacagagaaaagaaacaagaggaaactagcaggggtaaagagattgagtgggaacacaaaaggggaaaggaacttgaaaggagccgtgagaggtatagaagggatgcagaaaaagataggagcagggaaagggaggaggatggggacaggagac

SEQ ID NO: 20170 - protein, 402 aa, Glycine max
LLSHCSFVLAQNKQTLTLTLVETPYPIMATDARDSRRKYRRSSSPEDVDRSSKRHKHRHHSHRHRHGSKKRDEEIKFDDRTIGAVPSPTPHGHLPDDDDVEEGEILEDEALDGEVGKKETESDAEPGEIKVTGDRDVRSDNQNSGHLTKISVTRNEDIRDDKFISPAINAEDDVSPNCSSSETRDGKHAQARTDGVGNGFLDPKSSKGDKWHNGELGHFKGNEKLKGDFDDETLEANVRKAHYNRNSSSESGGGKYRMSGSSPSHGRYRSRSRSIGHTRDRSRSRSIIDEYAHSKRRRSDYDHDEERVRVRGREHGHGSVVDDRREYSTRYHNREARDRDRSRDRDVDRDLHREKKQEETSRGKEIEWEHKRGKELERSRERYRRDAEKDRSREREEDGDRR

SEQ ID NO: 20171 - protein, 375 aa, Glycine max
MATDARDSRRKYRRSSSPEDVDRSSKRHKHRHHSHRHRHGSKKRDEEIKFDDRTIGAVPSPTPHGHLPDDDDVEEGEILEDEALDGEVGKKETESDAEPGEIKVTGDRDVRSDNQNSGHLTKISVTRNEDIRDDKFISPAINAEDDVSPNCSSSETRDGKHAQARTDGVGNGFLDPKSSKGDKWHNGELGHFKGNEKLKGDFDDETLEANVRKAHYNRNSSSESGGGKYRMSGSSPSHGRYRSRSRSIGHTRDRSRSRSIIDEYAHSKRRRSDYDHDEERVRVRGREHGHGSVVDDRREYSTRYHNREARDRDRSRDRDVDRDLHREKKQEETSRGKEIEWEHKRGKELERSRERYRRDAEKDRSREREEDGDRR

SEQ ID NO: 20172 - DNA, 1407 bp, Glycine max
gagaagaaacgagagcgagagagagaaagaaatggcgaccaacattgggatcatggatgcggcttacttcgtcggcagatctgagattctttcttggatcaactcaactctgcaactcaatctctccaaagtcgaagaggcttgttccggcgccgttcattgtcagcttctcgatgccgctcatccagggatcgtgcctatgcacaaggtcaatttcgacgccaagagcgagtacgagatgattcagaactacaaggtccttcaagatgtcttcaacaaactcaaaatcaccaagcacatcgaggtcagcaagctggtgaaaggaaggccactggataacctcgagttcatgcaatggatgaaacgatactgcgattctgtcgattccggccttcagtacaattataatcctctggagaggagagaggtttgcaaaggaggaagagaaacgagcaagaaatctgcaaactcccaagcctcaaccaagggttctactgcacagagacctcattcttctcataatgctcgaagaaatgaggtttctaatgcaaaccctacaaatcaggctgcaaaggttgcgagagcagcaccttctgctggaaaccctgctcctgtgtatgaagaaaagataacagagttgaagttgtccattgatagccttgagaaggaacgagatttctacttcgcaaagctgagagatattgagatactgtgccagactcctgagatagaacactcaccgattgttgcggcaatacagaagatattatatgctacagatgacaatggaatggctgtggtcgaagctcaagctatgatttctgttggtcgtaaggaaatagagggattaagccccattgctgaggtttcggaggagaagagcagttcagaaactcataagagaaagaatattgccaatattgattttgatgttgctggcctcgcaacgttgtctcccagacagaggctttctgatgtttcagatgttcattgtagcgagtcacctcttatgacttgttagggaggaggaaggatcaccttctgttgttaattcagttagcaacatgttaaaaccgttttggtcacagtaattcctgttacaagtgtgaattgacagggttattcataatggttaggggttttagggagactattctgttatcaagtatcaagtatcgggtatcgggtatcagcccagaaaaatgtagccagatatattttgcctttagaatttgcttgttgtctcaacaatgtttctgaatccagtcatgtaatttctggctagtgctttgagcaacactatttcattttcagcatttttttcatttattatgtgatgatcaaattgtttacaattcagggaaaattacatatcggaatttgtaattaatttctgaattcggtctt

SEQ ID NO: 20173 - protein, 339 aa, Glycine max
RRNESEREKEMATNIGIMDAAYFVGRSEILSWINSTLQLNLSKVEEACSGAVHCQLLDAAHPGIVPMHKVNFDAKSEYEMIQNYKVLQDVFNKLKITKHIEVSKLVKGRPLDNLEFMQWMKRYCDSVDSGLQYNYNPLERREVCKGGRETSKKSANSQASTKGSTAQRPHSSHNARRNEVSNANPTNQAAKVARAAPSAGNPAPVYEEKITELKLSIDSLEKERDFYFAKLRDIEILCQTPEIEHSPIVAAIQKILYATDDNGMAVVEAQAMISVGRKEIEGLSPIAEVSEEKSSSETHKRKNIANIDFDVAGLATLSPRQRLSDVSDVHCSESPLMTC

SEQ ID NO: 20174 - protein, 329 aa, Glycine max
MATNIGIMDAAYFVGRSEILSWINSTLQLNLSKVEEACSGAVHCQLLDAAHPGIVPMHKVNFDAKSEYEMIQNYKVLQDVFNKLKITKHIEVSKLVKGRPLDNLEFMQWMKRYCDSVDSGLQYNYNPLERREVCKGGRETSKKSANSQASTKGSTAQRPHSSHNARRNEVSNANPTNQAAKVARAAPSAGNPAPVYEEKITELKLSIDSLEKERDFYFAKLRDIEILCQTPEIEHSPIVAAIQKILYATDDNGMAVVEAQAMISVGRKEIEGLSPIAEVSEEKSSSETHKRKNIANIDFDVAGLATLSPRQRLSDVSDVHCSESPLMTC

SEQ ID NO: 20175 - protein, 322 aa, Glycine max
MDAAYFVGRSEILSWINSTLQLNLSKVEEACSGAVHCQLLDAAHPGIVPMHKVNFDAKSEYEMIQNYKVLQDVFNKLKITKHIEVSKLVKGRPLDNLEFMQWMKRYCDSVDSGLQYNYNPLERREVCKGGRETSKKSANSQASTKGSTAQRPHSSHNARRNEVSNANPTNQAAKVARAAPSAGNPAPVYEEKITELKLSIDSLEKERDFYFAKLRDIEILCQTPEIEHSPIVAAIQKILYATDDNGMAVVEAQAMISVGRKEIEGLSPIAEVSEEKSSSETHKRKNIANIDFDVAGLATLSPRQRLSDVSDVHCSESPLMTC

SEQ ID NO: 20176 - DNA, 1228 bp, Glycine max
gttttatggcagaaataggtgcacggcaggcatgggtttcagcttttgtgactcaatcacccaccataaccattattatcagtacatagtactagttaatctcagtcatgcctattcctaggtttatgctcttttcatcccagcatcgctccactgctgcggccctcgctcttcttcgaaggtgcgttccctctacgacaactcaatctgttaggtattcaaaatcaacaagtcacggtaaaacaaaacattatcttcatcctgtattccaaccagaatccagctccgcctcccaggtttctcgctcatggggtgcctatgttgttccagctgctgttcttggatttgctgggcttgcagctttttttcactataatgatgagagaagagcggttcccaaaggtcatcagggtggtggcctcagaaatgttgccaatggacccataattgggggtccatttacactaattaatacagagaaacaagcaattacagaacgtaattttcttgggaattgggtcctcctctactttggttatacctcatcccccgatcttgggccagagcaagtccaaattatggccaacgcaattgatatattagaatcaaaacagaatctcaagattctaccagtatttgtttccattgatcctcaacgtgatactccctcacaacttcgtgcttaccttaaagagtttgattcaagaatcataggattaactggacctgttgcagctattaggcagatggctcaagaatatcgtgtttactttaaaaaggtagaagaggatggcaatgattatcttgttgactgttcccacaacatgtatttgctgaatcctaaattggaggttacgagatgctttggagtcgagtatagtgcagaggagttgtcagaagcgatagtgaaagagctgaacagaaacccctcttgaatggttacgagatgctttggagtcgagtatagtgcggaggagatgtttctgtttttcgttttcttttaattagatcacagaataatttacatgtgatgaattaagttttactttagacgattggatttagctttgctttattttcaactagacttgcagaaaaatgtagtggcaatctgagcttcattttaagtttcgcgggcatttagttcttggctaacatcttagatggatgttttatacctgaatgttttcacattcaccttcatctaacaagcactttggttttagtt

SEQ ID NO: 20177 - protein, 275 aa, Glycine max
MPIPRFMLFSSQHRSTAAALALLRRCVPSTTTQSVRYSKSTSHGKTKHYLHPVFQPESSSASQVSRSWGAYVVPAAVLGFAGLAAFFHYNDERRAVPKGHQGGGLRNVANGPIIGGPFTLINTEKQAITERNFLGNWVLLYFGYTSSPDLGPEQVQIMANAIDILESKQNLKILPVFVSIDPQRDTPSQLRAYLKEFDSRIIGLTGPVAAIRQMAQEYRVYFKKVEEDGNDYLVDCSHNMYLLNPKLEVTRCFGVEYSAEELSEAIVKELNRNPS

SEQ ID NO: 20178 - protein, 269 aa, Glycine max
MLFSSQHRSTAAALALLRRCVPSTTTQSVRYSKSTSHGKTKHYLHPVFQPESSSASQVSRSWGAYVVPAAVLGFAGLAAFFHYNDERRAVPKGHQGGGLRNVANGPIIGGPFTLINTEKQAITERNFLGNWVLLYFGYTSSPDLGPEQVQIMANAIDILESKQNLKILPVFVSIDPQRDTPSQLRAYLKEFDSRIIGLTGPVAAIRQMAQEYRVYFKKVEEDGNDYLVDCSHNMYLLNPKLEVTRCFGVEYSAEELSEAIVKELNRNPS

SEQ ID NO: 20179 - DNA, 1950 bp, Glycine max
atgcgggaatcgggtcgggtggtattcggagggttaatttccgagcggagattgacacgtcgccgccgtttgggtcggtgaaagaggccgtgacccgttttggaggtagcggtccttggataccctattttaacaacattgaaaattttgacttaaagaaagtagaggaacaagcagcagagttggagaaggatttgattgtcaaggaacttgaaacgcttgacgtgcttgaagaattaggagctaccaagaggattgtggaggacttgaagcagcagttacaaaaggaggctatgaaatgtttagcaactcgagatgtaaattcatatgaagaagctggaactcctgttattaaggagaaggatgaggaaaattgtggaaatattgtcaatgatgaagaacaggtgatgcaaattccaagcccatgctctatgtcatcatcacctgatatgatcttaatggagttgaaaaaagccaaattgaatctaggcaaaactataaatgaacttggggtgatacaatcctcgattgaatctttgaataagaagatgaagaaggagaaaaattttctggagaggacacgtgaaaagctagcatcaaagtttgcagcagaatctgctcaagagagggtccaagagcaaacaagattgaatccaccggcccctcatgtagagttcacctttggtaaccctgcaaataacttcaattctgattctgggcagtgcaatggaatggcagagacaagaagacctgaaccttcaaagcccttaagtgtatatgaagaatatggatttagtgttaaaactgctgagataaggtggcttgcggctaaaaagatggaagaagctgcaagggcagcagaagctattgctcttgctgaaatcaaggctctatctaatgcccagagatctttaggatttgttctgccagaacctgagaaagtcacttttgcttttggagagcgctctcccctaaaccccaaggctcagatacccaaggagtcaaccttgaagaaggtaatagattccaagtttcaaattgatgaaacaaaaatttctaagctgacaattttgaagaagttggaggaagcagctgaagaagttctacacagcaaacaagtcttgacagatgctttaaacagaattgaaactgcaaacagaaagcaacatgctgctaaggaggctctaaggagatggattccagaggatgatatgaaggagtatagcactattaattgcaacaagtttaatcaaactggaatttatcaagattctctgcaggatgtaaccaggtcaacaacagcaaacaatgatccaaagcctgctttaaggcccacaatttcaatgagagatgtacttagcagaaagcaggttcctgaaggatatgctacaagaaaggagatggaagagcacactgaacggcaaaaggtagcgttgagtcaaatgcttcaagcattgagggaagatctaactcttccaccaaagactgagaaagatgggaacaatcagaagccgtacgtagcacagaggaagaaatttggattcattcaaatatcactccccttggcaaagccaaataagaaaaggggatgaaatttcgatcctcaatccctatgcatggatgaatagccactacccatgcatctttatgttttcccatgccattctttattggttcatgtgttcacactttcatttgtttatgtagaagtttgagtgggtgtttgattctgtaaaatatatgttgtgcttgagtgattggcttataattctgtagctagctttaatggagctagtagattatgttgctattgttggatgcattggagtgatgaggaatttatccatagggtaggaaggtttttatcattggattgataattttattgttagaagtatgatctatcatgtggttgtaccaatatataaaattatatttgttgattagtgc

SEQ ID NO: 20180 - protein, 529 aa, Glycine max
AGIGSGGIRRVNFRAEIDTSPPFGSVKEAVTRFGGSGPWIPYFNNIENFDLKKVEEQAAELEKDLIVKELETLDVLEELGATKRIVEDLKQQLQKEAMKCLATRDVNSYEEAGTPVIKEKDEENCGNIVNDEEQVMQIPSPCSMSSSPDMILMELKKAKLNLGKTINELGVIQSSIESLNKKMKKEKNFLERTREKLASKFAAESAQERVQEQTRLNPPAPHVEFTFGNPANNFNSDSGQCNGMAETRRPEPSKPLSVYEEYGFSVKTAEIRWLAAKKMEEAARAAEAIALAEIKALSNAQRSLGFVLPEPEKVTFAFGERSPLNPKAQIPKESTLKKVIDSKFQIDETKISKLTILKKLEEAAEEVLHSKQVLTDALNRIETANRKQHAAKEALRRWIPEDDMKEYSTINCNKFNQTGIYQDSLQDVTRSTTANNDPKPALRPTISMRDVLSRKQVPEGYATRKEMEEHTERQKVALSQMLQALREDLTLPPKTEKDGNNQKPYVAQRKKFGFIQISLPLAKPNKKRG

SEQ ID NO: 20181 - protein, 432 aa, Glycine max; identical to SEQ ID NO: 19913

SEQ ID NO: 20182 - protein, 394 aa, Glycine max; identical to SEQ ID NO: 19914

SEQ ID NO: 20183 - DNA, 1885 bp, Glycine max
atcaactgtttggaaagaattcacttcagaaggaagaaagtattattacaacaaggttactcagcaatcaacgtggtcaataccagaggaacttaagttggctcgtgagcaggcacagaaagctgcaaaccagggaatgcagtcagaaacaaatgatacatccaatgctgcagtctcctccacagcaacaccaacaccaacaccaacagcagttaatgcagctagcttgaacacttccttgacatcaaatcattcaaatgggcttgcttccagcccatcttctgtcacaccaattgcagcaaccgattctcaacagtcggtttctggattatctgggtcctctgtttctcactctatagttaccccaagcaccacaggagtagaaccaagcactgtggtaactacgagtgctgcacctacaatagttgcaggaagctctggactagctgagaattcacctcaacaatccaaaatgccaccccttgttgaaaatcaagcatctcaagattttgcttctgtaaatggatcttctcttcaagatatcgaggaagccaaaagatcattgcctgtggttggaaaaaataatgttgttccacctgaagagaaaaccaatgacgatgaaaccttggtatatgcaaataaactggaagcaaaacttgcatttaaagctcttttggaatctgtgaatgttcagtctgattggacatgggaacaggcaatgagagaaatcatcaatgacaaaagatataatgccctaaaaacacttggtgagcgaaaacaggcttttaatgagtatttgggtcaaaggaagaagctggaggctgaagagaggcgcatgaagcagaaaagagcccgtgaagaattcacaaaaatgttggaagagtgcaaggaacttacatcatccatgaggtggagcaaagctattagtatgtttgaaaatgatgaacgattcaatgctgttgaaagactaagggaccgagaagatttatttgaaagctacatggtggaacttgagaggaaggaaaaggaaaatgctgcagaggaacaccgccggaatatagcagaatatagaaaatttctggagtcctgtgactatgtgaaggcgaatagtcattggcgaaaaatccaagatcggttagaggatgatgatagatacttgcgacttgaaaaaattgactgcttgctagttttccaggactatattcgggacttggagaaagaagaagaggaacaaaaaagaatacagaaggatcaaatccgtcggggtgaaaggaaaaaccgtgatgcatttcgcaagttgcttgaagaacatgttgctgctggaattcttactgctaaaactcaatggcatgaatattgcttgaaggtcagggatttacctcaatatcaagctgttgcgtcaaatacatctggttccactccaaaagatttgtttgaggatgctgcagaggatcttgaaaaacagtatcatgaagacaagacgctcataaaagatacaattaagtcaggcaagatcactgtagtgactacatcagtatttgaagagtttaaggttgctgtcttggaagaagctgcatgccaaacaatatccgagatcaatttgaagcttatattcgaagagttgttagagagagccaaggagaaggaggagaaagaagccgagaagcgccaacgccttgctgatgactttactaacctgttatatacattcaaggatattactgcttcctcaaaatgggaggattgcaagtctctttttgaggaggctcaagagtacaggtcaattggagacgaaagctatagtagagaaatttttgaggaatacatcacatacttgaaggaaaaagctaaagagaaggaacgcaagcgtgaagaggaaaaggct

SEQ ID NO: 20184 - protein, 628 aa, Glycine max
STVWKEFTSEGRKYYYNKVTQQSTWSIPEELKLAREQAQKAANQGMQSETNDTSNAAVSSTATPTPTPTAVNAASLNTSLTSNHSNGLASSPSSVTPIAATDSQQSVSGLSGSSVSHSIVTPSTTGVEPSTVVTTSAAPTIVAGSSGLAENSPQQSKMPPLVENQASQDFASVNGSSLQDIEEAKRSLPVVGKNNVVPPEEKTNDDETLVYANKLEAKLAFKALLESVNVQSDWTWEQAMREIINDKRYNALKTLGERKQAFNEYLGQRKKLEAEERRMKQKRAREEFTKMLEECKELTSSMRWSKAISMFENDERFNAVERLRDREDLFESYMVELERKEKENAAEEHRRNIAEYRKFLESCDYVKANSHWRKIQDRLEDDDRYLRLEKIDCLLVFQDYIRDLEKEEEEQKRIQKDQIRRGERKNRDAFRKLLEEHVAAGILTAKTQWHEYCLKVRDLPQYQAVASNTSGSTPKDLFEDAAEDLEKQYHEDKTLIKDTIKSGKITVVTTSVFEEFKVAVLEEAACQTISEINLKLIFEELLERAKEKEEKEAEKRQRLADDFTNLLYTFKDITASSKWEDCKSLFEEAQEYRSIGDESYSREIFEEYITYLKEKAKEKERKREEEKA

SEQ ID NO: 20185 - protein, 583 aa, Glycine max
MQSETNDTSNAAVSSTATPTPTPTAVNAASLNTSLTSNHSNGLASSPSSVTPIAATDSQQSVSGLSGSSVSHSIVTPSTTGVEPSTVVTTSAAPTIVAGSSGLAENSPQQSKMPPLVENQASQDFASVNGSSLQDIEEAKRSLPVVGKNNVVPPEEKTNDDETLVYANKLEAKLAFKALLESVNVQSDWTWEQAMREIINDKRYNALKTLGERKQAFNEYLGQRKKLEAEERRMKQKRAREEFTKMLEECKELTSSMRWSKAISMFENDERFNAVERLRDREDLFESYMVELERKEKENAAEEHRRNIAEYRKFLESCDYVKANSHWRKIQDRLEDDDRYLRLEKIDCLLVFQDYIRDLEKEEEEQKRIQKDQIRRGERKNRDAFRKLLEEHVAAGILTAKTQWHEYCLKVRDLPQYQAVASNTSGSTPKDLFEDAAEDLEKQYHEDKTLIKDTIKSGKITVVTTSVFEEFKVAVLEEAACQTISEINLKLIFEELLERAKEKEEKEAEKRQRLADDFTNLLYTFKDITASSKWEDCKSLFEEAQEYRSIGDESYSREIFEEYITYLKEKAKEKERKREEEKA

SEQ ID NO: 20186 - protein, 471 aa, Glycine max
MPPLVENQASQDFASVNGSSLQDIEEAKRSLPVVGKNNVVPPEEKTNDDETLVYANKLEAKLAFKALLESVNVQSDWTWEQAMREIINDKRYNALKTLGERKQAFNEYLGQRKKLEAEERRMKQKRAREEFTKMLEECKELTSSMRWSKAISMFENDERFNAVERLRDREDLFESYMVELERKEKENAAEEHRRNIAEYRKFLESCDYVKANSHWRKIQDRLEDDDRYLRLEKIDCLLVFQDYIRDLEKEEEEQKRIQKDQIRRGERKNRDAFRKLLEEHVAAGILTAKTQWHEYCLKVRDLPQYQAVASNTSGSTPKDLFEDAAEDLEKQYHEDKTLIKDTIKSGKITVVTTSVFEEFKVAVLEEAACQTISEINLKLIFEELLERAKEKEEKEAEKRQRLADDFTNLLYTFKDITASSKWEDCKSLFEEAQEYRSIGDESYSREIFEEYITYLKEKAKEKERKREEEKA

SEQ ID NO: 20187 - DNA, 1321 bp, Glycine max
aacgcgcattttagggacaaaattactggtaacatgtcaaaaaatgagattagagagtgctcattgatgacagttggatcaagttactgtggtagcaatcacatcccccaagatccagatgcaagcagggcatcaagcaatggtgtctggactactactttatccgccgagcctgaagctgttagagaccatgtgccgagaacaagtcctcagaatgaaaaagggaaatcggagatgcttgaaccaactacaacttcatcatccggtggctcaggtagtagtcttggaaaaaattgttcgctatctacgagaaaccagggccaaaaaagaaaaggaatagatgtggaagaatctgaggagcaaagtgaggacacagaacttaaatcagcacttggaaacaagtcatctcaacgtgcagggttggctcgaaggaaccgcgctgctgaagtgcataatctatctgaaaggagaaggagagaccggatcaatgagaagatgaaggcattgcaacaactcatacctcacagtagcaagacagacaaagcatcaatgttggaagaggcaatcgaatacttgaaatcacttcagttacaacttcagctaatgtggatgggatctggcatggcaccaattatgtttccaggaattcagcactatatgtcacaaatgggtatgggaatggctacaccgcctttccctcctattcacaatccgatgcaattaccgagactgccgcttgatcagtctgtatctgcgtctcagacaccaaaccagacattaatgagccaaaatcctattttgggtgcctttaattaccacaatcagatgcaaaatccagctctttcagagcaatatgcgcgttacatgggctatcatcttatgcaaaatgcctctcagccaatgaatgtattcagatatggtccccagggggtacggcatagtcaaacaatgattacacccagcaacagcagtggaaacatgagtggagcagcaaatattgatgaggctgtgagtggcaaaatgggttaattagtttcaaagcatgcttttgagtacctatggcgtaactaacaagataattgcaagatgatagaagcccttgtaaggcttgtatgctttcacaatatgtctgcctgttcatacagtggctgatctacagttatgtgagggtctagggtcagcacttgtacttccttatttttttaaaaattaattaaatttgtaaataaaattttatacttttatattttatttcatctatatttatataattgaacccactgattttattttttataatttacatccatcgatttaaggt

SEQ ID NO: 20188 - protein, 342 aa, Glycine max
NAHFRDKITGNMSKNEIRECSLMTVGSSYCGSNHIPQDPDASRASSNGVWTTTLSAEPEAVRDHVPRTSPQNEKGKSEMLEPTTTSSSGGSGSSLGKNCSLSTRNQGQKRKGIDVEESEEQSEDTELKSALGNKSSQRAGLARRNRAAEVHNLSERRRRDRINEKMKALQQLIPHSSKTDKASMLEEAIEYLKSLQLQLQLMWMGSGMAPIMFPGIQHYMSQMGMGMATPPFPPIHNPMQLPRLPLDQSVSASQTPNQTLMSQNPILGAFNYHNQMQNPALSEQYARYMGYHLMQNASQPMNVFRYGPQGVRHSQTMITPSNSSGNMSGAANIDEAVSGKMG

SEQ ID NO: 20189 - protein, 331 aa, Glycine max
MSKNEIRECSLMTVGSSYCGSNHIPQDPDASRASSNGVWTTTLSAEPEAVRDHVPRTSPQNEKGKSEMLEPTTTSSSGGSGSSLGKNCSLSTRNQGQKRKGIDVEESEEQSEDTELKSALGNKSSQRAGLARRNRAAEVHNLSERRRRDRINEKMKALQQLIPHSSKTDKASMLEEAIEYLKSLQLQLQLMWMGSGMAPIMFPGIQHYMSQMGMGMATPPFPPIHNPMQLPRLPLDQSVSASQTPNQTLMSQNPILGAFNYHNQMQNPALSEQYARYMGYHLMQNASQPMNVFRYGPQGVRHSQTMITPSNSSGNMSGAANIDEAVSGKMG

SEQ ID NO: 20190 - protein, 320 aa, Glycine max
MTVGSSYCGSNHIPQDPDASRASSNGVWTTTLSAEPEAVRDHVPRTSPQNEKGKSEMLEPTTTSSSGGSGSSLGKNCSLSTRNQGQKRKGIDVEESEEQSEDTELKSALGNKSSQRAGLARRNRAAEVHNLSERRRRDRINEKMKALQQLIPHSSKTDKASMLEEAIEYLKSLQLQLQLMWMGSGMAPIMFPGIQHYMSQMGMGMATPPFPPIHNPMQLPRLPLDQSVSASQTPNQTLMSQNPILGAFNYHNQMQNPALSEQYARYMGYHLMQNASQPMNVFRYGPQGVRHSQTMITPSNSSGNMSGAANIDEAVSGKMG

SEQ ID NO: 20191 - DNA, 1071 bp, Glycine max
gcttaaaagaaagaaatttcttaaccttaccctcaccctttttatctattgtaactgttgaaagtatttgggccggattgggttaaacaaaggacatagaaagaagggtgttgctcactggtgagtggtgaatggtgatctcatctcagtgcaatcctccgtagcatatattcattctctcatagttataaataatcccgaatcgaggtgtcggttttgaaaagagttaacagtctcttctcttctcttcgctcctccacttgtttgcccttcatggcggcatctcaggcaagccttctccttcaaaagcagctcaaagatctttgcaaaaaccccgtcgacggcttctctgccggtttggtcgatgaaaccaacattttcgaatggagtgtcaccataattggaccgcccgatactctttacgaggggggatttttcaatgctattatgagtttcccatccaattacccaaatagtccaccttcagttaagttcacttcagagatatggcatcccaatgtatatcccgatggccgggtttgcatatcaattcttcatcctcctggtgaggatccaaatggttacgagcttgcgagtgagcgctggacacctgttcatacggtagagagtatagtattgagtatcatatcgatgctttccagccctaatgatgaatctcctgcaaatgttgaagctgcaaaagagtggagagataggagagatgatttcaagaaaaaggttagccgatgtgtaaggaagtcacaagaaatgttgtgatttgtcgcctacgcctcatactgctgctgctttttctgaactggaggacatataaatgtgtaatggattggttctcctgttactgttgatccgtataagaatcgcattggaagtccacattcctcctttcttcagttccatcatgttctctgcatggccatttatcataacttggaaaacaaactgtattctaagtgtttttggccggtctttttgactactttattgaaaaatttactttgttcattcgcataaaagtttatattggatttcttatctaaaaaaaggtttatt

SEQ ID NO: 20192 - protein, 167 aa, Glycine max
MAASQASLLLQKQLKDLCKNPVDGFSAGLVDETNIFEWSVTIIGPPDTLYEGGFFNAIMSFPSNYPNSPPSVKFTSEIWHPNVYPDGRVCISILHPPGEDPNGYELASERWTPVHTVESIVLSIISMLSSPNDESPANVEAAKEWRDRRDDFKKKVSRCVRKSQEML

SEQ ID NO: 20193 - protein, 109 aa, Glycine max
MSFPSNYPNSPPSVKFTSEIWHPNVYPDGRVCISILHPPGEDPNGYELASERWTPVHTVESIVLSIISMLSSPNDESPANVEAAKEWRDRRDDFKKKVSRCVRKSQEML

SEQ ID NO: 20194 - DNA, 1240 bp, Glycine max
tttcaattttgttttgcacactactatcaattattgggaggtaagggctagaaaacaagttgtatcaattccaattgtggacaccattatacatacatcaaattttgcatgtcacgtgtattcacagtttgaccttagtattcaattattgggaggggaggaaaggaaaacaaagttatttcaattccaattgttgacactactatacatataatttcacatttcatatttgtttatgaatttaatggtgatatgctaacaatataaaatagttttacactttcatccaatcatagatcaccatctacatgacttctacgatagttttgtaaaaatcaacaaacttattacaaattatagattataaatggatgacaatgtaaattagttttacacttttacattgtcaatacatatctttttctctcttcatttattgacattaattttcaattaaatttgcagtttttacctggggcatgtttgatatccaatgatggcacaaagaagatgtgtggtgatgatcatagggcatggtacactagggggtgtcctagcaaatatggttgggctgctctaataggccttgctctttacatcatattcttctcacctggcatgggaactgttccatgggttgtgaactcagagatctatcccttgaggtacagaggggtttgtggaggaatagcatccacaactgtttggatttccaacctcattgtttctgagtccttcttgtccctcacaaaagctctagggacagcatggacattcatgatgtttggaattgtggccattgtggcaatcttctttgtcattatttttgtgcctgagaccaaaggggttcctatggaggaagtggagaagatgctagaacaaagatctgtgcagttcaagttttgggagaagagagattctggctctgagaagcattgactcaaagaacaaaaaaaaaagcaaaattgtttgagtcatttttattagttttatagcttaaaatagtgaaattaagtggcttgtgaagttatggttatttgatgacaatgattgttctctctgggtaagatttggtgatagttagcattttagctctaatgtgtatgtagttgtctagatgattagttggattgatgaaaatccttatgaaattccttagaggattggaatatgagaattggtaataagctcttatttgtgatataatgaagaaaaaaagtgtatcaagaatttgatcttt

SEQ ID NO: 20195 - protein, 142 aa, Glycine max
MCGDDHRAWYTRGCPSKYGWAALIGLALYIIFFSPGMGTVPWVVNSEIYPLRYRGVCGGIASTTVWISNLIVSESFLSLTKALGTAWTFMMFGIVAIVAIFFVIIFVPETKGVPMEEVEKMLEQRSVQFKFWEKRDSGSEKH

SEQ ID NO: 20196 - protein, 106 aa, Glycine max
MGTVPWVVNSEIYPLRYRGVCGGIASTTVWISNLIVSESFLSLTKALGTAWTFMMFGIVAIVAIFFVIIFVPETKGVPMEEVEKMLEQRSVQFKFWEKRDSGSEKH

SEQ ID NO: 20197 - DNA, 1066 bp, Glycine max
agggttttactctcttcgcaattcattctctacattccccccccctctctcaagtctcaaccatgtcttccggaaccctagaaaacgagaaacctcaagtggaagaagaacaagcccaagctgaagacaaccacaccaagcaagaagataattcggagatgaaagacgacgatgacagaggcgaagaggaaagggatcaggtagaacaagagaaggatgtggagaaagaggaagaaaaagaagaagaagaagaagagaaggaggaggaccgtgacgaggtgaagtcaaaaaagtcaacgaaagaaagcggttacgctactccaggaagtgagagaccaactagggagaggaaaacggtggagaggtacactgtttcttcgcccgacaagtttcccagatcttcttccatcaaagctctgtcaattgaaaagggcaacggtacgcagctcaaggacattcctaatgtggctttcacgttatcaaagagaaaagctgatgacaacctgcatgcacttcatagtatattgtttgggaaaaaagcaaaggtacatcatctaaagagaaatataggtctgttttctggctatgtgtggactgagaatgaggaaaaacagagggtgaagataaaggagaagattgacaaatgtgtgaaagaaaagttggtggacttctgtaatgtgcttaatattccgataaataagaccagtaagaagaaggaggaactgtctgcaaagttgttgcaatttttggagtccccacatgctacaactgatgttctgcttgctgataaggaaaagaaaggcaaaaagcgagccagaaagcaaaccccaagcaaatcttctggggaaggatccaaaacatctgccaagaagcaaaagcaaaattcacaagttgggaaaaaccaaaagcagtcttctgacattgaggacagtgatgcagctgaaccttcagatgcaaaagttgattctcaggaagatgatgattcaagtcaaaaaagtgaaagtgataatgaggaaagcatatcagagaaagaggaagataaagaaaaggctcacaaacgtacttc

SEQ ID NO: 20198 - protein, 354 aa, Glycine max
GFTLFAIHSLHSPPLSQVSTMSSGTLENEKPQVEEEQAQAEDNHTKQEDNSEMKDDDDRGEEERDQVEQEKDVEKEEEKEEEEEEKEEDRDEVKSKKSTKESGYATPGSERPTRERKTVERYTVSSPDKFPRSSSIKALSIEKGNGTQLKDIPNVAFTLSKRKADDNLHALHSILFGKKAKVHHLKRNIGLFSGYVWTENEEKQRVKIKEKIDKCVKEKLVDFCNVLNIPINKTSKKKEELSAKLLQFLESPHATTDVLLADKEKKGKKRARKQTPSKSSGEGSKTSAKKQKQNSQVGKNQKQSSDIEDSDAAEPSDAKVDSQEDDDSSQKSESDNEESISEKEEDKEKAHKRT

SEQ ID NO: 20199 - protein, 334 aa, Glycine max
MSSGTLENEKPQVEEEQAQAEDNHTKQEDNSEMKDDDDRGEEERDQVEQEKDVEKEEEKEEEEEEKEEDRDEVKSKKSTKESGYATPGSERPTRERKTVERYTVSSPDKFPRSSSIKALSIEKGNGTQLKDIPNVAFTLSKRKADDNLHALHSILFGKKAKVHHLKRNIGLFSGYVWTENEEKQRVKIKEKIDKCVKEKLVDFCNVLNIPINKTSKKKEELSAKLLQFLESPHATTDVLLADKEKKGKKRARKQTPSKSSGEGSKTSAKKQKQNSQVGKNQKQSSDIEDSDAAEPSDAKVDSQEDDDSSQKSESDNEESISEKEEDKEKAHKRT

SEQ ID NO: 20200 - protein, 302 aa, Glycine max
MKDDDDRGEEERDQVEQEKDVEKEEEKEEEEEEKEEDRDEVKSKKSTKESGYATPGSERPTRERKTVERYTVSSPDKFPRSSSIKALSIEKGNGTQLKDIPNVAFTLSKRKADDNLHALHSILFGKKAKVHHLKRNIGLFSGYVWTENEEKQRVKIKEKIDKCVKEKLVDFCNVLNIPINKTSKKKEELSAKLLQFLESPHATTDVLLADKEKKGKKRARKQTPSKSSGEGSKTSAKKQKQNSQVGKNQKQSSDIEDSDAAEPSDAKVDSQEDDDSSQKSESDNEESISEKEEDKEKAHKRT

SEQ ID NO: 20201 - DNA, 1407 bp, Glycine max
agagtgatagtgagagtgagtgagtggcgaaacccgctcacaattttggcatgaaattttgaaaagcacacagcacacagcacactttcaagtttcacccttaagcgcgccctctcatcaaactccaattttcattcatttcgcgattccctcctttctttctctctctattctaattctaattccaatcacaaccagattctattcccttccttccaattctagggtttctctctccgctagggttcccaatttctctcccccttcccaccaaaaacatggccaccgaaaccctagaagacaccaagcctcccctccaggacgacgaccgtgcgaaatcggagattcccgagaaagacgcttcctcggacgacgccgcggcaaaatcccgggacgcgaatgccggcgacaaagacggagcatctgacaatcaggaagtagaagagaaagacgccgctgaggagaagaaagaagagatcgacgaagacgaagaagaagaggaagacgaagtggaagagaaagagaagggtaagggtaagaagagtaagaaggatccagttacaccggcgccgagtgagaggcccacgagggagaggaaaacggtggagcgcttctctgtgccctcgccggctaagtctgcaaggtcctccgctagtaaaggtttgataattgaaaagggacgtggcacgcagctcaaggatatcccaaacgtggctttcaagttgtcaaagagaaaacctgatgacaatctgcatatgcttcatactttactgtttggaaagaaaacaaaggcacacaatttaaagagaaatataggccagttttctggttatgtgtggactgaaaatgaggacaaacagagggccaaggtaaaggaaaggattgacaaatttgtcaaagaaaagttgttggacttctgtgatgttcttaatattcaaataaacaagaccaatatgaagaaggaggagctgtcagcaaagttgttggaatttttggagtcccctcatgctacaactgatattctacttgctgataaagaacagaaaggtaaaaagagaaccagaaagtcagtccctagcaaatctcctggggaagcatctacagagacacctgccaagaagcaaaaacaaacttcccaatctgggaaaaagcaaaaaccgtcttctgatgatgaggaggatgataaagctgaactttcagatgcaaaagatgtttctcaggaagatgaagatgttgcagtaccgaacaatgaaagtgatgatgaaagaagtaaatcagaggaacagaaagagaaatcaaagtctcacaagcgtacttccaaaaaatctgttaaagagaattcagttagcaaagctgatagaacctcatctgccaagaagacccctgttaaagatgccaagagcattg

SEQ ID NO: 20202 - protein, 376 aa, Glycine max
MATETLEDTKPPLQDDDRAKSEIPEKDASSDDAAAKSRDANAGDKDGASDNQEVEEKDAAEEKKEEIDEDEEEEEDEVEEKEKGKGKKSKKDPVTPAPSERPTRERKTVERFSVPSPAKSARSSASKGLIIEKGRGTQLKDIPNVAFKLSKRKPDDNLHMLHTLLFGKKTKAHNLKRNIGQFSGYVWTENEDKQRAKVKERIDKFVKEKLLDFCDVLNIQINKTNMKKEELSAKLLEFLESPHATTDILLADKEQKGKKRTRKSVPSKSPGEASTETPAKKQKQTSQSGKKQKPSSDDEEDDKAELSDAKDVSQEDEDVAVPNNESDDERSKSEEQKEKSKSHKRTSKKSVKENSVSKADRTSSAKKTPVKDAKSI

SEQ ID NO: 20203 - protein, 217 aa, Glycine max
MLHTLLFGKKTKAHNLKRNIGQFSGYVWTENEDKQRAKVKERIDKFVKEKLLDFCDVLNIQINKTNMKKEELSAKLLEFLESPHATTDILLADKEQKGKKRTRKSVPSKSPGEASTETPAKKQKQTSQSGKKQKPSSDDEEDDKAELSDAKDVSQEDEDVAVPNNESDDERSKSEEQKEKSKSHKRTSKKSVKENSVSKADRTSSAKKTPVKDAKSI

SEQ ID NO: 20204 - DNA, 1553 bp, Glycine max
aaattttcaagtcccagcctatggactctgcttcattcgctcatcctttgatttcccacgtcatcactagctcaagcttgcatcgttcctacggtattcatcacagtgcaagactaggcctatggaagaacaaagtctggaactcagcttgttgtgctgctggagtagaagacttgtttgacgatagtaatttgaagagaaatgagaatggttccctcttagtgatgccgaaggtgatccagattgtccctctaaaggctactcttccattgaacgagcgcttaatgcattacgccaaggcaagtttgtgattgtggtagatgatgaaaacggcgatattgaaggaaatcttatcatggctgcatctcttactagtcccaaggatattgccttcatgattaagcacggatcagggatcgtttctgttggcatgaaagaggaggatcttcaaagactgaacctccctttaatgtcaccagagactgaagatgaggactcttctgctcccaccttcactatcacagtggatgtgaaatctggaacttctacgggtgtatcagctgctgatagagcgaaaactgttcttgctctgtcatctcctgagtccaaatcagaggatttcagaaaaccgggtcatgtgtttcctcttaagtacagaaatggtggggttcttagaagagcaggtcacactgaggcctcactggacttagttgcactggctggcttgcccccaatttctgttctttcggctcttgttgatgaaaatgatggctctatgcaatctttgctcaatttaagaaagttagcatcggaatacaccttaccaattgtctcaataactgatttgataaggtatcggagaaagagagaaaaattggttgaaagaacctcagtttctcgcctgcctactaaatggggcctatttcaagcatattgctacagctcaaagttggatggaactgaacatgtggctgttgtaaagggagatatgggagatggacaagatgtgctagtacgagtacattcagaatgtttaactggggatatatttggatcagctcggtgtgactgtggcaaccagttagatttggcaatgcggttaatagaagaagcaggtaggggagtagttgtgtatcttcgaggtcatgagggaagaggcattggccttggtcacaaacttaaagcgtataatttgcaggatcaaggtcatgacacggtccaagcaaacatagaactcggcttagctgttgatgctcgtgaatatgggattggtgcacagattttgagggatataggagttcgaacaatgcggcttatgacaaacaacccagcaaagtttgttggtcttaaaggatatggtttggcagtggtagggcgagttcctgtgttgacaccaatcacagaggaaaacaagagatacctggaaacaaaaaggaccaaaatgggtcatatttatggctctgatttacaaggatcattacctggattcaacggttctactgtaaataacggagactcactggagaacacatagtctacacaaaaacttacag

SEQ ID NO: 20205 - protein, 392 aa, Glycine max
MAASLTSPKDIAFMIKHGSGIVSVGMKEEDLQRLNLPLMSPETEDEDSSAPTFTITVDVKSGTSTGVSAADRAKTVLALSSPESKSEDFRKPGHVFPLKYRNGGVLRRAGHTEASLDLVALAGLPPISVLSALVDENDGSMQSLLNLRKLASEYTLPIVSITDLIRYRRKREKLVERTSVSRLPTKWGLFQAYCYSSKLDGTEHVAVVKGDMGDGQDVLVRVHSECLTGDIFGSARCDCGNQLDLAMRLIEEAGRGVVVYLRGHEGRGIGLGHKLKAYNLQDQGHDTVQANIELGLAVDAREYGIGAQILRDIGVRTMRLMTNNPAKFVGLKGYGLAVVGRVPVLTPITEENKRYLETKRTKMGHIYGSDLQGSLPGFNGSTVNNGDSLENT

SEQ ID NO: 20206 - protein, 379 aa, Glycine max
MIKHGSGIVSVGMKEEDLQRLNLPLMSPETEDEDSSAPTFTITVDVKSGTSTGVSAADRAKTVLALSSPESKSEDFRKPGHVFPLKYRNGGVLRRAGHTEASLDLVALAGLPPISVLSALVDENDGSMQSLLNLRKLASEYTLPIVSITDLIRYRRKREKLVERTSVSRLPTKWGLFQAYCYSSKLDGTEHVAVVKGDMGDGQDVLVRVHSECLTGDIFGSARCDCGNQLDLAMRLIEEAGRGVVVYLRGHEGRGIGLGHKLKAYNLQDQGHDTVQANIELGLAVDAREYGIGAQILRDIGVRTMRLMTNNPAKFVGLKGYGLAVVGRVPVLTPITEENKRYLETKRTKMGHIYGSDLQGSLPGFNGSTVNNGDSLENT

SEQ ID NO: 20207 - protein, 367 aa, Glycine max
MKEEDLQRLNLPLMSPETEDEDSSAPTFTITVDVKSGTSTGVSAADRAKTVLALSSPESKSEDFRKPGHVFPLKYRNGGVLRRAGHTEASLDLVALAGLPPISVLSALVDENDGSMQSLLNLRKLASEYTLPIVSITDLIRYRRKREKLVERTSVSRLPTKWGLFQAYCYSSKLDGTEHVAVVKGDMGDGQDVLVRVHSECLTGDIFGSARCDCGNQLDLAMRLIEEAGRGVVVYLRGHEGRGIGLGHKLKAYNLQDQGHDTVQANIELGLAVDAREYGIGAQILRDIGVRTMRLMTNNPAKFVGLKGYGLAVVGRVPVLTPITEENKRYLETKRTKMGHIYGSDLQGSLPGFNGSTVNNGDSLENT

SEQ ID NO: 20208 - DNA, 1344 bp, Glycine max
aaaccaaaccaaaccaaacctctctttctcagtttctctctcttagggttttctcctcccccattgacccaccgtccatcgcaaaggaagtcgcgcccaatttccatggtttgtagattaaatcttaaagcagtaagtcatcatggataaatcagagcagactcagcagcaacatcagcatgggatgggcgttgccacaggtgctagccaaatggcctattcttctcactacccgactgctcccatggtggcttctggcacgcctgctgtagctgttccttccccaactcaggctccagctgccttctctagttctgctcaccagcttgcataccagcaagcacagcatttccaccaccaacagcagcaacaccaacaacagcagcttcaaatgttctggtcaaaccaaatgcaagaaattgagcaaacaattgactttaaaaaccacagtcttcctcttgctcggataaaaaagataatgaaagctgatgaagatgtccggatgatttctgcagaagctccagtcatatttgcaaaagcatgtgaaatgttcatattagagttgacgttgagatcttggatccacacagaagagaacaagaggagaactctacaaaagaatgatatagcagctgctatttcgagaaacgatgtttttgatttcttggttgatattatcccaagagatgagttgaaagaggaaggacttggaataaccaaggctactattccattggtgaattctccagctgatatgccatattactatgtccctccacagcatcctgttgtaggacctcctgggatgatcatgggcaagcccgttggtgctgagcaagcaacgctgtattctacacagcagcctcgacctcccatggcgttcatgccatggccccatacacaaccccagcaacagcagccaccccaacatcaacaaacagactcatgatgacaatgcaattcaattaggtcggaaagtagcatgcaccttatgattattacaaatttacttaatgcctttaagtcagctgtagtttagtgttttgcattgaaaaatgccaaagattgtttgaggtttcttgcactcatttatgattgtatgagctcttatgctgagttacttttggttgtgtttatttgaggtactggtgtggtagttaaattagtttgtagctgtccataagtaaacagcgtagctgcttaattaggaggtctgaaatgatgaaatagtttgtattgttattgcagaaggtaggttttattcagtatttcattctattgcaatggctgaatttaatgctcatccgcttagtaccaaaaaaaaaaaaaaaaaagaattcgaga

SEQ ID NO: 20209 - protein, 268 aa, Glycine max
MDKSEQTQQQHQHGMGVATGASQMAYSSHYPTAPMVASGTPAVAVPSPTQAPAAFSSSAHQLAYQQAQHFHHQQQQHQQQQLQMFWSNQMQEIEQTIDFKNHSLPLARIKKIMKADEDVRMISAEAPVIFAKACEMFILELTLRSWIHTEENKRRTLQKNDIAAAISRNDVFDFLVDIIPRDELKEEGLGITKATIPLVNSPADMPYYYVPPQHPVVGPPGMIMGKPVGAEQATLYSTQQPRPPMAFMPWPHTQPQQQQPPQHQQTDS

SEQ ID NO: 20210 - protein, 254 aa, Glycine max
MGVATGASQMAYSSHYPTAPMVASGTPAVAVPSPTQAPAAFSSSAHQLAYQQAQHFHHQQQQHQQQQLQMFWSNQMQEIEQTIDFKNHSLPLARIKKIMKADEDVRMISAEAPVIFAKACEMFILELTLRSWIHTEENKRRTLQKNDIAAAISRNDVFDFLVDIIPRDELKEEGLGITKATIPLVNSPADMPYYYVPPQHPVVGPPGMIMGKPVGAEQATLYSTQQPRPPMAFMPWPHTQPQQQQPPQHQQTDS

SEQ ID NO: 20211 - protein, 245 aa, Glycine max
MAYSSHYPTAPMVASGTPAVAVPSPTQAPAAFSSSAHQLAYQQAQHFHHQQQQHQQQQLQMFWSNQMQEIEQTIDFKNHSLPLARIKKIMKADEDVRMISAEAPVIFAKACEMFILELTLRSWIHTEENKRRTLQKNDIAAAISRNDVFDFLVDIIPRDELKEEGLGITKATIPLVNSPADMPYYYVPPQHPVVGPPGMIMGKPVGAEQATLYSTQQPRPPMAFMPWPHTQPQQQQPPQHQQTDS

SEQ ID NO: 20212 - DNA, 1148 bp, Glycine max
agaatcaccattctctgaagccggaatccggcgagattctcagcttcggcgagagcaggagaacctcctacggcggcgtcaatgggaatactaataccaataccaattccaattcccattttttctccggccagtcaccgtttgttgctgctgtggatgaaaacaagaagaataacatgagcaacaacgggaagaaaaggtcaccgaattcgcgtggcagcaacgacgatggaatgctttctttcacctccggcgtgattattccggccacgaatttgaagtccggcggaggcggcgattccgaccactcggatctggaggcttcggtggtgaaggacccggtggtggagccggagaagcggccgcgtaagagagggcggaagccggcgaacggaagagaggaaccattaaaccatgttgaagcagagagacagaggagggagaagctgaaccagagattctacgcgcttcgtgctgtggttcccaacgtgtcaaagatggacaaagcgtcgcttctgggcgacgcgatatcttacatcaccgagctgaagtccaagcttcagaccctcgaatctgataaagatgtattgcataagcagcttgaaggagtgaagaaggaactcgagaaaacaaccgataacgtttcttctaatcacgcgtgtaataataacaataacaacaagttgtcgtcgaatcagccggcgttaattgacttggttgagatggacgtgaagatcattgggtgggacgcgatgataacgatcacatgcagcaagaagaaccaccccgcggcgacgttgatgacggcattgatggagttggacttggacgtgcactacgccaccgtaacgttggtcaacgatttgatgatccaacaagcaacggtgaagatgggaagtagattttacacgcaggagcagcttcgagcggcgctgtcggctaaggttggggatgtacgatgatgttggcactttgcggcagcgttgagattataagtgtgtgtttgtgtcatgttattagctagctatctctttctaagttgtgtgctgctctggggtattttaagccttcccggtagctgtttctgtaaaattttaagattttatttttctttattgggcagcttagtattgaattttgaggtaatc

SEQ ID NO: 20213 - protein, 319 aa, Glycine max
NHHSLKPESGEILSFGESRRTSYGGVNGNTNTNTNSNSHFFSGQSPFVAAVDENKKNNMSNNGKKRSPNSRGSNDDGMLSFTSGVIIPATNLKSGGGGDSDHSDLEASVVKDPVVEPEKRPRKRGRKPANGREEPLNHVEAERQRREKLNQRFYALRAVVPNVSKMDKASLLGDAISYITELKSKLQTLESDKDVLHKQLEGVKKELEKTTDNVSSNHACNNNNNNKLSSNQPALIDLVEMDVKIIGWDAMITITCSKKNHPAATLMTALMELDLDVHYATVTLVNDLMIQQATVKMGSRFYTQEQLRAALSAKVGDVR

SEQ ID NO: 20214 - protein, 261 aa, Glycine max
MSNNGKKRSPNSRGSNDDGMLSFTSGVIIPATNLKSGGGGDSDHSDLEASVVKDPVVEPEKRPRKRGRKPANGREEPLNHVEAERQRREKLNQRFYALRAVVPNVSKMDKASLLGDAISYITELKSKLQTLESDKDVLHKQLEGVKKELEKTTDNVSSNHACNNNNNNKLSSNQPALIDLVEMDVKIIGWDAMITITCSKKNHPAATLMTALMELDLDVHYATVTLVNDLMIQQATVKMGSRFYTQEQLRAALSAKVGDVR

SEQ ID NO: 20215 - protein, 242 aa, Glycine max
MLSFTSGVIIPATNLKSGGGGDSDHSDLEASVVKDPVVEPEKRPRKRGRKPANGREEPLNHVEAERQRREKLNQRFYALRAVVPNVSKMDKASLLGDAISYITELKSKLQTLESDKDVLHKQLEGVKKELEKTTDNVSSNHACNNNNNNKLSSNQPALIDLVEMDVKIIGWDAMITITCSKKNHPAATLMTALMELDLDVHYATVTLVNDLMIQQATVKMGSRFYTQEQLRAALSAKVGDVR

SEQ ID NO: 20216 - DNA, 1282 bp, Glycine max
atttaatcttttattatgaatcacgtggtcattttgaagaattgattgaattattagagaaaggattgggattggaacgtgcacataccggtatctttaccgaattaggtgtattgtatgccaaatacaaaccagaaaacttgatgaagcacattcaaatgtactatcgtcgtagtaacattccaaaattattaaatgcatgtgaaatggctcatttatgggctgaaatgagattcttgtactgtcatcatgatgaatatgataatgcaatcaaattaatgattgaacattcacctgaagcatgggatcatgcaatctttattgataccattactaaagaatctttaatcaatattgaattgtactacaaggccattcaattctacttggatgagcaaccatcacacattactgacttgttaacacacttgacaccaaaattagatcatgaacgtgttgcacgtgaagtgaaaaatcgtgatcgtgacaatctccctctcattaagaagtatttggagaatgttcaagaaaatgatttgactcaagtcaatgaagtgttaaatcaattgtacattgatgaagaagattacgaatcgttacgtcaatctattgacaagtatcgtaactttgatcaaagtggtttagccaagcaattggagaaccatgagttgttagaattcagacgcatcagtgcctacttgtataaactaaataaacaatgggaaaattctattagtttgagcaagaaggattcattatacttggatgcaatggaaactgctgcacaaagcaagaaacaaagtgttgctgaggatttactcacattctttgttgaaaagggtctaaaagactgctttgctgcatgcttgtacaattgttacaatttgattagagctgatgttgctatggaattggcatggcgtcacaagattcaagacatgagcatgccatacatgattcaagtagtacgtgagtacactagcaaagttgatgaactatatcaagcacaaaaagagttacaagaacaacaaaaggcacttgaagaagctaagaagaagcaaatggaaagtgttgataactatggtatggatgcaggtgcatacacttatgtaccatctacttatatgcctgcacaaacaattgttgctccaatgggttacatgccttatggatctacaattcctcaacaacaacaaatgcctcaacaatatagcggaatggatatgaaccaaggtgctcaattcttttaaataaaattataataaaaaaggtttaacaattt

SEQ ID NO: 20217 - protein, 415 aa, Glycine max
LIFYYESRGHFEELIELLEKGLGLERAHTGIFTELGVLYAKYKPENLMKHIQMYYRRSNIPKLLNACEMAHLWAEMRFLYCHHDEYDNAIKLMIEHSPEAWDHAIFIDTITKESLINIELYYKAIQFYLDEQPSHITDLLTHLTPKLDHERVAREVKNRDRDNLPLIKKYLENVQENDLTQVNEVLNQLYIDEEDYESLRQSIDKYRNFDQSGLAKQLENHELLEFRRISAYLYKLNKQWENSISLSKKDSLYLDAMETAAQSKKQSVAEDLLTFFVEKGLKDCFAACLYNCYNLIRADVAMELAWRHKIQDMSMPYMIQVVREYTSKVDELYQAQKELQEQQKALEEAKKKQMESVDNYGMDAGAYTYVPSTYMPAQTIVAPMGYMPYGSTIPQQQQMPQQYSGMDMNQGAQFF

SEQ ID NO: 20218 - protein, 368 aa, Glycine max
MKHIQMYYRRSNIPKLLNACEMAHLWAEMRFLYCHHDEYDNAIKLMIEHSPEAWDHAIFIDTITKESLINIELYYKAIQFYLDEQPSHITDLLTHLTPKLDHERVAREVKNRDRDNLPLIKKYLENVQENDLTQVNEVLNQLYIDEEDYESLRQSIDKYRNFDQSGLAKQLENHELLEFRRISAYLYKLNKQWENSISLSKKDSLYLDAMETAAQSKKQSVAEDLLTFFVEKGLKDCFAACLYNCYNLIRADVAMELAWRHKIQDMSMPYMIQVVREYTSKVDELYQAQKELQEQQKALEEAKKKQMESVDNYGMDAGAYTYVPSTYMPAQTIVAPMGYMPYGSTIPQQQQMPQQYSGMDMNQGAQFF

SEQ ID NO: 20219 - protein, 363 aa, Glycine max
MYYRRSNIPKLLNACEMAHLWAEMRFLYCHHDEYDNAIKLMIEHSPEAWDHAIFIDTITKESLINIELYYKAIQFYLDEQPSHITDLLTHLTPKLDHERVAREVKNRDRDNLPLIKKYLENVQENDLTQVNEVLNQLYIDEEDYESLRQSIDKYRNFDQSGLAKQLENHELLEFRRISAYLYKLNKQWENSISLSKKDSLYLDAMETAAQSKKQSVAEDLLTFFVEKGLKDCFAACLYNCYNLIRADVAMELAWRHKIQDMSMPYMIQVVREYTSKVDELYQAQKELQEQQKALEEAKKKQMESVDNYGMDAGAYTYVPSTYMPAQTIVAPMGYMPYGSTIPQQQQMPQQYSGMDMNQGAQFF

SEQ ID NO: 20220 - DNA, 1425 bp, Glycine max
attcagtcttacacgggttcagggaagacattggcttatctgcttcctatactttcagttgttgggccgctgagggggaaaactcctgaaggcaacagtgatggtggggagagtgggaagaagttgggaattgaagcagtgattgttgctccttctagggagcttggaatgcagatagtgagggagtttgagaaggtgctaggaatggataacaagagagtggttcagcagcttgtggggggtgcaaaccgaaccaggcaggaagatgctctcaagaaaaataagcctgcaattgttgttggcacacctggtaggatagctgagctcagtgcatccgggaaacttcgcactcatggctgtcgatatttggtattagatgaagttgatgaactcttgtcattcaatttccgggaagacatgcaccggatattggagcatgtagggaggagatcaggtgcagacccaaactcagattctagaaaggctgaacgtcagttaattatggtttctgcaactgtgccgttttctgttgtaagggcagctaggagctggggttgtgacccacttcttgtccaagctaacaaagttgccccacttgaaactgtctctccctctgaacccatcagtttgtctcggtcttcacccagctcaagccctagctcggctatgccatctccggcagcagtagagagtctacctcctgcattgaaacactattactttgtaacaagggtgcagcacaaagttgatgtgttgagaaggtgtattcatgcactggatgccaaatttgtgatagctttcatgaaccatactaagcagctaaaggatgttgtcttcaagctggaggcccgtgggatgaaagccatggagttacatggggatcttgggaagctagctaggtcaacaactctgaagaaattcaaaaatggtgaggtgagagttctggttacaaatgaattatcagcaaggggtttggatgtggcagaatgtgatcttgtggttaatctagacttaccgacagattcaattcactatgcacaccgagctggccgaactggtcggctaggtaggaatggtacagtggtaaccatatgtgaagagtcagaagtgtttgttgtaaagaaattgcagaagcagctagcaataccaattgcagcctgtgattttgcagaggggaagtttctcgtcactgaggaagagaaaacagtaagcacttctcaaagatgaggtgttatatttttgctacttgtttaggcaacaatgcagtttccatgctccatgttttattcttcatattgcttcttacctattgtacttattgacaatacatgagtacacattagaagcttccttgcattcccttgagtcatgaattggaaatcttatgtctatgtggcactgcaataaaatctattattttttaag

SEQ ID NO: 20221 - protein, 408 aa, Glycine max
IQSYTGSGKTLAYLLPILSVVGPLRGKTPEGNSDGGESGKKLGIEAVIVAPSRELGMQIVREFEKVLGMDNKRVVQQLVGGANRTRQEDALKKNKPAIVVGTPGRIAELSASGKLRTHGCRYLVLDEVDELLSFNFREDMHRILEHVGRRSGADPNSDSRKAERQLIMVSATVPFSVVRAARSWGCDPLLVQANKVAPLETVSPSEPISLSRSSPSSSPSSAMPSPAAVESLPPALKHYYFVTRVQHKVDVLRRCIHALDAKFVIAFMNHTKQLKDVVFKLEARGMKAMELHGDLGKLARSTTLKKFKNGEVRVLVTNELSARGLDVAECDLVVNLDLPTDSIHYAHRAGRTGRLGRNGTVVTICEESEVFVVKKLQKQLAIPIAACDFAEGKFLVTEEEKTVSTSQR

SEQ ID NO: 20222 - protein, 352 aa, Glycine max
MQIVREFEKVLGMDNKRVVQQLVGGANRTRQEDALKKNKPAIVVGTPGRIAELSASGKLRTHGCRYLVLDEVDELLSFNFREDMHRILEHVGRRSGADPNSDSRKAERQLIMVSATVPFSVVRAARSWGCDPLLVQANKVAPLETVSPSEPISLSRSSPSSSPSSAMPSPAAVESLPPALKHYYFVTRVQHKVDVLRRCIHALDAKFVIAFMNHTKQLKDVVFKLEARGMKAMELHGDLGKLARSTTLKKFKNGEVRVLVTNELSARGLDVAECDLVVNLDLPTDSIHYAHRAGRTGRLGRNGTVVTICEESEVFVVKKLQKQLAIPIAACDFAEGKFLVTEEEKTVSTSQR

SEQ ID NO: 20223 - protein, 340 aa, Glycine max
MDNKRVVQQLVGGANRTRQEDALKKNKPAIVVGTPGRIAELSASGKLRTHGCRYLVLDEVDELLSFNFREDMHRILEHVGRRSGADPNSDSRKAERQLIMVSATVPFSVVRAARSWGCDPLLVQANKVAPLETVSPSEPISLSRSSPSSSPSSAMPSPAAVESLPPALKHYYFVTRVQHKVDVLRRCIHALDAKFVIAFMNHTKQLKDVVFKLEARGMKAMELHGDLGKLARSTTLKKFKNGEVRVLVTNELSARGLDVAECDLVVNLDLPTDSIHYAHRAGRTGRLGRNGTVVTICEESEVFVVKKLQKQLAIPIAACDFAEGKFLVTEEEKTVSTSQR

SEQ ID NO: 20224 - DNA, 1695 bp, Glycine max
tgatgtctgatttaatttgcattggtttagaggaacatagtccgaggaacagccaccacatgtatggcagggagttccgatcgatgttggacggactcgacgaggaagggtgtgttgaagaaccggggcatcaatctgagaagaagcgtcgactaagtgtggaacaagtgaaggctttggagaagaactttgaggttgaaaacaagcttgaacctgagaggaaggtcaagcttgcccaagaacttgggttgcaacctagacaagtagccgtttggttccaaaaccgccgagccagatggaaaaccaaacaattggagagagattatggtgtcctcaaagccaattatgatgctcttaagcttaactttggcaccctcaatcaggacaacgaagccttacgaaagcaggtagaataataatacaacatagtataatatttagaagaattgattttgagtctaattaattttaaattaaaaagtataggtgaattttgagtgagaaaacaaacttcatgctgaattttcctattaattttttttctgggtcgtgcctttcaatctagaaactatgctcgatggatttaacctcatgcttgaaatgatcagtagttttctaattaagagctttcttctcttaatctaatttctttttaataataaagaaaaacttttgttgagaaacgatttatttaacaagaaaaatttatatttgattatctctaaattaagtgtaaaaccgtgatctaaaaaaaactcaatcaactcaatactctcatagtgtatatagtgttagttgagagtgagtggattttgaaattggattgtgtttgcagataaaggaattgaaatcgaggctgctgcaagaagagaacacagcaggaagcggtgtttcggtgaaggaagaagagataacaacgatgcctgcagactcagaagagaaaacgatggaacaaagtaagagtgacccaccttctgaaacctcgaacattaatcctagttcggagtcgtcggaggaggaccacttgaattacgaatgtttcaacaacaacagcgacgactgtgtcgtcggaggatccgccgcagcatcgctcttgcaagtggacttcatgaaagacggttcttccgacagcgacggatcaagcgcgatcttgaacgaagacaccatgtacttgccgtcttcgatgaactgttttcagttccagaaaccgtatcatcacgcgcagtacgtgaagacggaggagcacaatttcttgagcgccgatgaggcctgcaatttcttctccgatgaacaagcaccgaccctgcaatggtactgtccagaacagtggagctgagatagaagaaacatgggaaaattggaaaccgctttcagaaatttttgtttaatatgttgcacggttgtgttgaacacagctcattgaggtaaaagttgtaaaaaaaggttgccacttgccaacagaggctgcttgaaggtagaaaatgaaacactgtgcagaagatagagttacgaaagagagaacagagatcaatggctgcatggcgtggggtcggagatgaaggatgacgattaaggttaattattactctcgatcgtgggtaatatcaataattattcaatcgtaaagcaaaccatgctgtaaaaaacaaatttcaattcaagtatagaataacgatgtagtactttatcaaacag

SEQ ID NO: 20225 - protein, 138 aa, Glycine max; identical to SEQ ID NO: 17436

SEQ ID NO: 20226 - protein, 137 aa, Glycine max
MSDLICIGLEEHSPRNSHHMYGREFRSMLDGLDEEGCVEEPGHQSEKKRRLSVEQVKALEKNFEVENKLEPERKVKLAQELGLQPRQVAVWFQNRRARWKTKQLERDYGVLKANYDALKLNFGTLNQDNEALRKQVE

SEQ ID NO: 20227 - protein, 129 aa, Glycine max; identical to SEQ ID NO: 17437

SEQ ID NO: 20228 - DNA, 1813 bp, Glycine max
ggctcgttcgtttacctcaaacctcaaagaaaaaaaaaaacattgagttatcacttgttttcttttttgggaagacaaaaacattgagttcagcttctcacttccatggctgaggccagactctacgctcccccctctcaattggatattaagcaaattattttagaagcacagcatcgatggctacgtccggctgaaatttgtgcaattctcggtaattataagaagtttcgaattgctccagaacctgcacatatgccaccaagtggttcacttttcttatttgatcggaaggtgctgagacacttcagaaaggatggccataactggaggaagaaaaaagatggaaaaacagtgagagaagctcatgagagactaaaggctggaagtgtggatgtgttgcattgctactatgcccatggagaagaaaatgaaaattttcaaagacgcacgtattggttgcttgaagaggaactctctcacattgttctcgtccattatcgacaagtgaagggaaccaaggcgaattttacaagtgctaaagaaaatgaagaatctcttccttatgctcaacaaactgataaaattatgccccaaacagagatggacacttctttatcatctactcttcatccacatagttaccaggttccttcaaaaactgtcgatacaagcatgaacagtgcccaaacatcagaatatgaagaagctgaatctggtatttcttttgtgcgcattaataatttaaaatgttctgttttcaatttttcatatctagagggcattctgagtagcctttttgttgactttgttcttcgtatcactttcttgtgtgtatttaaattttttaactgtgtaatttttacagcattcaataaccatgcaagttctgagttttattctttcctcgagttacaacgccctgttgagaagatttcacctcaacctgctgatttttattctcctcggccactcataagtaaatttcttcattttaaattgtttttgagtttaactttgatgcattgtcagtttgtcactgtaaatttacattaccactctgtcatacattgtcgtatcattaaatgagtatgacttttttgaactaattttaagaatcaaacctttttaaatgttgtgacagtgcatgattgcatgatagtgtaaaaaactttacactaatattgcatcaaaaatcaaataccttgttatatatcttccatacatactggccttaatcaggaaagtctgtacctaacatgaatcatattattgaaactgggacagatgatcaagagaagttacctattattcctggggtgaattatatctcactcactcaagacaataaaaacaaagacattcttaatgctggattgacatatgaatccccaaaaccccttggcttttcctcatgggaaggtatcttagaaaataatgctggaagtcaacatgtgcattttcagcctttatttcctggaacacagcctgataacatgggaatcaatagcaatttttctcaaggagaagagataatggtgccatatttgaccaccagcattgctaagcagcatgagaatggaagtatcattaaagctgaaggaaattggcaggtttatgatgttgattctttacgcatgtccagttggcctatagatagtgcttattcaggctcaacatgtgaggtaagttgtagcaactgtgagcaggaagttaatgatgttgattttcagaaatccttggaacagtgtcttctacattcacacaaacaaaacaaggttctcatgcaaaatgatcttcaagaaaaactttt

SEQ ID NO: 20229 - protein, 327 aa, Glycine max
MAEARLYAPPSQLDIKQIILEAQHRWLRPAEICAILGNYKKFRIAPEPAHMPPSGSLFLFDRKVLRHFRKDGHNWRKKKDGKTVREAHERLKAGSVDVLHCYYAHGEENENFQRRTYWLLEEELSHIVLVHYRQVKGTKANFTSAKENEESLPYAQQTDKIMPQTEMDTSLSSTLHPHSYQVPSKTVDTSMNSAQTSEYEEAESGISFVRINNLKCSVFNFSYLEGILSSLFVDFVLRITFLCVFKFFNCVIFTAFNNHASSEFYSFLELQRPVEKISPQPADFYSPRPLISKFLHFKLFLSLTLMHCQFVTVNLHYHSVIHCRIIK

SEQ ID NO: 20230 - protein, 277 aa, Glycine max
MPPSGSLFLFDRKVLRHFRKDGHNWRKKKDGKTVREAHERLKAGSVDVLHCYYAHGEENENFQRRTYWLLEEELSHIVLVHYRQVKGTKANFTSAKENEESLPYAQQTDKIMPQTEMDTSLSSTLHPHSYQVPSKTVDTSMNSAQTSEYEEAESGISFVRINNLKCSVFNFSYLEGILSSLFVDFVLRITFLCVFKFFNCVIFTAFNNHASSEFYSFLELQRPVEKISPQPADFYSPRPLISKFLHFKLFLSLTLMHCQFVTVNLHYHSVIHCRIIK

SEQ ID NO: 20231 - protein, 184 aa, Glycine max
MNHIIETGTDDQEKLPIIPGVNYISLTQDNKNKDILNAGLTYESPKPLGFSSWEGILENNAGSQHVHFQPLFPGTQPDNMGINSNFSQGEEIMVPYLTTSIAKQHENGSIIKAEGNWQVYDVDSLRMSSWPIDSAYSGSTCEVSCSNCEQEVNDVDFQKSLEQCLLHSHKQNKVLMQNDLQEKL

SEQ ID NO: 20232 - DNA, 2276 bp, Glycine max
atcacttagtagtttacttcttcatagctcgcatctctattcgctagctgaaagagaaggatcattcatcagtgtttcgcgatctctgaagaagatggggaaaaagcgtgtaatgacgccagccaaggacgttgacttatcttccaccaaatacaaacgtgaagttgtgcaagctccgcatttgactggatttgtatttaggttatttgtgaggataattgaagctcccctgataggtcctatcattatgaatattttgaagaaggaaaataaaatggatgagatactgcgccacactgtgatacccgaggaacccatgtttaaacctgaatatccacctcaagaaatggagcctggtgttgttgtccttgaggaagatgggagacctgaagatcgagttgagtctgccctgaagtgtcttccacattatgatgttgctgaattatgggaaaattcatctgcatcttttcggtactggaaaatacgtgactatgctcatgcttatcgatctagaaaagtaaccccatccatggttgctgagcgcatcatctcaattatagaggacaatggaagaaataaacctcctacaccactattgatatcgtttgatgctgcagaagtccgggagcaggcggcagcatctactcagaggtttgaagcaggaaatccattatcgatattggatggaattttcatggccatcaaagatgacatagattgttatcctcatccatctaagggtgcaactacatggatgcatgaggtacgcactgtaaaggaggatgcagtctgtgtatcaagactgcgtacctgtggtgtcatattcatagggaaagcaaatatgcatgagttaggcatgggtacaacaggaaataatcctaattatggaactacaagaaatcctcatgcacctgacaggtatactggtggatcttcttcaggtccggctgcaattgtggcttctggactatgttctgctgcattgggaactgatggtggaggttcagtccgtattccttcttccctttgtggtgtggtgggatataagacaacttacgggcggacaagcatggaggggtcattatgtgattctgggactgtggaaattattggacccattgcttcaacggtggaggatgtcttgctagtgtattctgcaatgttgggtgcatcacctgcaaatagaatcagtttgaaaccgtcaccaccttgtttgccaagtctgtcatccaacgataattcaaatgccttgggatctttaagaattggaaagtacaccccgtggtttaatgatgtgcattcaactgaaatctctgataaatgtgatgaagcacttaatctgctgtcaaaggcgcatggttgtgaaatgatagaaattgttataccagagcttcttgagatgcgaactgcccatgttgtttccattggctctgaatgcttatgttcactgaatcctgattgtgaagacgggaaaggtgtaaatttgacatatgatactcgtacaagtttggcactttttcggtcatttacagcagccgattatgttgcagctcaatgtattagacgaaggagtatgtattaccacctggagattttcaagaaagtggatgtcatagtaacaccgaccactggcatgacagcacccataatacctcccagtgctcttaaaagtggtgaaacagatatgcagactacagctaaccttatgcagttcgttgttcctgcaaatcttttgggattccctgccatttctgtcccggttagtgagagtgaagtaaatcagttggttacgataaagtaggacttccaataggtttgcaaataatgggtcgaccatgggcggaagctactgtactgcgtgtagccgctgaagtggagaaactctgtggtgagtggaagaaaaaacccgcgtcgtactatgatgttctgaaggctaaatgaagctaagatattcttgctggttacggtttataagtagcctttgctgttttatcatttggaaatcgctatccatttagcaaatgctgtgtgtgctttcatcctcggtgcatctcatttctccaaaggatttatgatttgagaagttcttaggaaataaatctgcatagtaataattaaagacaaaatcaaaaattatttagaaaattacgggcgaaggtaacttgctcgtcgtcaatatgtagaaggagcttctttcttaagaacttcaaatataagattatgtgctattgaaacagaatgttcagcattgctcttaaagataataattttttgtt

SEQ ID NO: 20233 - protein, 599 aa, Glycine max
SLSSLLLHSSHLYSLAEREGSFISVSRSLKKMGKKRVMTPAKDVDLSSTKYKREVVQAPHLTGFVFRLFVRIIEAPLIGPIIMNILKKENKMDEILRHTVIPEEPMFKPEYPPQEMEPGVVVLEEDGRPEDRVESALKCLPHYDVAELWENSSASFRYWKIRDYAHAYRSRKVTPSMVAERIISIIEDNGRNKPPTPLLISFDAAEVREQAAASTQRFEAGNPLSILDGIFMAIKDDIDCYPHPSKGATTWMHEVRTVKEDAVCVSRLRTCGVIFIGKANMHELGMGTTGNNPNYGTTRNPHAPDRYTGGSSSGPAAIVASGLCSAALGTDGGGSVRIPSSLCGVVGYKTTYGRTSMEGSLCDSGTVEIIGPIASTVEDVLLVYSAMLGASPANRISLKPSPPCLPSLSSNDNSNALGSLRIGKYTPWFNDVHSTEISDKCDEALNLLSKAHGCEMIEIVIPELLEMRTAHVVSIGSECLCSLNPDCEDGKGVNLTYDTRTSLALFRSFTAADYVAAQCIRRRSMYYHLEIFKKVDVIVTPTTGMTAPIIPPSALKSGETDMQTTANLMQFVVPANLLGFPAISVPVSESEVNQLVTIK

SEQ ID NO: 20234 - protein, 568 aa, Glycine max
MGKKRVMTPAKDVDLSSTKYKREVVQAPHLTGFVFRLFVRIIEAPLIGPIIMNILKKENKMDEILRHTVIPEEPMFKPEYPPQEMEPGVVVLEEDGRPEDRVESALKCLPHYDVAELWENSSASFRYWKIRDYAHAYRSRKVTPSMVAERIISIIEDNGRNKPPTPLLISFDAAEVREQAAASTQRFEAGNPLSILDGIFMAIKDDIDCYPHPSKGATTWMHEVRTVKEDAVCVSRLRTCGVIFIGKANMHELGMGTTGNNPNYGTTRNPHAPDRYTGGSSSGPAAIVASGLCSAALGTDGGGSVRIPSSLCGVVGYKTTYGRTSMEGSLCDSGTVEIIGPIASTVEDVLLVYSAMLGASPANRISLKPSPPCLPSLSSNDNSNALGSLRIGKYTPWFNDVHSTEISDKCDEALNLLSKAHGCEMIEIVIPELLEMRTAHVVSIGSECLCSLNPDCEDGKGVNLTYDTRTSLALFRSFTAADYVAAQCIRRRSMYYHLEIFKKVDVIVTPTTGMTAPIIPPSALKSGETDMQTTANLMQFVVPANLLGFPAISVPVSESEVNQLVTIK

SEQ ID NO: 20235 - protein, 562 aa, Glycine max
MTPAKDVDLSSTKYKREVVQAPHLTGFVFRLFVRIIEAPLIGPIIMNILKKENKMDEILRHTVIPEEPMFKPEYPPQEMEPGVVVLEEDGRPEDRVESALKCLPHYDVAELWENSSASFRYWKIRDYAHAYRSRKVTPSMVAERIISIIEDNGRNKPPTPLLISFDAAEVREQAAASTQRFEAGNPLSILDGIFMAIKDDIDCYPHPSKGATTWMHEVRTVKEDAVCVSRLRTCGVIFIGKANMHELGMGTTGNNPNYGTTRNPHAPDRYTGGSSSGPAAIVASGLCSAALGTDGGGSVRIPSSLCGVVGYKTTYGRTSMEGSLCDSGTVEIIGPIASTVEDVLLVYSAMLGASPANRISLKPSPPCLPSLSSNDNSNALGSLRIGKYTPWFNDVHSTEISDKCDEALNLLSKAHGCEMIEIVIPELLEMRTAHVVSIGSECLCSLNPDCEDGKGVNLTYDTRTSLALFRSFTAADYVAAQCIRRRSMYYHLEIFKKVDVIVTPTTGMTAPIIPPSALKSGETDMQTTANLMQFVVPANLLGFPAISVPVSESEVNQLVTIK

SEQ ID NO: 20236 - DNA, 1556 bp, Glycine max
agagatttgcttagttctgccaatgtaatgtgtgctttaagttttgaccgtgatgaggatcacattgcagcaggaggagtttcaaagaaaatcaagattttcgacctcaatgctatttcaagcgattctgttgacatccagtacccagtagttgagatgtcaaataaatcaaagcttagttgtgtgtgctggaacccttacataaaaaatcatctggcatctactgactatgatggtgtggttcagatgtgggatgcagacactggtcagccattgtctcaatacatggagcaccaaaagagagcttggtctgttcacttttctttgtcagacccaaaaatgtttgctagtggaagtgatgactgctctgtcaaactgtggaatatcagtgagagaaattctctgggaaccatctggaaccctgccaatatatgctgtgttcagttctctgcttactcaacaaatcatctattttttggatctgctgattacaaggtttatggctatgatcttcgtcacactagaatcccttggtgcacattaactggtcatggcaaaactgttagctatgtaaaatttatagatgctgaagcagttgtctctgcttccactgacaactctttgaagctttgggacctgaagaaaatcagctcttctggtttgtcatctgatgcttgtgccgtgacctttaaaggtcatagtaatgaaaagaatttcgtgggattatcagttttggatggatacattgcatggggttcagaatctaatgaggtgtactgttatcacaaatcactgccggtgccaattgctactcataaatttgagtcagttgatcctatttctggccatctaaatagtggtgataataatggacagtttgtttccagtgtttgctggagaaagaaatctaacatgcttgttgctgccaactcagttggaattgtgaaactgttgcagatggtctgacagaaatgagaaaatatttggttaacattgaagcctgaaaagctatttatttcctgacttgataatattttgatttagtatacctctcagaagactaagcgtgcattttatttgagacaaactcgcagaccagttctttattcaggcttcaatgattaatggggtataaagcttaaatgggatcaccatttgacatttcttctgtggcaagcatcaatgtctcctattttccatgcttaggtaatactttcaggtgctggttttcttaaaatgtgaaccaaagaaagctgaacaagaaatgtatatagcatgtacaaatgtaggcttttgaactgaagcactggtgaagctggagcatgcaagtctctttcaaatatcgtattccaagtgactagtggttttctctgatgtctgatccattacttctgtatatagcacacctaagcagagatacatgctaattacctttactttcaaatcacttttagtttctcagaaaagtacaggagatgatctatgctttgcatttactttgacatataaactgtcgctaatatgatggttcaaatattaattttacactttcattt

SEQ ID NO: 20237 - protein, 321 aa, Glycine max
RDLLSSANVMCALSFDRDEDHIAAGGVSKKIKIFDLNAISSDSVDIQYPVVEMSNKSKLSCVCWNPYIKNHLASTDYDGVVQMWDADTGQPLSQYMEHQKRAWSVHFSLSDPKMFASGSDDCSVKLWNISERNSLGTIWNPANICCVQFSAYSTNHLFFGSADYKVYGYDLRHTRIPWCTLTGHGKTVSYVKFIDAEAVVSASTDNSLKLWDLKKISSSGLSSDACAVTFKGHSNEKNFVGLSVLDGYIAWGSESNEVYCYHKSLPVPIATHKFESVDPISGHLNSGDNNGQFVSSVCWRKKSNMLVAANSVGIVKLLQMV

SEQ ID NO: 20238 - protein, 312 aa, Glycine max
MCALSFDRDEDHIAAGGVSKKIKIFDLNAISSDSVDIQYPVVEMSNKSKLSCVCWNPYIKNHLASTDYDGVVQMWDADTGQPLSQYMEHQKRAWSVHFSLSDPKMFASGSDDCSVKLWNISERNSLGTIWNPANICCVQFSAYSTNHLFFGSADYKVYGYDLRHTRIPWCTLTGHGKTVSYVKFIDAEAVVSASTDNSLKLWDLKKISSSGLSSDACAVTFKGHSNEKNFVGLSVLDGYIAWGSESNEVYCYHKSLPVPIATHKFESVDPISGHLNSGDNNGQFVSSVCWRKKSNMLVAANSVGIVKLLQMV

SEQ ID NO: 20239 - protein, 269 aa, Glycine max
MSNKSKLSCVCWNPYIKNHLASTDYDGVVQMWDADTGQPLSQYMEHQKRAWSVHFSLSDPKMFASGSDDCSVKLWNISERNSLGTIWNPANICCVQFSAYSTNHLFFGSADYKVYGYDLRHTRIPWCTLTGHGKTVSYVKFIDAEAVVSASTDNSLKLWDLKKISSSGLSSDACAVTFKGHSNEKNFVGLSVLDGYIAWGSESNEVYCYHKSLPVPIATHKFESVDPISGHLNSGDNNGQFVSSVCWRKKSNMLVAANSVGIVKLLQMV

SEQ ID NO: 20240 - DNA, 1764 bp, Glycine max
atcttatttcaaaaaaaagtttttctttttcgaaattacttccttcactacttaatgaattccaatctttttcaacaacaaaatactatgaaaagatcacaaaaatctcaaaactattacatcccaaaacttaccaaaacctccaatatgccaaaacttgaaattatcagcaactccttcgacccaaaccacaaaaaacaagcacatgatgaaaacaatgataaagaaaataaaaacactgccaatcttcctacccgcaaagcgaataatattaaaaaactcaactatatcaactcaatcttcaaaggtatcgatgtcccaaacaccacaaaaaacaaatattctacaaagactcccaccaatcttcgtggttcacaaatcacagaaaaacctagcttcaaaagccccacaaatatgcaaacaatcaatttcaaacaacgaaaagcctctcatggaggagaaccaatgacatttgaggccaggttcagtccaataatcagagaagttaatttgaaaatccagaataatgtgaatcgttatgaaaattatgagaatatgaatagtatgaatactacaccaaaagagttaagacaaaaaatcgaagaaaacgcacaagaaaacccgaatataaggagaagtatgagcttagaagatataagactcgctaaaaaagtgagtttggcagagaatagtcaagaaactagcaataaatctagtcgatactctgtacaaagaccagattatgcattttcatttaataacaaggcaggaacattcaatcagcaccaattcgagatggataataatgagacagtatcatatggaaaatgtgaagagaattttattgcaagtgttggtggttatattgagtatttcgatcagagtatagaaggaaaaaatgaagagatttgttcaggaaagaaagaaagagagcataaagagagttatcagactttgttgagacaattcagggcatcgaatgatgagataggtgcgttgaagggtcagttggatgatatcaagaataagaagaatgagttggtggcgaccaatagtttgatttttagagagattaattctcgtagaaagaaggaacaagaaatgaaagagagaatggagaatatggaagcaatgataatggaattgaaagacgaggtgaattattataaactcagattcaaagaagtccaaacacagcttcaagaagaaagagataacaataaagttgacctcttaaaactcaaaaaaatcctctcaaataatattgatcttgcgtttggtcacggacatcaagctcattatgagattgatcagacattagaaagagggaatccacatagaaatagtgctaaaaagattgtgaatctgtataatatcgaccagcgagatatgaatagctcacttgaccagaaatcagctctcaagtataaaaactcctatgccaaaggaggtgtcggcgctgtttccactgtccttaaccagtatgaccttccaagacgtatagaaaataaaaatctcatgaagcaacatcaagctccttggtcttcactaaataatgtgacaccggtatcaacagaagagatggaagaaacatcgagtagaagggagatgatcagagcaaatcatgatttgataaaggaaagtgaagagaccaaggaaacagaagagcaaatcgatgatgatgatgacgatgaatctgtacgatcagaagctaaaactatacaaagactttatcaagaaggacttgaaaaagaacaacaaatc

SEQ ID NO: 20241 - protein, 588 aa, Glycine max
ILFQKKVFLFRNYFLHYLMNSNLFQQQNTMKRSQKSQNYYIPKLTKTSNMPKLEIISNSFDPNHKKQAHDENNDKENKNTANLPTRKANNIKKLNYINSIFKGIDVPNTTKNKYSTKTPTNLRGSQITEKPSFKSPTNMQTINFKQRKASHGGEPMTFEARFSPIIREVNLKIQNNVNRYENYENMNSMNTTPKELRQKIEENAQENPNIRRSMSLEDIRLAKKVSLAENSQETSNKSSRYSVQRPDYAFSFNNKAGTFNQHQFEMDNNETVSYGKCEENFIASVGGYIEYFDQSIEGKNEEICSGKKEREHKESYQTLLRQFRASNDEIGALKGQLDDIKNKKNELVATNSLIFREINSRRKKEQEMKERMENMEAMIMELKDEVNYYKLRFKEVQTQLQEERDNNKVDLLKLKKILSNNIDLAFGHGHQAHYEIDQTLERGNPHRNSAKKIVNLYNIDQRDMNSSLDQKSALKYKNSYAKGGVGAVSTVLNQYDLPRRIENKNLMKQHQAPWSSLNNVTPVSTEEMEETSSRREMIRANHDLIKESEETKETEEQIDDDDDDESVRSEAKTIQRLYQEGLEKEQQI

SEQ ID NO: 20242 - protein, 570 aa, Glycine max
MNSNLFQQQNTMKRSQKSQNYYIPKLTKTSNMPKLEIISNSFDPNHKKQAHDENNDKENKNTANLPTRKANNIKKLNYINSIFKGIDVPNTTKNKYSTKTPTNLRGSQITEKPSFKSPTNMQTINFKQRKASHGGEPMTFEARFSPIIREVNLKIQNNVNRYENYENMNSMNTTPKELRQKIEENAQENPNIRRSMSLEDIRLAKKVSLAENSQETSNKSSRYSVQRPDYAFSFNNKAGTFNQHQFEMDNNETVSYGKCEENFIASVGGYIEYFDQSIEGKNEEICSGKKEREHKESYQTLLRQFRASNDEIGALKGQLDDIKNKKNELVATNSLIFREINSRRKKEQEMKERMENMEAMIMELKDEVNYYKLRFKEVQTQLQEERDNNKVDLLKLKKILSNNIDLAFGHGHQAHYEIDQTLERGNPHRNSAKKIVNLYNIDQRDMNSSLDQKSALKYKNSYAKGGVGAVSTVLNQYDLPRRIENKNLMKQHQAPWSSLNNVTPVSTEEMEETSSRREMIRANHDLIKESEETKETEEQIDDDDDDESVRSEAKTIQRLYQEGLEKEQQI

SEQ ID NO: 20243 - protein, 559 aa, Glycine max
MKRSQKSQNYYIPKLTKTSNMPKLEIISNSFDPNHKKQAHDENNDKENKNTANLPTRKANNIKKLNYINSIFKGIDVPNTTKNKYSTKTPTNLRGSQITEKPSFKSPTNMQTINFKQRKASHGGEPMTFEARFSPIIREVNLKIQNNVNRYENYENMNSMNTTPKELRQKIEENAQENPNIRRSMSLEDIRLAKKVSLAENSQETSNKSSRYSVQRPDYAFSFNNKAGTFNQHQFEMDNNETVSYGKCEENFIASVGGYIEYFDQSIEGKNEEICSGKKEREHKESYQTLLRQFRASNDEIGALKGQLDDIKNKKNELVATNSLIFREINSRRKKEQEMKERMENMEAMIMELKDEVNYYKLRFKEVQTQLQEERDNNKVDLLKLKKILSNNIDLAFGHGHQAHYEIDQTLERGNPHRNSAKKIVNLYNIDQRDMNSSLDQKSALKYKNSYAKGGVGAVSTVLNQYDLPRRIENKNLMKQHQAPWSSLNNVTPVSTEEMEETSSRREMIRANHDLIKESEETKETEEQIDDDDDDESVRSEAKTIQRLYQEGLEKEQQI

SEQ ID NO: 20244 - DNA, 1259 bp, Glycine max
aagaaaaacataaaaagttcattttcacaatcacggtcgcttcctacgactatcgaattcgcgtcagcctcaattctcatggagtttgggattgatgcctccattaatggtgagacagtaggaaatgctactatagtgcagattaatagcagcacagctgatggaaacaaagtgggctgcagttcttttaatcctgcttataaacaaggtcatgatgataatataactcaagattcttctggaggggacacaatcccatcaggaattcctgcagtatcggttgcgtcagttgatgagccctatgtgggccaggagtttgaatatgaagctgcagcacatgcattctataatgcatatgctaaacgtgttggattcatcatacgtgtaagtaagctctcacgatcaaggcgtgatggaactgctattggacgggctcttgtttgcaacagagaaggttacagaatgcccgacaaacgtgaaaagattgtaaggcaaagggcggagacaagggttggttgcagggcaatgattttggtgaggaaagtaagttctggtaaatgggttattacaaagtttataatggaacacacacatcctttgacacctggaaaaggtagaagagattgcatttatgagcaatatccgaatgaacatgataaaattcgagaactatcccagcagttggctatagagagaaagcgatctgcaacctataaaaggcatcttgaattgatatttgagcaaattgaagagcacaatgatagtctttcaaagaaaatacaacacatagtggacagtgtgaaggagatggaaaccaaagaacagaatcagagatagcttgagctcagttatctagtcttttaattcttttccactggatgaaacatgcaatcaactgttcaggtcaaaagtgctgctagaaatatcgtgcaataatatagttgctgacctaggtatcagctttaggtgtcagctgagttctgtagttcaatttgccaagctcaatggaactcaataatccattggattgctttatatgcagtgatatttatagttcagtcaatgtacaggtcctttgaatccattcttctgaagttacactaacaatgtgtgactcataacaggcatgcaaatgccttgacagaattaaattgttccacttccgttgttaatgttgtacagtttgatccatggctgtgttctttgtataacatttacattaaataatgttgagaatgcacagtccggatgttcatatc

SEQ ID NO: 20245 - protein, 278 aa, Glycine max
KKNIKSSFSQSRSLPTTIEFASASILMEFGIDASINGETVGNATIVQINSSTADGNKVGCSSFNPAYKQGHDDNITQDSSGGDTIPSGIPAVSVASVDEPYVGQEFEYEAAAHAFYNAYAKRVGFIIRVSKLSRSRRDGTAIGRALVCNREGYRMPDKREKIVRQRAETRVGCRAMILVRKVSSGKWVITKFIMEHTHPLTPGKGRRDCIYEQYPNEHDKIRELSQQLAIERKRSATYKRHLELIFEQIEEHNDSLSKKIQHIVDSVKEMETKEQNQR

SEQ ID NO: 20246 - protein, 252 aa, Glycine max
MEFGIDASINGETVGNATIVQINSSTADGNKVGCSSFNPAYKQGHDDNITQDSSGGDTIPSGIPAVSVASVDEPYVGQEFEYEAAAHAFYNAYAKRVGFIIRVSKLSRSRRDGTAIGRALVCNREGYRMPDKREKIVRQRAETRVGCRAMILVRKVSSGKWVITKFIMEHTHPLTPGKGRRDCIYEQYPNEHDKIRELSQQLAIERKRSATYKRHLELIFEQIEEHNDSLSKKIQHIVDSVKEMETKEQNQR

SEQ ID NO: 20247 - DNA, 1129 bp, Glycine max
gaatcgattactatactagtaataaattgtacaaaaaataaaaatataaataatataaatataaaaagaacaaacacaaattttatgtgattagtcgcggtatttaaaataaaaaatgaaagtagacaaataaaaaaggaaaggagatgtttgaataaaaataattccccttcaagttcttattttttgagaggacaggacaatatgaatgttttattatgctctatcaacacattaaaaagattatatgatatatctgctgtggaagtaggtcaacatttctattggcaaatagggagtttccaagtacatgcccaagtacttattacttcttgggttgtaattgctctcttattggtttcagccattctaattattcgaaatctgcaaaccattcccgctttcggtcagaatttctttgaatatgttcttgaattcattcgagacgtgagcaaaactcaaattggagaagaatatggtccgtgggttccttttattggaactttgtttctatttatttttgtttctaattggtcgggggctcttttaccttggaaaatcatacaattacctcacggggagttagctgcacccacaaatgatataaatactaccgttgctttagctttacttacatcaattgcatatttctatgcgggtctttcaaaaaaaggattagcttattttaataaatacatccaaccaaccccaatccttttaccgattaacatcttagaagatttcacaaaacccttatctcttagttttcgacttttcggaaatatattagctgatgaattagtagttgttgttcttgtttctttagtacctttagtagttcctatacctgtcatgttccttggattattcacaagcggtattcaagctctcatttttgctactttagctgcggcttatataggtgaatccatggaaggccatcattgaccagtttttatacaaaatagtccttttcgtttagcttgccgcacatatattgcggctcaatataatctacttagtaaacatctatatctatctacctatatctatatagatataggtagatagatatagatagatattcgattagcatatattagcatatattagtatatattggatattc

SEQ ID NO: 20248 - protein, 247 aa, Glycine max
MNVLLCSINTLKRLYDISAVEVGQHFYWQIGSFQVHAQVLITSWVVIALLLVSAILIIRNLQTIPAFGQNFFEYVLEFIRDVSKTQIGEEYGPWVPFIGTLFLFIFVSNWSGALLPWKIIQLPHGELAAPTNDINTTVALALLTSIAYFYAGLSKKGLAYFNKYIQPTPILLPINILEDFTKPLSLSFRLFGNILADELVVVVLVSLVPLVVPIPVMFLGLFTSGIQALIFATLAAAYIGESMEGHH

SEQ ID NO: 20249 - DNA, 1473 bp, Glycine max
atttgatcaggccaagcaacaggctgagtatgagctgtcaagaggagttagtgccagagaaaaactaaacatggaagccgagatcaatcttgaaggacatcgacctagagtgaggcgatatgcccatgggttgaggaagctcataagaattggccaaggcccagagaaactgttacgacaatcatcaaagttggctattaggcctgatgggtttgaaggggacagtggagatgcagttgaagcacatcaatggaaatgcgttcttactgtggctggtattagaatttttgaagatgtttctgatcacaagaatggtaaggctgttcttgcaaagtctgttggtgttattgatgcaactgcagatacggtttttgaagtgattttgagcactaaacaacagaaaagatatgagtgggatacattgatgtgtgacttggagctgatagattcatatgatggacactacgatgttgtttatgggacatatgattctaagtatctatctcggtggcactcaaagcaggattttgtcttctctaggcaatggtttcggggacaagatggaacatatactatcttgcaatttccagctatacataagaaaaagcctcaaagatctggatatcgacgtgcaaaagttaatccatcttcatgggagattagaaatttgaacacatctatggcatcaaatagcccaagatgtttagtgacccacactttagagatacactctacgtcctggtgtcgatggaagaagaacaagagctcaaaatttgagaggagcattccatatgcactattgtgccaagtgtcaggtctgaaggaatacattgcagccaatcctgcactccaccatgaaaatgccaccacaattgttcattccaaattgtctgatgcttctatttctagtgctgaatatgaggatgaaatgcaggatgagttttatgatgcaattactgctgattcgtcaacatcagatgaagaaagtgatgatgatcagaagcttgttctgcaggaggcaagagtcaaactaaagaatatttcatgggcaatcacaaccttggctttgatgcgaactgcagctcccgatctaactgaagaattggatcctcatgtaactcatatcacaattccaagtgacttgcatggttctttgcgcaaaggaaatgatgacaatgacacaaactgttgggcttctcctagcggaaaaggatttatgattagaggaaagaattatcttaaagatagttctaaggtagttggaggagatcctcttctcaagcttgtagcagttgattggtttacagttgataaatccgcggatagaattgcccttcaccctaaatgtttggttcagtcagaagctgggaaaacgcttccatttatccttgtcattaatctccaggttcctgctaaaccaaactacagtctggttctatattatgcagctgacagaccgataaataaaaattc

SEQ ID NO: 20250 - protein, 490 aa, Glycine max
FDQAKQQAEYELSRGVSAREKLNMEAEINLEGHRPRVRRYAHGLRKLIRIGQGPEKLLRQSSKLAIRPDGFEGDSGDAVEAHQWKCVLTVAGIRIFEDVSDHKNGKAVLAKSVGVIDATADTVFEVILSTKQQKRYEWDTLMCDLELIDSYDGHYDVVYGTYDSKYLSRWHSKQDFVFSRQWFRGQDGTYTILQFPAIHKKKPQRSGYRRAKVNPSSWEIRNLNTSMASNSPRCLVTHTLEIHSTSWCRWKKNKSSKFERSIPYALLCQVSGLKEYIAANPALHHENATTIVHSKLSDASISSAEYEDEMQDEFYDAITADSSTSDEESDDDQKLVLQEARVKLKNISWAITTLALMRTAAPDLTEELDPHVTHITIPSDLHGSLRKGNDDNDTNCWASPSGKGFMIRGKNYLKDSSKVVGGDPLLKLVAVDWFTVDKSADRIALHPKCLVQSEAGKTLPFILVINLQVPAKPNYSLVLYYAADRPINKN

SEQ ID NO: 20251 - protein, 467 aa, Glycine max
MEAEINLEGHRPRVRRYAHGLRKLIRIGQGPEKLLRQSSKLAIRPDGFEGDSGDAVEAHQWKCVLTVAGIRIFEDVSDHKNGKAVLAKSVGVIDATADTVFEVILSTKQQKRYEWDTLMCDLELIDSYDGHYDVVYGTYDSKYLSRWHSKQDFVFSRQWFRGQDGTYTILQFPAIHKKKPQRSGYRRAKVNPSSWEIRNLNTSMASNSPRCLVTHTLEIHSTSWCRWKKNKSSKFERSIPYALLCQVSGLKEYIAANPALHHENATTIVHSKLSDASISSAEYEDEMQDEFYDAITADSSTSDEESDDDQKLVLQEARVKLKNISWAITTLALMRTAAPDLTEELDPHVTHITIPSDLHGSLRKGNDDNDTNCWASPSGKGFMIRGKNYLKDSSKVVGGDPLLKLVAVDWFTVDKSADRIALHPKCLVQSEAGKTLPFILVINLQVPAKPNYSLVLYYAADRPINKN

SEQ ID NO: 20252 - protein, 349 aa, Glycine max
MCDLELIDSYDGHYDVVYGTYDSKYLSRWHSKQDFVFSRQWFRGQDGTYTILQFPAIHKKKPQRSGYRRAKVNPSSWEIRNLNTSMASNSPRCLVTHTLEIHSTSWCRWKKNKSSKFERSIPYALLCQVSGLKEYIAANPALHHENATTIVHSKLSDASISSAEYEDEMQDEFYDAITADSSTSDEESDDDQKLVLQEARVKLKNISWAITTLALMRTAAPDLTEELDPHVTHITIPSDLHGSLRKGNDDNDTNCWASPSGKGFMIRGKNYLKDSSKVVGGDPLLKLVAVDWFTVDKSADRIALHPKCLVQSEAGKTLPFILVINLQVPAKPNYSLVLYYAADRPINKN

SEQ ID NO: 20253 - DNA, 1130 bp, Glycine max
atatacgcaaatttataggcccattaaaaaatcgtgcttcaaaacctgatggcctaggttttcagactatcttggtaactgcaaccatgacaaaggctgtgcaaaatctgattgatgaggagtttctaggcattgttcatctgcgcacgtcaacattgcataaaaagatttcttctgctcgtcatgattttattaaacttgcaggttctgagaacaagcttgaagcattacttcaggtactagagccaagcctagcaaaagggaatagggtgatggttttctgcaatacattggattcaagtcgtgctgtggatcattttcttggtgaaaatcagatttctgctgtgaactaccatggggaggtaccagcagagcaaagggttgaaaatctcagaaagttcaagagtgatggtgatgattgtcctacattggtttgcacggacttggctgctaggggtctagacttggatgtagatcatgttgtcatgtttgacttccccttgaattccattgactaccttcatcgcactggtagaactgctcgtatgggtgcaaaagggaaggtaacaagtttagttgctaaaaaggacttggacttggccagcaaaatagaggacgcattaaggaagaatgagagtttggaggctatcacaaaagaaagtgtccgaagggacattgcaaggacccaaaatcaaagcactgagaagggaaagagcaaaagattggttaaagtttcaaaagttatgggcaaatctggtagtcgttttggttctgggaataatggatcaggtatgaaatctggtaaagggtcaccagtcaaatctatgaagaaagggattcaagtttcaaaatctggaaaatcttctagtgcaaatagcttaagaaaagcttctacagagaagaggcaatcaagtaaaatggtcagtgccaccaaatctacgaattctaaactcaatgttgtggggtttagggggaaaaattcgtcttcaaataataaagaatcgggtttgtgaagttgattgtgggccatattgtaccgtataggaactaaatggctctcgtttttgtattagataagattttttctgtagtaaagatagtattataatttaattgttttagttcctgcc

SEQ ID NO: 20254 - protein, 336 aa, Glycine max
IRKFIGPLKNRASKPDGLGFQTILVTATMTKAVQNLIDEEFLGIVHLRTSTLHKKISSARHDFIKLAGSENKLEALLQVLEPSLAKGNRVMVFCNTLDSSRAVDHFLGENQISAVNYHGEVPAEQRVENLRKFKSDGDDCPTLVCTDLAARGLDLDVDHVVMFDFPLNSIDYLHRTGRTARMGAKGKVTSLVAKKDLDLASKIEDALRKNESLEAITKESVRRDIARTQNQSTEKGKSKRLVKVSKVMGKSGSRFGSGNNGSGMKSGKGSPVKSMKKGIQVSKSGKSSSANSLRKASTEKRQSSKMVSATKSTNSKLNVVGFRGKNSSSNNKESGL

SEQ ID NO: 20255 - protein, 308 aa, Glycine max
MTKAVQNLIDEEFLGIVHLRTSTLHKKISSARHDFIKLAGSENKLEALLQVLEPSLAKGNRVMVFCNTLDSSRAVDHFLGENQISAVNYHGEVPAEQRVENLRKFKSDGDDCPTLVCTDLAARGLDLDVDHVVMFDFPLNSIDYLHRTGRTARMGAKGKVTSLVAKKDLDLASKIEDALRKNESLEAITKESVRRDIARTQNQSTEKGKSKRLVKVSKVMGKSGSRFGSGNNGSGMKSGKGSPVKSMKKGIQVSKSGKSSSANSLRKASTEKRQSSKMVSATKSTNSKLNVVGFRGKNSSSNNKESGL

SEQ ID NO: 20256 - protein, 246 aa, Glycine max
MVFCNTLDSSRAVDHFLGENQISAVNYHGEVPAEQRVENLRKFKSDGDDCPTLVCTDLAARGLDLDVDHVVMFDFPLNSIDYLHRTGRTARMGAKGKVTSLVAKKDLDLASKIEDALRKNESLEAITKESVRRDIARTQNQSTEKGKSKRLVKVSKVMGKSGSRFGSGNNGSGMKSGKGSPVKSMKKGIQVSKSGKSSSANSLRKASTEKRQSSKMVSATKSTNSKLNVVGFRGKNSSSNNKESGL

SEQ ID NO: 20257 - DNA, 1192 bp, Glycine max
atatcacgttgttcttcacctctgtttcacttcactagctgctaatcaagccctctcttcctacatttctcaggggggacttgaagcaagcacattaatggagagggacccaaacatgggcaaggaaaaagtggtttcaaattccacattgcttccctcgtccacaaaagggttcaaggacaagggcatccccaacaatagcatgccctcctggcttctcaccaacatttctgacttggaggagaggatgaaagtgttggcaatgagtacaacagaagatgaagaaatgggagacacatttgctgatagagcagaaacttactaccaaaagaggcctcagctactgtcccttctgcaggacttgtacaatggctacataaccttatctgaccgttacatccaaacactggccaaacacaagcaccatagtagacactcttctcaagtttcaactgtagatgaaggcttctctgaccaagaagaagaagctagtggtgtgagccacagtgattcagacattgaaagctcaatctcctaccaacacccccaacacatgatgatgccaataggcctcccaaaaagctccatgcttgatgttgatgctattgttgctgagcttttgataaggaatattgagtatgacatgttgatgcatgaagttggtgtcatggagaggaggtactgtgagtcctcaaggaaaagtgagcttcaaaagagccttcttgaggtgttggagtctgagaggattgttcttttgaatgagaatgctagcttgggctatagggtcaacactttggtggaagaaaacaaggagcttgcatctgagtcagtgttcatcaagagaaaagccggtgagcttgctaagtgtgtgctgaagatgagggaggatcatagagtgtacttgctgcacaggaaaattgaggatcttcaggctcagatacatgccttggagaagaggaacaaggagtactatgataagcttctgagaagagatggtcatgaagatggtaaaaaaggtgtggctttggaggtttgtgttcagatggacaagcaaaagaggttcaagtggaaagatggcaacacttctgggatgaagaaatttcatgggaagaagtcccccccaagtttgtggaaaaagctgaagaacatggatttgttgttgtgtggtactaatccaacttgtgcttgatga

SEQ ID NO: 20258 - protein, 395 aa, Glycine max
YHVVLHLCFTSLAANQALSSYISQGGLEASTLMERDPNMGKEKVVSNSTLLPSSTKGFKDKGIPNNSMPSWLLTNISDLEERMKVLAMSTTEDEEMGDTFADRAETYYQKRPQLLSLLQDLYNGYITLSDRYIQTLAKHKHHSRHSSQVSTVDEGFSDQEEEASGVSHSDSDIESSISYQHPQHMMMPIGLPKSSMLDVDAIVAELLIRNIEYDMLMHEVGVMERRYCESSRKSELQKSLLEVLESERIVLLNENASLGYRVNTLVEENKELASESVFIKRKAGELAKCVLKMREDHRVYLLHRKIEDLQAQIHALEKRNKEYYDKLLRRDGHEDGKKGVALEVCVQMDKQKRFKWKDGNTSGMKKFHGKKSPPSLWKKLKNMDLLLCGTNPTCA

SEQ ID NO: 20259 - protein, 363 aa, Glycine max
MERDPNMGKEKVVSNSTLLPSSTKGFKDKGIPNNSMPSWLLTNISDLEERMKVLAMSTTEDEEMGDTFADRAETYYQKRPQLLSLLQDLYNGYITLSDRYIQTLAKHKHHSRHSSQVSTVDEGFSDQEEEASGVSHSDSDIESSISYQHPQHMMMPIGLPKSSMLDVDAIVAELLIRNIEYDMLMHEVGVMERRYCESSRKSELQKSLLEVLESERIVLLNENASLGYRVNTLVEENKELASESVFIKRKAGELAKCVLKMREDHRVYLLHRKIEDLQAQIHALEKRNKEYYDKLLRRDGHEDGKKGVALEVCVQMDKQKRFKWKDGNTSGMKKFHGKKSPPSLWKKLKNMDLLLCGTNPTCA

SEQ ID NO: 20260 - protein, 357 aa, Glycine max
MGKEKVVSNSTLLPSSTKGFKDKGIPNNSMPSWLLTNISDLEERMKVLAMSTTEDEEMGDTFADRAETYYQKRPQLLSLLQDLYNGYITLSDRYIQTLAKHKHHSRHSSQVSTVDEGFSDQEEEASGVSHSDSDIESSISYQHPQHMMMPIGLPKSSMLDVDAIVAELLIRNIEYDMLMHEVGVMERRYCESSRKSELQKSLLEVLESERIVLLNENASLGYRVNTLVEENKELASESVFIKRKAGELAKCVLKMREDHRVYLLHRKIEDLQAQIHALEKRNKEYYDKLLRRDGHEDGKKGVALEVCVQMDKQKRFKWKDGNTSGMKKFHGKKSPPSLWKKLKNMDLLLCGTNPTCA

SEQ ID NO: 20261 - DNA, 1439 bp, Glycine max
agatattaactcttcaagcttcaaatttgacctctgaggatctaactttgactgtgcttgctccagcctcatttacttcacccctttcagtagtctccttgaattcaccaacgactccaatgagtccttttttaggtttctcagagttattagtaagagtaaatggtgaaagaggaattggtgccacccagcgacaaagtttcactcttggtgtaaaagataatgagaaacaaagttatgatggcaaagcccaggctgtttctacgagtgatgatgtcattcctggttctgatcttagttgtacacatctatggctgcagagtagaattccacttggatgtattccatctcaatccattgccactataaagcttgagctacttccattgactgatggcataattgttctggacactttgcaaattgatgtcaaggaaaaaggtatagattgctgtacttttggaccatttttttcctcttaattccatgtttaagcatctatatagagaatatttggtcaatacaaattaatgagaagatgaactgctggtttaagatctgttacttgtatgattgtcattgttattttgaagtatcgcccattcacataacaataaggtcttctgttggcttcccttagctgtgagtgtgacattctgtaacaagtgcccatttttgtcttgatccatttcatattaatagttttgctgcctagatctagtcatttgtttcacttgagaagagaagtgaatattattgagtgttttgcaatacaagcactaatccctatttataagctaaacgggatgagataaggaaagactaaccattaggcctgaaagaagagtcagcggctacttgctatgtgctggcgagtggttggcacaggaatggtatgtggctttcacgtgttgggaagaagcatgtgtagtggtggtggtggaaggcaacgtgaatttggggacaagccaatctggagatgacaccccatccggtatggtcacactggtcaaattggcagctgagtggtgacaggcagtggtggacggcagcaagagcggagcccttgaaattgagagttctgatacctacttgaaatttgaaaagagaaaaaactgaatattatcgagtgtgttttgcaatacaagcactaatgtctatttataggctagacatattatgagaaagagggaaaataggaaaacaaaactattttaaaaattacaaatatattcttaatatatacagggagattctattgtaaattagtgcaaatttacagcagtttccaccatcatcccttttggtgtttacatgtgaagaacatatgcttttacgaatgtacaacgcaaaagtgagaagtatgtatacaaagaactttggtttattattttgtacattctgttttatttgtcattggaaagatttttcttctttgc

SEQ ID NO: 20262 - protein, 159 aa, Glycine max
ILTLQASNLTSEDLTLTVLAPASFTSPLSVVSLNSPTTPMSPFLGFSELLVRVNGERGIGATQRQSFTLGVKDNEKQSYDGKAQAVSTSDDVIPGSDLSCTHLWLQSRIPLGCIPSQSIATIKLELLPLTDGIIVLDTLQIDVKEKGIDCCTFGPFFSS

SEQ ID NO: 20263 - protein, 120 aa, Glycine max
MSPFLGFSELLVRVNGERGIGATQRQSFTLGVKDNEKQSYDGKAQAVSTSDDVIPGSDLSCTHLWLQSRIPLGCIPSQSIATIKLELLPLTDGIIVLDTLQIDVKEKGIDCCTFGPFFSS

SEQ ID NO: 20264 - DNA, 1298 bp, Glycine max
gatcagcaccaattaaagaagaaatatgggaaatgaaggtattatgaatggtgttacccccgggaaggctaccatattagctcttggcaaggctttccctcatcagcttgtcatgcaagagtatttagttgatggatatttcagggacacaaactgtgacagtcctgaactcaagcagaagctcactagactttgcaagacaaccacagtgaaaacaaggtatgtggtaatgtcagaggagatactgaaaaagtatccagaacttgcggctgaaggcatccccacagtaaagcaacgactagagatatgcaatgaggcagtgacagaaatggccattgaagcttcccaagcttgcatcaacaactggggtggatctttatcagacataacacacttagtttatgtgtcatccagtgaagctagattacccggtggtgacctttacctagccaaaggactaggactgagccctgatactcaacgagtcatgctctattttgctggttgttcgggaggcgtggccggcttacgtgttgcgaaagacatagctgagaacaaccctggaagccgagtgctgattgctacctcagaaactacaattattgggttcaagccaccaagtgcagatagaccttatgatctagttggggtggcactctttggggatggtgctggtgcaatgataattggctcagacccaatattggagtctgagaagcctctctttgagcttcacactgcagttcaggagtttttgccacacactgagaagaaaatagatgggaggctgacagaagaaggaataagcttcaagttagcaagggaacttcctcaaataattgaagacaatgttgaaggattctgtgacaagttaataagtgttgttgggtttgagaacaaggagtacaacaagatgttttgggctgttcatccggggggtcctgccatcttgaaccgcattgaaaagaggcttgatttgttgccagagaagctgagtgcaagtagaagggctctcatggattatggcaatgctagcagtaacaccattgtgtatgtgcttgagtatatgatagaggaaggtctcaagattagaaaggatgccagaggagatcttgaatggggcttaatacttgcttttggaccagggattacatttgagggaattcttgccaggaacttgtgtgcttgatgatattattatcacaagatgtgtttatgtgatacgtgactccatcaaaagcatattcaagactataatgatcaaaagaagaaaagtcttaaataaaaactttaaccgt

SEQ ID NO: 20265 - protein, 387 aa, Glycine max
MGNEGIMNGVTPGKATILALGKAFPHQLVMQEYLVDGYFRDTNCDSPELKQKLTRLCKTTTVKTRYVVMSEEILKKYPELAAEGIPTVKQRLEICNEAVTEMAIEASQACINNWGGSLSDITHLVYVSSSEARLPGGDLYLAKGLGLSPDTQRVMLYFAGCSGGVAGLRVAKDIAENNPGSRVLIATSETTIIGFKPPSADRPYDLVGVALFGDGAGAMIIGSDPILESEKPLFELHTAVQEFLPHTEKKIDGRLTEEGISFKLARELPQIIEDNVEGFCDKLISVVGFENKEYNKMFWAVHPGGPAILNRIEKRLDLLPEKLSASRRALMDYGNASSNTIVYVLEYMIEEGLKIRKDARGDLEWGLILAFGPGITFEGILARNLCA

SEQ ID NO: 20266 - protein, 381 aa, Glycine max
MNGVTPGKATILALGKAFPHQLVMQEYLVDGYFRDTNCDSPELKQKLTRLCKTTTVKTRYVVMSEEILKKYPELAAEGIPTVKQRLEICNEAVTEMAIEASQACINNWGGSLSDITHLVYVSSSEARLPGGDLYLAKGLGLSPDTQRVMLYFAGCSGGVAGLRVAKDIAENNPGSRVLIATSETTIIGFKPPSADRPYDLVGVALFGDGAGAMIIGSDPILESEKPLFELHTAVQEFLPHTEKKIDGRLTEEGISFKLARELPQIIEDNVEGFCDKLISVVGFENKEYNKMFWAVHPGGPAILNRIEKRLDLLPEKLSASRRALMDYGNASSNTIVYVLEYMIEEGLKIRKDARGDLEWGLILAFGPGITFEGILARNLCA

SEQ ID NO: 20267 - protein, 358 aa, Glycine max
MQEYLVDGYFRDTNCDSPELKQKLTRLCKTTTVKTRYVVMSEEILKKYPELAAEGIPTVKQRLEICNEAVTEMAIEASQACINNWGGSLSDITHLVYVSSSEARLPGGDLYLAKGLGLSPDTQRVMLYFAGCSGGVAGLRVAKDIAENNPGSRVLIATSETTIIGFKPPSADRPYDLVGVALFGDGAGAMIIGSDPILESEKPLFELHTAVQEFLPHTEKKIDGRLTEEGISFKLARELPQIIEDNVEGFCDKLISVVGFENKEYNKMFWAVHPGGPAILNRIEKRLDLLPEKLSASRRALMDYGNASSNTIVYVLEYMIEEGLKIRKDARGDLEWGLILAFGPGITFEGILARNLCA

SEQ ID NO: 20268 - DNA, 660 bp, Glycine max
tctctctctcagaattttctcctctctccgattccttttattaattggagttttctcgctcctttttctttccctgaaaacatttcatcttcgtattgatgtcggaaaagggtcggccacttcccaaatttggtgaatgggatgtcaatgatccagcctcagctgaggggttcacagtgatttttaataaggccagggatgagaaaaagacaggtggcaacccagagtcaccaggaaagactgctactgatcctcatagcaaacctgcagtagagcctggcaaaactcagactaaaaaatggttttgctgcatgcaaaacccttctgccgaatcatagcatagcaatggttgctcctgtgaaaagcctgaacagaagaacaatgtttatgtgtaactagcgtcacagtattttctcaaagataagagctgtagagccataagcgaattctacggaatttatattttgtgatgtaaaagtgagctgcaatgggggaaagaaaagaagacagactattatttatgtgtgtgtatcaatgttgtggtttattattaggagccagggttgcttcctgttttgccttgtcttgcgctatgagctagagcgttgcttgtcacattgtattgcttgtattatgaaacaaatcctattttatgaaccc

SEQ ID NO: 20269 - protein, 79 aa, Glycine max
MSEKGRPLPKFGEWDVNDPASAEGFTVIFNKARDEKKTGGNPESPGKTATDPHSKPAVEPGKTQTKKWFCCMQNPSAES

SEQ ID NO: 20270 - protein, 44 aa, Glycine max
LSLRIFSSLRFLLLIGVFSLLFLSLKTFHLRIDVGKGSATSQIW

SEQ ID NO: 20271 - protein, 42 aa, Glycine max
MLWFIIRSQGCFLFCLVLRYELERCLSHCIACIMKQILFYEP

SEQ ID NO: 20272 - DNA, 1493 bp, Glycine max
ggtaaaaggtactctctctcctctcatctttggatccccaaatctagggcttcttcttcttgtctgcgaaaatttcttgaatcactgtcttaattttcgtcatcaatttccgatttcgaatcttcgtctttgtttactttccatcgttgaagctgtgttgtgcttacttcactgtgctggttttgggtttcaagggatggaaaacatgcagagcttctggcaattgggtgatgaactccgtgggcactcaaaagcatcggaggatcacaagtggttaatggttgcctcgaaactggccgaacagacaagattgaagggggagcgtgtgaacaaccttgatctttcaaagggacccattgaaacaaggtcaagggataaatttgggttccaggaagagaacaaatttgattctcttaacttgagcatgttgaacctggactctaaatttactgagaatgtgagcaaaagctcacttcgaaatggtgtttatggtatgaatgcagtgtatcagaaaaacaatgcaaacttggtgagtaatgtgatcagtaacaagtacaatggcagtattcagcataacaaagagatcaacaacaacactggcaacaacatcaacaccaatgaaagcaacaacacaaatgcaactgacaaaaggtttaagaccttgcctgctgcggagacactcccccgcaatgaggtgcttggaggatacatctttgtctgtaacaatgacacaatgcaggaagacttgaaacgtcagctatttggtttgcctccaaggtatcgagattctgttagggcaataacaccagggctacctttatttctttataactatactactcatcagctgcatggtatttttgaggcagcaagttttggtggctctaacatagatccaactgcctgggaggataaaaaatgcaaaggggaatcaaggtttccagctcaggtaagaatccgtgtcaggaagctctgcaaggcattggaagaagattctttcaggccagtattgcatcattatgacgggccaaagtttcgtcttgaactgtcagttccagagactctggatctgttggacctatgtgaacaagctggttcagcagcataagcaagaatcaaacaaagaatgaatgtgcaaaataggtaggttttggtgtgccagctgtgtggttttggcagattttccgtgaagcgtaagcttggaaagtgaatcatcatcatgttttgggggaagtaaagggagcgtgttgttgagagtgagagaccctttgttggtgaataaatggttgttgtggtatctatcccctggaagatgctttgtagctgttacatgacatttaatacctttgtatgattaagtaaagtacagactactgtttgtactgctaaagtatgtatctgttgaaccaagaaaaaaattaaagttaaaaagcttcatgtattactaaactctatgttgagttggttgaagtgatcttttattttaaaaaaag

SEQ ID NO: 20273 - protein, 368 aa, Glycine max
VKGTLSPLIFGSPNLGLLLLVCENFLNHCLNFRHQFPISNLRLCLLSIVEAVLCLLHCAGFGFQGMENMQSFWQLGDELRGHSKASEDHKWLMVASKLAEQTRLKGERVNNLDLSKGPIETRSRDKFGFQEENKFDSLNLSMLNLDSKFTENVSKSSLRNGVYGMNAVYQKNNANLVSNVISNKYNGSIQHNKEINNNTGNNINTNESNNTNATDKRFKTLPAAETLPRNEVLGGYIFVCNNDTMQEDLKRQLFGLPPRYRDSVRAITPGLPLFLYNYTTHQLHGIFEAASFGGSNIDPTAWEDKKCKGESRFPAQVRIRVRKLCKALEEDSFRPVLHHYDGPKFRLELSVPETLDLLDLCEQAGSAA

SEQ ID NO: 20274 - protein, 303 aa, Glycine max; identical to SEQ ID NO: 19857

SEQ ID NO: 20275 - protein, 300 aa, Glycine max; identical to SEQ ID NO: 19858

SEQ ID NO: 20276 - DNA, 1476 bp, Glycine max
atctctaaaagagttctttatagtacttgggatggttgcaggatatggaattggtagcttgttcgttgaaactgtagctgggtggcggtatatgtatggagttagtagtcctatggcaataatcatgggacttggaatgtggtggctcccagcttctcctagatggttacttttacgtgctatacaaggaaaaggggatgttcagaattcaaaagacatagtaattcgtagtttgtgccagcttcaaggtcaagcttttaatgattccattccttggcaagtagatgagattctggcagaactttcttatctaggtgaagaaaaagaagctacctttggagaactgttccaaggaaaatgcttgaaagccctctggattggtgcaggattggtcttgtttcagcagatcacagggcaacctagtgtgctctactatgctggatcaatctttcagagtgcaggattctctggagcatctgatgcaacccgagtctctattctccttggggtttttaagttgattatgactggagttgctgttgtcgttgttgataaacttggaagaaggcctttactacttgggggagtttcagggatagtaagttccttcttgtttctttgattgtgtagtaatatcctgagaagagaaaacttcctcagttcctcatttctatctcaaattgagagggttatgccaatctgctaatcagtgctgcacggatggtcattcagcttagctaatttacaagagaggaatgattgtgacatggttgatcattgttaaaaatttaagaactcgtgtttatttgtatcacaggtgatctctttattctttctgggttcatattacattttcttggataatacaccagttgttgctgtagttggtctgctgttgtacgtaggcagttatcaggtgaatatgcttttttatagcattcgttagatcaaatatattggagtctcacttagagcctgagataaggagtaccattctttcttatcgtaatgcttacatccagtatcattcttataccatgcagtgttatttaaatggttcttcattatcttttttcagatttcctttggtccaattggttggctaatgatagcagagattttccccttgcgcctaagaggtcgaggactaagtatagctgtactcgtcaattttggtgcaaatgccctggtgacatttgctttttccccactgaaggcattattgggagcaggaattttgttttacacatttggtgtaatagcggtgacatctcttgtattcatataccttgttataccagaaaccaaggggcttacactagaggagattgaggccaaatgcctctaatcagtcaccttgttgcctctataaatatctgtttttagtactctgttgcaacttgtcttgaatattgtaatgacacatattatattaataaaaatatgtaatgatgaatataggtttatttatttatc

SEQ ID NO: 20277 - protein, 206 aa, Glycine max
SLKEFFIVLGMVAGYGIGSLFVETVAGWRYMYGVSSPMAIIMGLGMWWLPASPRWLLLRAIQGKGDVQNSKDIVIRSLCQLQGQAFNDSIPWQVDEILAELSYLGEEKEATFGELFQGKCLKALWIGAGLVLFQQITGQPSVLYYAGSIFQSAGFSGASDATRVSILLGVFKLIMTGVAVVVVDKLGRRPLLLGGVSGIVSSFLFL

SEQ ID NO: 20278 - protein, 196 aa, Glycine max
MVAGYGIGSLFVETVAGWRYMYGVSSPMAIIMGLGMWWLPASPRWLLLRAIQGKGDVQNSKDIVIRSLCQLQGQAFNDSIPWQVDEILAELSYLGEEKEATFGELFQGKCLKALWIGAGLVLFQQITGQPSVLYYAGSIFQSAGFSGASDATRVSILLGVFKLIMTGVAVVVVDKLGRRPLLLGGVSGIVSSFLFL

SEQ ID NO: 20279 - protein, 176 aa, Glycine max
MYGVSSPMAIIMGLGMWWLPASPRWLLLRAIQGKGDVQNSKDIVIRSLCQLQGQAFNDSIPWQVDEILAELSYLGEEKEATFGELFQGKCLKALWIGAGLVLFQQITGQPSVLYYAGSIFQSAGFSGASDATRVSILLGVFKLIMTGVAVVVVDKLGRRPLLLGGVSGIVSSFLFL

SEQ ID NO: 20280 - DNA, 1597 bp, Glycine max
ggcagctgagacactgcaaaaagagttatatagagagagaaaagaaaaatgcactgacacagtgacacagtggttctctcacctctccttctctgtgtaactctgccaccatcttcatttccccaagagaaaaagaaaaaggaaaagaaaaaaactgttcaacttttttttaactgaatcaatcactagcttccatttcttcacaggtggaactgtgaatgtgcaccacagctttttgatcctgttcctaaaattttcctgtgaaagattctgaaggcaattgaagtaaatgccatggatcgtggggaccaaatggcgttatccgggtcttactatatgcagcaaagaggaatacctggatctggagcaccacctgagttacatatttcgcctaatatgcgtccaatctctaatccaaatttaccatttcaatccagcattggtggtggtaccattggatccacattgccattggaatcttcagcaatttcagctcatggtgtcaatgtgggagctcctactggggcacctccaggggaacctgttaagaggaagagaggaaggcctaggaaatatggaaccgacggaagtgtgtcattggcattgactccaactccaacatcatctagctatcctggagccttgacacaaagccagaaacggggcagagggcgcccacccgggactgggaagaaacagcaattggcttcgcttggtgaattgatgtctggttcagctgggatgggattcactcctcatataatcaatattgcaagtggagaagacattacaacaaaaatcatggcattttctcagcagggagctagagctgtatgcattttgtcagccaatggtgctgtctctactgtcacacttcgtcagccatcaacttcaggtggcactgtcacatacgaggggcgctttgagatagtgtgtctgtcaggctcttacttggtcaccgataatggtggctcacgcaatcgaactggtggattgagtgtgtcccttgctagtcctgatggtcgtgtcattggtggtggagttggtggagtgcttattgcatcaagtcctgttcaggtggtagttgggagttttctatggggtggatcaaagacaaagaacaagaaaaaggaatcctcagaaggttcagaagttgctgtggagtcagatcaccagggagttcataatccagtttcactgaatagcagcatctcaccaaatcaaaaccttcctccaacccccccatctttaaatccttggtcgacatcgcgtccattggacatgcgtaattcccatgttgacatcgatttaatgcgtgggtgacacattgttgaatatacactagtgctgtgtatatatatttcagattcatggtcgctcatctaatttttgttgtagtagtaaaatgacagaatgggaagtaccaacagcagagtagagccagctgacttttgcaaattgataaatctcacttatatccatccacccttgatgattattgacttggggttgtactcatatttttgtagctgtgaggaattttcaatttgaaggttgtatgttcctgattggtaatgatacaatttgtcttattttg

SEQ ID NO: 20281 - protein, 342 aa, Glycine max
MDRGDQMALSGSYYMQQRGIPGSGAPPELHISPNMRPISNPNLPFQSSIGGGTIGSTLPLESSAISAHGVNVGAPTGAPPGEPVKRKRGRPRKYGTDGSVSLALTPTPTSSSYPGALTQSQKRGRGRPPGTGKKQQLASLGELMSGSAGMGFTPHIINIASGEDITTKIMAFSQQGARAVCILSANGAVSTVTLRQPSTSGGTVTYEGRFEIVCLSGSYLVTDNGGSRNRTGGLSVSLASPDGRVIGGGVGGVLIASSPVQVVVGSFLWGGSKTKNKKKESSEGSEVAVESDHQGVHNPVSLNSSISPNQNLPPTPPSLNPWSTSRPLDMRNSHVDIDLMRG

SEQ ID NO: 20282 - protein, 336 aa, Glycine max
MALSGSYYMQQRGIPGSGAPPELHISPNMRPISNPNLPFQSSIGGGTIGSTLPLESSAISAHGVNVGAPTGAPPGEPVKRKRGRPRKYGTDGSVSLALTPTPTSSSYPGALTQSQKRGRGRPPGTGKKQQLASLGELMSGSAGMGFTPHIINIASGEDITTKIMAFSQQGARAVCILSANGAVSTVTLRQPSTSGGTVTYEGRFEIVCLSGSYLVTDNGGSRNRTGGLSVSLASPDGRVIGGGVGGVLIASSPVQVVVGSFLWGGSKTKNKKKESSEGSEVAVESDHQGVHNPVSLNSSISPNQNLPPTPPSLNPWSTSRPLDMRNSHVDIDLMRG

SEQ ID NO: 20283 - protein, 328 aa, Glycine max
MQQRGIPGSGAPPELHISPNMRPISNPNLPFQSSIGGGTIGSTLPLESSAISAHGVNVGAPTGAPPGEPVKRKRGRPRKYGTDGSVSLALTPTPTSSSYPGALTQSQKRGRGRPPGTGKKQQLASLGELMSGSAGMGFTPHIINIASGEDITTKIMAFSQQGARAVCILSANGAVSTVTLRQPSTSGGTVTYEGRFEIVCLSGSYLVTDNGGSRNRTGGLSVSLASPDGRVIGGGVGGVLIASSPVQVVVGSFLWGGSKTKNKKKESSEGSEVAVESDHQGVHNPVSLNSSISPNQNLPPTPPSLNPWSTSRPLDMRNSHVDIDLMRG

SEQ ID NO: 20284 - DNA, 1189 bp, Glycine max
ggccactaaactgctgaagtatcatcctaccattggtgttcaagttgtgattggagggacaagacttgcgttagagcagaaacgaatgcaagcaaacccctgccaagctgatgggtgtgaaggtcttggtgcttgatgaagctgatcatttactagacatgggatttcgcaaagacattgagaagataattgctgcggtccctaaacaacgacaaactcttatgttttctgccactgttccagaagaggtccgtcaagtatgtcatattgctttgagaagggatcatgaatttatcaatacagttcaagagggaacggaggagacacattcacaggtctgccagacgcatttagttgccccattggacaagcatttctctttactatatgttcttctgaaggaccacattgcagatgatgttgattacaaggtccttgttttctgcacaactgctatggtcactagacttgttgctgaacttcttggtgagttgaacttgaatgtgagagaaatccattcaagaaagcctcagagttacagaaccagagtctctgaggaatttcggaagtcaaagggtctcatcctggttacttcagatgtatctgcacgtggagttgattatccagatgtcactcttgttatacaggttggtttgccagcagatagagaacagtatatacatagactcggtagaacagggcgaagagggaaagaagggcagggcatactgctgctggctccttgggaagacttctttttatctaccgtaaaagatttgcctattgagaaagctcctgtagtaccttcagttgatcctgacaccaagaaaaaggtggaaaaagccctatccaatgtggagatgaagaataaagaagcagcatatcaggcgtggcttggttactacaattccaacaaaaaagtggggcgtgacaagtacaggctagtggagcttgcaaacgagtttagtcgaagcatggggcttgataaccctccagctatacctaagctagtccttggcaagatgggcctcaggaatatccctggtttacgggcaaaataggttattctttcaattcaatttctgacaggtcatgtgaaatatgtattgttttttagttaaaatggtcccttatattgtaagacttgagacatcaaattttcaattatatatacatccattttttgttt

SEQ ID NO: 20285 - protein, 316 aa, Glycine max
MGVKVLVLDEADHLLDMGFRKDIEKIIAAVPKQRQTLMFSATVPEEVRQVCHIALRRDHEFINTVQEGTEETHSQVCQTHLVAPLDKHFSLLYVLLKDHIADDVDYKVLVFCTTAMVTRLVAELLGELNLNVREIHSRKPQSYRTRVSEEFRKSKGLILVTSDVSARGVDYPDVTLVIQVGLPADREQYIHRLGRTGRRGKEGQGILLLAPWEDFFLSTVKDLPIEKAPVVPSVDPDTKKKVEKALSNVEMKNKEAAYQAWLGYYNSNKKVGRDKYRLVELANEFSRSMGLDNPPAIPKLVLGKMGLRNIPGLRAK

SEQ ID NO: 20286 - protein, 300 aa, Glycine max
MGFRKDIEKIIAAVPKQRQTLMFSATVPEEVRQVCHIALRRDHEFINTVQEGTEETHSQVCQTHLVAPLDKHFSLLYVLLKDHIADDVDYKVLVFCTTAMVTRLVAELLGELNLNVREIHSRKPQSYRTRVSEEFRKSKGLILVTSDVSARGVDYPDVTLVIQVGLPADREQYIHRLGRTGRRGKEGQGILLLAPWEDFFLSTVKDLPIEKAPVVPSVDPDTKKKVEKALSNVEMKNKEAAYQAWLGYYNSNKKVGRDKYRLVELANEFSRSMGLDNPPAIPKLVLGKMGLRNIPGLRAK

SEQ ID NO: 20287 - protein, 279 aa, Glycine max
MFSATVPEEVRQVCHIALRRDHEFINTVQEGTEETHSQVCQTHLVAPLDKHFSLLYVLLKDHIADDVDYKVLVFCTTAMVTRLVAELLGELNLNVREIHSRKPQSYRTRVSEEFRKSKGLILVTSDVSARGVDYPDVTLVIQVGLPADREQYIHRLGRTGRRGKEGQGILLLAPWEDFFLSTVKDLPIEKAPVVPSVDPDTKKKVEKALSNVEMKNKEAAYQAWLGYYNSNKKVGRDKYRLVELANEFSRSMGLDNPPAIPKLVLGKMGLRNIPGLRAK

SEQ ID NO: 20288 - DNA, 1628 bp, Glycine max
agtgcagtgtgaagtgcgtataatccatattctcatggcttccgttgcattcagaaacctaaattctaagcgcttccttttctctttgcatttcacaaatgctaattaccattcactctctcgtggaacttgcaccgtcatatcccaaaactgcaataatgcatttcctttggagctcgtttctctacggagatccttagccactttcgctcgaacaaagccccatcttaacgtgggcacaattgggcatgttgatcatgggaaaaccacactgactgctgcaattaccaaggtgctagctgaagaaggtaaagctaaggccattgcctttgaggacatagacaaggctcccgaggagaagaagagagggattactattgcgactgctcatgtagagtacgagacagcaaagaggcactatgcccatgttgattgcccaggacatgcagactatgttaagaacatgataactggagctgcacaaatggatggtggaattcttgtcgtttctgctcctgatgggccaatgcctcaaacaaaggaacatatactgcttgctcgtcaggttggtgtgccatcattggtctgctttctaaataaggttgatgctgttgatgatccagagttgcttgaacttgtggaaatggagcttcgtgaactgcttaatttctacaaatttcctggggatgatattccaattgtacgaggttctgctctggctgcattgcagggaactaatgaagaacttggaaagaaggctatcttaaaactaatggatgctgtggatgaatacatttcggatcctgtgcggcaacttgacaaacctttcttaatgccagtagaagatgttttctcaattcaggggcgtggaactgttgtgactggtcgtgttgaacaaggcaccatcaaagtaggtgaggaggttgaagtattgggactaacacagagtggacctttgaagactactgtaactggtgtggaaatgttcaagaaaattttggatcgaggggaagctggtgataatgtgggacttcttctacgtggtctgaagcgcgatgatgtacagagaggaatggtcgtgaccaagcctggtgcatttaaaacatataagaagtttgaagcagagatttatgttctctcaaaagatgaaggtggccgtcatactgcttttttctctaattataagccacagttttacttgaggactgcagatgttaccggaaaggtggaattaccggaaagtgttaagatggttatgcctggtgataatgtgactgctacttttgagctgatatcacctgttcctcttgaaataggacaaagatttgctttgagagagggaggcagaacagttggtgcaggagttgtttccaaagtgatggcctaggatgttggtctaaattctacaacatcttttgtaatttgtaaataagttgagtagggactgagagctatgttctaggaggattctatggtgtgactattttttgacacttggtgcgctggttccgtttcaatgtgttttgttttgtttattttagagaattatactagttcattatgtttttcgtggaccagagggaaaatggttcaaattttttggtttagttaataatgtcaatttcttc

SEQ ID NO: 20289 - protein, 461 aa, Glycine max
VQCEVRIIHILMASVAFRNLNSKRFLFSLHFTNANYHSLSRGTCTVISQNCNNAFPLELVSLRRSLATFARTKPHLNVGTIGHVDHGKTTLTAAITKVLAEEGKAKAIAFEDIDKAPEEKKRGITIATAHVEYETAKRHYAHVDCPGHADYVKNMITGAAQMDGGILVVSAPDGPMPQTKEHILLARQVGVPSLVCFLNKVDAVDDPELLELVEMELRELLNFYKFPGDDIPIVRGSALAALQGTNEELGKKAILKLMDAVDEYISDPVRQLDKPFLMPVEDVFSIQGRGTVVTGRVEQGTIKVGEEVEVLGLTQSGPLKTTVTGVEMFKKILDRGEAGDNVGLLLRGLKRDDVQRGMVVTKPGAFKTYKKFEAEIYVLSKDEGGRHTAFFSNYKPQFYLRTADVTGKVELPESVKMVMPGDNVTATFELISPVPLEIGQRFALREGGRTVGAGVVSKVMA

SEQ ID NO: 20290 - protein, 450 aa, Glycine max
MASVAFRNLNSKRFLFSLHFTNANYHSLSRGTCTVISQNCNNAFPLELVSLRRSLATFARTKPHLNVGTIGHVDHGKTTLTAAITKVLAEEGKAKAIAFEDIDKAPEEKKRGITIATAHVEYETAKRHYAHVDCPGHADYVKNMITGAAQMDGGILVVSAPDGPMPQTKEHILLARQVGVPSLVCFLNKVDAVDDPELLELVEMELRELLNFYKFPGDDIPIVRGSALAALQGTNEELGKKAILKLMDAVDEYISDPVRQLDKPFLMPVEDVFSIQGRGTVVTGRVEQGTIKVGEEVEVLGLTQSGPLKTTVTGVEMFKKILDRGEAGDNVGLLLRGLKRDDVQRGMVVTKPGAFKTYKKFEAEIYVLSKDEGGRHTAFFSNYKPQFYLRTADVTGKVELPESVKMVMPGDNVTATFELISPVPLEIGQRFALREGGRTVGAGVVSKVMA

SEQ ID NO: 20291 - protein, 307 aa, Glycine max
MITGAAQMDGGILVVSAPDGPMPQTKEHILLARQVGVPSLVCFLNKVDAVDDPELLELVEMELRELLNFYKFPGDDIPIVRGSALAALQGTNEELGKKAILKLMDAVDEYISDPVRQLDKPFLMPVEDVFSIQGRGTVVTGRVEQGTIKVGEEVEVLGLTQSGPLKTTVTGVEMFKKILDRGEAGDNVGLLLRGLKRDDVQRGMVVTKPGAFKTYKKFEAEIYVLSKDEGGRHTAFFSNYKPQFYLRTADVTGKVELPESVKMVMPGDNVTATFELISPVPLEIGQRFALREGGRTVGAGVVSKVMA

SEQ ID NO: 20292 - DNA, 1175 bp, Glycine max
gggtagcaaaggcacaaaaggcctttctggagtttgcagaagcaagtggatatccaatagcagttatgccgtccgggaagggactagtaccagagcatcatccacatttcattgggacatactggggtgctgtcagctctagcttttgtggggaaattgtggagtctgctgatgcatatgtttttgttggccccatcttcaatgactatagctccgttggatactcgttgttgataaagaaggagaaagccataatagtgcagcctaatcgggtaaccattggcaatggtccttccttgggctgggttttcatggctgatttcttaactgcattggctaaaaaagtgaagaccaacaccgcagctgtggagaattaccggcgtatctatgtcccaccaggcattcctctgaggcgagagaaggatgaaccacttagagttaatgttctattcaagcacattcaagaactgctaagcggagatactgctgtaatagctgaaactggagactcatggttcaactgtcagaagctccatctgcctgagaattgcgggtatgaattccagatgcagtatggatccattggttggtcagtaggtgctactcttggatatgcacaggctgcaacagacaagcgtgtaattgcttgcattggtgatggcagttttcaggtaacagcacaggatatttcaacaatgattcgctgtggacaaaagaccatcatctttctcatcaataatggaggttatacaattgaagttgagattcatgatggtccatacaatgtgataaagaattgggactacactcgctttgtggacgctatccataatgggcaaggcaaatgctggactgccaaggtacgtacagaggatgatctgactgtagcaattgcaaaagctactggaccacagaaagattcactatgttttatagaagtttttgtacacaaggatgacaccagcatagaattgctggaatggggatctcgtgttgctgctgctaacagtcgtcctcctaatcctcaatagaaaatcatttcctaattattggcctgttttgtgtattttgttgaatagagttccactactggatatttacaagagaaaaacgacaaaaatgaaaaataagttgaaataaatgtttgcttttccagatttgtatctggtctcgtg

SEQ ID NO: 20293 - protein, 342 aa, Glycine max
VAKAQKAFLEFAEASGYPIAVMPSGKGLVPEHHPHFIGTYWGAVSSSFCGEIVESADAYVFVGPIFNDYSSVGYSLLIKKEKAIIVQPNRVTIGNGPSLGWVFMADFLTALAKKVKTNTAAVENYRRIYVPPGIPLRREKDEPLRVNVLFKHIQELLSGDTAVIAETGDSWFNCQKLHLPENCGYEFQMQYGSIGWSVGATLGYAQAATDKRVIACIGDGSFQVTAQDISTMIRCGQKTIIFLINNGGYTIEVEIHDGPYNVIKNWDYTRFVDAIHNGQGKCWTAKVRTEDDLTVAIAKATGPQKDSLCFIEVFVHKDDTSIELLEWGSRVAAANSRPPNPQ

SEQ ID NO: 20294 - protein, 321 aa, Glycine max
MPSGKGLVPEHHPHFIGTYWGAVSSSFCGEIVESADAYVFVGPIFNDYSSVGYSLLIKKEKAIIVQPNRVTIGNGPSLGWVFMADFLTALAKKVKTNTAAVENYRRIYVPPGIPLRREKDEPLRVNVLFKHIQELLSGDTAVIAETGDSWFNCQKLHLPENCGYEFQMQYGSIGWSVGATLGYAQAATDKRVIACIGDGSFQVTAQDISTMIRCGQKTIIFLINNGGYTIEVEIHDGPYNVIKNWDYTRFVDAIHNGQGKCWTAKVRTEDDLTVAIAKATGPQKDSLCFIEVFVHKDDTSIELLEWGSRVAAANSRPPNPQ

SEQ ID NO: 20295 - protein, 239 aa, Glycine max
MADFLTALAKKVKTNTAAVENYRRIYVPPGIPLRREKDEPLRVNVLFKHIQELLSGDTAVIAETGDSWFNCQKLHLPENCGYEFQMQYGSIGWSVGATLGYAQAATDKRVIACIGDGSFQVTAQDISTMIRCGQKTIIFLINNGGYTIEVEIHDGPYNVIKNWDYTRFVDAIHNGQGKCWTAKVRTEDDLTVAIAKATGPQKDSLCFIEVFVHKDDTSIELLEWGSRVAAANSRPPNPQ

SEQ ID NO: 20296 - DNA, 1284 bp, Glycine max
tgggacgcatggagctgatcatgataaacccaaccttaactcaaatgctcctgaagcttccaggccttcttcttccatcaagacagacaatggcatcatcgctcaggaccctccaatgtcggtggtgcagtatgaaacacctgctaatggcatgacacaaaaatgtatagcttcaggtgatggagtaggaaatttaaaacctccttcaggaccactgctctcaaatgtatgtgaaccaagggacagcgttccatcccaattaactacagcagagactaaagtaggaaggggaaacttgaataacattgaccttaataatgtttacaatgatatacagaatactgttgagaatcataagaagccttatcctcctgtggcttcagggatggggtttattgaccatgcctcatggttgcaatgtgattctctcaaatcaagtcctccacagacaagtagaaactcagattcaacctctacccaatcaccatctagttccagtggagaagctcagagtcgcacagatcgaattgtttttaaactctttggcaaggatccatctgattttccccttcttctccgatcacagattctcaactggttatcccgcagtcccacggagatagagagctatataaggccaggttgtatcatattaacaatatatctccgtcttgaaaaatctgcatgggaggagctctactgtaatctaggatcaagcttgagaaagcttcttgctgcatcaaatgattcattttggagaacaggatgggtatatgcaagggtgcagcacgctgtagctttcctgtataacggtcaggtagtcttagatgtgcccttgcgtctcaaaagcccacaacattgtatgatttcatgcattaatccacttgctgttcctgcaagtgctagtgctcagtttattgtgaaaggtttcaacctttcccaatctagcacaaggttgcactgtgcacttgaagggaagtatctggtacatgctagttgtcatgatttgataggtggagctgatgcacccattcagcatctaagcttctcttgtcaaataccaagtgtaactgggagggggtttattgaggtggaagatcatggtcttagcagctgttcctttccatttatagttgcagagcaagaagtttgttcggagatctgcaagctggaaaatgtgattgaggaagctgaaaccactgatgatatccagataaaaaaccaacatatggaagaaaagactcaagctttggatttcttgcaagaaatgggttggcttcttca

SEQ ID NO: 20297 - protein, 427 aa, Glycine max
GTHGADHDKPNLNSNAPEASRPSSSIKTDNGIIAQDPPMSVVQYETPANGMTQKCIASGDGVGNLKPPSGPLLSNVCEPRDSVPSQLTTAETKVGRGNLNNIDLNNVYNDIQNTVENHKKPYPPVASGMGFIDHASWLQCDSLKSSPPQTSRNSDSTSTQSPSSSSGEAQSRTDRIVFKLFGKDPSDFPLLLRSQILNWLSRSPTEIESYIRPGCIILTIYLRLEKSAWEELYCNLGSSLRKLLAASNDSFWRTGWVYARVQHAVAFLYNGQVVLDVPLRLKSPQHCMISCINPLAVPASASAQFIVKGFNLSQSSTRLHCALEGKYLVHASCHDLIGGADAPIQHLSFSCQIPSVTGRGFIEVEDHGLSSCSFPFIVAEQEVCSEICKLENVIEEAETTDDIQIKNQHMEEKTQALDFLQEMGWLL

SEQ ID NO: 20298 - protein, 389 aa, Glycine max
MSVVQYETPANGMTQKCIASGDGVGNLKPPSGPLLSNVCEPRDSVPSQLTTAETKVGRGNLNNIDLNNVYNDIQNTVENHKKPYPPVASGMGFIDHASWLQCDSLKSSPPQTSRNSDSTSTQSPSSSSGEAQSRTDRIVFKLFGKDPSDFPLLLRSQILNWLSRSPTEIESYIRPGCIILTIYLRLEKSAWEELYCNLGSSLRKLLAASNDSFWRTGWVYARVQHAVAFLYNGQVVLDVPLRLKSPQHCMISCINPLAVPASASAQFIVKGFNLSQSSTRLHCALEGKYLVHASCHDLIGGADAPIQHLSFSCQIPSVTGRGFIEVEDHGLSSCSFPFIVAEQEVCSEICKLENVIEEAETTDDIQIKNQHMEEKTQALDFLQEMGWLL

SEQ ID NO: 20299 - protein, 377 aa, Glycine max
MTQKCIASGDGVGNLKPPSGPLLSNVCEPRDSVPSQLTTAETKVGRGNLNNIDLNNVYNDIQNTVENHKKPYPPVASGMGFIDHASWLQCDSLKSSPPQTSRNSDSTSTQSPSSSSGEAQSRTDRIVFKLFGKDPSDFPLLLRSQILNWLSRSPTEIESYIRPGCIILTIYLRLEKSAWEELYCNLGSSLRKLLAASNDSFWRTGWVYARVQHAVAFLYNGQVVLDVPLRLKSPQHCMISCINPLAVPASASAQFIVKGFNLSQSSTRLHCALEGKYLVHASCHDLIGGADAPIQHLSFSCQIPSVTGRGFIEVEDHGLSSCSFPFIVAEQEVCSEICKLENVIEEAETTDDIQIKNQHMEEKTQALDFLQEMGWLL

SEQ ID NO: 20300 - DNA, 1265 bp, Glycine max
atgatggtttaagtaatcatcaaaatgaagtttcaaaggaaacaacagatagtaataccattatgcaatcagtttctgttgatgtcccagagagcattgataattcagtcctgcatgaggaagtccccacacataaaggcaatttatatgctttggatgccatagttcctggtgatagggagatcaagaaacaagaaatagaattttctgaaaatgatgtgcacctgaaggacagtgaaaatggaaagccctcagatactcctattaatggctcatctatgacaaatgaaagttctgtgaagaagaaacctaggatcatacggtctgttaaggaagctagggattatctttcgaaaaaacatgacaaacaagatcctggcactagcacggaatgtaaaattgaactcgcgaaagaaaatattgctgatatgaaatcttcaagtgttattgatttaaatggccagaagtaccagaatttggagaagaatacaattgtgtctaaaagtgacacattaaatggaatattggattctaagcctctcataaatcctagtgaagattctaatcagaaggataaggaatttagcccaacaaaggatgactacttcaaagactctggtgttgaacctggcctaggaaaccttcaagagtctgacaccactttagaccatgaaattaatggcattggtacagagacacggctgcctgtaaagccagaaaattggccagacaaaagcctcattgaagttgagcatagcaggagtgatgctttaaatggattatcagattctaagtctgccacaaatgccagggaagattccaatcagaagaataagaaatttggcactacaaaggatgactacctcaaagatgctggtgttgaacctggaataagaaaccatcaaaagtcaggcaccactttagacagtgaagttaatggcattagtacagagacaaggggctctggaaagacagaaaactggctggagaaaaacttccatgaagttgagcctatagttaagcaaattagagcaggatttagaaataactacatggctgcaaaagagagagtcaatcaaactttagatataccaactgagatggaatcacttgggggtgttgaagatgatggagaacttgactggatgcaggatgatcatcttagagatattgtctttcgagtccgtgagaatgagctgtctggacgggacccattttatttgatgaatgatgaagataaggacacattttttagaggtcttgtg

SEQ ID NO: 20301 - protein, 421 aa, Glycine max
DGLSNHQNEVSKETTDSNTIMQSVSVDVPESIDNSVLHEEVPTHKGNLYALDAIVPGDREIKKQEIEFSENDVHLKDSENGKPSDTPINGSSMTNESSVKKKPRIIRSVKEARDYLSKKHDKQDPGTSTECKIELAKENIADMKSSSVIDLNGQKYQNLEKNTIVSKSDTLNGILDSKPLINPSEDSNQKDKEFSPTKDDYFKDSGVEPGLGNLQESDTTLDHEINGIGTETRLPVKPENWPDKSLIEVEHSRSDALNGLSDSKSATNAREDSNQKNKKFGTTKDDYLKDAGVEPGIRNHQKSGTTLDSEVNGISTETRGSGKTENWLEKNFHEVEPIVKQIRAGFRNNYMAAKERVNQTLDIPTEMESLGGVEDDGELDWMQDDHLRDIVFRVRENELSGRDPFYLMNDEDKDTFFRGLV

SEQ ID NO: 20302 - protein, 401 aa, Glycine max
MQSVSVDVPESIDNSVLHEEVPTHKGNLYALDAIVPGDREIKKQEIEFSENDVHLKDSENGKPSDTPINGSSMTNESSVKKKPRIIRSVKEARDYLSKKHDKQDPGTSTECKIELAKENIADMKSSSVIDLNGQKYQNLEKNTIVSKSDTLNGILDSKPLINPSEDSNQKDKEFSPTKDDYFKDSGVEPGLGNLQESDTTLDHEINGIGTETRLPVKPENWPDKSLIEVEHSRSDALNGLSDSKSATNAREDSNQKNKKFGTTKDDYLKDAGVEPGIRNHQKSGTTLDSEVNGISTETRGSGKTENWLEKNFHEVEPIVKQIRAGFRNNYMAAKERVNQTLDIPTEMESLGGVEDDGELDWMQDDHLRDIVFRVRENELSGRDPFYLMNDEDKDTFFRGLV

SEQ ID NO: 20303 - protein, 329 aa, Glycine max
MTNESSVKKKPRIIRSVKEARDYLSKKHDKQDPGTSTECKIELAKENIADMKSSSVIDLNGQKYQNLEKNTIVSKSDTLNGILDSKPLINPSEDSNQKDKEFSPTKDDYFKDSGVEPGLGNLQESDTTLDHEINGIGTETRLPVKPENWPDKSLIEVEHSRSDALNGLSDSKSATNAREDSNQKNKKFGTTKDDYLKDAGVEPGIRNHQKSGTTLDSEVNGISTETRGSGKTENWLEKNFHEVEPIVKQIRAGFRNNYMAAKERVNQTLDIPTEMESLGGVEDDGELDWMQDDHLRDIVFRVRENELSGRDPFYLMNDEDKDTFFRGLV

SEQ ID NO: 20304 - DNA, 1853 bp, Glycine max
atcaacagccaaaaataatttcaattttgttgtctagtaaaaacttgaccggcaatattcctttggacataacgaaattgactggtttggttgaactacggcttgatggtaatatgttgactggcccaataccagatttcacgggatgcatggacttaaagatcattcatcttgagaacaatcagttgacaggtgcactctcaacctctttggcgaaccttccaaatttgagggaactgtatgtccaaaataatatgttatccggaactgtaccatcggatcttctgagtaaagatttggatttgaactacactggaaacactaatcttcataaaggtagcagaaaaaagagtcacttgtatgtgattattggttcagcagttggggctgctgttctacttgtggccactattatatcgtgcttggttatgcgtaaaggaaagacaaaatattacgaacaaaacagccttgtttctcacccttctcagagtatggattcttctaagagcattggtccttctgaagtggcacactgcttcagcttttctgaaattgaaaattctacaaataattttgagaaaaaaattggttccggaggttttggagttgtttactatgggaaactgaaagatggaaaagagatagcagttaaagttctaaccagcaattcctatcagggaaaacgagagttctccaatgaggtaactcttctctcaagaatacatcatagaaacttggtacagcttctcgggtattgtcgagaagaaggaaatagcatgcttatttatgagttcatgcataatggaactctcaaggaacatctttatggcccattaacacatggacggagcatcaattggatgaagcgccttgagattgcagaagactctgcaaaagggattgagtatcttcacacaggctgtgttcctgctgtcatccatcgagacttaaaaagcagcaacattcttcttgacaaacacatgagagccaaggtttcagattttggtctctcaaaacttgctgtggatggagcctcccatgtgtcaagcatagttcgtgggacggtaggatatttggatcccgagtactatatttcccagcagcttactgacaagagtgatatttatagttttggtgtaattcttcttgaactcatatctggtcaagaagcaatatctaatgacagctttggtgctaattgccgaaacatagtccagtgggcaaaattacacattgagagtggagatatacaaggtattattgatcctgtgctacaaaacaactatgacctacaatcaatgtggaaaatagcagagaaggcattaatgtgtgttcaaccacatggacatatgcgaccatcaatttcagaagttctgaaggagatccaagatgcaattgctattgagagagaggctgaaggtaattcggatgagccaagaaattcagttcattcttcaatcaacatgggttctatggatttggctgcaactgagaactacctctcaattgatgaatccattgcacagcctattgcacgatagagtaaacataatgcacaatttttttcctattagattttattttttaaaaatgggcatggccttgttcctatgttgtctaaagtttgatgcccctcctagttttcatttgtcatctcggatgttaataatgtatttaggtttttttgctctgcatgtaacttgtagttgtaggtttcaaattttggtttttgcctggttgaatgtggcaacattaatatggcaaatctagagtgtgcttggacctgcatagtcagcgaatgagtgtgtatattgattattttttgtagaatgtatgcaaagagatttgaactt

SEQ ID NO: 20305 - protein, 512 aa, Glycine max
QQPKIISILLSSKNLTGNIPLDITKLTGLVELRLDGNMLTGPIPDFTGCMDLKIIHLENNQLTGALSTSLANLPNLRELYVQNNMLSGTVPSDLLSKDLDLNYTGNTNLHKGSRKKSHLYVIIGSAVGAAVLLVATIISCLVMRKGKTKYYEQNSLVSHPSQSMDSSKSIGPSEVAHCFSFSEIENSTNNFEKKIGSGGFGVVYYGKLKDGKEIAVKVLTSNSYQGKREFSNEVTLLSRIHHRNLVQLLGYCREEGNSMLIYEFMHNGTLKEHLYGPLTHGRSINWMKRLEIAEDSAKGIEYLHTGCVPAVIHRDLKSSNILLDKHMRAKVSDFGLSKLAVDGASHVSSIVRGTVGYLDPEYYISQQLTDKSDIYSFGVILLELISGQEAISNDSFGANCRNIVQWAKLHIESGDIQGIIDPVLQNNYDLQSMWKIAEKALMCVQPHGHMRPSISEVLKEIQDAIAIEREAEGNSDEPRNSVHSSINMGSMDLAATENYLSIDESIAQPIAR

SEQ ID NO: 20306 - protein, 475 aa, Glycine max
MLTGPIPDFTGCMDLKIIHLENNQLTGALSTSLANLPNLRELYVQNNMLSGTVPSDLLSKDLDLNYTGNTNLHKGSRKKSHLYVIIGSAVGAAVLLVATIISCLVMRKGKTKYYEQNSLVSHPSQSMDSSKSIGPSEVAHCFSFSEIENSTNNFEKKIGSGGFGVVYYGKLKDGKEIAVKVLTSNSYQGKREFSNEVTLLSRIHHRNLVQLLGYCREEGNSMLIYEFMHNGTLKEHLYGPLTHGRSINWMKRLEIAEDSAKGIEYLHTGCVPAVIHRDLKSSNILLDKHMRAKVSDFGLSKLAVDGASHVSSIVRGTVGYLDPEYYISQQLTDKSDIYSFGVILLELISGQEAISNDSFGANCRNIVQWAKLHIESGDIQGIIDPVLQNNYDLQSMWKIAEKALMCVQPHGHMRPSISEVLKEIQDAIAIEREAEGNSDEPRNSVHSSINMGSMDLAATENYLSIDESIAQPIAR

SEQ ID NO: 20307 - protein, 463 aa, Glycine max
MDLKIIHLENNQLTGALSTSLANLPNLRELYVQNNMLSGTVPSDLLSKDLDLNYTGNTNLHKGSRKKSHLYVIIGSAVGAAVLLVATIISCLVMRKGKTKYYEQNSLVSHPSQSMDSSKSIGPSEVAHCFSFSEIENSTNNFEKKIGSGGFGVVYYGKLKDGKEIAVKVLTSNSYQGKREFSNEVTLLSRIHHRNLVQLLGYCREEGNSMLIYEFMHNGTLKEHLYGPLTHGRSINWMKRLEIAEDSAKGIEYLHTGCVPAVIHRDLKSSNILLDKHMRAKVSDFGLSKLAVDGASHVSSIVRGTVGYLDPEYYISQQLTDKSDIYSFGVILLELISGQEAISNDSFGANCRNIVQWAKLHIESGDIQGIIDPVLQNNYDLQSMWKIAEKALMCVQPHGHMRPSISEVLKEIQDAIAIEREAEGNSDEPRNSVHSSINMGSMDLAATENYLSIDESIAQPIAR

SEQ ID NO: 20308 - DNA, 1558 bp, Glycine max
attaaagaatcagattatcattccttgtttatggagctttctagtttgttactaaatgggacttctgaattgcacttggcaaatttccttcatatgataacaaccatgacagaatctggttcctctgaggagcaaatagaatttttcattttgaatagccaaaaagtaccaaaacttccagatgaagaatctgtttggacattatcttccgtgtcatcaattgtagaggctgataagttgaacccttcagatcatgtcccatcaacaaatgaacagatctttcctagaaggaagcccggagtatgccccaactggccacctgctggttggaaaactgcaccagatttcaggtatgcccaggccaatggtttcaagaccaaaccttcccagattagcagcttttctgaaatgaagaaggatgacaattcagcaagcataatttctccaccagtttgtgctgaacaaggatcagttactgttgactggaccttcaaagaagatccaccagcaagttcagtggcactagtgttgcatgaaaatgataactttgaagatcaatcttgtcatgattttgatcccactgcttttagtatccatgctgattctgatcctgttagtttggatgaatctctggatgaagctcatttcagttcaccagcttttggcaagagagatcaattacaaactggtacatttgatgctgcacaagcaaaggaaactggcagattaggtgaatttcttgcatgcaaatactttgtcgataaagttggcaatactgcagtaaggtgggttaataaagataatgaaactggacttccatatgatttagtcattggggaggataacagccaagaattcatagaagttaaagcaaccagatctccaagaaaagactggttcaacatatcagcgagagagtggcagtttgcaaatgaaagaggccaatcttttagcattgcatttgtcgctataatgggaaataatgttgcaagggtcacgatattcaaagatccagtgaagttatgccagcgaggtgagctgcaattggctgttatgatgcgaagacaacagaagcagttctctgttgtctcatagcttctgttcttgttttactatgttgggtggatagacttagtgaagcccatattatgatttgcaaaaagctatcttttggcatcatggcatgccatagaaatccaattggatatcacttaatgcaagatatgttgatcacgtgagttgttgtacacaacattttgctgctacatggatttgtttctacttttgcatggaagatacctgatgcaaatagtgtgagaatacaataagcagattttttctgccttctcttattcatggagattcagtttcattcaggtcttcttgaaagtagttcctgtcagtttcagctttttgtatgtgtatatctctagtgtttatggctgcaacatttgcgtgtaacatatttttcgtttaattgggcgaagcttaaggtccacatctgagcatgtaaatacaaacttgtctacgcggttatgttccactatctattaagacc

SEQ ID NO: 20309 - protein, 364 aa, Glycine max
IKESDYHSLFMELSSLLLNGTSELHLANFLHMITTMTESGSSEEQIEFFILNSQKVPKLPDEESVWTLSSVSSIVEADKLNPSDHVPSTNEQIFPRRKPGVCPNWPPAGWKTAPDFRYAQANGFKTKPSQISSFSEMKKDDNSASIISPPVCAEQGSVTVDWTFKEDPPASSVALVLHENDNFEDQSCHDFDPTAFSIHADSDPVSLDESLDEAHFSSPAFGKRDQLQTGTFDAAQAKETGRLGEFLACKYFVDKVGNTAVRWVNKDNETGLPYDLVIGEDNSQEFIEVKATRSPRKDWFNISAREWQFANERGQSFSIAFVAIMGNNVARVTIFKDPVKLCQRGELQLAVMMRRQQKQFSVVS

SEQ ID NO: 20310 - protein, 354 aa, Glycine max
MELSSLLLNGTSELHLANFLHMITTMTESGSSEEQIEFFILNSQKVPKLPDEESVWTLSSVSSIVEADKLNPSDHVPSTNEQIFPRRKPGVCPNWPPAGWKTAPDFRYAQANGFKTKPSQISSFSEMKKDDNSASIISPPVCAEQGSVTVDWTFKEDPPASSVALVLHENDNFEDQSCHDFDPTAFSIHADSDPVSLDESLDEAHFSSPAFGKRDQLQTGTFDAAQAKETGRLGEFLACKYFVDKVGNTAVRWVNKDNETGLPYDLVIGEDNSQEFIEVKATRSPRKDWFNISAREWQFANERGQSFSIAFVAIMGNNVARVTIFKDPVKLCQRGELQLAVMMRRQQKQFSVVS

SEQ ID NO: 20311 - protein, 333 aa, Glycine max
MITTMTESGSSEEQIEFFILNSQKVPKLPDEESVWTLSSVSSIVEADKLNPSDHVPSTNEQIFPRRKPGVCPNWPPAGWKTAPDFRYAQANGFKTKPSQISSFSEMKKDDNSASIISPPVCAEQGSVTVDWTFKEDPPASSVALVLHENDNFEDQSCHDFDPTAFSIHADSDPVSLDESLDEAHFSSPAFGKRDQLQTGTFDAAQAKETGRLGEFLACKYFVDKVGNTAVRWVNKDNETGLPYDLVIGEDNSQEFIEVKATRSPRKDWFNISAREWQFANERGQSFSIAFVAIMGNNVARVTIFKDPVKLCQRGELQLAVMMRRQQKQFSVVS

SEQ ID NO: 20312 - DNA, 1267 bp, Glycine max
acttagtttggatttcagccattgaaaagtcttaaaaaatttagtttaggtcttatttaatctcaaaaccagctcatatgcattagtttgaaaacggtctaataaaacaatagttgacagaagtggtaatcacttatatcttttgatcaagaaatcaggactagcatctgattgactcttagacataaaatgaatcttcttgtgagaagaatatttatattttatgtgctcacgattttcatgaaaattaatcatcaatttcacagaaatgttttatatcaatattatgatcatttgatcaacaaaataaaaatatcaatctaataatgggtgaagaaaaaaaaagtttcaataataatgatcaagggtgtgtatgattaacataatagaaataaaaaagataaaaataaaataaaaattaaaataaaatataaaaaatgtaaattataaaaaaaaagtacaaaatttcttgacaatataatatttcatcttaaaaaacaaacacactctacgacaaattttggtattatcttaaaatttggacctccatatatatatctctcaatatcaaaagttaattcacggatgagtcatccttcaattatacatactgttttattgttgcctgcttcttagtttggatttcagctaaagaaagtgtcatttgaatttatgagtaattcaatctcaaagctagctagtttgtagaattgtactggtatgataagggtccaatatcttaaaatttgaatttagtactccatttagtttatgggatgggaattatttctggcttatacacattattttgttgttggtacatatagtcaatcctaattacactaatatcctatatctctagtaaaattgtctatagaagattaaaaaaaccaagattatattccatattttttttctttgtttctggtagttgcctcagttgaaaacaaggtgctgcgttattgaacatgtcctctttgctaactcgtacttgtaggtgaattgagggaaaataggtacttttttagcaatagatcaaatggaaacatcaagagacctgctggttctgggtgctggaaatctgtaggcaaagaaaaacaaatcatccattcagagagcaatcaagtaattgggatgaaggaaacactgtttttttgcaaagggtcccatgagacaagaactcagtgggtcatgcacgaattgcgccttgtagcttcctacccatgtcagatgccagtggcagattttgctgtgtatcgcatatttc

SEQ ID NO: 20313 - protein, 44 aa, Glycine max
MNLLVRRIFIFYVLTIFMKINHQFHRNVLYQYYDHLINKIKISI

SEQ ID NO: 20314 - protein, 44 aa, Glycine max
MKETLFFCKGSHETRTQWVMHELRLVASYPCQMPVADFAVYRIF

SEQ ID NO: 20315 - DNA, 1134 bp, Glycine max
gaaaacaaatgaacttttaaatcaagaagtgcagaagttgcatgctcaggtcgagagcctgagacagagatgtgaactgcaagaattagagcttcaaaggtcagcaaaaaatactcaagaagctatggcactggctgctgaggaatctgctaaatgtaaagctgcaaaagaagttattaagtcgctcacggctcagctcaaagatctggctgagaagcttcctcctggagtgtatgatgctgagaacgttagaccagcttacctaccaaatggtattgagccaaatggcatccgccatccagattcaaatggggagcagcactcaagagcagagtcaatcagtgcatctagtttggcctccatgggacttgaatctgctctattgaatagaactgcagggaattcgccaggaacatatggaactaatcctcaccagcaaattcggagccctgtgtcctctaatggggccaataattatccagatgttaaattgcctaatcgtggtggtgcaattcaggcaagcagcggtaatgtgtcagatactgctgatggtcgagattctgggaatttccacaacggcgatagtggtttgaaattgaggagtgttgcacctgctgctgatagtaatcaagttgaggcagaatggattgaacagtatgaacctggtgtctacataacacttgtggcactgagtgatggaacgagagatctgaagcgagtgcgcttcagccgaaggagatttggggagcaccaagcagaaacctggtggtcagagaaccgagacaaggtatatgaaagatacaatgttcgcagcacggataagtcggccaaccaagcagcacgtagttcagaaggtgctgtttcgcctgtttcccaaacttaggagaagtagggagagggaagtcctccattaacacattttgtcactgagcaacattgtagggcagcaagaatgcatatgaagaaaccaggcatccttgtttgttggtggttcttatgtccatccttattctcttctcactcttcttttttcccctttcctctttttctcttaaattatctgtcttccatttaatttgggcatatgccctttacatgttgtagtttagtgtatataaaatcatcagttctgat

SEQ ID NO: 20316 - protein, 293 aa, Glycine max
KTNELLNQEVQKLHAQVESLRQRCELQELELQRSAKNTQEAMALAAEESAKCKAAKEVIKSLTAQLKDLAEKLPPGVYDAENVRPAYLPNGIEPNGIRHPDSNGEQHSRAESISASSLASMGLESALLNRTAGNSPGTYGTNPHQQIRSPVSSNGANNYPDVKLPNRGGAIQASSGNVSDTADGRDSGNFHNGDSGLKLRSVAPAADSNQVEAEWIEQYEPGVYITLVALSDGTRDLKRVRFSRRRFGEHQAETWWSENRDKVYERYNVRSTDKSANQAARSSEGAVSPVSQT

SEQ ID NO: 20317 - protein, 252 aa, Glycine max
MALAAEESAKCKAAKEVIKSLTAQLKDLAEKLPPGVYDAENVRPAYLPNGIEPNGIRHPDSNGEQHSRAESISASSLASMGLESALLNRTAGNSPGTYGTNPHQQIRSPVSSNGANNYPDVKLPNRGGAIQASSGNVSDTADGRDSGNFHNGDSGLKLRSVAPAADSNQVEAEWIEQYEPGVYITLVALSDGTRDLKRVRFSRRRFGEHQAETWWSENRDKVYERYNVRSTDKSANQAARSSEGAVSPVSQT

SEQ ID NO: 20318 - protein, 173 aa, Glycine max
MGLESALLNRTAGNSPGTYGTNPHQQIRSPVSSNGANNYPDVKLPNRGGAIQASSGNVSDTADGRDSGNFHNGDSGLKLRSVAPAADSNQVEAEWIEQYEPGVYITLVALSDGTRDLKRVRFSRRRFGEHQAETWWSENRDKVYERYNVRSTDKSANQAARSSEGAVSPVSQT

SEQ ID NO: 20319 - DNA, 868 bp, Glycine max
atttctatatcctgatttagagtgggacttccgtttgccgttggtgaaaagcatcaatgttagtggtcacaagtatggtcttgtctaccctggtgttggttgggttgtatggaggagcaaagatgacttgccagatgaacttgtttttcacataaattatcttggatctgatcagcccactttcacattgaatttctccaaaggatctagtcaaattattgctcaatattatcaattgattcggcttggctttgagggttacaaaaatatcatggaaaattgctgggagaatgcaagagttctgaaggaaggaatcgagagaacaggtcggtttaacatcatctccaaggatatcggtgtgccacttgtagccttctccttgaaagacagtagtcaacacacagtgtttgagatagcagaccatctgagaaaattcgggtggatagttcctgcctatacaatgccaccagatgctcaacacattgctgtccttcgggtggtgatcagggaggatttcagccgcggcttggccgagagactcgccgctgacatagagaaagttgtgaagctcttggacacacttcctagccccctcactaccaaagctgttcatatcacagctatcactagtgagactggtgagaagattaagaaagctgcaatagagactcagaaagagattgctttctactggaagcgacttgtggatggcaagagacttggagcatgctaggcttaccaaatcttggccttttggccaccttgctatgagttatggtgctttgtttcttatctttgaggatatgtgagtgtgtaatggctttgtagcaataagcaatgccaatgcatgatggattctaatactcag

SEQ ID NO: 20320 - protein, 243 aa, Glycine max
FLYPDLEWDFRLPLVKSINVSGHKYGLVYPGVGWVVWRSKDDLPDELVFHINYLGSDQPTFTLNFSKGSSQIIAQYYQLIRLGFEGYKNIMENCWENARVLKEGIERTGRFNIISKDIGVPLVAFSLKDSSQHTVFEIADHLRKFGWIVPAYTMPPDAQHIAVLRVVIREDFSRGLAERLAADIEKVVKLLDTLPSPLTTKAVHITAITSETGEKIKKAAIETQKEIAFYWKRLVDGKRLGAC

SEQ ID NO: 20321 - protein, 153 aa, Glycine max
MENCWENARVLKEGIERTGRFNIISKDIGVPLVAFSLKDSSQHTVFEIADHLRKFGWIVPAYTMPPDAQHIAVLRVVIREDFSRGLAERLAADIEKVVKLLDTLPSPLTTKAVHITAITSETGEKIKKAAIETQKEIAFYWKRLVDGKRLGAC

SEQ ID NO: 20322 - DNA, 1375 bp, Glycine max
attggttaatttcgtcggtcaactgcatgggtctccgcttctcctctggctcggcacctcactcctcttccctcaacggctctcactgttcaggttcagcaagaactggctgcaagaacgtggggttctccgcaaccgggaagagtcagttttcggagattgcgagtggaagcgacgatcgcgaagagtctcttggtcggattctgaaatggccaaacttgaaggtgtttagttttgaggagctgatttctgcctcaaggcgtttcaggtatgacatacaggggttagtgatcggtaaaggttgttttggcccagtttacaagggatgtttggatgagaatacccttacccctgccaaagtaggctatggaatggccgttgcgatcaaaatgtttaaccaagattacttccgagggtttgaagagtggcagtcagaagtaaactttttaggaaggctttctcaccccaacctggttaatctattgggatactgttgggacgaggataagcttcttctagtgtatgagttcatgccaaagggaagcttagactatcatctattcagaggaaacataacaccactttcttggaacacacggcttaaaatagctattggtgcagctcggggattagctttcttgcacgcctctgaaaacaatgtcatattcagtgatttcaaggcctcaaatatacttcttgacgggaattacaatgcaaagatctcagattttggctttgctagatgggggccttttgaaggagaatcacatgtatctaccagggtcattggcacatatgattatgctgctccagaatacatagcaacaggaaatgaaaacagacgaagttttcttaaaccaaacaggacttagtgtaacacaaacagtcgatgctgtggaaggtgaagttgggagaaggcagactaaaataaggaatagtgtaatgctctgatccaccacaaactaacatgcctttgaattgtatcaatatttcaaaaggccacttgtatgtgaagagtgatatctatggatttggtgtagtgctgcttgaaatacttacaggcatgcgggcacttgacacaaatcgacctcaaaccatgcagaacctagttgaatggactaagccttgtctttcttccaaaaaaaagttgaaagccataatggatgctaagatagagggtcaatattcacttgaggcagcatggcaagcagcaaaacttactctaaaatgcctaaaatctgtccctgaagaacgtccttctatgaaagatgtagttgaggcattggaagccattgaagctatccaaaacccacaattcgcagcgtacatctcatccaccccctcggcagggtcgtaagagtataaacaaatttac

SEQ ID NO: 20323 - protein, 289 aa, Glycine max
WLISSVNCMGLRFSSGSAPHSSSLNGSHCSGSARTGCKNVGFSATGKSQFSEIASGSDDREESLGRILKWPNLKVFSFEELISASRRFRYDIQGLVIGKGCFGPVYKGCLDENTLTPAKVGYGMAVAIKMFNQDYFRGFEEWQSEVNFLGRLSHPNLVNLLGYCWDEDKLLLVYEFMPKGSLDYHLFRGNITPLSWNTRLKIAIGAARGLAFLHASENNVIFSDFKASNILLDGNYNAKISDFGFARWGPFEGESHVSTRVIGTYDYAAPEYIATGNENRRSFLKPNRT

SEQ ID NO: 20324 - protein, 281 aa, Glycine max
MGLRFSSGSAPHSSSLNGSHCSGSARTGCKNVGFSATGKSQFSEIASGSDDREESLGRILKWPNLKVFSFEELISASRRFRYDIQGLVIGKGCFGPVYKGCLDENTLTPAKVGYGMAVAIKMFNQDYFRGFEEWQSEVNFLGRLSHPNLVNLLGYCWDEDKLLLVYEFMPKGSLDYHLFRGNITPLSWNTRLKIAIGAARGLAFLHASENNVIFSDFKASNILLDGNYNAKISDFGFARWGPFEGESHVSTRVIGTYDYAAPEYIATGNENRRSFLKPNRT

SEQ ID NO: 20325 - protein, 166 aa, Glycine max
MAVAIKMFNQDYFRGFEEWQSEVNFLGRLSHPNLVNLLGYCWDEDKLLLVYEFMPKGSLDYHLFRGNITPLSWNTRLKIAIGAARGLAFLHASENNVIFSDFKASNILLDGNYNAKISDFGFARWGPFEGESHVSTRVIGTYDYAAPEYIATGNENRRSFLKPNRT

SEQ ID NO: 20326 - DNA, 1670 bp, Glycine max
ggcgaaacactcccctttgccgctgttgttgttgctgcaccaccgaacaacttcccctgtaaatcgcgtttcgtttgtgcaaggttttaaaagatggctgatgctgaggacattcaacctcttgttgttgataatggaactggaatggtcaaggctggttttgcaggtgatgatgctcctagggccgtgttccccagcattattgggagaccacgccatactggtgtaatggttgggatgggtcagaaggatgcttacgtgggtgatgaagcccaatcaaaaaggggtatactcaccttgaagtatcctatagagcatggcatagtcagcaactgggacgatatggagaagatttggcatcacacattttacaatgagctacgtgttgcccctgaagaacaccccgtacttcttaccgaggcaccactcaatcccaaggccaacagagagaagatgacccaaattatgtttgagactttcaatgtgcctgccatgtatgttgcaattcaggctgtcttgtctctgtatgccagtggacgtactacaggtattgtgcttgattctggtgatggtgtgagccacacggtgcccatatatgaagggtatgctcttcctcatgcaattcttcggttggaccttgctggccgtgatttaacagagtacttggtgaaaatccttaccgagagaggatactccttcagcacctctgccgaaaaggaaattgtccgtgatgtgaaggagaaattggcatacgtggcccttgatttcgaacaagaaatggagactactaagagtagttctgcagtggaaaagagctatgaattgcctgatggacaggtcattacaataggttctgagagattccgttgcccagaagtactgttccagccttctctgattggtatggaagctactggaattcatgaaacgacatacaattccatcatgaaatgtgatgttgatattaggaaggatctgtatggaaacatcgtgcttagtggagggtctactatgtttccgggaattgctgatcgcatgagcaaggaaattagtgctcttgcacccagtagcatgaaaatcaaggtggttgcacctcctgagagaaagtacagtgtctggattggtggttctatcttggcatcacttagcaccttccaacagatgtggatctccaagggtgaatatgatgaatctgggccagccatcgttcatcggaagtgcttctaaagttgggtcaagtcgagctggatggtgatcaagttcttcatgcacccagtcctgtgccatatttcagtaaagtttggttgacttatttggtatttgaagctttgggtttttaatagatatatctagtttaatgaatggatttgtaagttgagtatgttataagtttctccgttaggtcaccttggaagccagactttttatgctattggcggatggtattggaactttgtaggttctgcttggtttggtttttccttttattcgattttcatgttgtggccaagaattaggtgcctcgagttaggaggacgatagtctaagcatcttttctcacagggatttttgagtcagtttctgtttatatttattatatgcataattggtttttatgtttgcagtacactcagaaatcagaatgtttttattgtttgaggtgattaaag

SEQ ID NO: 20327 - protein, 377 aa, Glycine max
MADAEDIQPLVVDNGTGMVKAGFAGDDAPRAVFPSIIGRPRHTGVMVGMGQKDAYVGDEAQSKRGILTLKYPIEHGIVSNWDDMEKIWHHTFYNELRVAPEEHPVLLTEAPLNPKANREKMTQIMFETFNVPAMYVAIQAVLSLYASGRTTGIVLDSGDGVSHTVPIYEGYALPHAILRLDLAGRDLTEYLVKILTERGYSFSTSAEKEIVRDVKEKLAYVALDFEQEMETTKSSSAVEKSYELPDGQVITIGSERFRCPEVLFQPSLIGMEATGIHETTYNSIMKCDVDIRKDLYGNIVLSGGSTMFPGIADRMSKEISALAPSSMKIKVVAPPERKYSVWIGGSILASLSTFQQMWISKGEYDESGPAIVHRKCF

SEQ ID NO: 20328 - protein, 360 aa, Glycine max
MVKAGFAGDDAPRAVFPSIIGRPRHTGVMVGMGQKDAYVGDEAQSKRGILTLKYPIEHGIVSNWDDMEKIWHHTFYNELRVAPEEHPVLLTEAPLNPKANREKMTQIMFETFNVPAMYVAIQAVLSLYASGRTTGIVLDSGDGVSHTVPIYEGYALPHAILRLDLAGRDLTEYLVKILTERGYSFSTSAEKEIVRDVKEKLAYVALDFEQEMETTKSSSAVEKSYELPDGQVITIGSERFRCPEVLFQPSLIGMEATGIHETTYNSIMKCDVDIRKDLYGNIVLSGGSTMFPGIADRMSKEISALAPSSMKIKVVAPPERKYSVWIGGSILASLSTFQQMWISKGEYDESGPAIVHRKCF

SEQ ID NO: 20329 - protein, 332 aa, Glycine max
MVGMGQKDAYVGDEAQSKRGILTLKYPIEHGIVSNWDDMEKIWHHTFYNELRVAPEEHPVLLTEAPLNPKANREKMTQIMFETFNVPAMYVAIQAVLSLYASGRTTGIVLDSGDGVSHTVPIYEGYALPHAILRLDLAGRDLTEYLVKILTERGYSFSTSAEKEIVRDVKEKLAYVALDFEQEMETTKSSSAVEKSYELPDGQVITIGSERFRCPEVLFQPSLIGMEATGIHETTYNSIMKCDVDIRKDLYGNIVLSGGSTMFPGIADRMSKEISALAPSSMKIKVVAPPERKYSVWIGGSILASLSTFQQMWISKGEYDESGPAIVHRKCF

SEQ ID NO: 20330 - DNA, 1353 bp, Glycine max
acttcataatataagaacaaattgaagtccttattcccaattctccttttaattcaaccgcagcaatctccgtctctgccccacggcttacgttgagcgaggtagtggttagcattatatattttgggaacttgcagtatgtctcgtggatctgtgaatcggaaacatgttacacgtaaagatgttaagcgggtgcaggctcttattgagcactgtctgacacaaaatatgaataaggaagaagctgttgagttaataagtcaagtagaaatagagcctaatttcatcaaactagtttggcaaaagcttgaggaagaaaatcaagagttctttaaatgttattatgcaaaaatggcatggaagcagaaaatgatgctactcagcatattttcggaagaacaaggggaaataacgggcttaacttcaagtgcaccactccctacctttgatggttcacacaaccctgcagtttcatcccaagccaactgtaatgttggcttaactacaatcccatcatcattccctacctttgatgggttacatagccctgaagttttatcacaacctaactctatttttgatgggtcacacaacccttcatttttatcacaacccaattctattgcgggcttaactccatttgcatccctccctacctttgatgagttacataaccctgtagatttatcacaacccaactttagctttgatgggtcagataaccttgcagttttatcacagcctaactctaatgtggacttgactgaaattgcctcattacctaactttgatgggtcacataaccttgcagttttaccacaacctaactctaatgtggacttgactgaaattgcaccattccctacctttgatggatcacacaactctgtggttttgtcacaacctaactccaacatggcacatcttcctccattaccttactacactgaagagcaaatccaagcaagtttgatgccaacaaatatggaacaacccatttattcaagttcatatgatgtgtttaacaattgtggatcgtctctccaaacaagtatgcagggtggtgcggttgatgtgtctgcttatgacaaagacaattggattagtggcccttcgagcatgctttctgatcaaagtgaagacatgggtatgatacaaagaattaatcgggagatgattgaatcatggcctgaatattcaggttttcaccccttaaattagggaaatacccttccctttaattttgacacctttgtaggagacagtggtgaatgtagtgaaccaactaattgatgaaagatattatttatttatttttataaaattatagcttagaaaaaaaaaaaaaaaaaa

SEQ ID NO: 20331 - protein, 360 aa, Glycine max
MSRGSVNRKHVTRKDVKRVQALIEHCLTQNMNKEEAVELISQVEIEPNFIKLVWQKLEEENQEFFKCYYAKMAWKQKMMLLSIFSEEQGEITGLTSSAPLPTFDGSHNPAVSSQANCNVGLTTIPSSFPTFDGLHSPEVLSQPNSIFDGSHNPSFLSQPNSIAGLTPFASLPTFDELHNPVDLSQPNFSFDGSDNLAVLSQPNSNVDLTEIASLPNFDGSHNLAVLPQPNSNVDLTEIAPFPTFDGSHNSVVLSQPNSNMAHLPPLPYYTEEQIQASLMPTNMEQPIYSSSYDVFNNCGSSLQTSMQGGAVDVSAYDKDNWISGPSSMLSDQSEDMGMIQRINREMIESWPEYSGFHPLN

SEQ ID NO: 20332 - protein, 330 aa, Glycine max
MNKEEAVELISQVEIEPNFIKLVWQKLEEENQEFFKCYYAKMAWKQKMMLLSIFSEEQGEITGLTSSAPLPTFDGSHNPAVSSQANCNVGLTTIPSSFPTFDGLHSPEVLSQPNSIFDGSHNPSFLSQPNSIAGLTPFASLPTFDELHNPVDLSQPNFSFDGSDNLAVLSQPNSNVDLTEIASLPNFDGSHNLAVLPQPNSNVDLTEIAPFPTFDGSHNSVVLSQPNSNMAHLPPLPYYTEEQIQASLMPTNMEQPIYSSSYDVFNNCGSSLQTSMQGGAVDVSAYDKDNWISGPSSMLSDQSEDMGMIQRINREMIESWPEYSGFHPLN

SEQ ID NO: 20333 - protein, 289 aa, Glycine max
MAWKQKMMLLSIFSEEQGEITGLTSSAPLPTFDGSHNPAVSSQANCNVGLTTIPSSFPTFDGLHSPEVLSQPNSIFDGSHNPSFLSQPNSIAGLTPFASLPTFDELHNPVDLSQPNFSFDGSDNLAVLSQPNSNVDLTEIASLPNFDGSHNLAVLPQPNSNVDLTEIAPFPTFDGSHNSVVLSQPNSNMAHLPPLPYYTEEQIQASLMPTNMEQPIYSSSYDVFNNCGSSLQTSMQGGAVDVSAYDKDNWISGPSSMLSDQSEDMGMIQRINREMIESWPEYSGFHPLN

SEQ ID NO: 20334 - DNA, 1155 bp, Glycine max
gatatataacaccataacactttctctctctttgccggtgccacaatccctctctctctccgacgtacatttccatctttttagggtttcatttcatggactccgattcctggatttccacgcgcctctcttcctcttcacgccgccaccattatcgatctgatctgtacgcggaggagagtgaagggaacgatgatttcagggcggagtttctatgccctttctgcgccgaggattacgacgtcgtttccctctgttgccacattgacgaccaccaccctatccaagccaaaaacggggtgtgtcccatttgtgggaagaaggtgggagtggatctcgttggacattttactacacaacatgggaacttcttgaggatatcctttttgcaagttgaacttacgtgcagcgcaaaaggagggtcaggaaaggaggctctgcttcaacaatttctatattgagaaaagagttacaagaaggagccttgcagtcccttcttggaggttcttcatacttagcttcctcaaattccgagcccgatcctctgttatcatcatttatgtttaacccagttgtagctgatgagtctgtgagtgcaacacctccttccactgaagatgctctagtaaaagaaagttcaaaagacgatttcttgaaaagaaaacctcagcagttacagctatcagaagaggatcaagtagagaaggctcggaggtttgaattcgtgcaagggcttctgatgtccaccattcttgatgataagttatgactgcatttgtagctcatatgccaatgttgaaagagctggagctgtaagctagagagagggagagttatccaaaacgatacgaagctgcatcggataaatatgttttgtcttcaagattttattcgatgatccaaatacataaaaagggtgagacggctggagtgtcaatttgagctagtcttctgcaccaactggttgaatattcttataggagcttgacgagaagagttgttcttgggatcaagtataagttcgttattagttaaatgttccaaaatatctgacgtttacattgcataatgggtacgcagatcattaaatatgtttgtatactgaagattataaagtcttatttgtaatgtaatagtattaaaaatattttgttc

SEQ ID NO: 20335 - protein, 121 aa, Glycine max
MDSDSWISTRLSSSSRRHHYRSDLYAEESEGNDDFRAEFLCPFCAEDYDVVSLCCHIDDHHPIQAKNGVCPICGKKVGVDLVGHFTTQHGNFLRISFLQVELTCSAKGGSGKEALLQQFLY

SEQ ID NO: 20336 - protein, 69 aa, Glycine max
MFNPVVADESVSATPPSTEDALVKESSKDDFLKRKPQQLQLSEEDQVEKARRFEFVQGLLMSTILDDKL

SEQ ID NO: 20337 - protein, 60 aa, Glycine max
MISGRSFYALSAPRITTSFPSVATLTTTTLSKPKTGCVPFVGRRWEWISLDILLHNMGTS

SEQ ID NO: 20338 - DNA, 1315 bp, Glycine max
aacgaaacccgtcgtcaaagtgggtttccggcagagatcatatatcttctagggtgtccacctttgaaattcaatctccaattgagcatcacaaaccctagaaaatcgttccagatgaatacaaaatcgctccaaatcctggtgcactcaccggacctcggaatttcccttcaatccacaaccaaccacgaaaccctttccgatctcaaaaactctcttttccctcaatcacaccaatccttctacttcaccttcaatggcaaacccctccccgacaaaacccctctttcccaattcccccctctctccaccctctctctccgctcccgcctccttggcggcggcggagacggcggcgccaccggagccgagtcccgcgactgctacctcaacatgtacgccgacaagaagcccgacaaggtggaccccaatgaacagcgtctctccaagtggcacaattgcgccctctccaacgaacccttgagagagccctgcgtgatcgataaattggggaatatcttcaacaaggaagcgctggtggaagcgttgttggggaagaagcttcccaaggaatttgggcacatcaagggtttgaaggatatgattaatgttcagctttctgcgattcctggagcggatgatggggcaaagtttcagtgccctgttgcggggcttgaattcaacgggaagtataggtttttcgcgctgaggaattgtgggcatgttttgagtgcgaaggctctgagggaggttaagtcttcgtcgtgtttggtttgtcacaaggagtatgctgacgtggataaggttgtgctcaatgggagtgatgaggaggttgcggttttgagggagaggatggaggaggagaaagctaagattagggagaagaagagtaagaaggttaagaataatggtaatgatgacggtgtgagtttggaagggactaggttgagtggtactaagcatggtgttgatggtaagggtgtagagaaagcttcggctaaggtggaacgaaatgggaaggttggtaatggtaatgttggtgtgaatggtggtgctgctgctgctgccaagcgtttcaaggctgttgatctggccccggcgaatgctacaaaggatgtgtatgcttccatcttcacttcgtcgaggaagtctgagtttaaagaaacttatagctgtaggtctcttcctcttggaagaaactgattcaggtgtctggtatacagttgtctctactgttttattgttatccaatgtactgaattctagtttgtgcctttgtggttatataagtgattgacttttcctgtgaaaaaag

SEQ ID NO: 20339 - protein, 400 aa, Glycine max
NETRRQSGFPAEIIYLLGCPPLKFNLQLSITNPRKSFQMNTKSLQILVHSPDLGISLQSTTNHETLSDLKNSLFPQSHQSFYFTFNGKPLPDKTPLSQFPPLSTLSLRSRLLGGGGDGGATGAESRDCYLNMYADKKPDKVDPNEQRLSKWHNCALSNEPLREPCVIDKLGNIFNKEALVEALLGKKLPKEFGHIKGLKDMINVQLSAIPGADDGAKFQCPVAGLEFNGKYRFFALRNCGHVLSAKALREVKSSSCLVCHKEYADVDKVVLNGSDEEVAVLRERMEEEKAKIREKKSKKVKNNGNDDGVSLEGTRLSGTKHGVDGKGVEKASAKVERNGKVGNGNVGVNGGAAAAAKRFKAVDLAPANATKDVYASIFTSSRKSEFKETYSCRSLPLGRN

SEQ ID NO: 20340 - protein, 362 aa, Glycine max
MNTKSLQILVHSPDLGISLQSTTNHETLSDLKNSLFPQSHQSFYFTFNGKPLPDKTPLSQFPPLSTLSLRSRLLGGGGDGGATGAESRDCYLNMYADKKPDKVDPNEQRLSKWHNCALSNEPLREPCVIDKLGNIFNKEALVEALLGKKLPKEFGHIKGLKDMINVQLSAIPGADDGAKFQCPVAGLEFNGKYRFFALRNCGHVLSAKALREVKSSSCLVCHKEYADVDKVVLNGSDEEVAVLRERMEEEKAKIREKKSKKVKNNGNDDGVSLEGTRLSGTKHGVDGKGVEKASAKVERNGKVGNGNVGVNGGAAAAAKRFKAVDLAPANATKDVYASIFTSSRKSEFKETYSCRSLPLGRN

SEQ ID NO: 20341 - protein, 269 aa, Glycine max
MYADKKPDKVDPNEQRLSKWHNCALSNEPLREPCVIDKLGNIFNKEALVEALLGKKLPKEFGHIKGLKDMINVQLSAIPGADDGAKFQCPVAGLEFNGKYRFFALRNCGHVLSAKALREVKSSSCLVCHKEYADVDKVVLNGSDEEVAVLRERMEEEKAKIREKKSKKVKNNGNDDGVSLEGTRLSGTKHGVDGKGVEKASAKVERNGKVGNGNVGVNGGAAAAAKRFKAVDLAPANATKDVYASIFTSSRKSEFKETYSCRSLPLGRN

SEQ ID NO: 20342 - DNA, 1806 bp, Glycine max
gaataatactaaacttttttcttcgaatggctaaaacatgttccggtgcatccagatacgatgtgttcattaacttcagaggggaagacacacgttttgcatttaccgggcatctccacaaagctctttgtaacaagggaatccgtgctttcatggatgaaaatgacattaagagaggagacgaaataagagcaacacttgaggaggcaattaaagggtcgaggattgccatcactgtgttctctaaagactatgcttcttcctcattttgcttagatgaacttgcaaccatccttggctgctaccgcgagaaaactctgttggttattcctgtcttttataaggtggatccttctgatgtaagacgcctgcaaggaagttatgcagaaggattggctaggcttgaggaaaggttccatcctaacatggagaattggaagaaggctctgcagaaagtagcagaattggctgggcatcatttcaaagatgggtatccctccttaccaagcttttgctttataatttttgttaaaattgaaagagaaaataaatgtttattaaccttgacaagatatggatacaagggttttagtttaacttcactacaactataatttcttgtttgaaacagagctggatatgaattcaagtttattaggaagattgttgatgatgtcttcgacaagattaataaagctgaagcaagtatatatgttgcggatcacccggttggattacacttagaagtggaaaaaataaggaaacttttggaggctggatctagtgatgctatctccatgatagggatccacggaatgggcggggtaggaaaatcaacacttgctcgagcagtttataatttgcatactgatcattttgatgattcgtgtttcctacaaaacgtgagagaagaatcaaacagacacgggttaaaacgcctacaaagcatccttctttcacaaatacttaagaaggaaatcaacttagcaagtgagcaacaaggcacttcgatgataaaaaataagctcaagggaaagaaggttctcttagttctagatgatgttgatgagcacaagcaattacaggcaattgttggaaaatctgtttggtctgagtctgagtttggcaccagattggttctgatcatcaccactcgggacaaacaactcctaacatcttatggggtcaaaagaacacatgaggtgaaagaattgagtaagaaagatgctattcaattgcttaaacggaaagcttttaaaacatatgatgaagttgatcaaagttacaatcaggtcttgaatgatgtagtaacttggacttctggccttccattggctttggaagtgataggttcgaacctgtttggaaaaagtattaaagaatgggaatcagctatcaaacaatatcaaagaattcccaataaggaaatcttgaagatacttaaagtaagctttgatgctttggaggaagaagaaaaaagtgtttttcttgacattacttgttgcttgaaaggctataaatgcagagagattgaagatatacttcacagtctttatgataactgcatgaaataccatattggggtgcttgttgacaagtctctcatacagattagtgacgatagagttacattgcatgacttgattgagaacatgggtaaagaaattgacagacagaaatcacctaaagagacagggaagcggaggagattatggttactaaaagatataattcaagtcttaaaagacaactcggggaccagtgaagttaaaatcatttgtcttgatttccccatatctgacaaac

SEQ ID NO: 20343 - protein, 336 aa, Glycine max
MIGIHGMGGVGKSTLARAVYNLHTDHFDDSCFLQNVREESNRHGLKRLQSILLSQILKKEINLASEQQGTSMIKNKLKGKKVLLVLDDVDEHKQLQAIVGKSVWSESEFGTRLVLIITTRDKQLLTSYGVKRTHEVKELSKKDAIQLLKRKAFKTYDEVDQSYNQVLNDVVTWTSGLPLALEVIGSNLFGKSIKEWESAIKQYQRIPNKEILKILKVSFDALEEEEKSVFLDITCCLKGYKCREIEDILHSLYDNCMKYHIGVLVDKSLIQISDDRVTLHDLIENMGKEIDRQKSPKETGKRRRLWLLKDIIQVLKDNSGTSEVKIICLDFPISDK

SEQ ID NO: 20344 - protein, 330 aa, Glycine max
MGGVGKSTLARAVYNLHTDHFDDSCFLQNVREESNRHGLKRLQSILLSQILKKEINLASEQQGTSMIKNKLKGKKVLLVLDDVDEHKQLQAIVGKSVWSESEFGTRLVLIITTRDKQLLTSYGVKRTHEVKELSKKDAIQLLKRKAFKTYDEVDQSYNQVLNDVVTWTSGLPLALEVIGSNLFGKSIKEWESAIKQYQRIPNKEILKILKVSFDALEEEEKSVFLDITCCLKGYKCREIEDILHSLYDNCMKYHIGVLVDKSLIQISDDRVTLHDLIENMGKEIDRQKSPKETGKRRRLWLLKDIIQVLKDNSGTSEVKIICLDFPISDK

SEQ ID NO: 20345 - protein, 265 aa, Glycine max
MIKNKLKGKKVLLVLDDVDEHKQLQAIVGKSVWSESEFGTRLVLIITTRDKQLLTSYGVKRTHEVKELSKKDAIQLLKRKAFKTYDEVDQSYNQVLNDVVTWTSGLPLALEVIGSNLFGKSIKEWESAIKQYQRIPNKEILKILKVSFDALEEEEKSVFLDITCCLKGYKCREIEDILHSLYDNCMKYHIGVLVDKSLIQISDDRVTLHDLIENMGKEIDRQKSPKETGKRRRLWLLKDIIQVLKDNSGTSEVKIICLDFPISDK

SEQ ID NO: 20346 - DNA, 1853 bp, Glycine max
aattctaaagttctgttatggcctccctatagacttcagcccagataacatagctgcactaagatgtgcatcagagttcctagagatgactgaagaactagaagatggaaacctcatttctaagagtgaagctttcctcacctttgttgtgctttcttcatggaaagacactatcactgttctgaaatcatctgaaaacctatctccatgggctgaaaacctccaaattgtaagaagatgctgtgattccattgcatggaaagcttctaaagatgagctcacaagcgaggatgcagcacctaatcaagaaagctggtggttcaacgatgtggccgccttccgcattgatcattttatgcggatcatttctgcaataagggcaaagggaaccaaaccagagaccattggtaaatgtatcatgcaatatgccaagagatggctgccgggaatggaggtggagttagaagggctaagaggatatgggcatgaaaagtgtaacctacagttcagtatttttagtgggaagaagaaagaaagcagtggaaacagcaaggagcaaagaacaattattgaaagcctaataagcattattcctcctcagcaagatgcagtctcgtgtaagttcatgttgcagttgttaaagatggccatgatgtattctgtatcaccagctctcacaacagaccttgaaaagagagtgagtttggtgttggaagatgctgaggtgagtgatcttctaattccaagatatcaaaatggagatcaaggcaaaacggtcatgtgagtatgttacaattctcctttttttcgcacattggaattggcattaatgccaaaggtcaaatttaactccacagccctctaaaccaattttttttgttaaaaaaaaaaaacccaagagttatgaaaacgactaatgacactaatgtctatcttttgtcttttcttattcttttccttcattagttgcatgactaattcatctgaagaatgcaccatgctagacatagatgtagtgcaacgaattgtggaatacttcttgatgcatgaacaacagcagattcaacagcaacagaagactaggaaattcaatattagtaggctcttggataattacctagctgaaattgcaagagatccaaatctttcaattaccaagttccaagtttttgctgaattgctaccagaaaatactcgatcatatgatgatggcctatatagagccattgacacctacctcaagacccagccttcactgaccgagcatgaccgtaaaagactctgcaaaatcatgaactgtgaaaaactctcacttgatgcatgcctgcatgctgcacaaaatgagagattgcccctaagaactgttgtccaggttctattttcagagcaagtaaagatgagggcagcaatgcatgagaaagagccagcacaaattggaatccaatctgaacaagaagaaaaccagacatctgcaactatggacattaaggcactcaaagcagaacttgagaatgtaaagtcccaaatggtagaactgcagaatgactattgtgaattacaacaggagtatgaaaagttaagcaacaagccaaagaattcatcaggctggagtttaaattggcggaagattaagaactccttacatacaaaaccagcaggagttgaaattggagacagacaggatgcacccaagtcaccaaacaccattctacgtagactaaaccctagaagaaggctctccatgtcttaaaagtttttcatttttgaagtttcaacataaaaagtcctgtaataaaaacacctagctagccattctttatatgaagcatatagactaaatttagtttcttaag

SEQ ID NO: 20347 - protein, 277 aa, Glycine max
MTLMSIFCLFLFFSFISCMTNSSEECTMLDIDVVQRIVEYFLMHEQQQIQQQQKTRKFNISRLLDNYLAEIARDPNLSITKFQVFAELLPENTRSYDDGLYRAIDTYLKTQPSLTEHDRKRLCKIMNCEKLSLDACLHAAQNERLPLRTVVQVLFSEQVKMRAAMHEKEPAQIGIQSEQEENQTSATMDIKALKAELENVKSQMVELQNDYCELQQEYEKLSNKPKNSSGWSLNWRKIKNSLHTKPAGVEIGDRQDAPKSPNTILRRLNPRRRLSMS

SEQ ID NO: 20348 - protein, 274 aa, Glycine max
MSIFCLFLFFSFISCMTNSSEECTMLDIDVVQRIVEYFLMHEQQQIQQQQKTRKFNISRLLDNYLAEIARDPNLSITKFQVFAELLPENTRSYDDGLYRAIDTYLKTQPSLTEHDRKRLCKIMNCEKLSLDACLHAAQNERLPLRTVVQVLFSEQVKMRAAMHEKEPAQIGIQSEQEENQTSATMDIKALKAELENVKSQMVELQNDYCELQQEYEKLSNKPKNSSGWSLNWRKIKNSLHTKPAGVEIGDRQDAPKSPNTILRRLNPRRRLSMS

SEQ ID NO: 20349 - protein, 260 aa, Glycine max
ILKFCYGLPIDFSPDNIAALRCASEFLEMTEELEDGNLISKSEAFLTFVVLSSWKDTITVLKSSENLSPWAENLQIVRRCCDSIAWKASKDELTSEDAAPNQESWWFNDVAAFRIDHFMRIISAIRAKGTKPETIGKCIMQYAKRWLPGMEVELEGLRGYGHEKCNLQFSIFSGKKKESSGNSKEQRTIIESLISIIPPQQDAVSCKFMLQLLKMAMMYSVSPALTTDLEKRVSLVLEDAEVSDLLIPRYQNGDQGKTVM

SEQ ID NO: 20350 - protein, 232 aa, Glycine max
MTEELEDGNLISKSEAFLTFVVLSSWKDTITVLKSSENLSPWAENLQIVRRCCDSIAWKASKDELTSEDAAPNQESWWFNDVAAFRIDHFMRIISAIRAKGTKPETIGKCIMQYAKRWLPGMEVELEGLRGYGHEKCNLQFSIFSGKKKESSGNSKEQRTIIESLISIIPPQQDAVSCKFMLQLLKMAMMYSVSPALTTDLEKRVSLVLEDAEVSDLLIPRYQNGDQGKTVM

SEQ ID NO: 20351 - DNA, 499 bp, Glycine max
ttacctcggaggagactgccaaggtcaaggctgccggcaaggcgtggtacaagaccatgatctcggacagtgactacaccgagtttgagaacttcaccaagtggctcggagtgacgcagtgaagcggcctttgagacctagttaagttttgattagttgtgtcgctgaacttgtattgagacgaaatagtattttatcaatctgtcttatcctgcatcttcacaacaagttacctatctgtggactttaagcctgcatgttcgttttatttctccattgccgtgggagcatagtatttgcatgttcgaaccaattatctggattatggtatggatttgtgcacataatgtctgttcatgatgcttgtggtctagtgccgtttggccttgtagtagtactacttccgtatccgtctcagagataattgatgttttagaaagtaagtgatgttttaggtttgttgaacaatcgactaaatttataagatttttttttgacc

SEQ ID NO: 20352 - protein, 55 aa, Glycine max
MFVLFLHCRGSIVFACSNQLSGLWYGFVHIMSVHDACGLVPFGLVVVLLPYPSQR

SEQ ID NO: 20353 - protein, 39 aa, Glycine max
TSEETAKVKAAGKAWYKTMISDSDYTEFENFTKWLGVTQ

SEQ ID NO: 20354 - DNA, 1328 bp, Glycine max
ttagcaagtcaagggctgttgactacagcgatggagtatttaaaacttttgggttctgaagaactgtcgcctgaacttacaatcttaaaggatcgaattgcactttctacagaacctgagaaagacttcaaaactactgcttttgaaagttctcaatcacatagtgggtcctattatggtgccgataattccaattataatagtaattattatcaggagccagtaaccactcaagtgcagcatggtgtttctggaattcaatatcctgatagctatcaacagccatttgatcctagatatggaagaggctatggtgctcctactccaccccagcaacctcaacagcctaatttgtttgttccaccacagactactcaggttgtgcaaactccccagccgactttctcaaatactgctgttgcaccaccacctttgagaacttttgatcctcaaactcctcccatgcttagaaatgtggagcaatatcagcagcctacattgggatctcaattgtataatacaaccaatccaccttaccagcctacaccccctgttccatcacaagtggccttgagtcatggccagaacttgtcacaagttgtggcacctaccccaaatccaatgggatacatgccagtctctggttctggtggtgtccaaagacctggggtgggatcaatacaacctcccagtccccctcaagtgcaacctgtgcaaccacctgcagctcctcctcctactttgcagactgctgatacttcaaaagtacctgggcatcaaatgcctattgtcacaactttgacaaggcttttcaatgagacatcagacgcccttggaggttcacgtgcaaacccagctaagaggcgggagatagaagacaactcgaagagacttggtgggttgtttgccaagttaaatagtggagacatatcgaaaaatgcttctgacaagctccttcagctttgtcaggcattagacaatggtgattttggtactgccctacaaattcaggttcttcttactactactgagtgggacgaatgccaatcctggttaggttcactcaagcggatgatcaagacaaggcagagcgcgagactaggttaaaaaagctacagatttctttttgctgattttggaaaattttcgtgtgattagcatcttgcagtagtgattgctggtcctcgtatcaatgtacacagactactgccatctctagatttcaggtgcagggtttttgattctatgtgcttctacaattttcttgctgtgtctgcagctttcacatcgactgttattaaaagctgttaatgaaggtagttttcagg

SEQ ID NO: 20355 - protein, 368 aa, Glycine max
LASQGLLTTAMEYLKLLGSEELSPELTILKDRIALSTEPEKDFKTTAFESSQSHSGSYYGADNSNYNSNYYQEPVTTQVQHGVSGIQYPDSYQQPFDPRYGRGYGAPTPPQQPQQPNLFVPPQTTQVVQTPQPTFSNTAVAPPPLRTFDPQTPPMLRNVEQYQQPTLGSQLYNTTNPPYQPTPPVPSQVALSHGQNLSQVVAPTPNPMGYMPVSGSGGVQRPGVGSIQPPSPPQVQPVQPPAAPPPTLQTADTSKVPGHQMPIVTTLTRLFNETSDALGGSRANPAKRREIEDNSKRLGGLFAKLNSGDISKNASDKLLQLCQALDNGDFGTALQIQVLLTTTEWDECQSWLGSLKRMIKTRQSARLG

SEQ ID NO: 20356 - protein, 358 aa, Glycine max
MEYLKLLGSEELSPELTILKDRIALSTEPEKDFKTTAFESSQSHSGSYYGADNSNYNSNYYQEPVTTQVQHGVSGIQYPDSYQQPFDPRYGRGYGAPTPPQQPQQPNLFVPPQTTQVVQTPQPTFSNTAVAPPPLRTFDPQTPPMLRNVEQYQQPTLGSQLYNTTNPPYQPTPPVPSQVALSHGQNLSQVVAPTPNPMGYMPVSGSGGVQRPGVGSIQPPSPPQVQPVQPPAAPPPTLQTADTSKVPGHQMPIVTTLTRLFNETSDALGGSRANPAKRREIEDNSKRLGGLFAKLNSGDISKNASDKLLQLCQALDNGDFGTALQIQVLLTTTEWDECQSWLGSLKRMIKTRQSARLG

SEQ ID NO: 20357 - protein, 214 aa, Glycine max
MLRNVEQYQQPTLGSQLYNTTNPPYQPTPPVPSQVALSHGQNLSQVVAPTPNPMGYMPVSGSGGVQRPGVGSIQPPSPPQVQPVQPPAAPPPTLQTADTSKVPGHQMPIVTTLTRLFNETSDALGGSRANPAKRREIEDNSKRLGGLFAKLNSGDISKNASDKLLQLCQALDNGDFGTALQIQVLLTTTEWDECQSWLGSLKRMIKTRQSARLG

SEQ ID NO: 20358 - DNA, 1711 bp, Glycine max
tgttattagcattgatgatgacgatgacgaggaaagtgatgatgcggagtttcccggaggtgttgctggaggtgttggggaattggatagcgatgcctgctctagtaaaaggtctcctccagacccaagtggcttgcggaattctgtacacatagatgttgttgatgatagtggtgtttgtggaaaggagtctgaatctgatgagctaaaatgtaggaaagcatgctctacaaatggtactggcggatgtcgctatggtgtcgattggggtgacagtgagtcagagagtgattgctctgattgtgaactcatggatcgtgaacagtgggaaaagatttctcttaagagaaagcgcagtgtgtttaatgaccaatcttgttatgatgagcatgccagttcttctggattacattgtaataataatgtataccttgatgttgacgaggaaaatatgaccaaagagaatgctagaggcaccgcatattctggtcccaccaatggtgaatatgttaaggagaatcaatcttccttttctgttaagggtgatagtcaagtagatgggatttgttttaataatggggcaaaaaattctttcaaggattctgatgagaaagttgagtgggagacttttaaatcttctttgtttgaatccacagaggaaatgcaatcattgcatcaaagttctgatattgagcatggaaaaagtacaagaaacaaagatttctctccctgcacccagtataataataactacaatttctgtagtgatgttactggtgtttcaaggagccaagaagcatgtagaaggcagcttagcaatactggatctacactgaagagtaaagatggcaatttatttgatttgaattatgaaagtgcctatgttgatgaaggacaagttgattgtgatgggcttgcttcaaatgatcaagattgtggtcttactgcttcaaatgagaaagatataattaatgaaagagaaaagcttaaggagactgatgaatataaacaagcaatggaagaggaatgggcatctaggcagcggcaattgcaaattcaggcagaggaagtacaaagattacgcaaaagaagaaaggctgaaaagcgcttactggatatgcaaagaaggcaaaaagaacgtattgaagaagtgagagagacacagaagaaggatgaagaagttatgaacctgaaggagcaattgcgggttgaaatacagaaggggcttaatcaattggagatgcgatgccatgatatgccctcactgcttcgtggcttaggaatacaagtgggaggaagctttatccctttgccaaatgaggtgcatgcagcctataaacgtgcgttgcttaagtttcatccagaccgtgcatcaaaaactgacgttcgtgttcaggttgaggctgaggagaagttcaagctcatctctcgtttgaaggaaaagtttgggatgacttcatgtcactaaatgctaacaactgataaatttggttgttggtattttgtgttttaactgaagtgcttttacctcataatagctcatttgttggtattcttatcttaactgtatctattagtctcccctccttttctcccaaaatttacagcagataataggttaatggactagaatatgtgaaggattttatttcttataaaaatggattttttggacggacagttaaattgatattactgtcctcatcttgac

SEQ ID NO: 20359 - protein, 488 aa, Glycine max
VISIDDDDDEESDDAEFPGGVAGGVGELDSDACSSKRSPPDPSGLRNSVHIDVVDDSGVCGKESESDELKCRKACSTNGTGGCRYGVDWGDSESESDCSDCELMDREQWEKISLKRKRSVFNDQSCYDEHASSSGLHCNNNVYLDVDEENMTKENARGTAYSGPTNGEYVKENQSSFSVKGDSQVDGICFNNGAKNSFKDSDEKVEWETFKSSLFESTEEMQSLHQSSDIEHGKSTRNKDFSPCTQYNNNYNFCSDVTGVSRSQEACRRQLSNTGSTLKSKDGNLFDLNYESAYVDEGQVDCDGLASNDQDCGLTASNEKDIINEREKLKETDEYKQAMEEEWASRQRQLQIQAEEVQRLRKRRKAEKRLLDMQRRQKERIEEVRETQKKDEEVMNLKEQLRVEIQKGLNQLEMRCHDMPSLLRGLGIQVGGSFIPLPNEVHAAYKRALLKFHPDRASKTDVRVQVEAEEKFKLISRLKEKFGMTSCH

SEQ ID NO: 20360 - protein, 385 aa, Glycine max
MDREQWEKISLKRKRSVFNDQSCYDEHASSSGLHCNNNVYLDVDEENMTKENARGTAYSGPTNGEYVKENQSSFSVKGDSQVDGICFNNGAKNSFKDSDEKVEWETFKSSLFESTEEMQSLHQSSDIEHGKSTRNKDFSPCTQYNNNYNFCSDVTGVSRSQEACRRQLSNTGSTLKSKDGNLFDLNYESAYVDEGQVDCDGLASNDQDCGLTASNEKDIINEREKLKETDEYKQAMEEEWASRQRQLQIQAEEVQRLRKRRKAEKRLLDMQRRQKERIEEVRETQKKDEEVMNLKEQLRVEIQKGLNQLEMRCHDMPSLLRGLGIQVGGSFIPLPNEVHAAYKRALLKFHPDRASKTDVRVQVEAEEKFKLISRLKEKFGMTSCH

SEQ ID NO: 20361 - protein, 338 aa, Glycine max
MTKENARGTAYSGPTNGEYVKENQSSFSVKGDSQVDGICFNNGAKNSFKDSDEKVEWETFKSSLFESTEEMQSLHQSSDIEHGKSTRNKDFSPCTQYNNNYNFCSDVTGVSRSQEACRRQLSNTGSTLKSKDGNLFDLNYESAYVDEGQVDCDGLASNDQDCGLTASNEKDIINEREKLKETDEYKQAMEEEWASRQRQLQIQAEEVQRLRKRRKAEKRLLDMQRRQKERIEEVRETQKKDEEVMNLKEQLRVEIQKGLNQLEMRCHDMPSLLRGLGIQVGGSFIPLPNEVHAAYKRALLKFHPDRASKTDVRVQVEAEEKFKLISRLKEKFGMTSCH

SEQ ID NO: 20362 - DNA, 1261 bp, Glycine max
gaattggataatgctgctactccacctgttgaatatgataatggccatgcaaaccttgatgcccactattcatcttcttcttcacaacaagcacatgatgctgcacataatcaacagatgagggaggaattggctgcaatacgcattcaaacagcatttcgaggatttctggctagaagagcactacgggctttgaaaggtgtggtaaggcttcaggcccttgtaagaggccatgcagtgagaaaacaagccgcaataacactccgttgtatgcaagctttggtgagggttcaagctcgtgttcgggctaggcgtgtttgcatggcattggaaactcaagcatcacaacagaagcatcagcaaaaccttgcaaatgaagctcgagttcgagaaacagaagaaggatggtgtgatagtgtaggatctgttgaagaaattcaggctaaaatattgaagagacaagaggctgcagcaaaacgtgagagagccatggcgtatgctctatctcatcagtggcaggcaggatcaagacagcagcctgtttcctctggtggatttgaaccagataaaaatagctggggttggaattggttggaaagatggatggctgtccgtccttgggagaaccgcttcgttgacattaatatgaaggatggagtaacagtacatgaagatggagctaaggatgataaaaatggaaccacacctcagttgagctctgctaacaagaaaccattctcatcaaacacacatccaaacctgacaagtcatggaactggtcccactatatctgatggctgtgattcttcatctagtaagtctgcaggtttgctagaatcatcatacacgcagcctgttaagctaacttctaaggcaaaagttgaaaatactgttgaagaagttaactcaaaacctagaattgggtcaagatcccatagtaatccaaaggagagaacatcacaggcagataagcaggccaaaaaacgattatctctgcctaacaatggggctggagctggatgtcaaatagtcaaacaccctgttagcactactaatgtgattagggataaacctaagctcaacggaagacgggatgcgaatacaaaaccagttccatagctgaatggaagaaaggatgcgaacataaacacacggatatgtattttcgagaatctcaaataagggaaatcactctcttctctattgatatatatggccatttgttgttctgtgcatataatgtgaagcggtgagggctttg

SEQ ID NO: 20363 - protein, 372 aa, Glycine max
ELDNAATPPVEYDNGHANLDAHYSSSSSQQAHDAAHNQQMREELAAIRIQTAFRGFLARRALRALKGVVRLQALVRGHAVRKQAAITLRCMQALVRVQARVRARRVCMALETQASQQKHQQNLANEARVRETEEGWCDSVGSVEEIQAKILKRQEAAAKRERAMAYALSHQWQAGSRQQPVSSGGFEPDKNSWGWNWLERWMAVRPWENRFVDINMKDGVTVHEDGAKDDKNGTTPQLSSANKKPFSSNTHPNLTSHGTGPTISDGCDSSSSKSAGLLESSYTQPVKLTSKAKVENTVEEVNSKPRIGSRSHSNPKERTSQADKQAKKRLSLPNNGAGAGCQIVKHPVSTTNVIRDKPKLNGRRDANTKPVP

SEQ ID NO: 20364 - protein, 333 aa, Glycine max
MREELAAIRIQTAFRGFLARRALRALKGVVRLQALVRGHAVRKQAAITLRCMQALVRVQARVRARRVCMALETQASQQKHQQNLANEARVRETEEGWCDSVGSVEEIQAKILKRQEAAAKRERAMAYALSHQWQAGSRQQPVSSGGFEPDKNSWGWNWLERWMAVRPWENRFVDINMKDGVTVHEDGAKDDKNGTTPQLSSANKKPFSSNTHPNLTSHGTGPTISDGCDSSSSKSAGLLESSYTQPVKLTSKAKVENTVEEVNSKPRIGSRSHSNPKERTSQADKQAKKRLSLPNNGAGAGCQIVKHPVSTTNVIRDKPKLNGRRDANTKPVP

SEQ ID NO: 20365 - protein, 282 aa, Glycine max
MQALVRVQARVRARRVCMALETQASQQKHQQNLANEARVRETEEGWCDSVGSVEEIQAKILKRQEAAAKRERAMAYALSHQWQAGSRQQPVSSGGFEPDKNSWGWNWLERWMAVRPWENRFVDINMKDGVTVHEDGAKDDKNGTTPQLSSANKKPFSSNTHPNLTSHGTGPTISDGCDSSSSKSAGLLESSYTQPVKLTSKAKVENTVEEVNSKPRIGSRSHSNPKERTSQADKQAKKRLSLPNNGAGAGCQIVKHPVSTTNVIRDKPKLNGRRDANTKPVP

SEQ ID NO: 20366 - DNA, 1918 bp, Glycine max
attagatcatctttgcgtgctgttttcattcagaaattggagaaactggatctcagcaagcatccatctagaaaacagaataaagcctttcccattctttctgtccttgcacgagatattattgaactggctattaatgagaaagcaatatttagtcccaaacttaagagatggcatcctcttgctactggtgttgctgttgctaccctccatgtgtgttatggaaatgagttgaagaagtatgttaagggtattaatgagttgacacctgatgctatagaagtgctgatagctgctgacaaattggagaaagatctggtgcagatagcagtggaagattctgttgacagtgaagatggtggaaaatccattataagggagatgcaaccttacgaggctgaagctgttattgctaccctggttaagtcatggataaatattagagtagatagattgggggaatgggttgacagaaatgtgcgacaagaggtatggaatcctggggaaaataaagagggttttgctccttctgctgttgaagttctacgaatcatagatgacactctggaggctttctttctgttacctatacccatgcatgcagatttgcttcctgaattgatgtctggtctcgacaaatctctgcaacagtacattttgaaagccacatctggctgtggtagccgtagtagcttcatcccaactttgcctgcattgactaggtgttcaacaacatcaaaaactggtgtatttaagaaaaaagaaaagtcacaagtgactcagaggaggaaagcccatgtcggaaccactattggagacaactcaattgatataacccagatgtgtgttcgcatcaatactatgcagcgcattcgcatggaattaggggttttggaaaagaggatagttgccaatctcagcagttctagatccactaatgcggatatagcaaatggggtgagcttgaagttcaagctttccgcatctgctgctgtggaaggcatccatcaactctgcgagtgcatagcatacaaaatcgttttccatgaactctggcatgttatttgggatggcctttatgttggagaagttgcatctgctaggattgagccttttcttcaggagcttgagcaatacttggagattgtatcatctacagtgcatgataaagttagaacacgtgtaattgttaaagtaatgcaggcttcttttgatgggtttctgttggttttgttagccggaggtccatcacgtgctttctctctgcaagattctgttattatagaggaagatttcaagtttctgactggcttgttctggtccaatggagatggattgccagctgaattgatagaaaagcattctaccactgtcaaaggtgtacttcccttgtttcgtgctgatactgagcacataattcagcagttcagtcaacttactatggaaatgtacggttctacagccaaatcccggcttccattgcctccaacagcagatcaatggagtccaacagaaccgaacacacttttgcgagtcttgtgtaataggaatgatgaggcagctgcaaagttccttaagaagaattacaacttacctaagaagctctaacaattgacaagtaaccactactctgatatgccacgcctttccacccaatataaatttgaagtttgttcgttatgtgttgtgaaaccctggcctagtttttgaggatgtgattcaggtaaaggtggtacggtatgcattatacacttactgatcaactctaggaaatatgatgctttatcatcaataatgctcaaaagtataaattgtacaggagtgattcttttgcctttgctaatttgttggcttgttttcagctcgtgccaaaacacaatcactgacaccatggtaatacagagaagtatttacaatt

SEQ ID NO: 20367 - protein, 535 aa, Glycine max
IRSSLRAVFIQKLEKLDLSKHPSRKQNKAFPILSVLARDIIELAINEKAIFSPKLKRWHPLATGVAVATLHVCYGNELKKYVKGINELTPDAIEVLIAADKLEKDLVQIAVEDSVDSEDGGKSIIREMQPYEAEAVIATLVKSWINIRVDRLGEWVDRNVRQEVWNPGENKEGFAPSAVEVLRIIDDTLEAFFLLPIPMHADLLPELMSGLDKSLQQYILKATSGCGSRSSFIPTLPALTRCSTTSKTGVFKKKEKSQVTQRRKAHVGTTIGDNSIDITQMCVRINTMQRIRMELGVLEKRIVANLSSSRSTNADIANGVSLKFKLSASAAVEGIHQLCECIAYKIVFHELWHVIWDGLYVGEVASARIEPFLQELEQYLEIVSSTVHDKVRTRVIVKVMQASFDGFLLVLLAGGPSRAFSLQDSVIIEEDFKFLTGLFWSNGDGLPAELIEKHSTTVKGVLPLFRADTEHIIQQFSQLTMEMYGSTAKSRLPLPPTADQWSPTEPNTLLRVLCNRNDEAAAKFLKKNYNLPKKL

SEQ ID NO: 20368 - protein, 408 aa, Glycine max
MQPYEAEAVIATLVKSWINIRVDRLGEWVDRNVRQEVWNPGENKEGFAPSAVEVLRIIDDTLEAFFLLPIPMHADLLPELMSGLDKSLQQYILKATSGCGSRSSFIPTLPALTRCSTTSKTGVFKKKEKSQVTQRRKAHVGTTIGDNSIDITQMCVRINTMQRIRMELGVLEKRIVANLSSSRSTNADIANGVSLKFKLSASAAVEGIHQLCECIAYKIVFHELWHVIWDGLYVGEVASARIEPFLQELEQYLEIVSSTVHDKVRTRVIVKVMQASFDGFLLVLLAGGPSRAFSLQDSVIIEEDFKFLTGLFWSNGDGLPAELIEKHSTTVKGVLPLFRADTEHIIQQFSQLTMEMYGSTAKSRLPLPPTADQWSPTEPNTLLRVLCNRNDEAAAKFLKKNYNLPKKL

SEQ ID NO: 20369 - protein, 337 aa, Glycine max
MHADLLPELMSGLDKSLQQYILKATSGCGSRSSFIPTLPALTRCSTTSKTGVFKKKEKSQVTQRRKAHVGTTIGDNSIDITQMCVRINTMQRIRMELGVLEKRIVANLSSSRSTNADIANGVSLKFKLSASAAVEGIHQLCECIAYKIVFHELWHVIWDGLYVGEVASARIEPFLQELEQYLEIVSSTVHDKVRTRVIVKVMQASFDGFLLVLLAGGPSRAFSLQDSVIIEEDFKFLTGLFWSNGDGLPAELIEKHSTTVKGVLPLFRADTEHIIQQFSQLTMEMYGSTAKSRLPLPPTADQWSPTEPNTLLRVLCNRNDEAAAKFLKKNYNLPKKL

SEQ ID NO: 20370 - DNA, 1184 bp, Glycine max
atgtttcatccttctgtctctcatcccacgtgaaggttcaatggtcactaagctagttcagccaccaatgacagattcccatgtgagtcctcttatttgtagaaccatgaatgccatgaaactccaaaattttgttccatctagaaatcattcaagaataaacacttcaagatttggtgagagaccattatggtttagacccattacaatcattaaagttgcagaacacaatcctggctcaggcttagctgagcttgaaacacttgctcagaagaaaagagagctttgccaggcggtggaaggtacccactccagttattttcatctcccttttattattatgatcgaaatagtaatatgattgaaaaagagtggcaaaaaaacatgtttcaaggaatcaacaggggaatttttggaatcccagctaccaagaaatctgaaattgaaagattggtgaagcagatagaatctctgaatccaactccatgcccaactctagaactggagaaggtggctgggtgctggaggcttgtttacagtacgatctcaattttgggatcaaagaggaccaaattaggcctcagagacttcatctcattggatgatttttttcagacgattgacatatccaagagcaaagcagttaatgtgataaagttcagtgcaatgggattgagtttgttgtctggacagcttaatattgaagcctctttcaggattgcttcctcaacagttaaaactccacttcttgtttggtcgcttatttctctgtaaagcattaatatgttaatatggcttccaaataactacctaattggttactgcttgaaattgacagagggttgacattaatttcgaaaactcaacgatcactcctgaccggttgatgaatgtatttcggaaaaattatgatcttttgttgggcatcttcaatccagagggatggctggaaatcacgccatagatatgttgatgataccttgagaataggaagggacgacaaaagcaatatctttgtgctggaaagatttgatgatagtaataacacgtagccaatttccttccactttaatcttcaaaattaattagtacgcgaggcattttttatccttacagatgtttttgttttgaaaattttgttggccaagattcatttagtaaatatgatagaaatttcttcttac

SEQ ID NO: 20371 - protein, 138 aa, Glycine max
MIEKEWQKNMFQGINRGIFGIPATKKSEIERLVKQIESLNPTPCPTLELEKVAGCWRLVYSTISILGSKRTKLGLRDFISLDDFFQTIDISKSKAVNVIKFSAMGLSLLSGQLNIEASFRIASSTVKTPLLVWSLISL

SEQ ID NO: 20372 - protein, 129 aa, Glycine max
MFQGINRGIFGIPATKKSEIERLVKQIESLNPTPCPTLELEKVAGCWRLVYSTISILGSKRTKLGLRDFISLDDFFQTIDISKSKAVNVIKFSAMGLSLLSGQLNIEASFRIASSTVKTPLLVWSLISL

SEQ ID NO: 20373 - protein, 119 aa, Glycine max
CFILLSLIPREGSMVTKLVQPPMTDSHVSPLICRTMNAMKLQNFVPSRNHSRINTSRFGERPLWFRPITIIKVAEHNPGSGLAELETLAQKKRELCQAVEGTHSSYFHLPFIIMIEIVI

SEQ ID NO: 20374 - DNA, 1688 bp, Glycine max
ggagaactacctacctcaggatatggaacaaatgcatggcctgacttggctttatccagttcagctaaaattgatcatggttccctgggtactgaagtatctaataatttaagtgaacttagcaaattgagttcatcaagaggtgaagaaactacacaacatgaaaagcatgctgaaattttccaaaatgctcatgaaggtaaagagcaaggtcattttgttgattatggatgggccaacataggaagttttgatgaccttgatcggatttttagcaatgatgaccctatatttggccatgcaagtcttgatagttctaatgagctttggtcgtctaaagatgtgagtaacaatgcagcacctttaccattggatacaccaagttcatctggtgctttaaggaacagaactgagtctttggaaatcaaagaagaatatgttcaatgtaatgataaatcattggacctcagcaatgagaagattgggggtcctggatcccaagttatagaaaattcatgcacaaccacagctaatgtgggaaatggtggagttagaagtaagcctactggaaaggaacagcaggtttttaggcaaaagaatcttttgaaaactcggaaaaaatcactggtaaaacaagaggagaataccttgcaggatttctatgataattggtctccttcagcagcaccggcaaaacaatttcagaatcaattggcaccttctgttatacaatcttctccctcttcaattctggggcagccaaagcagatccaaggagctgaaaccctatatcagaatatcataaatccatatgcggcttcttctgtgtatgggaaccttactaatacatatcctgctatgccaatgctatcacagactcacccagcactttctgggtacgaagtgtctcctggtattgtgaatcctgtgaataatttagtggactcagtcaagcctcaaatcatgacccctcaggagaaaattgaaaaattgaggaggcggcagcaaatgcaggcaatgattgctattcagaaacaacaacaacaattgggccatcaagttcctagtactagtaaatcaagcactcaaaaatgtcctccagaaattcaaagtcatcttagtgatgggactgatgacgatctaagaactcttcctgctctagatccaccaattgaacaagatgattctaatacaatgtcagtggcagttggtaatgatttcgttgaagataccgtattgtacagacttcaggatattatatcaaagttagacatcaaaataagactctgcatcagagatagtttgttccggttggcacaaaggcattatactagtgatactagcagtacaaacaaaagtagcagagaagaacttgaagttgctgcaagagaagaaagcattagccaaaacagatatgccaggatgcctgatgttgaaacagagacgaatcccattgatagaactgtggctcatttactttttcataggcctatggagttgacccaaaactattctgacaagctggagtcacctatttctaccaaatgtgaaagcaaagcagctaaccccttgaactttccagtgagttgcttaccagatgaggactcgaaaaacaatcaacaactttctcaccttgggtttaagaatccttgggttgatgcccagtccatggatcaaattaaaaacag

SEQ ID NO: 20375 - protein, 562 aa, Glycine max
GELPTSGYGTNAWPDLALSSSAKIDHGSLGTEVSNNLSELSKLSSSRGEETTQHEKHAEIFQNAHEGKEQGHFVDYGWANIGSFDDLDRIFSNDDPIFGHASLDSSNELWSSKDVSNNAAPLPLDTPSSSGALRNRTESLEIKEEYVQCNDKSLDLSNEKIGGPGSQVIENSCTTTANVGNGGVRSKPTGKEQQVFRQKNLLKTRKKSLVKQEENTLQDFYDNWSPSAAPAKQFQNQLAPSVIQSSPSSILGQPKQIQGAETLYQNIINPYAASSVYGNLTNTYPAMPMLSQTHPALSGYEVSPGIVNPVNNLVDSVKPQIMTPQEKIEKLRRRQQMQAMIAIQKQQQQLGHQVPSTSKSSTQKCPPEIQSHLSDGTDDDLRTLPALDPPIEQDDSNTMSVAVGNDFVEDTVLYRLQDIISKLDIKIRLCIRDSLFRLAQRHYTSDTSSTNKSSREELEVAAREESISQNRYARMPDVETETNPIDRTVAHLLFHRPMELTQNYSDKLESPISTKCESKAANPLNFPVSCLPDEDSKNNQQLSHLGFKNPWVDAQSMDQIKN

SEQ ID NO: 20376 - DNA, 1442 bp, Glycine max
attatggaattcagaaattgcagattcaattcaacggttgagtgttgattcattgtacttgtactagcagcagcaatttgtttcgtgaacacttgcagcttcggtttcttaattcatcttcgctagggtttttgaagttgacgatggcttcccctcctcatttcgacgacgactttgattttggaggcggttttagcggaacgcaatcaggtaataagaggccatctcccgactatgacgaggatgaatatgaaaatgatccttttggacacaagaaggccaaatcaaaagctgaagaagcggcttctggtgtgaccacaggaatgattttgtctcttcgtgaaagtcttcagaactgtaaggacatgcttgctacatgccaaaatgaacttgaggctgcaaaatctgagattcagaagtggcattcttcatttcaaaatgaaccttttatatctgctgggaccactccagcaccgaaatcggtgattaattatcttcaagctctgaaatcatctgaagagtctttaagagagcagcttgaaaaagcaaagaaaaaggaagctgcattcattgtcacatttgccaaacgggaacaagagatagcagagttgaagtctgctgtacgggacctgaaatctcaattcaattcagcttctatgcaggctaggaggttgttactagatccagcagttcatgaagagttcacacgattgaaggtaaatgtcagtcgaggttgttgtcgtagatttatctcctcagagatatagatagtgaagaattgacttgtcttcctctattatgaacaatgctctgtttatttcataattgtaattccatcctttgttcattgaagaatttatgaagacattttactaccttggatgtaacaaaatgaaatggaaccattagttttaaatggaagagggtaaaaaagcttcctagttttagaatgtgattcaaatacaaagcatagagacagagaggatatttacattggtgatgattcagtcaagtgtttcttacaagagttttcatctgaacatagaatttagttgaagaaaaggataaaaaagtaaaggagttgcaagataacattgctgctgtaaactttactccccaaagcaagatggggaagatgctgatggctaaatgtagaaccctacaggaggaaaatgaggagattgggaatcaagcttctgagggcaagatgcacgaattagcaatgaaactttcagtgcagaaataccaaaatgcagaactcagatgtcaatttgaaggttgtttgttgagtcagtgatttcatctgattatcttttggcattttaatgccttgatcttttaaactagcttctcaattattgctagtttcctgtgtcactctgtcagattcattaaagaagttcatataatcagattaatattcattccaaaatacaagcaag

SEQ ID NO: 20377 - protein, 207 aa, Glycine max
MASPPHFDDDFDFGGGFSGTQSGNKRPSPDYDEDEYENDPFGHKKAKSKAEEAASGVTTGMILSLRESLQNCKDMLATCQNELEAAKSEIQKWHSSFQNEPFISAGTTPAPKSVINYLQALKSSEESLREQLEKAKKKEAAFIVTFAKREQEIAELKSAVRDLKSQFNSASMQARRLLLDPAVHEEFTRLKVNVSRGCCRRFISSEI

SEQ ID NO: 20378 - protein, 147 aa, Glycine max
MILSLRESLQNCKDMLATCQNELEAAKSEIQKWHSSFQNEPFISAGTTPAPKSVINYLQALKSSEESLREQLEKAKKKEAAFIVTFAKREQEIAELKSAVRDLKSQFNSASMQARRLLLDPAVHEEFTRLKVNVSRGCCRRFISSEI

SEQ ID NO: 20379 - protein, 133 aa, Glycine max
MLATCQNELEAAKSEIQKWHSSFQNEPFISAGTTPAPKSVINYLQALKSSEESLREQLEKAKKKEAAFIVTFAKREQEIAELKSAVRDLKSQFNSASMQARRLLLDPAVHEEFTRLKVNVSRGCCRRFISSEI

SEQ ID NO: 20380 - DNA, 1397 bp, Glycine max
aacgtcctgatatgtttagaggaactgttcgatatgctagtgttcatgctcatttggggagaactgctagtagaagagatgatcttgaatctcttgcatacacactagtcttcctccataagggccgattaccatggcaaggttaccagggtgatagcaaatccttccttgtttgcaaaaagaagatggggacatctcctgagacgctatgctgcttgtgtcctcctccttttaggcattttcttgagattgtagtgaatatgaaatttgatgaagaacctaattattccaagctaatttctttgtttgatggtacgattggacccaatccagcattgcggccaattaatactgaaggtgcccaaaaggttgggcaaaagcggggtagattgaatgttgaagatgatgaatcacagccaagaaagaaggtccgtttaggggttcctgctacacaatggatttcaatttacaatgcaagactgccaatgaaacaaaggtaccattataatgtgtctgatgcaagattagaacagcatgttgagagaggggttgcagatggccttcttattagttgtgtgtcttcttgttgcaatctttgggctcttattatggatgctggaactggttttacagctcaagtttacaagttgtcaacctttttcttgcacaaggaatggataatggagcagtgggataaaaacttttacattacttctattgcagggagcaacaatggcagctctcttgtggtgatgtcaaaaggtacgcagtatactcaacaatcctacaaagtgagtgaatctttccccttcaaatggataaacaagaagtggagagaaggttttcatgtcacttcaatggccactgctggaagtcgttggggtgttgttatgtctcgaaatgctggattcagtaaacaggtggttgaacttgattttctctatccaagtgagggcatccataaacgttgggataaaggttataggattacagcaaccgcagctacattggatcaatctgctcttatattaagtattccgagacgcaaactcagtgatgaaactcaggaaactttacggacgtcacaatttcccagcacgcatgttaaggacaaatggtcaaaaaacctttaccttgcctgtttgtgctacggacgcacagtatgctgatttccatgacattttaaagcattttattgacaagcggattatgaattgtctactgcccaacaaccacaaaagatctttttgtagaaagaaactaattgttgtgccagtagagaaccttattttgttatgttataagataagaatattgttctgttccctccccttctattattatatgctttatgggacggggggaatgttacagagtaatgaatggtgtttagcttt

SEQ ID NO: 20381 - protein, 388 aa, Glycine max
RPDMFRGTVRYASVHAHLGRTASRRDDLESLAYTLVFLHKGRLPWQGYQGDSKSFLVCKKKMGTSPETLCCLCPPPFRHFLEIVVNMKFDEEPNYSKLISLFDGTIGPNPALRPINTEGAQKVGQKRGRLNVEDDESQPRKKVRLGVPATQWISIYNARLPMKQRYHYNVSDARLEQHVERGVADGLLISCVSSCCNLWALIMDAGTGFTAQVYKLSTFFLHKEWIMEQWDKNFYITSIAGSNNGSSLVVMSKGTQYTQQSYKVSESFPFKWINKKWREGFHVTSMATAGSRWGVVMSRNAGFSKQVVELDFLYPSEGIHKRWDKGYRITATAATLDQSALILSIPRRKLSDETQETLRTSQFPSTHVKDKWSKNLYLACLCYGRTVC

SEQ ID NO: 20382 - protein, 385 aa, Glycine max
MFRGTVRYASVHAHLGRTASRRDDLESLAYTLVFLHKGRLPWQGYQGDSKSFLVCKKKMGTSPETLCCLCPPPFRHFLEIVVNMKFDEEPNYSKLISLFDGTIGPNPALRPINTEGAQKVGQKRGRLNVEDDESQPRKKVRLGVPATQWISIYNARLPMKQRYHYNVSDARLEQHVERGVADGLLISCVSSCCNLWALIMDAGTGFTAQVYKLSTFFLHKEWIMEQWDKNFYITSIAGSNNGSSLVVMSKGTQYTQQSYKVSESFPFKWINKKWREGFHVTSMATAGSRWGVVMSRNAGFSKQVVELDFLYPSEGIHKRWDKGYRITATAATLDQSALILSIPRRKLSDETQETLRTSQFPSTHVKDKWSKNLYLACLCYGRTVC

SEQ ID NO: 20383 - protein, 327 aa, Glycine max
MGTSPETLCCLCPPPFRHFLEIVVNMKFDEEPNYSKLISLFDGTIGPNPALRPINTEGAQKVGQKRGRLNVEDDESQPRKKVRLGVPATQWISIYNARLPMKQRYHYNVSDARLEQHVERGVADGLLISCVSSCCNLWALIMDAGTGFTAQVYKLSTFFLHKEWIMEQWDKNFYITSIAGSNNGSSLVVMSKGTQYTQQSYKVSESFPFKWINKKWREGFHVTSMATAGSRWGVVMSRNAGFSKQVVELDFLYPSEGIHKRWDKGYRITATAATLDQSALILSIPRRKLSDETQETLRTSQFPSTHVKDKWSKNLYLACLCYGRTVC

SEQ ID NO: 20384 - DNA, 997 bp, Glycine max
  misc_feature (355)..(355): n is a, c, g, or t
attcactctccttcatctctctcgctttctctctctttctctggcctctctctctctctcagaatttacacacgatccaatgacaacgaccaacaacgtgaacggatgttttggagacacgaagctgaccaaagtgtttgtaggaggattggcttgggacactaacaaagaagcaatgcatgatcatttcatcaagtacggtgatatcttggaggcagtcatcatctccgacaaactcactcgccgttccaaaggctacggctttgtgactttcaaagatgcggaagccgcgaagagggcttgtgaagactcgactccgatcatcaatggccgccgtgccaactgcaatcttgcnttccctcggtgggccgccttcgtagatctcccaccgtggcctcccctcaacaaggatctaagcacgtgggtaggcccatgtcaggacatgtagggaacaatcaagctcaatggtactacccctgcgggattcgcacaccagcaacatcaacaacaccatcatcagaccattcctttctatgggtaccctccctcctatgtcgccctgaacatgaccttcaatcaaaaagttggatacgttggaggcacctatatgagcggatactatgcacaaccgcaaccacaatcgctaccactgccacaaccacaatattaccaccaccatcacatgtatggtggaggaagagtaatggttggggcaaacccgatgatgcctctctacactgtctatccttatcatcaatctcacgccatcggttttcctcaaccctcttatacgaaacccatatcaggtacagttggaggaggaggagatagcataatgaagaaggccataagttgatgggctacacaacaagttgttgaccaaacgattcagcccaagaatattcattttctccggctcacaatgtttatttttaatatagagacaaatcattgttaaattaattcctttacatttcataatttattcattaaaact

SEQ ID NO: 20385 - protein, 148 aa, Glycine max
  misc_feature (118)..(118): Xaa can be any naturally occurring amino acid
FTLLHLSRFLSLSLASLSLSEFTHDPMTTTNNVNGCFGDTKLTKVFVGGLAWDTNKEAMHDHFIKYGDILEAVIISDKLTRRSKGYGFVTFKDAEAAKRACEDSTPIINGRRANCNLXFPRWAAFVDLPPWPPLNKDLSTWVGPCQDM

SEQ ID NO: 20386 - protein, 132 aa, Glycine max
MSGHVGNNQAQWYYPCGIRTPATSTTPSSDHSFLWVPSLLCRPEHDLQSKSWIRWRHLYERILCTTATTIATTATTTILPPPSHVWWRKSNGWGKPDDASLHCLSLSSISRHRFSSTLLYETHIRYSWRRRR

SEQ ID NO: 20387 - protein, 122 aa, Glycine max
  misc_feature (92)..(92): Xaa can be any naturally occurring amino acid
MTTTNNVNGCFGDTKLTKVFVGGLAWDTNKEAMHDHFIKYGDILEAVIISDKLTRRSKGYGFVTFKDAEAAKRACEDSTPIINGRRANCNLXFPRWAAFVDLPPWPPLNKDLSTWVGPCQDM

SEQ ID NO: 20388 - DNA, 594 bp, Glycine max
atcccacagagccaactccaaataaattaaatatataaataaaataaattgaactcctatctggggtttcttttacaaatttatttatttaatttatttggaaaataacaaatcattagtaataaatgaggatgtctaaaaatgtcaaagtgttggtctctctagttcttgtagtgttattggctcttgcagcaaccaatattgaggcaagatacataaattatcgcgatcttcgtagtggagatcacagtttggcttgcgataaggcgaatcctagcacctgcacgaagcaagaagtcaatcgttaccaaagaggatgcgagacggccgatcggtgccgtgaatctcgttaatttatacagatgataaccgaagagcataatcatgcatcaaattagtttcctaattactataatagattgacaggcttctaacttggagaacaaatcttggttagtttatagaaatgcaatcctcgtattgatttgagatgatcaaattgatttcctttattatttaattagtctgttattggttttgtattattttaacacgatgatgttacgatcaaacaaatataaatatattgttccc

SEQ ID NO: 20389 - protein, 75 aa, Glycine max
MRMSKNVKVLVSLVLVVLLALAATNIEARYINYRDLRSGDHSLACDKANPSTCTKQEVNRYQRGCETADRCRESR

SEQ ID NO: 20390 - protein, 73 aa, Glycine max
MSKNVKVLVSLVLVVLLALAATNIEARYINYRDLRSGDHSLACDKANPSTCTKQEVNRYQRGCETADRCRESR

SEQ ID NO: 20391 - DNA, 856 bp, Glycine max
atcacccatattattgataccaactagcaacatacatagtgaagtacactagcaacatcttagcaccaatggcagccaagatttttgccatccttgccctccttgctctttcagcaagcgttgctaccgcgactattattccacaatgctcacaacaatacctctctccggtgacagccgcgagatttgaatacccaactatacaatcctacaggctacaagaggccatcgcagcaagcatcttacggtcgttagcattgaccgtccaacaaccatatgccctattgcaacaaccatccttaatgaatctatatctccaaagaatcgcagcacaacaactacaacaacagttgcttccaacaatcaatcaagtagttgcagcgaaccttgctgcttacctccagcaacaacaatttcttccattcaatcaactagctggggtgaaccctgctgcttacttgcaggcacaacagctactaccattcaaccaacttgtcaggagccctgctgccttcttactgcagcaacagttgcttccattccatctacaagttgtggcaaacattgctgctttcttgcaacaacaacaacaattgctgccattttacccacaggttgtgggaaacattaacgccttcttgcaacagcaacagttgctaccattctacccacaggatgtggcaaacaatgtcgccttcttacaacaacaacaattgctgccatttaaccaacttgctttgacgaatcctaccaccttattgcagcagcccaccattggtggtgccatcttctagatttttttatgctttatactgtaataataaagttctcatactgatatgtgcaacttctcagt

SEQ ID NO: 20392 - protein, 241 aa, Glycine max
MAAKIFAILALLALSASVATATIIPQCSQQYLSPVTAARFEYPTIQSYRLQEAIAASILRSLALTVQQPYALLQQPSLMNLYLQRIAAQQLQQQLLPTINQVVAANLAAYLQQQQFLPFNQLAGVNPAAYLQAQQLLPFNQLVRSPAAFLLQQQLLPFHLQVVANIAAFLQQQQQLLPFYPQVVGNINAFLQQQQLLPFYPQDVANNVAFLQQQQLLPFNQLALTNPTTLLQQPTIGGAIF

SEQ ID NO: 20393 - protein, 163 aa, Glycine max
MNLYLQRIAAQQLQQQLLPTINQVVAANLAAYLQQQQFLPFNQLAGVNPAAYLQAQQLLPFNQLVRSPAAFLLQQQLLPFHLQVVANIAAFLQQQQQLLPFYPQVVGNINAFLQQQQLLPFYPQDVANNVAFLQQQQLLPFNQLALTNPTTLLQQPTIGGAIF

SEQ ID NO: 20394 - DNA, 1019 bp, Glycine max
ctccaatcttcttctcttcttttctcgttctctttctcttgtgctgcgtgccaagccagacccatacatacacccacccagcccaccaatcactgccagcagcgacggagtgagggaagcaagcaaggaaggaagggacgctcggatggcgatgggagcggctgtgcgggaggcggcggcggacggcgtcgtgaccttcctctgggtgctctgcgtctccacgctcggcgcctccacggccgccgtcaccacctacctcagcctgcacgaggggatccactacgccctcctcgtcaccgtctccatcctcgccctcctcctcttcgccttcaacctcctctgcgacgccctcggcggcgccagcttcaaccccaccggcgtcgccgccttctacgccgccggcctcaccagcccctcgctcttctccatcgcgctccgcctaccagcgcaggccgccggagccgtgggcggagctctggccatctccgagctgatgccggagcagtacaagcacatgctcggcgggccctcgctcaaggtggatccccacaccggcgccgtcgccgaaggtgtgctcaccttcgtcatcacctttgccgtcctctgcatcatcgtcaagggaccccgcaaccccatcgtcaagacagcgatgctctccgtcaccaccgtcagcctcgtcctcaccggcgccgcatacaccggcccctccatgaaccctgccaacgcctttggttgggcgtatgttaacaatctgcacaacacctgggagcagctgtacgtgtactggatatgccccttcatcggtgccattctcgctgcgtggaccttcagggccgtgttcccgccaccggcccctaagcccaagaccaagaaagcatgatgaactcaagcacaaactttgacttagcaatttggggacctgaagaagcgaacatggtttgctagggaataatttgaaattgtatttaatcacctcaatgttacaccgatgtttaacttaaaagtgatcatttatcagt

SEQ ID NO: 20395 - protein, 292 aa, Glycine max
SNLLLFFSRSLSLVLRAKPDPYIHPPSPPITASSDGVREASKEGRDARMAMGAAVREAAADGVVTFLWVLCVSTLGASTAAVTTYLSLHEGIHYALLVTVSILALLLFAFNLLCDALGGASFNPTGVAAFYAAGLTSPSLFSIALRLPAQAAGAVGGALAISELMPEQYKHMLGGPSLKVDPHTGAVAEGVLTFVITFAVLCIIVKGPRNPIVKTAMLSVTTVSLVLTGAAYTGPSMNPANAFGWAYVNNLHNTWEQLYVYWICPFIGAILAAWTFRAVFPPPAPKPKTKKA

SEQ ID NO: 20396 - protein, 248 aa, Glycine max
LQSSSLLFSFSFSCAACQARPIHTPTQPTNHCQQRRSEGSKQGRKGRSDGDGSGCAGGGGGRRRDLPLGALRLHARRLHGRRHHLPQPARGDPLRPPRHRLHPRPPPLRLQPPLRRPRRRQLQPHRRRRLLRRRPHQPLALLHRAPPTSAGRRSRGRSSGHLRADAGAVQAHARRALAQGGSPHRRRRRRCAHLRHHLCRPLHHRQGTPQPHRQDSDALRHHRQPRPHRRRIHRPLHEPCQRLWLGVC

SEQ ID NO: 20397 - protein, 244 aa, Glycine max
MAMGAAVREAAADGVVTFLWVLCVSTLGASTAAVTTYLSLHEGIHYALLVTVSILALLLFAFNLLCDALGGASFNPTGVAAFYAAGLTSPSLFSIALRLPAQAAGAVGGALAISELMPEQYKHMLGGPSLKVDPHTGAVAEGVLTFVITFAVLCIIVKGPRNPIVKTAMLSVTTVSLVLTGAAYTGPSMNPANAFGWAYVNNLHNTWEQLYVYWICPFIGAILAAWTFRAVFPPPAPKPKTKKA

SEQ ID NO: 20398 - DNA, 908 bp, Glycine max
acacacttcttccacgcttcctcccccgagctacgacgacgactagccagccagctactcctccgcgcgcaagccagcggcgaagctcgtgaactctcccggtgcccagacatggcggcaagaaggctcctcgaggaggcggtcgccgccggcgcgcagcaggactcgctcaactcggacctggtcctcatcctcgccggcctgctctgcgcgctggtctgcgtcctcggcctcggcctcgtggcgcggtgcgcgtgctcgcgccactgggccagggccgcagacgccccgcccggcgccaacaggggcgtcaagaaggaggtgctgcgcgccctgcccaccgtcaggtacgtcgccgacggcggcgaggcgtcggaatcggacgagtgcgccatctgcctcgccgagttcgaggacggccaggacatgcgggtgctgccgcagtgcagccacgcgttccacacggcctgcgtcgacgcctggctgcgctcgcactcctcgtgcccgtcgtgccggcgggtgctcgtcgccgagctgccgcgcggcgagcggagcggacgctgcggcgcgcggcccggcggcctcgacgcgctcctcaaggccgtgccgctgtgccgctgacgtcgctgtagctcggcattagtggcgtgcgcactctggacaaaaggccaagggaaaagtgtgtcgagggaaattagccggtgcataagctcatcggttagcttcttatttacctttctcttggcttgggggcctgctgggtgttgattctttttaggtgtggctactctggaaatgggaaccattgagcatgaaggcgtgtgtatatacatagttgatggggggatttgtgattgtaacctatttgtacatatgtggaagttgctataaaaacatgcacttgctgg

SEQ ID NO: 20399 - protein, 206 aa, Glycine max
THFFHASSPELRRRLASQLLLRAQASGEARELSRCPDMAARRLLEEAVAAGAQQDSLNSDLVLILAGLLCALVCVLGLGLVARCACSRHWARAADAPPGANRGVKKEVLRALPTVRYVADGGEASESDECAICLAEFEDGQDMRVLPQCSHAFHTACVDAWLRSHSSCPSCRRVLVAELPRGERSGRCGARPGGLDALLKAVPLCR

SEQ ID NO: 20400 - protein, 169 aa, Glycine max
MAARRLLEEAVAAGAQQDSLNSDLVLILAGLLCALVCVLGLGLVARCACSRHWARAADAPPGANRGVKKEVLRALPTVRYVADGGEASESDECAICLAEFEDGQDMRVLPQCSHAFHTACVDAWLRSHSSCPSCRRVLVAELPRGERSGRCGARPGGLDALLKAVPLCR

SEQ ID NO: 20401 - DNA, 836 bp, Glycine max
agagactgctcgaccggaccgacgagcgacgaagcgcgcagaaagagaagaacctcggagctgagatggcacaagccatggcgtcgatgaccggcctctcgcagggcgtcctgcccagcaggcgcgccgacagcagaaccaggacggccgtcgtcatcgtcagggcgtccgcggagggcgacgccgttgcgcaggcgggccgccgcgccgtgatcgggctggtggccactggcatcgtcggcggcgccttgtcgcaggcggcgcgcgccgagaccgtcaagaccatcaagattggagccccgccgccgccctccggtggactccccgggactctcaactctgaccaggcgagggacttcgacctccccttgaaggagcggttctacctgcagccgctgccgccggcggaggcggcggcgagggtgaagacgtcggcgcaggacatcatcaacctcaagccgctcatcgacaagaaggcgtggccgtacgtccagaacgacctccgcctccgggcctcctacctgcgctacgacctcaagaccgtcatcgcttccaagcccaaggaggagaagaagagcctcaaggagctcaccggcaagctcttcagcaccatcgacgatcttgaccatgccgcgaagatcaagagcaccccagaggccgagaaatacttcgcagcaaccaaagatgctcttggccatgttctcgccaagctaggctagacgcaagggctaataatggccatgtaatttcggacttgtgtttgttcatatggacccggcaaggcaatgtaccattttctgttgatattgtatcaggaagcacttaactacaatgcc

SEQ ID NO: 20402 - protein, 238 aa, Glycine max
RLLDRTDERRSAQKEKNLGAEMAQAMASMTGLSQGVLPSRRADSRTRTAVVIVRASAEGDAVAQAGRRAVIGLVATGIVGGALSQAARAETVKTIKIGAPPPPSGGLPGTLNSDQARDFDLPLKERFYLQPLPPAEAAARVKTSAQDIINLKPLIDKKAWPYVQNDLRLRASYLRYDLKTVIASKPKEEKKSLKELTGKLFSTIDDLDHAAKIKSTPEAEKYFAATKDALGHVLAKLG

SEQ ID NO: 20403 - protein, 217 aa, Glycine max
MAQAMASMTGLSQGVLPSRRADSRTRTAVVIVRASAEGDAVAQAGRRAVIGLVATGIVGGALSQAARAETVKTIKIGAPPPPSGGLPGTLNSDQARDFDLPLKERFYLQPLPPAEAAARVKTSAQDIINLKPLIDKKAWPYVQNDLRLRASYLRYDLKTVIASKPKEEKKSLKELTGKLFSTIDDLDHAAKIKSTPEAEKYFAATKDALGHVLAKLG

SEQ ID NO: 20404 - protein, 213 aa, Glycine max
MASMTGLSQGVLPSRRADSRTRTAVVIVRASAEGDAVAQAGRRAVIGLVATGIVGGALSQAARAETVKTIKIGAPPPPSGGLPGTLNSDQARDFDLPLKERFYLQPLPPAEAAARVKTSAQDIINLKPLIDKKAWPYVQNDLRLRASYLRYDLKTVIASKPKEEKKSLKELTGKLFSTIDDLDHAAKIKSTPEAEKYFAATKDALGHVLAKLG

SEQ ID NO: 20405 - DNA, 1092 bp, Glycine max
atacactcgatcgaaccaactcattcctcctaccacctcggcaccaccagcccaagcagagccatggcgcccaacggagacaacaccgtggccaacgtccacagcggcatcgacagcaccaacaagacgctgctcaagagcgacgccctctacacctacatcctcgacaccaccgtcttcccccgtgagcacgagtgcatgcgcgacctgcgcctcatcaccgacaagcacccatggggctacatgcagtcgtcgtcggacgaggcacagctgctggggatgctgatcaagatggcgggcgccaagaagacgatcgaggtgggcgtgttcacgggctactcgctgctggccaccgcgctggcgctcccggaggacggcaaggtggtggccatcgacaccgaccgcgagtgctacgaggtgggccgccccttcatcgagaaggccggcatggcgcacaaggtggacttccgcgagggcaccggcctggcgcgcctggacgagctgctcgtcaaggacgagggcgcggccagctacgacttcgcgttcgtggacgcggacaagcccaactacgtgcgctaccacgagcagctgctgaagctggtccgcgtcggcggcaccatcatctacgacaacacgctgtggggcggcacggtggcgctgccggcgggcacgcccatgtccgacctcgacacccgcttctccgccgccctcagggacctcaacgccaagctcgccgccgacccgcgcatcgaggtctgccagctcgccatcgccgacggcgtcaccatctgccgccgcctcgtctaggcgggcgggcgtccggcccggcccgtcccggcgtgatcgtgatccgccgcgcgcctgccggcctgcgtgcgtgcctggagtccatttccttaccagccgcttatcctaatcaattgtattatttttccctgccagcgctggtttagcgtgaagcatccgatggtttcgaattttcaataacttttttggcttttcaactttgagaggagtggctgtacttactgtactatatatggtgttccgatatgcgatgacgttgtcgtgcatgtggatgtccttgtcgcc

SEQ ID NO: 20406 - protein, 268 aa, Glycine max
IHSIEPTHSSYHLGTTSPSRAMAPNGDNTVANVHSGIDSTNKTLLKSDALYTYILDTTVFPREHECMRDLRLITDKHPWGYMQSSSDEAQLLGMLIKMAGAKKTIEVGVFTGYSLLATALALPEDGKVVAIDTDRECYEVGRPFIEKAGMAHKVDFREGTGLARLDELLVKDEGAASYDFAFVDADKPNYVRYHEQLLKLVRVGGTIIYDNTLWGGTVALPAGTPMSDLDTRFSAALRDLNAKLAADPRIEVCQLAIADGVTICRRLV

SEQ ID NO: 20407 - protein, 247 aa, Glycine max
MAPNGDNTVANVHSGIDSTNKTLLKSDALYTYILDTTVFPREHECMRDLRLITDKHPWGYMQSSSDEAQLLGMLIKMAGAKKTIEVGVFTGYSLLATALALPEDGKVVAIDTDRECYEVGRPFIEKAGMAHKVDFREGTGLARLDELLVKDEGAASYDFAFVDADKPNYVRYHEQLLKLVRVGGTIIYDNTLWGGTVALPAGTPMSDLDTRFSAALRDLNAKLAADPRIEVCQLAIADGVTICRRLV

SEQ ID NO: 20408 - protein, 239 aa, Glycine max
MGLHAVVVGRGTAAGDADQDGGRQEDDRGGRVHGLLAAGHRAGAPGGRQGGGHRHRPRVLRGGPPLHREGRHGAQGGLPRGHRPGAPGRAARQGRGRGQLRLRVRGRGQAQLRALPRAAAEAGPRRRHHHLRQHAVGRHGGAAGGHAHVRPRHPLLRRPQGPQRQARRRPAHRGLPARHRRRRHHLPPPRLGGRASGPARPGVIVIRRAPAGLRACLESISLPAAYPNQLYYFSLPALV

SEQ ID NO: 20409 - DNA, 831 bp, Glycine max
acgtttagctatctgagaatacaaaatggcggcggcgaaagcagcggtggtattgccacgtccggtgacgtttgtgacgggaaatgcgaagaagctcgaagaggtcaaagctatcatcgggagttccattcctttcaagtctctcaaactcgacctgcctgagcttcaaggagagcctgaggatatctccaaagagaaagctcgtttggctgctcttcaggtaaatgggccagtgctagtggaggatacatgcctctgtttcaatgctttgaagggtcttcctgggccttacattaagtggtttcttgagaagcttggccatgaaggtttgaacaacttactgatggcctatgaagataaatcagcttatgcattgtgtgcattctctttctcgcatggtccaggtgctgaacctcttacatttttggggaaaactccgggtaagatagttccagcaagaggaccaactgatttcgggtgggatccagtgtttcaacctgatggatatgaccaaacttatgcagaaatggcaaaggaagaaaagaacaagatatcccatcggtacaagtctttagcaatggtgaaatctcactttaaggaggctggctacgtgttccagacaacagatgatgataccaattaaagtgaaaacccattccccattttccttcagcttttaaagatttgagcactggttctcctttttttctgaattgcaattagaaacacttttgttcacaagtttctaaccaaaacataaaatggcaaaacatattcattggattttgctgtgttctcaagagacagtaatactaatcattgtcttgattc

SEQ ID NO: 20410 - protein, 205 aa, Glycine max
MAAAKAAVVLPRPVTFVTGNAKKLEEVKAIIGSSIPFKSLKLDLPELQGEPEDISKEKARLAALQVNGPVLVEDTCLCFNALKGLPGPYIKWFLEKLGHEGLNNLLMAYEDKSAYALCAFSFSHGPGAEPLTFLGKTPGKIVPARGPTDFGWDPVFQPDGYDQTYAEMAKEEKNKISHRYKSLAMVKSHFKEAGYVFQTTDDDTN

SEQ ID NO: 20411 - DNA, 695 bp, Glycine max
agatgggaatcacctcctcaacctccagcccaacctccagcccggaatcgagagcaatggcgctcgccaaggccaaggagatcgttgcctccgctcccctcgtcgtcttcagcaaaacttcctgtcctttctgcgtccgtgtgaagcagttgttcgagaagctcggagcaagctacaaggccattgagttggataaggaaagtgatggagctgagctccagaatgccctgaaggagtggactggacagaggactgtcccaaatgtcttcatcaatgggaagcatattggcggctgtgatgatactatggcactgaacaatgatgggaagctggtgcctctgctgactgaggctggagccatcgccggttctgcctcgaagacaaccatcactgcttgacatgtgtgttaccattcccgtgcttaaaaataatgatgctttgcaagtgctgaacttgcagatgctatgtgggagtgactgttcgttccctgtgtaaaactccctagacatcagtcgagtcgtgttgctgtggtggttgtgaaatctacaataatcattgctacaataatgtcgtgttccctagacatcagatgagaaagatgagaagaaataacattataatcttattcgaactatcatctgtaagcttcttttgatacaatatttttatttatagattttaaaaacatttgtagg

SEQ ID NO: 20412 - protein, 131 aa, Glycine max
MGITSSTSSPTSSPESRAMALAKAKEIVASAPLVVFSKTSCPFCVRVKQLFEKLGASYKAIELDKESDGAELQNALKEWTGQRTVPNVFINGKHIGGCDDTMALNNDGKLVPLLTEAGAIAGSASKTTITA

SEQ ID NO: 20413 - protein, 113 aa, Glycine max
MALAKAKEIVASAPLVVFSKTSCPFCVRVKQLFEKLGASYKAIELDKESDGAELQNALKEWTGQRTVPNVFINGKHIGGCDDTMALNNDGKLVPLLTEAGAIAGSASKTTITA

SEQ ID NO: 20414 - DNA, 932 bp, Glycine max
cccgctgctggtcgctggcggcgaggccgtaatcccggccgtcgctgaggccgtcgccgtggcgcggaagcgaggaatcttcgttgtttgggttgtcagagagcatgacccttctggaagggatgtcgaactttttcgcagacacttgtactctggaggaaagggtccaacagtgaaaggcttgaaaggtgcagagctggcggacgggctttttatcaaagagggcgactataagttggtgaagacgagatttagtgctttttttgcgacacaccttgattctgttcttaaaacactaggaatgaagaacttggtaattgttggtgttcaaacaccaaattgcatccgacagactgtctatgacgctgtggcattggactatgagaaagttatggtccttactgatgcaacagctgctgcaaggccagatatccatttagcaagtatcagagatatgaagactatcggcgtggaaacaccaaccttggaagagtggcggcgttaggtttcaaggtggtgtacttcattctcggcaccgaagtgacatgcctagtgcaacggagtcgacaaacgctccctctccatttggtcctgacaagtgtaattatattagtatttgcatataacttctaatccgtccaacatagagttaatcatacagtgtcatgtggtttccctttatatatagaggacttaaggcatgggtatgggtagaagccaactccaaaccaaaacagggcaattgaagaaggcaggtgctcggattatacaaatttgatgttttgaaaaccggatgcatttttagatgtgaacgtgtaccatcatttgcatgcccgaaggaaggctgctatcgcatcggccttcttccttttcggtgaaaactgaaaagcaaatcgaatgcaaatcagttgcgatggttgagtaatgtgttc

SEQ ID NO: 20415 - protein, 167 aa, Glycine max
PLLVAGGEAVIPAVAEAVAVARKRGIFVVWVVREHDPSGRDVELFRRHLYSGGKGPTVKGLKGAELADGLFIKEGDYKLVKTRFSAFFATHLDSVLKTLGMKNLVIVGVQTPNCIRQTVYDAVALDYEKVMVLTDATAAARPDIHLASIRDMKTIGVETPTLEEWRR

SEQ ID NO: 20416 - DNA, 1072 bp, Glycine max
gcggtgaccggtgaaggactgaattttaattttgattcagtgactctcccagcctgatccaaaccaaaacaaaatccctttaaaaccctagtctcgcaatttcgaaatttatcactcactcaatcactctcatcatccactcgtcttattctcagaaaagagaagaagaaatggtgttaggcgtgagagagataagctgtagcggagagccagtccttgacagtgataacggggaggagttgatgcaggtgcaaccgggcatagacatagtcctcggcgatcttcctcgccagtcccccggcacactctatatcactaacaagtgtgctctcctctcctctcattcgcaatttctcttgtattgttgtgtgttctattcacactttggtctcgcttacacacagattgatacaggagaagcggatgatgaccactctgattctgaatccaatcatatccaacaagatttgtcccacatcacagagatgaggctcattccctctgatcctactcaattggattctctctttgcaatattctgccagtgtgcagagcttaatccagaaccaaacgatgaggaaggagaaggacatggttgggtttttagtgctgatgagatgggagatgaagaagcagaggacgaaggttatatctttcacaatccagccaactctattggtcactcaaatggaaatcatgacctaactcgtacgacacttgagcttcaaatcaatgatcaaagatttgaggatgcagaagagatggaggacaatggagatggcaaccattattgagtgtctttgttttctccaaaatagcattttctagtctttaccaaaagtcatcaactgtatgttgtgtagtttggttctatatatgtaatcctattatgaaacatctgaccagaggcttagagtggtttatcttagacctttttttttctttcctgcagtagaaagcagctggatactgagcttaaagctgtattatgtagaacagtagaagaaatttgaacattgtttggataatttattgagaatgttcatgcaaataattagtgtgtttggttctc

SEQ ID NO: 20417 - protein, 207 aa, Glycine max
MVLGVREISCSGEPVLDSDNGEELMQVQPGIDIVLGDLPRQSPGTLYITNKCALLSSHSQFLLYCCVFYSHFGLAYTQIDTGEADDDHSDSESNHIQQDLSHITEMRLIPSDPTQLDSLFAIFCQCAELNPEPNDEEGEGHGWVFSADEMGDEEAEDEGYIFHNPANSIGHSNGNHDLTRTTLELQINDQRFEDAEEMEDNGDGNHY

SEQ ID NO: 20418 - protein, 183 aa, Glycine max
MQVQPGIDIVLGDLPRQSPGTLYITNKCALLSSHSQFLLYCCVFYSHFGLAYTQIDTGEADDDHSDSESNHIQQDLSHITEMRLIPSDPTQLDSLFAIFCQCAELNPEPNDEEGEGHGWVFSADEMGDEEAEDEGYIFHNPANSIGHSNGNHDLTRTTLELQINDQRFEDAEEMEDNGDGNHY

SEQ ID NO: 20419 - DNA, 978 bp, Glycine max
agtatatccagaatgttctaaacaagccatgatgtttctactttctatgttttcctttgaatccatggaactagaaaacacttaaacccctgcaagtgcgaatctgcatcatcatcatcatcatcatcgagttttacaagcacaaatcacaatcctcgcaaggaacagaaccgatcaacaacatgttcggagtagttttcccgaaccggagcttccccatggacatctcaaccttcgctcaaatcgacaccttccactgggtccttgacatgaacactttcgcgaggctttcgaccaggtccgggagctctgcatcttcctcctcaacggctacacgctgccgccggagaaggcgctcgccgtctacatccagtcgccggggtcgccgttcgtgttctgcggcgccgtcacggtggcgcggccctccgccgtgctgacgctggcgtggccagagcccggcgccggagggccgatgcagctgacggcggacgcgcagccgctttcggcgaagatcggggtgtcggtggaggatctggcgtcgctgccgtcgctcgacgtggcggcggagaagcgaatcgagggtttggcgatgaaggtcggagagaatctgttcaatttcatgcaatcgttttgcggcgtggacgggtcgaagctgattgttccgatggatatcttggaccggtggttcaagaagtttcaggagcgggccaggcgtgaccctgaatacttgaagggtttcgcttcgtaagtctttattttttatctgtaggaatcggcgaccgtataagggagtttacaacaattcaaccaacttagctagattctcttcctttgctttgtaattctgaaattgaaaaagggttctttttaattttttgttgcttttttttgtaatttaatggtgtaagatgataatgatagataatagaaatgggatatcatgttgtattgtgatcctaatttagaagtgtttttctg

SEQ ID NO: 20420 - protein, 91 aa, Glycine max
MQLTADAQPLSAKIGVSVEDLASLPSLDVAAEKRIEGLAMKVGENLFNFMQSFCGVDGSKLIVPMDILDRWFKKFQERARRDPEYLKGFAS

SEQ ID NO: 20421 - protein, 84 aa, Glycine max
MFGVVFPNRSFPMDISTFAQIDTFHWVLDMNTFARLSTRSGSSASSSSTATRCRRRRRSPSTSSRRGRRSCSAAPSRWRGPPPC

SEQ ID NO: 20422 - protein, 72 aa, Glycine max
MDISTFAQIDTFHWVLDMNTFARLSTRSGSSASSSSTATRCRRRRRSPSTSSRRGRRSCSAAPSRWRGPPPC

SEQ ID NO: 20423 - DNA, 528 bp, Glycine max
aaaaaagcagccaaaacgctagctagctgcagcgatgatgtctcgctcctgctacctcgccgtgtcggtccttctcgcggtcgccgcgacagccagcggcgccatcgcgccggcgttgctgcacgaggtgcgcctcgaggaggagggcctgctggtcgcggagggcgcgagggtggcgtccacctgggcgggcaacaaggtctcgcgggcgcagccgatggaggcgtggccgagcggcggcgtggccacgcagggcgacgaccagagctcgtcgggcggcggcgagcacgccaaggaggaggggagcagcaaggagggcgagaagcagggcaggagctgcctcaccaaggaggagtgccacaagaagaaggtgctctgcggcaaggcctgcacgctctcggcgcacagcaagtgcgccgccaagtgcaccaagtcctgtgtccctacctgctaggacccgccgacgaggaagctagtttctgtgatgcaattgccaagatgattggaataaggacgggtacttcttac

SEQ ID NO: 20424 - protein, 176 aa, Glycine max
KKAAKTLASCSDDVSLLLPRRVGPSRGRRDSQRRHRAGVAARGAPRGGGPAGRGGREGGVHLGGQQGLAGAADGGVAERRRGHAGRRPELVGRRRARQGGGEQQGGREAGQELPHQGGVPQEEGALRQGLHALGAQQVRRQVHQVLCPYLLGPADEEASFCDAIAKMIGIRTGTSY

SEQ ID NO: 20425 - protein, 139 aa, Glycine max
MMSRSCYLAVSVLLAVAATASGAIAPALLHEVRLEEEGLLVAEGARVASTWAGNKVSRAQPMEAWPSGGVATQGDDQSSSGGGEHAKEEGSSKEGEKQGRSCLTKEECHKKKVLCGKACTLSAHSKCAAKCTKSCVPTC

SEQ ID NO: 20426 - protein, 138 aa, Glycine max
MSRSCYLAVSVLLAVAATASGAIAPALLHEVRLEEEGLLVAEGARVASTWAGNKVSRAQPMEAWPSGGVATQGDDQSSSGGGEHAKEEGSSKEGEKQGRSCLTKEECHKKKVLCGKACTLSAHSKCAAKCTKSCVPTC

SEQ ID NO: 20427 - DNA, 1056 bp, Glycine max
atcaatcaatttgcagcatcctaatctcgctcagattttctccagaaaagggaaaataaataaaaaaagagaataataataatatcttttgtaattcgcaaaacgtgatcgacgctggcgcaaattgaaattaggaattagggttagggttttcattatcttcgcccggaaaagaaaggggggaagaagaaagaaccgttcctttatgatcgaaaaggtgcctttggtcatcatcgcggtgttaatcttggtggtgcaatcctctgcagcgttccacggtataaacagaatcatgaaggtccaccctgttcctcgaaaacgcaacatctcaatccaatttggcggcgacgggggcaacccgatgtcggaggctcaggcgctgttggggatcgccgggaagaagctccggcgactaccgcacgtgttcagctgcgtgctggagctgcccttccgctccgacgccgacgttgcggtggaggaagcccccgactgcttccgctttgtggcggagaccgatggaatcggcgacgtgagggcgcacacggtggaaatccaccctggcgtgacgaagatcgtggtgagggacggcggctcggtggagctctcgctcgaccagctggagctcgatatgtggaggttccggttgccggaatcgactcggccggagctcgccagcgcggtgttcgtcgacggcgagctcatcgtcacggtgccgaaggggcacgaagaggagaatgatggggatggtgatagaggtatgggtggaggtagacttgtgcttgtacagtagtgatgaatgaatgaatgagtgggtgaggtaatgaatgattcttttgttaacgccttgtggcctttccaaacgtggccttgttagtatgtcggttagatttcaggttgttgttggaactagtttctctgtgaattttattgttgctattgttcagtcaggaacaaaaatgttttatctggattctggagaatggtttattcatcatggcaatggcaattatccaaaataggtgtaactgaggcgtgtttcgattttcatttcttctc

SEQ ID NO: 20428 - protein, 194 aa, Glycine max
MIEKVPLVIIAVLILVVQSSAAFHGINRIMKVHPVPRKRNISIQFGGDGGNPMSEAQALLGIAGKKLRRLPHVFSCVLELPFRSDADVAVEEAPDCFRFVAETDGIGDVRAHTVEIHPGVTKIVVRDGGSVELSLDQLELDMWRFRLPESTRPELASAVFVDGELIVTVPKGHEEENDGDGDRGMGGGRLVLVQ

SEQ ID NO: 20429 - protein, 165 aa, Glycine max
MKVHPVPRKRNISIQFGGDGGNPMSEAQALLGIAGKKLRRLPHVFSCVLELPFRSDADVAVEEAPDCFRFVAETDGIGDVRAHTVEIHPGVTKIVVRDGGSVELSLDQLELDMWRFRLPESTRPELASAVFVDGELIVTVPKGHEEENDGDGDRGMGGGRLVLVQ

SEQ ID NO: 20430 - protein, 142 aa, Glycine max
MSEAQALLGIAGKKLRRLPHVFSCVLELPFRSDADVAVEEAPDCFRFVAETDGIGDVRAHTVEIHPGVTKIVVRDGGSVELSLDQLELDMWRFRLPESTRPELASAVFVDGELIVTVPKGHEEENDGDGDRGMGGGRLVLVQ

SEQ ID NO: 20431 - DNA, 943 bp, Glycine max
attcaagttatcactttcctgaattgagtgtaacaggatcattttttttgttatcttatataaaggtcctcaaggaaggtattgtactgagatgactgagacaagggttaatactctcatggtcacgagttccggcaattatggcatgttgcacaacaacaaaattcatttgaattgccaattccttggtctcgggcattccatcaaggaacatggtaggtttgggttagtgtgctcttcatcacttagtggtggtggtaataagatgaaacttagagtgaagaagaaggggaagcaaagttcttcaccaaccatgatggtagctctcaatgagggtcatgaggtcatctctgaggagtccactaccgtgaagctctcggctctggtggctgtgaggaatagtaaagataataacaaggtgtttgcaaatgagatagtgaataaccttctaaccattttctggcctcaaaaccagaccaaaggtgttgttcttcaacttgttagcacacagcttgatcccaggagaatggaagcaaagttgagcaagaaaaccgttttggagttatccgaagaccataaagttgatgagaagggaagaatcagcacctataaagttgaattcattgtggactctgattttgggatccctggtgctgttaccgtggttaacggctttgacaatgagttcttcttggaaagcataaccatggcacaaaatgttcattttgcttgcaaatcttgggttcaaccaaacaagcttgacccagagaagagaattttcttcgttaacaaggtaattaatatacatgcatggtttgttgactcaactgaattttagcaaaattaactagtgtgaggtttggatgtgatgatcatctcttgtaaataggtttggggtaccctatgtgccctatacattttaatagatatctttttcctgatt

SEQ ID NO: 20432 - protein, 248 aa, Glycine max
MTETRVNTLMVTSSGNYGMLHNNKIHLNCQFLGLGHSIKEHGRFGLVCSSSLSGGGNKMKLRVKKKGKQSSSPTMMVALNEGHEVISEESTTVKLSALVAVRNSKDNNKVFANEIVNNLLTIFWPQNQTKGVVLQLVSTQLDPRRMEAKLSKKTVLELSEDHKVDEKGRISTYKVEFIVDSDFGIPGAVTVVNGFDNEFFLESITMAQNVHFACKSWVQPNKLDPEKRIFFVNKVINIHAWFVDSTEF

SEQ ID NO: 20433 - protein, 239 aa, Glycine max
MVTSSGNYGMLHNNKIHLNCQFLGLGHSIKEHGRFGLVCSSSLSGGGNKMKLRVKKKGKQSSSPTMMVALNEGHEVISEESTTVKLSALVAVRNSKDNNKVFANEIVNNLLTIFWPQNQTKGVVLQLVSTQLDPRRMEAKLSKKTVLELSEDHKVDEKGRISTYKVEFIVDSDFGIPGAVTVVNGFDNEFFLESITMAQNVHFACKSWVQPNKLDPEKRIFFVNKVINIHAWFVDSTEF

SEQ ID NO: 20434 - protein, 230 aa, Glycine max
MLHNNKIHLNCQFLGLGHSIKEHGRFGLVCSSSLSGGGNKMKLRVKKKGKQSSSPTMMVALNEGHEVISEESTTVKLSALVAVRNSKDNNKVFANEIVNNLLTIFWPQNQTKGVVLQLVSTQLDPRRMEAKLSKKTVLELSEDHKVDEKGRISTYKVEFIVDSDFGIPGAVTVVNGFDNEFFLESITMAQNVHFACKSWVQPNKLDPEKRIFFVNKVINIHAWFVDSTEF

SEQ ID NO: 20435 - DNA, 702 bp, Glycine max
accaaaggtatcttgcaatcacaacgaacaaaagctctcgatctcaccgacaccgaggaagaagagatcaatggcgtccgagcagggagtcgtgatcgcgtgccacagcaaggctgagtttgacgcccacatgaccaaggcccaggaagccggcaagctggtggtcatcgacttcactgccgcctggtgcggtccatgccgcgccatcgccccactgttcgtcgaacacgccaagaagttcactcaggtcgtcttcctgaaggtggacgtggacgaagtgaaggaagtcaccgcggcctacgaggtcgaggcgatgccgaccttccacttcgtcaagaacggcaagacggtcgcgaccatcgtgggtgccaggaaggacgagctcctggccctgatcgagaagcatgccgcgcctgcgcctgcgactgcgtctgcctaaatgagatcagatcagtcgtcgccgtcaataagggccagcacgtatggctgtaaatgttgtcgttatcagttctggctttgtcgtttgtgggcgatttgtgaactagtagtatgtttgtttctatccgagccggaggcgatacttaaccatggatacttgttgtgagttcgtttctgttcgcgtgtgactcttgaattgaatcaaccagctcaccactgcaccaggccgtggtgagtggtgacagtgatttcctgttagcatgt

SEQ ID NO: 20436 - protein, 145 aa, Glycine max
PKVSCNHNEQKLSISPTPRKKRSMASEQGVVIACHSKAEFDAHMTKAQEAGKLVVIDFTAAWCGPCRAIAPLFVEHAKKFTQVVFLKVDVDEVKEVTAAYEVEAMPTFHFVKNGKTVATIVGARKDELLALIEKHAAPAPATASA

SEQ ID NO: 20437 - protein, 122 aa, Glycine max
MASEQGVVIACHSKAEFDAHMTKAQEAGKLVVIDFTAAWCGPCRAIAPLFVEHAKKFTQVVFLKVDVDEVKEVTAAYEVEAMPTFHFVKNGKTVATIVGARKDELLALIEKHAAPAPATASA

SEQ ID NO: 20438 - protein, 102 aa, Glycine max
MTKAQEAGKLVVIDFTAAWCGPCRAIAPLFVEHAKKFTQVVFLKVDVDEVKEVTAAYEVEAMPTFHFVKNGKTVATIVGARKDELLALIEKHAAPAPATASA

SEQ ID NO: 20439 - DNA, 1009 bp, Glycine max
  misc_feature (1003)..(1003): n is a, c, g, or t
tggaatctctagcaaaattccagtaattcacacacatcttctaattcgcttttgtcaacctctttattaattggcacaacccgtgatggcaatataaatagcaaaaccaccagcaacaccaccctttgtccacgagagaaagaaatcaatcacatcctatccaaattcaaatcacgaagaacaagtaaaaaggaagagatgggaaatgctatggggagtaaaaaagcaaaggtgatgaaaatagacggtgaaacgttcaagctcaatactccagcaagagcaaacgacgtcgttaaggactaccctggacatgttctcttggactctcacgcggtgaaaaacttcgggcctcgggccaagccacttgagcctgactaccagctcaagcccaagaagatttattttttggtggagttacccaaggttaagcccgaaccattagtaacgaggagggtgcgatccagtggaatccgtggcatgaacgcccaggataggcttgatttcttgatgctgtcgaaacgctccgtttcggaccttaccatggtgaagcatgggcccaagccagaaaatggtgggcccacgagggtcaaaatgaggctgcccaaggcccacttggagaggcttatggaggagagccacgacgggagcgaggtggcggagaagatcataagtttgtatatggggaataatgccgccgtggacggcggcggcgcaacggtggaggcccaaaaggaggttcacaatcgcaagccacgaaggaaacgggtgagtttcagcccagtggaacaagcagaaattcatgaagaatcagcagcaccacaacagtcactagtttatagcagtccttccagatagtcatttatgcagaagcaagccattatttatatgttaggtgcttctaatgcaatttaattttgccctaaaatctgtagcctatatattgatagacatgtctatacatttatacagtagtagtgctaggaccagaagatgcaaatgttgncttcat

SEQ ID NO: 20440 - protein, 218 aa, Glycine max
MGNAMGSKKAKVMKIDGETFKLNTPARANDVVKDYPGHVLLDSHAVKNFGPRAKPLEPDYQLKPKKIYFLVELPKVKPEPLVTRRVRSSGIRGMNAQDRLDFLMLSKRSVSDLTMVKHGPKPENGGPTRVKMRLPKAHLERLMEESHDGSEVAEKIISLYMGNNAAVDGGGATVEAQKEVHNRKPRRKRVSFSPVEQAEIHEESAAPQQSLVYSSPSR

SEQ ID NO: 20441 - protein, 214 aa, Glycine max
MGSKKAKVMKIDGETFKLNTPARANDVVKDYPGHVLLDSHAVKNFGPRAKPLEPDYQLKPKKIYFLVELPKVKPEPLVTRRVRSSGIRGMNAQDRLDFLMLSKRSVSDLTMVKHGPKPENGGPTRVKMRLPKAHLERLMEESHDGSEVAEKIISLYMGNNAAVDGGGATVEAQKEVHNRKPRRKRVSFSPVEQAEIHEESAAPQQSLVYSSPSR

SEQ ID NO: 20442 - protein, 206 aa, Glycine max
MKIDGETFKLNTPARANDVVKDYPGHVLLDSHAVKNFGPRAKPLEPDYQLKPKKIYFLVELPKVKPEPLVTRRVRSSGIRGMNAQDRLDFLMLSKRSVSDLTMVKHGPKPENGGPTRVKMRLPKAHLERLMEESHDGSEVAEKIISLYMGNNAAVDGGGATVEAQKEVHNRKPRRKRVSFSPVEQAEIHEESAAPQQSLVYSSPSR

SEQ ID NO: 20443 - DNA, 918 bp, Glycine max
cattagagtataaggcagtgtttggtagcagagaattaaaaacatggaattctggaaccgcagattgctactacagaacgaggacgttcccctctcgatgccacctctctctcacactcacaccaaacacgccactaacgcatcatcatcctcgccgccgcaatcttcggctttccaattccaaagcccactgcaggtttcgattcctccagttttttcatcgagtgtggcctacgtcttcctcatcctcttcaccaccttcttcttcgtcggcttcgtcttcctctacttccgccagttcgcctccgacgccgccgccgccggatcctaccgccgccgctgggaggagggcgcggcagcggcggcggaggcaaagaagtgcctgccggtggtggcgcactgcggggaggggtgcgcggagtgcgcgatatgcctggaggagctgcgagagggggacgcggtgaagatgattccgtactgcaagcacgtgttccacccgcactgcattgacacgtggctcgataagcatgtcacgtgccccgtgtgccggtgcagtgagctgctatgtggagaagaggtggtggggtcggtgtcagcgagaagacaagaagaagtggttctaaatttggattagaagaactttgaagaagaagatgaaactgtagcgttgcgtgtttcattggacattgcttattatccatatttgctaggtttcaaccaccacttgagagtcttaaccaacgaacgtgttacatattacaagtttcttttgtggttttgttcattcccattattattgccacttgccagtgtcattatttagcagcatttaataattcaataacattctctttcagtttcttttttataaaaataaattgtagtagactcatagtactgctattttgcgttttctcc

SEQ ID NO: 20444 - protein, 196 aa, Glycine max
MEFWNRRLLLQNEDVPLSMPPLSHTHTKHATNASSSSPPQSSAFQFQSPLQVSIPPVFSSSVAYVFLILFTTFFFVGFVFLYFRQFASDAAAAGSYRRRWEEGAAAAAEAKKCLPVVAHCGEGCAECAICLEELREGDAVKMIPYCKHVFHPHCIDTWLDKHVTCPVCRCSELLCGEEVVGSVSARRQEEVVLNLD

SEQ ID NO: 20445 - protein, 178 aa, Glycine max
MPPLSHTHTKHATNASSSSPPQSSAFQFQSPLQVSIPPVFSSSVAYVFLILFTTFFFVGFVFLYFRQFASDAAAAGSYRRRWEEGAAAAAEAKKCLPVVAHCGEGCAECAICLEELREGDAVKMIPYCKHVFHPHCIDTWLDKHVTCPVCRCSELLCGEEVVGSVSARRQEEVVLNLD

SEQ ID NO: 20446 - protein, 153 aa, Glycine max
LEYKAVFGSRELKTWNSGTADCYYRTRTFPSRCHLSLTLTPNTPLTHHHPRRRNLRLSNSKAHCRFRFLQFFHRVWPTSSSSSSPPSSSSASSSSTSASSPPTPPPPDPTAAAGRRARQRRRRQRSACRWWRTAGRGARSARYAWRSCERGTR

SEQ ID NO: 20447 - DNA, 876 bp, Glycine max
atctacctcactcgtagctcaagcatcagcggcaggagctctgggcagcgtgcgcacgtggggtacctagctcgctctgctagcctaccatggctgatcaccaccggggcgcgacgggaggtggcgggggctacggcgacctccagcgcgggggcggcatgcacggcgaggcgcagcagcagcagaagcagggcgccatgatgacggcgctcaaggccgcgacggccgcgaccttcggcgggtcgatgctggtgctgtccgggctgatcctggccggcaccgtgatcgcgctcacggtggccacccccgtgctggtgatcttcagcccggtgctggtgccggccgccatcgcgctggcgctcatggcggccgggttcgtcacctccggcggcctcggcgtcgctgcgctgtccgtgttctcctggatgtacaagtacctgacgggcaagcacccgccgggcgccgaccagctggaccacgccaaggcgaggctggcgtccaaggcccgcgacatcaaggatgcagcacagcaccgcatcgaccaggcgcaggggtcttgagagaagaaccacactcgagcggaccgcgcgcgcgtcctccttgaaccactgccggcgcggcggcatatggcccttaaaggcggtggctgctgctacgtacgctgccgtagagtctcggtcgccgcgatagctctagctagtcgtttatgtgttgtgctttgtgtgtgcatgcatgtgtctgggggcatgcagtgcagtgcagtactatatgctgtatgcgtctctctttgatcggagaggcggatgtacagcatgctcgatatgtctagtttggatgtcatgtttatgatgaggaataaaatgcagtgttcaggcg

SEQ ID NO: 20448 - protein, 156 aa, Glycine max
MADHHRGATGGGGGYGDLQRGGGMHGEAQQQQKQGAMMTALKAATAATFGGSMLVLSGLILAGTVIALTVATPVLVIFSPVLVPAAIALALMAAGFVTSGGLGVAALSVFSWMYKYLTGKHPPGADQLDHAKARLASKARDIKDAAQHRIDQAQGS

SEQ ID NO: 20449 - protein, 133 aa, Glycine max
MHGEAQQQQKQGAMMTALKAATAATFGGSMLVLSGLILAGTVIALTVATPVLVIFSPVLVPAAIALALMAAGFVTSGGLGVAALSVFSWMYKYLTGKHPPGADQLDHAKARLASKARDIKDAAQHRIDQAQGS

SEQ ID NO: 20450 - protein, 120 aa, Glycine max
MMTALKAATAATFGGSMLVLSGLILAGTVIALTVATPVLVIFSPVLVPAAIALALMAAGFVTSGGLGVAALSVFSWMYKYLTGKHPPGADQLDHAKARLASKARDIKDAAQHRIDQAQGS

SEQ ID NO: 20451 - DNA, 672 bp, Glycine max
aactccaagcgccaccaatctcgccttccgaggaaacccaccagcccaccacagacccgagcggaagaagccatgtccgggcgcggcaagggtggcaaggggctcggcaagggcggcgcgaagcgtcaccggaaggttctgcgcgacaacatccagggcatcaccaagccggcgatccggcggctggcgaggaggggcggcgtcaagcgcatctcggggctcatctacgaggagacccgcggcgtgctcaagatcttcctcgagaacgtcatccgcgacgccgtcacctacactgagcacgcccgccgcaagaccgtcactgccatggacgtcgtctacgcgctcaagcgccagggccgcaccctctacggcttcggcggctaggctgatggactcctcgcgatgttctccccttctgcagatgcgacgttttctggccgtgcccacaagtcttgcggtcaagaaagtttcaggaactcttgttagttcatctctggctgtggtaggtttatctgaatcgtgagactagtaggtttatctgaatcgcgaggctagcaggtttacctgaatcatgaagcagtgatgaaattatgtgtgcatcggatgttggaaatctagcttgtaatgcaatttgttactcttgatgcaaatgaatggtctggtcgttactgc

SEQ ID NO: 20452 - protein, 173 aa, Glycine max
TPSATNLAFRGNPPAHHRPERKKPCPGAARVARGSARAARSVTGRFCATTSRASPSRRSGGWRGGAASSASRGSSTRRPAACSRSSSRTSSATPSPTLSTPAARPSLPWTSSTRSSARAAPSTASAARLMDSSRCSPLLQMRRFLAVPTSLAVKKVSGTLVSSSLAVVGLSES

SEQ ID NO: 20453 - protein, 127 aa, Glycine max
NSKRHQSRLPRKPTSPPQTRAEEAMSGRGKGGKGLGKGGAKRHRKVLRDNIQGITKPAIRRLARRGGVKRISGLIYEETRGVLKIFLENVIRDAVTYTEHARRKTVTAMDVVYALKRQGRTLYGFGG

SEQ ID NO: 20454 - protein, 103 aa, Glycine max; identical to SEQ ID NO: 71

SEQ ID NO: 20455 - DNA, 733 bp, Glycine max
ccttttcatagtatatgatctcatctcaaagtccattctacacaattctctctcatcatctttgctattacctctttttccaaactctaaaaatttttagttccacaaaaccaaaccaaaatggcagcagcctcggcctcatccaccatgatatcaacaccagccttatctccaagcacaagcatccaaaagcaccatcatttgaagccatccaacgtgtgctttcaaggccttagacccctcacaaggttcacaaccaaagtgagcagcaccaccaaaagggttattccaaagggtggtgtcggtgttagagctgaactcaactcagcacttgtcataagcctcagcactgggctctccctcttcttggggaggtttgtgttcttcaacttccaaagggagaacgtggcaaagcaagtgcctgagcagaacggactcacacactttgaggctggtgacacacgtgccaaggagtatgtcagcctcctcaaatccaatgaccctgttggattcaacattgttgatgtcttggcttggggctccattggccatgttgttgcttactatatcttggccaccactagcaatggctatgaccctgcattctttggctgattttcatcatgttccattgtctttctttgcttgctttttactatgttataatgtaatcaatgtcatcatgtataggttctctctaagatccaacaagttcagcatatgctaatttgtc

SEQ ID NO: 20456 - protein, 164 aa, Glycine max
MAAASASSTMISTPALSPSTSIQKHHHLKPSNVCFQGLRPLTRFTTKVSSTTKRVIPKGGVGVRAELNSALVISLSTGLSLFLGRFVFFNFQRENVAKQVPEQNGLTHFEAGDTRAKEYVSLLKSNDPVGFNIVDVLAWGSIGHVVAYYILATTSNGYDPAFFG

SEQ ID NO: 20457 - protein, 155 aa, Glycine max
MISTPALSPSTSIQKHHHLKPSNVCFQGLRPLTRFTTKVSSTTKRVIPKGGVGVRAELNSALVISLSTGLSLFLGRFVFFNFQRENVAKQVPEQNGLTHFEAGDTRAKEYVSLLKSNDPVGFNIVDVLAWGSIGHVVAYYILATTSNGYDPAFFG

SEQ ID NO: 20458 - protein, 83 aa, Glycine max
MSASSNPMTLLDSTLLMSWLGAPLAMLLLTISWPPLAMAMTLHSLADFHHVPLSFFACFLLCYNVINVIMYRFSLRSNKFSIC

SEQ ID NO: 20459 - DNA, 1122 bp, Glycine max
aaaaaggcaattattgcctctctttcttgctcgccacagcttcgtcaaagacacgcggaaaagaagaggaagggggaggcgactcgaccgaggcccggtttcgatctctggtcctccgattgcgtccagatctaccagcaatggcatcatcttcggacccatggatgaaggaatacaatgaagcatccagacttgctgatgacatcagttccatgattgccgacagagggtctcttccacaatcaggcccagaaattatgcggcatacttcagccattcggagaaaaataactattcttggtactagactggatagcttggagtcattgtttggcagaattcctccaaagtcaatcactgacaaggagatgcataaacgccaagacatgctttccagtttgaagtctaaagccaagcagatggcgacaagtttcaacatgtcaaacttcgctaacagggaggatctgcttggtcaaagtaaaatgccagatgacatgagcagagttgctgggttagataaccaaggaattgttggccttcagaggcaaattatgaaagagcaagatgagggtctcgagaagctggaagagacagtgctgagcacgaagcatattgcattagcagtcaatgaagaacttaccctgcacacaagattgatagatgaccttgaagatcatgttgatgttacaaattcacgtcttcagcgtgtgcaaaagaggcttgcaattctgaacaagcgcaccaaaggtggttgctcatgcacgtgtctgctcctatctgtcgttgccattgtgattcttgcagtcattgtttggcttctcgtcaagtatctgtaaagaaaagaaagaagcagccggctaccctgcggacctctctcgaaatgctcacctgcagccttcgcttgaaaagttccttctgtgttactccataaaatgtgcagccctttaaaattaatatgtatacacggtggtttcatcttcccttccatgagtggaatggttatggctatgtacattacatagaatttggtacgtacatgatcatcatctgcatgactgcattttgtgtatggcgtttgtcagtttgcaatgacagggtgttgatttattctgtggggtaagc

SEQ ID NO: 20460 - protein, 277 aa, Glycine max
KGNYCLSFLLATASSKTRGKEEEGGGDSTEARFRSLVLRLRPDLPAMASSSDPWMKEYNEASRLADDISSMIADRGSLPQSGPEIMRHTSAIRRKITILGTRLDSLESLFGRIPPKSITDKEMHKRQDMLSSLKSKAKQMATSFNMSNFANREDLLGQSKMPDDMSRVAGLDNQGIVGLQRQIMKEQDEGLEKLEETVLSTKHIALAVNEELTLHTRLIDDLEDHVDVTNSRLQRVQKRLAILNKRTKGGCSCTCLLLSVVAIVILAVIVWLLVKYL

SEQ ID NO: 20461 - protein, 231 aa, Glycine max
MASSSDPWMKEYNEASRLADDISSMIADRGSLPQSGPEIMRHTSAIRRKITILGTRLDSLESLFGRIPPKSITDKEMHKRQDMLSSLKSKAKQMATSFNMSNFANREDLLGQSKMPDDMSRVAGLDNQGIVGLQRQIMKEQDEGLEKLEETVLSTKHIALAVNEELTLHTRLIDDLEDHVDVTNSRLQRVQKRLAILNKRTKGGCSCTCLLLSVVAIVILAVIVWLLVKYL

SEQ ID NO: 20462 - protein, 223 aa, Glycine max
MKEYNEASRLADDISSMIADRGSLPQSGPEIMRHTSAIRRKITILGTRLDSLESLFGRIPPKSITDKEMHKRQDMLSSLKSKAKQMATSFNMSNFANREDLLGQSKMPDDMSRVAGLDNQGIVGLQRQIMKEQDEGLEKLEETVLSTKHIALAVNEELTLHTRLIDDLEDHVDVTNSRLQRVQKRLAILNKRTKGGCSCTCLLLSVVAIVILAVIVWLLVKYL

SEQ ID NO: 20463 - DNA, 1113 bp, Glycine max
ccaattaccaagcacttaactcgcccgacctacccaccaaccaccccgcggcgagactgaccagactgaccagactgaattgatcggcaataaatcagcacgctgcacgcgctgggggtctgagtcggaggaggaagaagatcgaggagcagctgattcgctcgcacaaagcgccgggatcagatccatctctccgcgcgcgatgtctgaggtggcggcgatggcggggcaggcgtacatgagacagctctccaagcaccctctccgcaccaaggccatcacctccggggtgctggccggctgcagcgacgccgtcgcccagaagatctccggcgtcaagaagctccagctcaggaggctcctcctcataatgctctatggatttgcatacgcaggaccattcggtcattttttccacaagcttatggacaagattttcaagggacagaagaaaggaaaagaaactacagccaagaaggtcatagtggagcagctaactgtatcaccatggaacaatatgatgttcatgatgtactacggtctggtagttgaagggaggccattcgggcaagtaaagagcaaggtcaagaaggactttgcaaacatccaattgacagcttggaagttctggccaatagttagctggatcaactatgagtacatgccactccagctccgagttcttttcgccagctccattgcatcatgctgggcagtgtttctgaacctgaaagcagcaagatccattgccggcgctagtaagaatgcataaaagaaggatggaaggaaggggctagtgctacattgtatttctagctaattaagtatccactagtgattttctcagttcatttttatcactcagtttgtatttatgtttctatgtgaacccctcgagcatcgagaacctagagtgaatgtttcaactaagtatgtgagtatgtcaatgtgaagagtccctttcttgccactgggaaaaaaaccctacaaagcaaaaattatcctctagaaggtaccatgtttgttattcctttgggaggaaaatagggactgtactgggatctgacgcgtggaaataaatgaacatgctctgaggtttgtagaatctcaatg

SEQ ID NO: 20464 - protein, 189 aa, Glycine max
MSEVAAMAGQAYMRQLSKHPLRTKAITSGVLAGCSDAVAQKISGVKKLQLRRLLLIMLYGFAYAGPFGHFFHKLMDKIFKGQKKGKETTAKKVIVEQLTVSPWNNMMFMMYYGLVVEGRPFGQVKSKVKKDFANIQLTAWKFWPIVSWINYEYMPLQLRVLFASSIASCWAVFLNLKAARSIAGASKNA

SEQ ID NO: 20465 - protein, 183 aa, Glycine max
MAGQAYMRQLSKHPLRTKAITSGVLAGCSDAVAQKISGVKKLQLRRLLLIMLYGFAYAGPFGHFFHKLMDKIFKGQKKGKETTAKKVIVEQLTVSPWNNMMFMMYYGLVVEGRPFGQVKSKVKKDFANIQLTAWKFWPIVSWINYEYMPLQLRVLFASSIASCWAVFLNLKAARSIAGASKNA

SEQ ID NO: 20466 - protein, 177 aa, Glycine max
MRQLSKHPLRTKAITSGVLAGCSDAVAQKISGVKKLQLRRLLLIMLYGFAYAGPFGHFFHKLMDKIFKGQKKGKETTAKKVIVEQLTVSPWNNMMFMMYYGLVVEGRPFGQVKSKVKKDFANIQLTAWKFWPIVSWINYEYMPLQLRVLFASSIASCWAVFLNLKAARSIAGASKNA

SEQ ID NO: 20467 - DNA, 854 bp, Glycine max
aaaaaattgtgtcgtgtatatagtagtattttatttataagagctaccccttggaacattcaaaacagatcctacatttgggcaaaaaggaagctcaaccacatccaatacctcagaccacacaacagtgtagaagggagatttgaaagtgcatgtgaagaaacgcattagaagagaaaaaagatgagcaaaaaacagacggtgaaattagacgaggagcaaatcgcagaattgcgcgaaatctttcggtccttcgatcggaacaatgacgggagcctgacgcagttggagctgagttcgcttctgcgctcgcttggtctgaagcccagtgcagaccaactcgagggatttattcagagggcggacaccaacagcaatggcctggtggagttctcggagttcgttgctctggtcgcgccggagcttctgccggccaagtcgccctacacggaagagcagctgaagcagctgttccgaatgttcgatcgtgacgggaacggcctcatcactgcggcggagttggctcactccatggctaggcttggccatgccctcaccgccgaggagctgaccgggatgatcaaagaggccgacaccgacggcgatggcatgatcaactatcaggagttcgctcatgctattacttccgctgcttttgataattgctggccttaaccactctctttctaggtaataatgtaaattcaattttttcgggagaaattacgagattagcgatccatttaataagggagaaactttttattcttatttcaagaatttgagtttatattttgctatattttgatgtacaacgatgataataaagagcaaatctaagtgcttatacatct

SEQ ID NO: 20468 - protein, 163 aa, Glycine max
MSKKQTVKLDEEQIAELREIFRSFDRNNDGSLTQLELSSLLRSLGLKPSADQLEGFIQRADTNSNGLVEFSEFVALVAPELLPAKSPYTEEQLKQLFRMFDRDGNGLITAAELAHSMARLGHALTAEELTGMIKEADTDGDGMINYQEFAHAITSAAFDNCWP

SEQ ID NO: 20469 - DNA, 743 bp, Glycine max
agtctctatcatcatccaatccagatcagcaaagcggcagtgcgtagagaggatcgtcgaacagaacagcatgaagatggtcatcgttctcgtcgtgtgcctggctctgtcagctgccagcgcctctgcaatgcagatgccctgcccctgcgcggggctgcagggcttgtacggcgctggcgccggcctgacgacgatgatgggcgccggcgggctgtacccctacgcggagtacctgaggcagccgcagtgcagcccgctggcggcggcgccctactacgccgggtgtgggcagacgagcgccatgtaccagccgctccggcaacagtgctgccagcagcagatgaggatgatggacgtgcagtccgtcgcgcagcagctgcagatgatgatgcagcttgagcgtgccgctgccgccagcagcagcctgtacgagccagctctgatgcagcagcagcagcagctgctggcagcccagggtctcaaccccatggccatgatgatggcgcagaacatgccggccatgggtggactctaccagtaccagtaccagctgcccagctaccgcaccaacccctgtggcgtctccgctgccattccgccctactactgattcatgatatttgggaaatctcctctatccatccctctctatctatatatgtaataatgcagtaagacgacacacattatcatgtgtggtatgaccaataatatatgcatcataataaagttttggtttt

SEQ ID NO: 20470 - protein, 203 aa, Glycine max
VSIIIQSRSAKRQCVERIVEQNSMKMVIVLVVCLALSAASASAMQMPCPCAGLQGLYGAGAGLTTMMGAGGLYPYAEYLRQPQCSPLAAAPYYAGCGQTSAMYQPLRQQCCQQQMRMMDVQSVAQQLQMMMQLERAAAASSSLYEPALMQQQQQLLAAQGLNPMAMMMAQNMPAMGGLYQYQYQLPSYRTNPCGVSAAIPPYY

SEQ ID NO: 20471 - protein, 180 aa, Glycine max
MKMVIVLVVCLALSAASASAMQMPCPCAGLQGLYGAGAGLTTMMGAGGLYPYAEYLRQPQCSPLAAAPYYAGCGQTSAMYQPLRQQCCQQQMRMMDVQSVAQQLQMMMQLERAAAASSSLYEPALMQQQQQLLAAQGLNPMAMMMAQNMPAMGGLYQYQYQLPSYRTNPCGVSAAIPPYY

SEQ ID NO: 20472 - protein, 178 aa, Glycine max
MVIVLVVCLALSAASASAMQMPCPCAGLQGLYGAGAGLTTMMGAGGLYPYAEYLRQPQCSPLAAAPYYAGCGQTSAMYQPLRQQCCQQQMRMMDVQSVAQQLQMMMQLERAAAASSSLYEPALMQQQQQLLAAQGLNPMAMMMAQNMPAMGGLYQYQYQLPSYRTNPCGVSAAIPPYY

SEQ ID NO: 20473 - DNA, 1376 bp, Glycine max
gaagtttgtgctgaagattctgtgtgtcaggacatgatagttgattttgggattttatgtttgctgaggcgctttttattgagtgatgattatgagaaactggctgctattgaggcttatgatgcatcatctagagcacatgaggggaaggagcggatatcaaatgtagatggggaaccggctatatcagatgtaaatgatccagctagtgtccgagttcctcctacagctcatatccgcaagcatgcagctcggttattgaccatcctctcactgcttcccagagtcaagaaggttatcacagttgatgaaacttggtgcaaatggcttgatgattgtgctaatgggcggattccaggttgcagtgaccttaaaatgcaaagctatgccagggcagcacttttaaatatgttttgcaatgaccagcctaatggaaaatctgaaagtggaagaggaggcccttctgatggtggtgtaaaaaattataggaactcgtgtcctcgttatgatgacatgatattcttgataaattctcatcttccccactggaaatgtcccaaagaaacagatcaacaagaagctttctcaaaggagatatctctgtttacttctactgaaatgggggatgtaatagaatccgtgaatggcagcaactgttctatttctaatgattcaactaaaaacaacccagatgcagattgccctccactagacatagtttttgtccatggtctacgtggtgggccttacaaaacttggcgtatagctgaggagaaatcctcaacttcatcacctttggtggagaagattgatgaggaagcaggaaagcttggaaccttttggcctggtgaatggctttccagtgattttcctgaggctcggatgtttaccctaaaatacaagactaatctcacacaatggtctggagctagcttgcctcttcaggaagttagttctatgctattggagaagcttgttgctgcaggaattgggaatcgacctgttgtttttgttactcacagtatgggtggcctggttgtgaagcagattcttcataaagcaaaggaagaaagatttgataatctcatgaaaaatacaataggaattgttttttatagctgcccgcattttggtagcaaacttgcagatatgccttggcgaatgggctttgtgcttcgtcctgctccaacaataggagagctaagaagtggatcttcaagactgatagagcttaatgactatattcgtcaccttcataagaaagggttgcttgatgtcctcagcttttgtgagaccaaggtaactccaatagttgaaggttatggtggatgggcctttcgaactgaaattgtaccaattgagtcagcatatcctgg

SEQ ID NO: 20474 - protein, 458 aa, Glycine max
EVCAEDSVCQDMIVDFGILCLLRRFLLSDDYEKLAAIEAYDASSRAHEGKERISNVDGEPAISDVNDPASVRVPPTAHIRKHAARLLTILSLLPRVKKVITVDETWCKWLDDCANGRIPGCSDLKMQSYARAALLNMFCNDQPNGKSESGRGGPSDGGVKNYRNSCPRYDDMIFLINSHLPHWKCPKETDQQEAFSKEISLFTSTEMGDVIESVNGSNCSISNDSTKNNPDADCPPLDIVFVHGLRGGPYKTWRIAEEKSSTSSPLVEKIDEEAGKLGTFWPGEWLSSDFPEARMFTLKYKTNLTQWSGASLPLQEVSSMLLEKLVAAGIGNRPVVFVTHSMGGLVVKQILHKAKEERFDNLMKNTIGIVFYSCPHFGSKLADMPWRMGFVLRPAPTIGELRSGSSRLIELNDYIRHLHKKGLLDVLSFCETKVTPIVEGYGGWAFRTEIVPIESAYP

SEQ ID NO: 20475 - protein, 447 aa, Glycine max
MIVDFGILCLLRRFLLSDDYEKLAAIEAYDASSRAHEGKERISNVDGEPAISDVNDPASVRVPPTAHIRKHAARLLTILSLLPRVKKVITVDETWCKWLDDCANGRIPGCSDLKMQSYARAALLNMFCNDQPNGKSESGRGGPSDGGVKNYRNSCPRYDDMIFLINSHLPHWKCPKETDQQEAFSKEISLFTSTEMGDVIESVNGSNCSISNDSTKNNPDADCPPLDIVFVHGLRGGPYKTWRIAEEKSSTSSPLVEKIDEEAGKLGTFWPGEWLSSDFPEARMFTLKYKTNLTQWSGASLPLQEVSSMLLEKLVAAGIGNRPVVFVTHSMGGLVVKQILHKAKEERFDNLMKNTIGIVFYSCPHFGSKLADMPWRMGFVLRPAPTIGELRSGSSRLIELNDYIRHLHKKGLLDVLSFCETKVTPIVEGYGGWAFRTEIVPIESAYP

SEQ ID NO: 20476 - protein, 333 aa, Glycine max
MQSYARAALLNMFCNDQPNGKSESGRGGPSDGGVKNYRNSCPRYDDMIFLINSHLPHWKCPKETDQQEAFSKEISLFTSTEMGDVIESVNGSNCSISNDSTKNNPDADCPPLDIVFVHGLRGGPYKTWRIAEEKSSTSSPLVEKIDEEAGKLGTFWPGEWLSSDFPEARMFTLKYKTNLTQWSGASLPLQEVSSMLLEKLVAAGIGNRPVVFVTHSMGGLVVKQILHKAKEERFDNLMKNTIGIVFYSCPHFGSKLADMPWRMGFVLRPAPTIGELRSGSSRLIELNDYIRHLHKKGLLDVLSFCETKVTPIVEGYGGWAFRTEIVPIESAYP

SEQ ID NO: 20477 - DNA, 1099 bp, Glycine max
aaggaaagtcttatcccactagaaaatgatcatgtaagatactgaaaaatattttgaggtacaataatgataatatgaaatgttttctagattttttaacgatatatttgttgtaggtgccttttcttctaactgatgttggacggcggccaaatgctgagtatgttgttgtaaacatggatggctcaagacatcctttacctttgacaacagtctatcataaattgcaaccaataactgcttctccttatacttttttgcaagcactttttgggcatgaatatccggttggactactagatgaagagaaaattcttccattggggaaggatatcactgctgttggcctttgcagtttaaaaaatggaattgctgaaattaagtcgtgcaaatatctaccatattttctgtctgacttgagtaaagatcagatgataatggatctttccatcaaaacaaaaatactgttttggggtggtattgctcttggttcaatgtcagttggggtccttggctatgcagttgtgaggaactggaataagtggaaacagtggaagcaacagaggcagctccagcaacaaaggcaagcggtgagtgatgttgaacctcagatggatgatgagattgaagatgctccagatggacaattatgtgttatatgtctaatgaggagaaggcgttctgtcttcattccctgtgggcatcttgtgtgttgccaagggtgtgccatatcagttgaacgtgaagtggcacccaaatgtcccgtttgtcgtcaggagatccgagattcagtgcggatttatgaatcttgaacagacaggctgattgttctgttctctctgcggcagaatcttttatgctttgctaatgagaagaatgttgtttgctttttatttcgataagatatggaatgtggagttgtagggaaaacttgcctttgctcttatttcctgtgaacattcatctggggtagataataggttgtcgaggttaattcgaagcctcctcacttctcactctgccaggtcttttggggaaccttatacgcttataggatttccagttatcccatttagtgtacataaatatttaatattgc

SEQ ID NO: 20478 - protein, 211 aa, Glycine max
MDGSRHPLPLTTVYHKLQPITASPYTFLQALFGHEYPVGLLDEEKILPLGKDITAVGLCSLKNGIAEIKSCKYLPYFLSDLSKDQMIMDLSIKTKILFWGGIALGSMSVGVLGYAVVRNWNKWKQWKQQRQLQQQRQAVSDVEPQMDDEIEDAPDGQLCVICLMRRRRSVFIPCGHLVCCQGCAISVEREVAPKCPVCRQEIRDSVRIYES

SEQ ID NO: 20479 - protein, 126 aa, Glycine max
MIMDLSIKTKILFWGGIALGSMSVGVLGYAVVRNWNKWKQWKQQRQLQQQRQAVSDVEPQMDDEIEDAPDGQLCVICLMRRRRSVFIPCGHLVCCQGCAISVEREVAPKCPVCRQEIRDSVRIYES

SEQ ID NO: 20480 - protein, 124 aa, Glycine max
MDLSIKTKILFWGGIALGSMSVGVLGYAVVRNWNKWKQWKQQRQLQQQRQAVSDVEPQMDDEIEDAPDGQLCVICLMRRRRSVFIPCGHLVCCQGCAISVEREVAPKCPVCRQEIRDSVRIYES

SEQ ID NO: 20481 - DNA, 1652 bp, Glycine max
gtagctttgaaagaagctatgccaaaagtgtttctaagtgtaatgtgggactgtttcctagtttcctttcaaaagtactagctgatgggtgctactaactatttatttgaagcttacttgaagttcattttaggatgtagattctcctacaaagtgcactttatttatttagtatgtggataataaatggaccctttttaaaggattctgatttaagtgttgaacttcaaaaaaaaaagtcactgaagagagcgagtagaataaactaccgggctgcaacatagcaacttatcattggttttatatttgtgtttggcattgtacataatgacttgtaaaagccttgtgtttatatgttccagagcccgaggaatatggtatcttgtatcatttttcaattttgttctacttgggattttgtaatcctggttggattcactgatatgatgtgtttttttcaaatttgtcagcacattttccttgtcttgaaatttgttgataattataaaccattacaattttatgttgctttagaggaagcgccccagcaaaatatctgagttggaatctcaaatttctcaactccaaaatgacttgaagaaggtaaaggaccagcttattttgtctgaatcatgcaagaagcaagctcagcaagaagctgaggagtccaaggagcaactactagccctatctgcaaaacttgaagagtcacaaaaacaagttctggatctttgttctactggagaagctcgcgttcttgagctccagaatatcgtagaagaacgtgatatggcatgccaatctgagcttgagtcttccaaaaagcagctctcagttgagtctgctgccctggcctctgcaacgaacgaaattcagatgctcaaggcgcaacttgaattggtagctaattgtgagagtgtgcaatctcaacacgcagaatcagcagacattgagcttcttaacctgaagcagaacttgtccgaaacgctttctcttgtggatgccttgaaaaaccaactaagggattgcaaagaatctgaagctcaggcccaagcattggtcaatgaaactatgatgcaacttgaggctgcaaaaggaactgttgagttcctaagggctgatgttgcgaaagctgttgatggctacaactccattgctaaagagttagaccaatctgaagcacgggtgaactcactagaggcacttgttagcaatcttgagacagaccccatcaataataaatgcatcctttcagaaaatgttgcagatgatcataaatttgagtaccaacctgaaatattgaaacagggtgaggatcctagtcagctggaagcagaagttgtttctttgaagtccgaggttgaacgattgagatctgctatagagactgctgagattaaataccaagaagaacagaatcggagcacggtgcagatcaggaatgcctacgagttagtagaccagataaaatctgaatcatgtcagagggaatgtgagctagaggctgagttgaaaaagaaaaaagctgatattgaagagttgaaggctaacctaatggacaaggaaactgagttgcaaggcattgtggaggagaatgacaacctgaacctaaagcttcaagagagcatgtcatccaaaaacgagcacgaact

SEQ ID NO: 20482 - protein, 287 aa, Glycine max
MACQSELESSKKQLSVESAALASATNEIQMLKAQLELVANCESVQSQHAESADIELLNLKQNLSETLSLVDALKNQLRDCKESEAQAQALVNETMMQLEAAKGTVEFLRADVAKAVDGYNSIAKELDQSEARVNSLEALVSNLETDPINNKCILSENVADDHKFEYQPEILKQGEDPSQLEAEVVSLKSEVERLRSAIETAEIKYQEEQNRSTVQIRNAYELVDQIKSESCQRECELEAELKKKKADIEELKANLMDKETELQGIVEENDNLNLKLQESMSSKNEHE

SEQ ID NO: 20483 - protein, 258 aa, Glycine max
MLKAQLELVANCESVQSQHAESADIELLNLKQNLSETLSLVDALKNQLRDCKESEAQAQALVNETMMQLEAAKGTVEFLRADVAKAVDGYNSIAKELDQSEARVNSLEALVSNLETDPINNKCILSENVADDHKFEYQPEILKQGEDPSQLEAEVVSLKSEVERLRSAIETAEIKYQEEQNRSTVQIRNAYELVDQIKSESCQRECELEAELKKKKADIEELKANLMDKETELQGIVEENDNLNLKLQESMSSKNEHE

SEQ ID NO: 20484 - protein, 193 aa, Glycine max
MMQLEAAKGTVEFLRADVAKAVDGYNSIAKELDQSEARVNSLEALVSNLETDPINNKCILSENVADDHKFEYQPEILKQGEDPSQLEAEVVSLKSEVERLRSAIETAEIKYQEEQNRSTVQIRNAYELVDQIKSESCQRECELEAELKKKKADIEELKANLMDKETELQGIVEENDNLNLKLQESMSSKNEHE

SEQ ID NO: 20485 - DNA, 1283 bp, Glycine max
cccaaatatcagattactgttgcagctgaactgcagagaggaattttactagcctaaaattttgccatcggcacatagaaagtgttgttttgtatcttttcgaagatcactttgttaagataaaaagagataagactaatgcgagaagtgcctcatcattgggtttcatcttgcttttaattgaagtctggagaatgaatatgacctaaattttttgaacttttgagaatttgaaaattttcagaaattgctgtgtgggagtaaaagctcattgtcacggtggacatgtgcagatattagaattttgtcttacggcaccaactgtacctatagaatttgctggacaaaaggaatctaggaagtgctctctttcacaaataatggggaaatcacgaaagtactcaaaaggtcatgccaccggttttgttccagattttcgccatgctgttgagactatgggtgaatcagaaggacttggtaacttgggaagggttgataatgagttgacaatgtcagaaatttcatgtgccccaaagagaaaaagggttgatgagagttttgatgtgccatttcaactgttatctttaacaaagatggcccgttctgggagaaaggacttgacactgagattaaaatccgaacttgaagaagtaaggaaacttcaaaagaaaattgctggtatgagttcaatcactactgaattatctccatatagtgacataaggagctgcagtgtgggagagaagaggcctccactggaatcattagcactgcatggtaagaagcgcccactactaaagcataacggtcctaaaacaaagagaagtatttctgggcgatttatatctgcgaaatctgctgcaccagtaactccttcatatgccgtgctgatgaagcagtgtgagacattgcttaagcgcgtgatgtctcatcaatttggtaaagtttttgacaaaccggttgacattgtgaaatggaacattccagactatttcactatcatcaagcacccgatggatttgggtactgtgaagagtaagctgatttcgtgtgaatatacaagtcttatggattttgctgcagatgtgcggctgactttctcaaatgcaatgagttataatccaccgggcaatgatgtgcatgtcatggcagagacactaagtaaatattttgaaacaagatggaagcctatagagaagattcttgccattgatgatgtgccatctgagccttcaaaacccactacttgtattgaaaaatccgaaattgttgatcctcctgtg

SEQ ID NO: 20486 - protein, 301 aa, Glycine max
MGKSRKYSKGHATGFVPDFRHAVETMGESEGLGNLGRVDNELTMSEISCAPKRKRVDESFDVPFQLLSLTKMARSGRKDLTLRLKSELEEVRKLQKKIAGMSSITTELSPYSDIRSCSVGEKRPPLESLALHGKKRPLLKHNGPKTKRSISGRFISAKSAAPVTPSYAVLMKQCETLLKRVMSHQFGKVFDKPVDIVKWNIPDYFTIIKHPMDLGTVKSKLISCEYTSLMDFAADVRLTFSNAMSYNPPGNDVHVMAETLSKYFETRWKPIEKILAIDDVPSEPSKPTTCIEKSEIVDPPV

SEQ ID NO: 20487 - protein, 276 aa, Glycine max
MGESEGLGNLGRVDNELTMSEISCAPKRKRVDESFDVPFQLLSLTKMARSGRKDLTLRLKSELEEVRKLQKKIAGMSSITTELSPYSDIRSCSVGEKRPPLESLALHGKKRPLLKHNGPKTKRSISGRFISAKSAAPVTPSYAVLMKQCETLLKRVMSHQFGKVFDKPVDIVKWNIPDYFTIIKHPMDLGTVKSKLISCEYTSLMDFAADVRLTFSNAMSYNPPGNDVHVMAETLSKYFETRWKPIEKILAIDDVPSEPSKPTTCIEKSEIVDPPV

SEQ ID NO: 20488 - protein, 258 aa, Glycine max
MSEISCAPKRKRVDESFDVPFQLLSLTKMARSGRKDLTLRLKSELEEVRKLQKKIAGMSSITTELSPYSDIRSCSVGEKRPPLESLALHGKKRPLLKHNGPKTKRSISGRFISAKSAAPVTPSYAVLMKQCETLLKRVMSHQFGKVFDKPVDIVKWNIPDYFTIIKHPMDLGTVKSKLISCEYTSLMDFAADVRLTFSNAMSYNPPGNDVHVMAETLSKYFETRWKPIEKILAIDDVPSEPSKPTTCIEKSEIVDPPV

SEQ ID NO: 20489 - DNA, 1413 bp, Glycine max
gagtgtatgaaatgacccagtactcagaaggtgaagggagtaagtgagaactgagaacttctaagaaacgccgccaatggcgcatcgctcactcttcctctctctcagacgaaatagcggtttagcttgtgtcctgaacagaacaagattcgtgtcttcgggtgctgtgagcagtgatttggtggaagagagtgtggaaggtgatgatgacctaaggagcagaatcttcaggcttaggctccccaagcgaagcgccaccaacgttcttcagaaatgggtcctccaagggaatcctattacgctctctcagcttcgggatatatccaaagagcttcgaagatctcaacgttacaaacacgctttggagatatcagagtggatggttagcaatgaggaatatgagttatcagactctgattatgcagtccgcatagatttgatgacccaagtttttggcattgatgctgcagagcgctactttgagggtctacctcttgctacaaagactactgaaacatacacagcactcctccattcttacgcaggagcaaaattgactgaaaaggctgaggaactttatcaaaggataaaggattcaaacctttcctttgatgctcttacttacaatgaaatgatgactctttacatgtcagtggggcagtttgaaaaggtccctatagttgttgaagaactgaaacaacaaaaggtttcccctgatatctttacttacaatctatggataagttcctgtgccgctattcttaatatcgatgaagttaggaggattcttgatgaaatgagtcacggtgctggttctaatgaaagttggatcagatatttgaacctggccaatatatatattagtgtagctcatcttgataatgcaagttccaacacacttgttgagactgagaaaaggatcacccaaaggcaatggataacttatgacttcttaatcattctttatggtgggttgggaagtaaggataaacttgatcagatatggaattccttgggaatgaccaaacagaaaatgattagcaggaattacatgtgcatcatttcttcctatctgatgcttggtcttacgaaagaagtgggtgaagttattgatcaatggaagcaatcaacgaccacggattttgatatgcttgcctgtaaaaagattttggttgcttttagggacattggcttagctgaaatagccaacaacttgaatgtgattctcattgagaagaacctcagtcttggaagtgattaactaggagttctctgagcatgaatgtaatatagaatatatatagatttgagatcaattttgcaacttcggaagggaaaatatatttcatttgaaatttgttaatccatcccgaatgaataaatatgctgtgtgaatggaagtcttgcaatgct

SEQ ID NO: 20490 - protein, 394 aa, Glycine max
MAHRSLFLSLRRNSGLACVLNRTRFVSSGAVSSDLVEESVEGDDDLRSRIFRLRLPKRSATNVLQKWVLQGNPITLSQLRDISKELRRSQRYKHALEISEWMVSNEEYELSDSDYAVRIDLMTQVFGIDAAERYFEGLPLATKTTETYTALLHSYAGAKLTEKAEELYQRIKDSNLSFDALTYNEMMTLYMSVGQFEKVPIVVEELKQQKVSPDIFTYNLWISSCAAILNIDEVRRILDEMSHGAGSNESWIRYLNLANIYISVAHLDNASSNTLVETEKRITQRQWITYDFLIILYGGLGSKDKLDQIWNSLGMTKQKMISRNYMCIISSYLMLGLTKEVGEVIDQWKQSTTTDFDMLACKKILVAFRDIGLAEIANNLNVILIEKNLSLGSD

SEQ ID NO: 20491 - protein, 293 aa, Glycine max
MVSNEEYELSDSDYAVRIDLMTQVFGIDAAERYFEGLPLATKTTETYTALLHSYAGAKLTEKAEELYQRIKDSNLSFDALTYNEMMTLYMSVGQFEKVPIVVEELKQQKVSPDIFTYNLWISSCAAILNIDEVRRILDEMSHGAGSNESWIRYLNLANIYISVAHLDNASSNTLVETEKRITQRQWITYDFLIILYGGLGSKDKLDQIWNSLGMTKQKMISRNYMCIISSYLMLGLTKEVGEVIDQWKQSTTTDFDMLACKKILVAFRDIGLAEIANNLNVILIEKNLSLGSD

SEQ ID NO: 20492 - protein, 273 aa, Glycine max
MTQVFGIDAAERYFEGLPLATKTTETYTALLHSYAGAKLTEKAEELYQRIKDSNLSFDALTYNEMMTLYMSVGQFEKVPIVVEELKQQKVSPDIFTYNLWISSCAAILNIDEVRRILDEMSHGAGSNESWIRYLNLANIYISVAHLDNASSNTLVETEKRITQRQWITYDFLIILYGGLGSKDKLDQIWNSLGMTKQKMISRNYMCIISSYLMLGLTKEVGEVIDQWKQSTTTDFDMLACKKILVAFRDIGLAEIANNLNVILIEKNLSLGSD

SEQ ID NO: 20493 - DNA, 1435 bp, Glycine max
aaaacgaatctgaaaaagatggatctgaaaccgaaaccctaaaaccaatcatggatccatttccctttccacatttagctaccacgaaacgtaattttaatttctctctcaagagtcattttccgatgaaacgcaccgttcggcccctcttcgcgctcctcctcctcctcgtcttcgctgccaccctcacctcacgcgccgtcctccgccgcggcatcctctccatcgagctcgaatcccgcgtccggatccgccgccctccgccgcagctcaactccacgctcctccaccacgccgccgtcgaaatcggcgaggagaagttcaagcaagagattcagagcctcctcgacggcaacttcggcagccaagcgcgccaccgcaccttcgtctcctggcgccgcttcatccaccatgaccgcggcggcgccgaaggcgccgtggccaacctcccggggacgctccgctcgccgctcttctatcgctactggctcgacttccggaaggtcctccacgactggttccggaagcgacgattccaacccggtatcatgtccgagttgactcggtcaattaagcttccaattgattcacacaacaacaacaaactacaaaccaataacaaaaataaaaacaaatactcttcttgtgccgtagttggaaacagtggaattttgctgaatagaaactacggtagtgaaattgattcccatgaggttgtgataaggttaaacaatgctagggttgatcactttgaaaccaaggttgggaaaaaaactagcatttcattcatgaatagtaacatcttgcatttgtgtgctagaaggggagggtgcttttgccacccttatggtgataacgttccaattgtaatgtacatttgtcaagccgtgcatttcttggactacactgtgtgcaatgcttctcacaaggctcctttgttggtcactgatcctaggtttgatgtgttgtgtgcgaggattgtgaagtactattcgttgaagaggtttgtggaggagagtgggaagggtttggagaagtggggtgaggctcatgatggttctctttttcactactcttcagggatgcaggctgtgatactggctttggggatttgtgatagggttagcatttttgggtttgggaaattggcttctgctaagcaccattaccacactaaccagaaggctgagcttcacttgcatgattatgaggctgagtatgcgttttatagggaccttgtggatgggaatagggctataccgtttcttgaggacaggtttaaggttcctcctgttgttatgtatcagtgataggtgctgaactgctactgctgcaagtggtggtggtggagggcatctgtgacttgttgttctgttattgtaatacttgtgaaatgcacagatagtggaaaaagcaaaaaatactgattcaagac

SEQ ID NO: 20494 - protein, 435 aa, Glycine max
NESEKDGSETETLKPIMDPFPFPHLATTKRNFNFSLKSHFPMKRTVRPLFALLLLLVFAATLTSRAVLRRGILSIELESRVRIRRPPPQLNSTLLHHAAVEIGEEKFKQEIQSLLDGNFGSQARHRTFVSWRRFIHHDRGGAEGAVANLPGTLRSPLFYRYWLDFRKVLHDWFRKRRFQPGIMSELTRSIKLPIDSHNNNKLQTNNKNKNKYSSCAVVGNSGILLNRNYGSEIDSHEVVIRLNNARVDHFETKVGKKTSISFMNSNILHLCARRGGCFCHPYGDNVPIVMYICQAVHFLDYTVCNASHKAPLLVTDPRFDVLCARIVKYYSLKRFVEESGKGLEKWGEAHDGSLFHYSSGMQAVILALGICDRVSIFGFGKLASAKHHYHTNQKAELHLHDYEAEYAFYRDLVDGNRAIPFLEDRFKVPPVVMYQ

SEQ ID NO: 20495 - protein, 419 aa, Glycine max
MDPFPFPHLATTKRNFNFSLKSHFPMKRTVRPLFALLLLLVFAATLTSRAVLRRGILSIELESRVRIRRPPPQLNSTLLHHAAVEIGEEKFKQEIQSLLDGNFGSQARHRTFVSWRRFIHHDRGGAEGAVANLPGTLRSPLFYRYWLDFRKVLHDWFRKRRFQPGIMSELTRSIKLPIDSHNNNKLQTNNKNKNKYSSCAVVGNSGILLNRNYGSEIDSHEVVIRLNNARVDHFETKVGKKTSISFMNSNILHLCARRGGCFCHPYGDNVPIVMYICQAVHFLDYTVCNASHKAPLLVTDPRFDVLCARIVKYYSLKRFVEESGKGLEKWGEAHDGSLFHYSSGMQAVILALGICDRVSIFGFGKLASAKHHYHTNQKAELHLHDYEAEYAFYRDLVDGNRAIPFLEDRFKVPPVVMYQ

SEQ ID NO: 20496 - protein, 394 aa, Glycine max
MKRTVRPLFALLLLLVFAATLTSRAVLRRGILSIELESRVRIRRPPPQLNSTLLHHAAVEIGEEKFKQEIQSLLDGNFGSQARHRTFVSWRRFIHHDRGGAEGAVANLPGTLRSPLFYRYWLDFRKVLHDWFRKRRFQPGIMSELTRSIKLPIDSHNNNKLQTNNKNKNKYSSCAVVGNSGILLNRNYGSEIDSHEVVIRLNNARVDHFETKVGKKTSISFMNSNILHLCARRGGCFCHPYGDNVPIVMYICQAVHFLDYTVCNASHKAPLLVTDPRFDVLCARIVKYYSLKRFVEESGKGLEKWGEAHDGSLFHYSSGMQAVILALGICDRVSIFGFGKLASAKHHYHTNQKAELHLHDYEAEYAFYRDLVDGNRAIPFLEDRFKVPPVVMYQ

SEQ ID NO: 20497 - DNA, 1717 bp, Glycine max
tttcctcttctttgcatcatcattctcattccttctttctaaactaaccaactttttttcaaacaaattcgattctttcttcatttttaacctaattttcttttcgatccaaaaaatggctctctcgcgcgttgttgctcaatcgtcgcaatcgaatcttctgaaacccctagcgtcgtacttatcactacgacgccgttcggtttcgacttcgtcagacccactcacgatagagacctcggtgcccttcacctcccacaactgcgacgcgccgtcacgcgccgtggagacctcctcggcggagctctttgcgttcttccacgacatggcgctgatgcggcggatggagatcgcggcggactcgctctacaaggcgaagctgatccgcggcttctgccacctctacgacggtcaggaggctgtcgccgtcggcatggaggccgccatcacgcgcaaggactgcgtcatcaccgcctaccgcgaccattgcaccttcctcgcccgtggcggaaccctaatcgagatcttctccgagctcatgggccgccgcgacggctgctccaaggggaaagggggatccatgcacttttataggaaggaaggtggcttctacggtggccatggaatcgttggggcgcaggttccgcttgggtgtggcttggcttttgctcagaagtattgtaaagatgagaatgttacgttttctatgtacggtgatggtgctgccaatcagggccagttgttcgaggcgcttaacatttccgctctttgggatctcccctccattttggtctgcgagaataatcactatggaatggggacagctgagtggagagctgctaagagtcctgcttattacaagcgtggggattatgttcctggattgaaggtagatggcatggatgctcttgctgtgaaacaagcttgtaaatttgcaaaggagtttgctttgaagaatggtcccattattcttgaaatggacacatacagataccatggccactccatgtctgatcctggcagcacataccgtacacgtgatgagatttctggtgtgagacaggagcgtgatccaattgagagagtaagaaagctactattgactcacgagattgctactgaaaaggagctaaaggacattgaaaaggaaataagaaaagaagttgatgaagccattgccaaagcaaaggaaagtcaaatgccagagccatctgatttatttaccaatgtatatgtaaaaggctttggtgtcgaggcttgtggcgctgataggaaagaagttagagctattttgccctgatggaaaacttttcctttgaatttcttttccttagttttggaccgatcaaaataatgaagaataaaaggttcagaagatcatctctacctatttgttgagctttccccaaattgtatatgaaattgattcttcagtagcaatggggcggaaattaatgttttgccatgtaattttggaggatctaacactcatatgacctcaattgattaagcatgcaactagtgtcctgcaaatttggaggatttcgttatgcaaaacctccatgattggcaaaattttgccattattttatttttaggtattcacaagattgtgttccaattgaaaccattttttggctataagagtctttggacagttaaaaatttgatgcctgtacattgcagattgaattggtgatacaggttggattatgtt

SEQ ID NO: 20498 - protein, 432 aa, Glycine max
FLFFASSFSFLLSKLTNFFSNKFDSFFIFNLIFFSIQKMALSRVVAQSSQSNLLKPLASYLSLRRRSVSTSSDPLTIETSVPFTSHNCDAPSRAVETSSAELFAFFHDMALMRRMEIAADSLYKAKLIRGFCHLYDGQEAVAVGMEAAITRKDCVITAYRDHCTFLARGGTLIEIFSELMGRRDGCSKGKGGSMHFYRKEGGFYGGHGIVGAQVPLGCGLAFAQKYCKDENVTFSMYGDGAANQGQLFEALNISALWDLPSILVCENNHYGMGTAEWRAAKSPAYYKRGDYVPGLKVDGMDALAVKQACKFAKEFALKNGPIILEMDTYRYHGHSMSDPGSTYRTRDEISGVRQERDPIERVRKLLLTHEIATEKELKDIEKEIRKEVDEAIAKAKESQMPEPSDLFTNVYVKGFGVEACGADRKEVRAILP

SEQ ID NO: 20499 - protein, 394 aa, Glycine max
MALSRVVAQSSQSNLLKPLASYLSLRRRSVSTSSDPLTIETSVPFTSHNCDAPSRAVETSSAELFAFFHDMALMRRMEIAADSLYKAKLIRGFCHLYDGQEAVAVGMEAAITRKDCVITAYRDHCTFLARGGTLIEIFSELMGRRDGCSKGKGGSMHFYRKEGGFYGGHGIVGAQVPLGCGLAFAQKYCKDENVTFSMYGDGAANQGQLFEALNISALWDLPSILVCENNHYGMGTAEWRAAKSPAYYKRGDYVPGLKVDGMDALAVKQACKFAKEFALKNGPIILEMDTYRYHGHSMSDPGSTYRTRDEISGVRQERDPIERVRKLLLTHEIATEKELKDIEKEIRKEVDEAIAKAKESQMPEPSDLFTNVYVKGFGVEACGADRKEVRAILP

SEQ ID NO: 20500 - protein, 324 aa, Glycine max
MALMRRMEIAADSLYKAKLIRGFCHLYDGQEAVAVGMEAAITRKDCVITAYRDHCTFLARGGTLIEIFSELMGRRDGCSKGKGGSMHFYRKEGGFYGGHGIVGAQVPLGCGLAFAQKYCKDENVTFSMYGDGAANQGQLFEALNISALWDLPSILVCENNHYGMGTAEWRAAKSPAYYKRGDYVPGLKVDGMDALAVKQACKFAKEFALKNGPIILEMDTYRYHGHSMSDPGSTYRTRDEISGVRQERDPIERVRKLLLTHEIATEKELKDIEKEIRKEVDEAIAKAKESQMPEPSDLFTNVYVKGFGVEACGADRKEVRAILP

SEQ ID NO: 20501 - DNA, 876 bp, Glycine max
gggcaggaagatctgcagacaacatttggacgcggtagagaagaaagaaaggaaagggtagggtagatcaggcaggcttcagttcagccatgagaactcacactcacacttacacttatactattttctctctaattcttctctccttatttcttcgaacccattccgaggttataacgttaacctctgatacatttaatgataagatcaaggagaaagacactgcatggtttgtgaaattctgcgttccctggtgcaagcattgtaagaatcttggttcattgtgggatgatttggggaaagcaatggaaggagaagatgaaatagaggttggagaagtcgattgcggcatggacaaagcagtatgttccaaagttgatattcactcctatcctacctttaaggttttctatgatggtgaagaagtagccagataccaaggtacaagagatgttgaatcaatgaaaacctttgttttggaagaagctgaaaaggcagcagcaaaagcacttgaaagtaacaaagaattataacaacttttgaggtgcagtcattatctggattacaactagctctttactgtgggtggtgcacatcccagataagtaatcacctttgggttcaggctgagacattcattcttctctgttctgatcaacatttgtttgtttgacgtagcagttgtgagttaagaactaatttcgtacactaccacaatttctttctgctatactccacaattttcttttttaggtttatttatactctactaaactgatagtggcttgtcatgtttaaagtttcaatataatgatcagtgaattatgaatcgtacctcaggatttgtttatataatcatttggtcttttgaatgct

SEQ ID NO: 20502 - protein, 147 aa, Glycine max
MRTHTHTYTYTIFSLILLSLFLRTHSEVITLTSDTFNDKIKEKDTAWFVKFCVPWCKHCKNLGSLWDDLGKAMEGEDEIEVGEVDCGMDKAVCSKVDIHSYPTFKVFYDGEEVARYQGTRDVESMKTFVLEEAEKAAAKALESNKEL

SEQ ID NO: 20503 - protein, 75 aa, Glycine max
MEGEDEIEVGEVDCGMDKAVCSKVDIHSYPTFKVFYDGEEVARYQGTRDVESMKTFVLEEAEKAAAKALESNKEL

SEQ ID NO: 20504 - DNA, 1090 bp, Glycine max
taactgccataagtgtagtcctgtctctaaatccaacttcaactattgctcacatatctggtattggtataaaagccatcccttctatttcacacttatccagtctccgtgctgtcaacttgtcaaacattttcatagttcacatctcaccaggagttctaccaaagggtattcaaacacttaacttgtcaaaaaacaaaatcagcacccttgagggcctcagagaattggccaagttgcggatacttgacctaagctacaaccgcatttcgagaattggacaaggtttgtcaagttgtacactaatcaaagagctgtatcttgttgggaacaagataagtgatgttgaagggctacacaggctattgaagctaacagttctagacttgagcttcaacaagatcacaacagcaaaagcattaggccagcttgtggctaacttcaactcacttaaggcccttaatctccttggaaattcaattcaaagcaacatcagcgatgaccagctaagcaaagcagtctgtggtcttcttccaaagatggtgtacctgaacaagcaacctgtcaaggctcataggacacgcggaatattaagcgatagtgttgccagagctgcactcgggagcagcacgcgtagctgcaacagaagatcaattagaagagttggccatggaggatcaaatctctccagaggtaatagaaggagtaccagtgtttcccagaaaagcacgaaccggacaaggaagtgaaattgaagctgtttgttgcatgttagaggagcaactcaatggaacactttcatttggttcttctcaatgttatatcagaggaaactgtgtgttagatgttgctgtctcttgatttgtttgtgagatatgtaaaatttcatttaatagcttaaaattttaagataattgtttcctgatataatagtatcaaagccctcataatcatgttgtcgcttcaaggccaaagggctctagcatgaggggttatgttggatatgaaagtcattatttgctttcagcctacagtttgaacttttggaacgtttgattcgtgacattgttaagtcataaaatgttgaagt

SEQ ID NO: 20505 - protein, 248 aa, Glycine max
TAISVVLSLNPTSTIAHISGIGIKAIPSISHLSSLRAVNLSNIFIVHISPGVLPKGIQTLNLSKNKISTLEGLRELAKLRILDLSYNRISRIGQGLSSCTLIKELYLVGNKISDVEGLHRLLKLTVLDLSFNKITTAKALGQLVANFNSLKALNLLGNSIQSNISDDQLSKAVCGLLPKMVYLNKQPVKAHRTRGILSDSVARAALGSSTRSCNRRSIRRVGHGGSNLSRGNRRSTSVSQKSTNRTRK

SEQ ID NO: 20506 - DNA, 1187 bp, Glycine max
tatgtgacagatttccatgtcagatgttctatgaaggagaaaagatacagcaaggattgtgctgaggaagtcatgaaatcattagatctgcctatggataaaattaagaaatgcatgggtgatcctgaagcagatgtggagaatgaagtgctaaagaatgagcaacaagtccagatcggtagaggatctcgcggtgatgtcaccatcttgccaacgttggttataaacaatgtccagtatagaggaaaattggagagaactgctgtactcaaggctgtatgttctggatttaaggagactactgaaccttcagtttgtttaagtggagatgttgagactaatgagtgtcttgaaagaaatggaggatgttggcaagacaaacatgctaacataactgcttgcaaggatactttcaggggaagagtttgcgagtgccctgttgtgaacggtgttcagtataagggtgatggttatacaacatgtgaagcttttgacctgcaaggtgttctataaacaatggtggttgttggtctgaaactaaaaagggactaactttctcagcttgctcagactccaaggtaaatggctgtcagtgcccggttgggtttcgtggggatggcactaataaatgcgaagacgttgatgaatgtaaggaacgaagtgcttgtcagtgtgatggctgcagctgcaagaacacttggggtagttacgattgtaaatgcaagggaaatcttctatatataaaggagcaagatgtttgtattgaaagaagtggatcaaaatttggacggttccttgcctttgtggtcatagcagttgttgttggtgctggtctagccggttacgtgttctacaaatataggctccggtcttacatggactctgagatcatggctatcatgtcacaatacatgccactggaccagcaaaataatgtagttcatgctgaagctcagcctttacgacaacaaggcgccgtgtaagacatacataatgagctaaaaatagtcaaaggaacccgttgcactgcataatccacttgagagaaagattataaatagaactggctatatggatttgaatccatttgacagcgaaggaagatcagtattttactgtaggataattatgtgaacattgcaatacataacagaaattttctacaaggaataatttctattttccac

SEQ ID NO: 20507 - protein, 170 aa, Glycine max
YVTDFHVRCSMKEKRYSKDCAEEVMKSLDLPMDKIKKCMGDPEADVENEVLKNEQQVQIGRGSRGDVTILPTLVINNVQYRGKLERTAVLKAVCSGFKETTEPSVCLSGDVETNECLERNGGCWQDKHANITACKDTFRGRVCECPVVNGVQYKGDGYTTCEAFDLQGVL

SEQ ID NO: 20508 - protein, 160 aa, Glycine max
MKEKRYSKDCAEEVMKSLDLPMDKIKKCMGDPEADVENEVLKNEQQVQIGRGSRGDVTILPTLVINNVQYRGKLERTAVLKAVCSGFKETTEPSVCLSGDVETNECLERNGGCWQDKHANITACKDTFRGRVCECPVVNGVQYKGDGYTTCEAFDLQGVL

SEQ ID NO: 20509 - protein, 146 aa, Glycine max
MKSLDLPMDKIKKCMGDPEADVENEVLKNEQQVQIGRGSRGDVTILPTLVINNVQYRGKLERTAVLKAVCSGFKETTEPSVCLSGDVETNECLERNGGCWQDKHANITACKDTFRGRVCECPVVNGVQYKGDGYTTCEAFDLQGVL

SEQ ID NO: 20510 - DNA, 1197 bp, Glycine max
gatagatggtacaatgatggctccatctactgcatttacaaagatctggcggatgcgcaataatggcactatagtctggcacaagggaactcaacttgtttggattggaggagacaagtttagtgactctcattcagttgacttagaggttcctgaggatggtgtccctttggagaaggaacttgacattgccgttgacttcacagcacctccattacctggtcgttacatatcatattggaggatgacaactccatctggacatcaatttggccaacgtgtttgggtccttatacaggttgatgcctctctcaaggactcattttatgataactctcaaggtctgaacttgaatattcccctcgatatcagtggctctaaaggacctcatattatagatatcaatgtccagcctactgaggatgatactgttcttcaaacccgcaagcctaatgctcccattgagcctttgaatcaaatggttgatgaggaaccaaggttggagctggaaaacgaattccctataaatgaagctacatttgttgcccctgttgcctcagccccagctgcaacctctgtggcatcttcatcagtgccttgtcctataattgatctgtctgaaacaaccccagctgttccatctaatcagcaatccccaaccgtggatgtgccatcgtcatctatgggtactggtggaggaattaattctgtggaggagaatctacttaaagagcttgaggagatgggttttaaacaggttgatttgaacaaggagatcttgaggaagaatgagtacgatctggaccaatccctagacgctctctgtggtgttgatgtctgtggtgtttctgagtgggaccatatgcttgaagagttacaggagatgggttttcgtgacaaagagatgaataagagactgcttgagaaaaacaatggaagcctcaaacgtgttgttatggatttaataaacggcgagtagttttagttgaaatgttagttaatagtttatgtaaaggtgacgacttgtgctcctagggtgcctgatacttgcctggcagtcataattatcttatttcctatctcgatcttgagttgtggtgattcatcacaattgaacaatttgatctatcctatgtttggatttaagtatgttatgaactcaaaagtatatagctaaatcattttggttatttaaag

SEQ ID NO: 20511 - protein, 325 aa, Glycine max
IDGTMMAPSTAFTKIWRMRNNGTIVWHKGTQLVWIGGDKFSDSHSVDLEVPEDGVPLEKELDIAVDFTAPPLPGRYISYWRMTTPSGHQFGQRVWVLIQVDASLKDSFYDNSQGLNLNIPLDISGSKGPHIIDINVQPTEDDTVLQTRKPNAPIEPLNQMVDEEPRLELENEFPINEATFVAPVASAPAATSVASSSVPCPIIDLSETTPAVPSNQQSPTVDVPSSSMGTGGGINSVEENLLKELEEMGFKQVDLNKEILRKNEYDLDQSLDALCGVDVCGVSEWDHMLEELQEMGFRDKEMNKRLLEKNNGSLKRVVMDLINGE

SEQ ID NO: 20512 - protein, 321 aa, Glycine max
MMAPSTAFTKIWRMRNNGTIVWHKGTQLVWIGGDKFSDSHSVDLEVPEDGVPLEKELDIAVDFTAPPLPGRYISYWRMTTPSGHQFGQRVWVLIQVDASLKDSFYDNSQGLNLNIPLDISGSKGPHIIDINVQPTEDDTVLQTRKPNAPIEPLNQMVDEEPRLELENEFPINEATFVAPVASAPAATSVASSSVPCPIIDLSETTPAVPSNQQSPTVDVPSSSMGTGGGINSVEENLLKELEEMGFKQVDLNKEILRKNEYDLDQSLDALCGVDVCGVSEWDHMLEELQEMGFRDKEMNKRLLEKNNGSLKRVVMDLINGE

SEQ ID NO: 20513 - protein, 320 aa, Glycine max
MAPSTAFTKIWRMRNNGTIVWHKGTQLVWIGGDKFSDSHSVDLEVPEDGVPLEKELDIAVDFTAPPLPGRYISYWRMTTPSGHQFGQRVWVLIQVDASLKDSFYDNSQGLNLNIPLDISGSKGPHIIDINVQPTEDDTVLQTRKPNAPIEPLNQMVDEEPRLELENEFPINEATFVAPVASAPAATSVASSSVPCPIIDLSETTPAVPSNQQSPTVDVPSSSMGTGGGINSVEENLLKELEEMGFKQVDLNKEILRKNEYDLDQSLDALCGVDVCGVSEWDHMLEELQEMGFRDKEMNKRLLEKNNGSLKRVVMDLINGE

SEQ ID NO: 20514 - DNA, 1458 bp, Glycine max
gcgattcggtaccatccatcatcgccgttttcaaattcttcaattttcaccatcaattccctttcgcctctctcaatcgatataatttttttgcagagtttgggatttcagggttttggacgatgaacgtgggcgacctaaacaaggtttgggaaatcagggctctgaagaggaaacccgcggctgaagaagccacgaagatgttggaaaagatcgccaaacaggtccaacccatcatgcgcaaacacaaatggaggatcaaacttctctctgaaatgtgcccaagcaatccacgtcttctggggttgaatgttggagctggtatacatgtgaagttgcggctacggagaccgaacagggatttggacttctacccgtttgatcaggttctggatacgatgcttcatgagctttgccataatgcccatggccctcataatgccaacttctacaagctctgggatgaacttagaaaggaatgtgaagagttgatggctaagggaataagtggtgctggggagggatttgatcttccaggaaggcgtttaggtggttattcccgtcaacctccactttcatccctccgtaaaactgcactggaagctgcagaaaaaagagtacaattgggatctcttcttccgtctgggccaaaacgtctaggtggtgatagtgttataatgagggcccttagtccagtacaagctgctgcaatggctgcagaacggagattacaggatgacgtatggtgtggttctcaatcttgtgaaaatttggatcatgaagatgttgactatgaagttgctgagaacatcgtgcataagggggaaaatgtgggaagctcaagacaaacagacaattctactctaccttcgaatctgttatctcgaaaaagaagtcaggataccaattcaagtttacctgctaagtcatcatctagtacttctgaatttgtagatttgactatggatacaccgaaaagtagacctgacaaggagcatcaaactggacctaaacgaagatgcggtggatcagaaagcttttcacattctcaatcaaattatcaggcaggatctagttcagcaaatttatcaagtgtatctgggcgacattctgaagaatctggaatgtgggagtgtacaatgtgcactctgttgaataaaagattggctcccatatgtgagttgtgtggcactcaacagccaaaagattttagtaccaaatgcaacacttggtcttgtaaattctgtacgttggaaaacaatgtgaagttggagaagtgctcagcctgtgatcagtggagatactctcatggcccatcagtgtcaatccgagcacccaaccttggtacatagaagagctgcgtagtttgcttaatggagcacttttgatccatttttggctttagtctttacaaaattgcattactttctccaccaatctatttatttttggtttctt

SEQ ID NO: 20515 - protein, 449 aa, Glycine max
DSVPSIIAVFKFFNFHHQFPFASLNRYNFFAEFGISGFWTMNVGDLNKVWEIRALKRKPAAEEATKMLEKIAKQVQPIMRKHKWRIKLLSEMCPSNPRLLGLNVGAGIHVKLRLRRPNRDLDFYPFDQVLDTMLHELCHNAHGPHNANFYKLWDELRKECEELMAKGISGAGEGFDLPGRRLGGYSRQPPLSSLRKTALEAAEKRVQLGSLLPSGPKRLGGDSVIMRALSPVQAAAMAAERRLQDDVWCGSQSCENLDHEDVDYEVAENIVHKGENVGSSRQTDNSTLPSNLLSRKRSQDTNSSLPAKSSSSTSEFVDLTMDTPKSRPDKEHQTGPKRRCGGSESFSHSQSNYQAGSSSANLSSVSGRHSEESGMWECTMCTLLNKRLAPICELCGTQQPKDFSTKCNTWSCKFCTLENNVKLEKCSACDQWRYSHGPSVSIRAPNLGT

SEQ ID NO: 20516 - protein, 409 aa, Glycine max
MNVGDLNKVWEIRALKRKPAAEEATKMLEKIAKQVQPIMRKHKWRIKLLSEMCPSNPRLLGLNVGAGIHVKLRLRRPNRDLDFYPFDQVLDTMLHELCHNAHGPHNANFYKLWDELRKECEELMAKGISGAGEGFDLPGRRLGGYSRQPPLSSLRKTALEAAEKRVQLGSLLPSGPKRLGGDSVIMRALSPVQAAAMAAERRLQDDVWCGSQSCENLDHEDVDYEVAENIVHKGENVGSSRQTDNSTLPSNLLSRKRSQDTNSSLPAKSSSSTSEFVDLTMDTPKSRPDKEHQTGPKRRCGGSESFSHSQSNYQAGSSSANLSSVSGRHSEESGMWECTMCTLLNKRLAPICELCGTQQPKDFSTKCNTWSCKFCTLENNVKLEKCSACDQWRYSHGPSVSIRAPNLGT

SEQ ID NO: 20517 - protein, 383 aa, Glycine max
MLEKIAKQVQPIMRKHKWRIKLLSEMCPSNPRLLGLNVGAGIHVKLRLRRPNRDLDFYPFDQVLDTMLHELCHNAHGPHNANFYKLWDELRKECEELMAKGISGAGEGFDLPGRRLGGYSRQPPLSSLRKTALEAAEKRVQLGSLLPSGPKRLGGDSVIMRALSPVQAAAMAAERRLQDDVWCGSQSCENLDHEDVDYEVAENIVHKGENVGSSRQTDNSTLPSNLLSRKRSQDTNSSLPAKSSSSTSEFVDLTMDTPKSRPDKEHQTGPKRRCGGSESFSHSQSNYQAGSSSANLSSVSGRHSEESGMWECTMCTLLNKRLAPICELCGTQQPKDFSTKCNTWSCKFCTLENNVKLEKCSACDQWRYSHGPSVSIRAPNLGT

SEQ ID NO: 20518 - DNA, 1283 bp, Glycine max
aactcaaagaaaagcaaaatgtttttgtacaatttcatcgtgcaggaagtgaagataaaacaaagacaaaaacagcatcaggactacaaccaacttttttagagtcttggacaaaggattggaaatgtaatcccaatatgatcagtttagagtttgaaatatacaaacacaagttcttatcaaacgatttattgggtagagcagtattagacttacaaaattacacattcgtgacaaaaaaaccaaaaatcatcatacttccagttcaattagtcaaacaaaaggtaaaatcaactctcacagatcaaccatctatcgtcattcaaatcacaccagaagattttggttaccatccatcaccatacgtatggacatggtcatatgaacaacaagaacccactttgattatggatcttgccgatgtagtacaagtttcttgctctgaaactgcaacctattttgtaacagagaaaggttcactatacaaattagcaattggagaacatgtaccaataaaaattgaaacattaacacctgttctaaaagtagcagcaggattcgatcatgtgcttttcatttcgaaggataaaacagtgcaaagttttggtgaaaacaattatggacaattgggattggatgattttacatcacgatctattgcatcaacagttcaattggcacctggattatcggatgcagaatctgtttttgcaggtagaaatgtttcattctttgttgcatccaatggagatgcttatgcatgtggtgataattctaaaaatcaattaggattaagaaacaatgagttaattgcgcgtccaaaaattcttgacattaaaaatatatcttgtttacgtacatttaaagactttaccatggcaattagtcatgattcattatactttaccggtatttgtaacggattcgtgtcaaatacatggttgcatgtgttaactggaacaagatttatgtctgttgcaggatggagcgatatttttgctctatcaagagaaggaaaagtgtttaaatgtgatcttgaagaagataaggcagagattgttgaagaattatcaacgaaaaatatcactgaaattgttgctggatttaatcatttaatagctatggaagagaatggtgatgttacttacatacaagaaggacttggagataagttaaagtttttggagtcaaataaggcattatcgattgcagcttctggtactcaaagcatagtagttaccagagatttgtaaaaattacaacattaaatacaaatttgaagc

SEQ ID NO: 20519 - protein, 416 aa, Glycine max
LKEKQNVFVQFHRAGSEDKTKTKTASGLQPTFLESWTKDWKCNPNMISLEFEIYKHKFLSNDLLGRAVLDLQNYTFVTKKPKIIILPVQLVKQKVKSTLTDQPSIVIQITPEDFGYHPSPYVWTWSYEQQEPTLIMDLADVVQVSCSETATYFVTEKGSLYKLAIGEHVPIKIETLTPVLKVAAGFDHVLFISKDKTVQSFGENNYGQLGLDDFTSRSIASTVQLAPGLSDAESVFAGRNVSFFVASNGDAYACGDNSKNQLGLRNNELIARPKILDIKNISCLRTFKDFTMAISHDSLYFTGICNGFVSNTWLHVLTGTRFMSVAGWSDIFALSREGKVFKCDLEEDKAEIVEELSTKNITEIVAGFNHLIAMEENGDVTYIQEGLGDKLKFLESNKALSIAASGTQSIVVTRDL

SEQ ID NO: 20520 - protein, 371 aa, Glycine max
MISLEFEIYKHKFLSNDLLGRAVLDLQNYTFVTKKPKIIILPVQLVKQKVKSTLTDQPSIVIQITPEDFGYHPSPYVWTWSYEQQEPTLIMDLADVVQVSCSETATYFVTEKGSLYKLAIGEHVPIKIETLTPVLKVAAGFDHVLFISKDKTVQSFGENNYGQLGLDDFTSRSIASTVQLAPGLSDAESVFAGRNVSFFVASNGDAYACGDNSKNQLGLRNNELIARPKILDIKNISCLRTFKDFTMAISHDSLYFTGICNGFVSNTWLHVLTGTRFMSVAGWSDIFALSREGKVFKCDLEEDKAEIVEELSTKNITEIVAGFNHLIAMEENGDVTYIQEGLGDKLKFLESNKALSIAASGTQSIVVTRDL

SEQ ID NO: 20521 - protein, 281 aa, Glycine max
MDLADVVQVSCSETATYFVTEKGSLYKLAIGEHVPIKIETLTPVLKVAAGFDHVLFISKDKTVQSFGENNYGQLGLDDFTSRSIASTVQLAPGLSDAESVFAGRNVSFFVASNGDAYACGDNSKNQLGLRNNELIARPKILDIKNISCLRTFKDFTMAISHDSLYFTGICNGFVSNTWLHVLTGTRFMSVAGWSDIFALSREGKVFKCDLEEDKAEIVEELSTKNITEIVAGFNHLIAMEENGDVTYIQEGLGDKLKFLESNKALSIAASGTQSIVVTRDL

SEQ ID NO: 20522 - DNA, 1160 bp, Glycine max
aatgattatcaatgtggactaaactaagcttctgtgctacttgtggtcctgtaacaacttcaagtctacaagtacaaggtgatgaatcctgaaatgcaaaattcaaatgttgatcaattctgaccttttcttttgacaagagaaaatttatttaaagatataactcaagggatgtactaatgataatgataatacaattgcatctcctgaggaataccctattatctggatggattattaaaattttacatcatttttttttcttctccgaaatataagcctgatttgatgctaaacagcacatgcatcattgaaagaggccagcagtttgttttattgtttttaaagtttccataatagtattattctttttaaaatttgtttcctgaaaaaagtttttctttttgcttttaccataaagtcaataatggcaaaatctttcgtgaaataagattcccgttcgttcctttttatgcttttccaacttagttcatgtcctttttgagctcggcttccattttaaccttgcttttttcttatatttgtagcctgcaggtggtcaaagtaacatcttatttggtgaagcatccgttgagaagacagcaaagaagatacataaccagaagttcgcggagctgacaggcaataatattttccaaggagatgttcctccaggctcagctgagaagcctctgagcagggctaagctcagagaaatgactggcagtgacatatttgctgatggaaagacagaaatcaaagaccctgtgcgaggtgcccggaaaccccctggtggagagagcagcattgccttggtttaagttatttttaatttacaaaaaatactagcaatatattctctaatatttattttttctgacatactttctattgatagaaattcgcgtgagtcttgctaaatatgtgactctcatccacaaacaagtgaaactcacatgaatttcagtcaatgaaagaaagcagataaaaaaagtattagaaaatgtgttgttagctttcctctttaacttatcccctttgacataggaattctataaattcgtctgaacttccatgtttttctgtagaagggtcagtgtgttcgattatcagcattgtaagtttcaactttcaatgaacgtggcataacctttacattt

SEQ ID NO: 20523 - protein, 48 aa, Glycine max
MSFLSSASILTLLFSYICSLQVVKVTSYLVKHPLRRQQRRYITRSSRS

SEQ ID NO: 20524 - protein, 35 aa, Glycine max
MERQKSKTLCEVPGNPLVERAALPWFKLFLIYKKY

SEQ ID NO: 20525 - protein, 34 aa, Glycine max
MTGSDIFADGKTEIKDPVRGARKPPGGESSIALV

SEQ ID NO: 20526 - DNA, 2098 bp, Glycine max
tctctctctctctttctctctttctctctgtctagaatgcctctattctcctctgtcggtcacacacagcgatagatagataatagagaagagaagcattcataggcgccaattgtgagtgagagagaagtttctgttttttctacttttccatttttttgggagagatagagagagagagatctgattcttcaccataactgtcattgctttgcttctctcactcagcacaagttgacaagaagggcattgccatttcaatcccatacaaaaagcacacaccccaattcaccaccattttcctaaagcttcactcttttctctgctaagagaagaaagcaagaaagaaaaagccaaaatggttgaatctcagcccaagttcttcatcccggactcaatcaacggcgtgaatttcgacgtagcggcgcagattaagatggtgtgggaagtgatgaaggcgccactgatcgtgcctctgctgaacctggcagtgtacattagcctcgccatggcgctcatgctcttcatggagagggtctacatgggcattgtcatcatcctcgtcaagctcttctggaagaagccacaccagcgctacaagttcgagccactccaagacgacgaggaactcggcaactctaattaccccgtcgtgcttgtccagattccaatgttcaatgagaaagaggtgtacaaggtgtcgattggagcagcttgtaatctttcatggcctgcggatcgtctcgtcatccaagtgcttgatgattctactgaccctaccgtcaagcaaatggtggagatggaatgccagagatgggcaagtaagggcataaacatagtgtaccaaatcagagaaacaagaggagggtacaaagcgggtgctctaaaagaaggcctaaaacgtaactatgtgaaacactgtgagtacgtggcaattttcgatgcagatttcaggccagagccagattttctcagacgttccattcctttcttggtgggcaaccccgacattgctcttgttcaagctcgttggagatttgtgaattctgacgagtgcttattgacaagaatgcaagagatgtccctggattaccatttcacagtagagcaagaagttggatcagccactcatgctttcttcggtttcaacggaactgctggtatttggagaatagctgctatcaacgaagctggtgggtggaaagacagaacaacagtggaagatatggaccttgctgttcgtgctagtcttaggggatggaaatttttgtaccttggtgacctccaggccaaaagtgagcttcccagtactttgagagccttcagattccagcagcacagatggtcatgtggtcctgctaatttgttccgcaaaatggtgatggagattgtgaggaacaagaaagttaggttttggaagaaagtgtatgttatatacagctttttctttgttcgcaaaatcatcgcccacatggtcaccttcttcttctactgtgttgtgattccccttacaatcttggtcccagaggttcatgttccaatctggggagctgtttatattccttctgtcatcaccattctcaattcagttggaacaccaaggtccattcaccttctgttctattggatcctctttgagaatgtgatgtctttgcaccgtaccaaggcaacatttataggtctcttagagtatgggagggctaatgaatgggttgtgactgaaaaacttggtgactctgtcaataataataagaataaatcaggagatgctgccaagaagaataatgccatcaaggccacccccaaaaagactcgatccaaatttgttgaaagacttaatttactggagttgggatttgctgccttcctcttcgtatgtggatgctatgattatgttcatgggaaacacaactacttcatctacctcttccttcagaccttaacattctcaattgtaggatttggctacgttggcaccatcgtgtaaacctcgttgagccaaatttctcaagttacttaagtttcatcaatgttgtgtccatatttttctagtttctcctaaaaaaaaatacatcaaaagaggctgatttcttcaagc

SEQ ID NO: 20527 - protein, 542 aa, Glycine max
MVESQPKFFIPDSINGVNFDVAAQIKMVWEVMKAPLIVPLLNLAVYISLAMALMLFMERVYMGIVIILVKLFWKKPHQRYKFEPLQDDEELGNSNYPVVLVQIPMFNEKEVYKVSIGAACNLSWPADRLVIQVLDDSTDPTVKQMVEMECQRWASKGINIVYQIRETRGGYKAGALKEGLKRNYVKHCEYVAIFDADFRPEPDFLRRSIPFLVGNPDIALVQARWRFVNSDECLLTRMQEMSLDYHFTVEQEVGSATHAFFGFNGTAGIWRIAAINEAGGWKDRTTVEDMDLAVRASLRGWKFLYLGDLQAKSELPSTLRAFRFQQHRWSCGPANLFRKMVMEIVRNKKVRFWKKVYVIYSFFFVRKIIAHMVTFFFYCVVIPLTILVPEVHVPIWGAVYIPSVITILNSVGTPRSIHLLFYWILFENVMSLHRTKATFIGLLEYGRANEWVVTEKLGDSVNNNKNKSGDAAKKNNAIKATPKKTRSKFVERLNLLELGFAAFLFVCGCYDYVHGKHNYFIYLFLQTLTFSIVGFGYVGTIV

SEQ ID NO: 20528 - protein, 516 aa, Glycine max
MVWEVMKAPLIVPLLNLAVYISLAMALMLFMERVYMGIVIILVKLFWKKPHQRYKFEPLQDDEELGNSNYPVVLVQIPMFNEKEVYKVSIGAACNLSWPADRLVIQVLDDSTDPTVKQMVEMECQRWASKGINIVYQIRETRGGYKAGALKEGLKRNYVKHCEYVAIFDADFRPEPDFLRRSIPFLVGNPDIALVQARWRFVNSDECLLTRMQEMSLDYHFTVEQEVGSATHAFFGFNGTAGIWRIAAINEAGGWKDRTTVEDMDLAVRASLRGWKFLYLGDLQAKSELPSTLRAFRFQQHRWSCGPANLFRKMVMEIVRNKKVRFWKKVYVIYSFFFVRKIIAHMVTFFFYCVVIPLTILVPEVHVPIWGAVYIPSVITILNSVGTPRSIHLLFYWILFENVMSLHRTKATFIGLLEYGRANEWVVTEKLGDSVNNNKNKSGDAAKKNNAIKATPKKTRSKFVERLNLLELGFAAFLFVCGCYDYVHGKHNYFIYLFLQTLTFSIVGFGYVGTIV

SEQ ID NO: 20529 - protein, 511 aa, Glycine max
MKAPLIVPLLNLAVYISLAMALMLFMERVYMGIVIILVKLFWKKPHQRYKFEPLQDDEELGNSNYPVVLVQIPMFNEKEVYKVSIGAACNLSWPADRLVIQVLDDSTDPTVKQMVEMECQRWASKGINIVYQIRETRGGYKAGALKEGLKRNYVKHCEYVAIFDADFRPEPDFLRRSIPFLVGNPDIALVQARWRFVNSDECLLTRMQEMSLDYHFTVEQEVGSATHAFFGFNGTAGIWRIAAINEAGGWKDRTTVEDMDLAVRASLRGWKFLYLGDLQAKSELPSTLRAFRFQQHRWSCGPANLFRKMVMEIVRNKKVRFWKKVYVIYSFFFVRKIIAHMVTFFFYCVVIPLTILVPEVHVPIWGAVYIPSVITILNSVGTPRSIHLLFYWILFENVMSLHRTKATFIGLLEYGRANEWVVTEKLGDSVNNNKNKSGDAAKKNNAIKATPKKTRSKFVERLNLLELGFAAFLFVCGCYDYVHGKHNYFIYLFLQTLTFSIVGFGYVGTIV

SEQ ID NO: 20530 - DNA, 1377 bp, Glycine max
aagaaaatagaatggaaaacattgtgcccaaatgatgggtttgtttattttcgtaatagcgagttgatctctggacaagttggaaaggttactttaggaaatggcaacaaagatggactgttctctgtgctactgagagactatagagcacatgctgctgcatcttgcatgaatcgtttagctaaattgagtgcacgatggattggcaatcatgggttctcaataggcattgatgatgtccaaccaaaagagattctgattaacaagaaagatgaaacaatttcagaaggttatagggaatgtgataaacacatagaagctttcaataagggaaaactagaactcttagctggttgtgatgctgcgcagacattagagactcggattactggggtattaaatggacttcgtgatacggcagggaaggtctgcatgcaaaccctacactggagaaatagtccattgatcatgtcacaatgtggctccaaaggatcttctattaatatcagtcaaatggttgcctgtgttggtcaacaatcagtcggtggtcgtcgtactcctaatgggttcatagatcggagccttcctcatttccccagaaaatcaaaaacccctgctgcaaaaggttttgttgctaattccttttacagtggattgtcagctactgagtttttcttccatacaatgggagggcgagaagggcttgttgatacagcggttaaaactgcagacacgggatatatgtctcgtcaattaatgaaatccctagaggatttgtttttacattatgattatactgtaagaaatgctggtggctctattgttcaattttgctatggagatgatggcatggatccagcaggcatggaaggaaaaaatggaaaaccattgaattttgagcggttgtttcttaaaagcaaggccatatgtcccaatgatgaagatgatgaaattttatcttcctcagatgtgagtaaagtagttcatgagaagctctcagaatttgatatgtctaggttagcagagaaaggggtttttgaggtgggcttctctgctgacttcgttgaatctctacaatcctttatcaaagataatgcaaaattaacggaagaaggtttcactgatgagcattctcaaaacctgaaaaaatttgggcagaggatatctgggatcactcgtaaacagctagatgtttttttgaatatttgtctatctcgttatcattccaaaaaaatggaggctggagctcctgttggtgcaactggagctcatagtattggagagcctgggacccagatgactttgaaaactttccactttgctggagttgcaagcatgaatgttactcttggagttcctcgtgtcaaagaaataatg

SEQ ID NO: 20531 - protein, 459 aa, Glycine max
KKIEWKTLCPNDGFVYFRNSELISGQVGKVTLGNGNKDGLFSVLLRDYRAHAAASCMNRLAKLSARWIGNHGFSIGIDDVQPKEILINKKDETISEGYRECDKHIEAFNKGKLELLAGCDAAQTLETRITGVLNGLRDTAGKVCMQTLHWRNSPLIMSQCGSKGSSINISQMVACVGQQSVGGRRTPNGFIDRSLPHFPRKSKTPAAKGFVANSFYSGLSATEFFFHTMGGREGLVDTAVKTADTGYMSRQLMKSLEDLFLHYDYTVRNAGGSIVQFCYGDDGMDPAGMEGKNGKPLNFERLFLKSKAICPNDEDDEILSSSDVSKVVHEKLSEFDMSRLAEKGVFEVGFSADFVESLQSFIKDNAKLTEEGFTDEHSQNLKKFGQRISGITRKQLDVFLNICLSRYHSKKMEAGAPVGATGAHSIGEPGTQMTLKTFHFAGVASMNVTLGVPRVKEIM

SEQ ID NO: 20532 - protein, 403 aa, Glycine max
MNRLAKLSARWIGNHGFSIGIDDVQPKEILINKKDETISEGYRECDKHIEAFNKGKLELLAGCDAAQTLETRITGVLNGLRDTAGKVCMQTLHWRNSPLIMSQCGSKGSSINISQMVACVGQQSVGGRRTPNGFIDRSLPHFPRKSKTPAAKGFVANSFYSGLSATEFFFHTMGGREGLVDTAVKTADTGYMSRQLMKSLEDLFLHYDYTVRNAGGSIVQFCYGDDGMDPAGMEGKNGKPLNFERLFLKSKAICPNDEDDEILSSSDVSKVVHEKLSEFDMSRLAEKGVFEVGFSADFVESLQSFIKDNAKLTEEGFTDEHSQNLKKFGQRISGITRKQLDVFLNICLSRYHSKKMEAGAPVGATGAHSIGEPGTQMTLKTFHFAGVASMNVTLGVPRVKEIM

SEQ ID NO: 20533 - protein, 315 aa, Glycine max
MQTLHWRNSPLIMSQCGSKGSSINISQMVACVGQQSVGGRRTPNGFIDRSLPHFPRKSKTPAAKGFVANSFYSGLSATEFFFHTMGGREGLVDTAVKTADTGYMSRQLMKSLEDLFLHYDYTVRNAGGSIVQFCYGDDGMDPAGMEGKNGKPLNFERLFLKSKAICPNDEDDEILSSSDVSKVVHEKLSEFDMSRLAEKGVFEVGFSADFVESLQSFIKDNAKLTEEGFTDEHSQNLKKFGQRISGITRKQLDVFLNICLSRYHSKKMEAGAPVGATGAHSIGEPGTQMTLKTFHFAGVASMNVTLGVPRVKEIM

SEQ ID NO: 20534 - DNA, 1302 bp, Glycine max
aggggactatcaaacattttggcccccttccgtgcccaactttctctcagacccgaaaatgaaagacatcttctaatggcagaagaagcacagaacagcaactccatgaatgccttgccaaaggttctcgttctgggtccccctacgtgcttcataaccctccaacctctctactctcacaagttccatttcctcaacccccacacctcaagcctttcactgcaacacttcctccaccaccaccaccaccaccacccttcctccatctccgccgttctctgcggtgcatcctactccgtcaccgccaacgtcctctgcctcctgcccgcgctccgcctcatcgtcaccaccagcgccggaaccgaccacatcgacctcgccgagtgccgccgccgcggaatccaggtcgccggcgccggagagctgttctccgaggacgtcgccgatatggccgtcgccctgctcgctgacgttatgaggaaaatttcggcggcggatcggtatttgaggactcagcagaatcacgacactacgccttgggattttttcacattcggctccaagttagcaggtaagcgagttgagattattggactgggaagcattggcatggaagtggccaagaggttggagtcttttggttgcattatcttatacaactctaagcataaaaaagcttcagtttcgtatcctttctattctagcatggtggatcttgcaactacttgcgacgctcttgtgttatgttgcgcactaaatgagcaaacaaagcacataattaacagggaagtcatgttggcattgggaaaacaaggatttattgtcaatgttggaagagggggtcttattgatgaaaaggaattggtcaagtgtttgatggaaggtgaaattggaggtgctggtttggatgtgtttgagaacgagcctcatgttcccaaagaactccttgcaatgaataatgtggttttatctccacattctgctgcttttactgtggaatctatgatgaatttgtgtgaacttatgggaggcaatttagaagccttcttcttaaataagcccctaattactcctgtaatgttgcctcaataacttgttcttttgataacctagtatcgtacgtgtggtacaattttatgacattcctgcaatgattctgattaagttttaaatgaatttgttctattccaaaaaccatctctgcaaagtgccttggcaagtgtatttcaaactctgttgtgccgttactctgtttgatcagtttttaagctcatttttatatggaaactctattgtgccgtt

SEQ ID NO: 20535 - protein, 363 aa, Glycine max
RGLSNILAPFRAQLSLRPENERHLLMAEEAQNSNSMNALPKVLVLGPPTCFITLQPLYSHKFHFLNPHTSSLSLQHFLHHHHHHHPSSISAVLCGASYSVTANVLCLLPALRLIVTTSAGTDHIDLAECRRRGIQVAGAGELFSEDVADMAVALLADVMRKISAADRYLRTQQNHDTTPWDFFTFGSKLAGKRVEIIGLGSIGMEVAKRLESFGCIILYNSKHKKASVSYPFYSSMVDLATTCDALVLCCALNEQTKHIINREVMLALGKQGFIVNVGRGGLIDEKELVKCLMEGEIGGAGLDVFENEPHVPKELLAMNNVVLSPHSAAFTVESMMNLCELMGGNLEAFFLNKPLITPVMLPQ

SEQ ID NO: 20536 - protein, 338 aa, Glycine max
MAEEAQNSNSMNALPKVLVLGPPTCFITLQPLYSHKFHFLNPHTSSLSLQHFLHHHHHHHPSSISAVLCGASYSVTANVLCLLPALRLIVTTSAGTDHIDLAECRRRGIQVAGAGELFSEDVADMAVALLADVMRKISAADRYLRTQQNHDTTPWDFFTFGSKLAGKRVEIIGLGSIGMEVAKRLESFGCIILYNSKHKKASVSYPFYSSMVDLATTCDALVLCCALNEQTKHIINREVMLALGKQGFIVNVGRGGLIDEKELVKCLMEGEIGGAGLDVFENEPHVPKELLAMNNVVLSPHSAAFTVESMMNLCELMGGNLEAFFLNKPLITPVMLPQ

SEQ ID NO: 20537 - protein, 328 aa, Glycine max
MNALPKVLVLGPPTCFITLQPLYSHKFHFLNPHTSSLSLQHFLHHHHHHHPSSISAVLCGASYSVTANVLCLLPALRLIVTTSAGTDHIDLAECRRRGIQVAGAGELFSEDVADMAVALLADVMRKISAADRYLRTQQNHDTTPWDFFTFGSKLAGKRVEIIGLGSIGMEVAKRLESFGCIILYNSKHKKASVSYPFYSSMVDLATTCDALVLCCALNEQTKHIINREVMLALGKQGFIVNVGRGGLIDEKELVKCLMEGEIGGAGLDVFENEPHVPKELLAMNNVVLSPHSAAFTVESMMNLCELMGGNLEAFFLNKPLITPVMLPQ

SEQ ID NO: 20538 - DNA, 1412 bp, Glycine max
atctctccatgatcgcctatactgtagtgatgtgaaaaaggaaccactaacatggaagcagagactaaagatctgcataggagcagcacgtggactacacttccttcacacaggtgtcaagcgaaccatctttcatcgtgacgtaacaccttataaaattcttttgggtagcaacatggtggccaaacttgcagacttccggctttccttaacaggaccgcattatgcatcaaagccaaaaccaaagacaatttcaaaagatggctttataggtacatatggttatgtggctcctgagatttccgaaaacaatacaataacagaaaaatgtgatgtttattcctttggggtagtgctactggaactggtatgcaaagacaagctaaaagatgttgagaagcgggagaagcaccctgttgaggagaatattgatccgaatatcaaaggaaagattgcaccagagtgttgggaagtatttatggatatcacagaaagatgcttgaagtttgatccgaatgagcggccagcaatgggtgaagtggaggtgcaacttgagcttgctctgtcactgcaggaagaagcagatataataaatactggcgatgattataccctattatcgatgatcattatgaattaatcctcaaccagaataggtaccatctttagctggaaactaaactgatagattatagaacttccaaggttgtctcaatgataattgataacagttcaacagattgttcaatcacagtagagcagatgaatgggaagtcatgggaaaatattttttttagttcaagaatgaaattgagttatttgccagttttgtcactcaaggcattttttgtctctctagtaagattttatgaccgcaaagacaagaagattgttgtgactggtgtatgagaacacaggcactgccaattgatctctccataatttcctaaactgtcatgatatgaaaatggaatcacttttgtggatatatataggctgaaagatccttcaaagctgcagtgcatggactacattacattcacacaggagtcacgtgcaccgactttcatcatgcagccaatatcctgcaatattttagcccttcattagtcattgcacagaaatgaaggaacagaaaaatgtaatgaatagttcctatttagctatagagaaaattttgatggagaggcaggagaggatccatacttgttttggataacaatacggtgcctgaactcagatttttgcttttttgaggtatctatactgttttcttgttaattatacatcacttacagcttagaagctggcccagtaatccagtatcaacttcaaatttgatctcttgttgtataaagtttgcgtctgtgtagatccatatagaaataatcgctatgaaagaatttgttggg

SEQ ID NO: 20539 - protein, 212 aa, Glycine max
SLHDRLYCSDVKKEPLTWKQRLKICIGAARGLHFLHTGVKRTIFHRDVTPYKILLGSNMVAKLADFRLSLTGPHYASKPKPKTISKDGFIGTYGYVAPEISENNTITEKCDVYSFGVVLLELVCKDKLKDVEKREKHPVEENIDPNIKGKIAPECWEVFMDITERCLKFDPNERPAMGEVEVQLELALSLQEEADIINTGDDYTLLSMIIMN

SEQ ID NO: 20540 - protein, 154 aa, Glycine max
MVAKLADFRLSLTGPHYASKPKPKTISKDGFIGTYGYVAPEISENNTITEKCDVYSFGVVLLELVCKDKLKDVEKREKHPVEENIDPNIKGKIAPECWEVFMDITERCLKFDPNERPAMGEVEVQLELALSLQEEADIINTGDDYTLLSMIIMN

SEQ ID NO: 20541 - DNA, 939 bp, Glycine max
taatctcaaggggaagctgcgtctctttctaagacctaaatgccaccctatattctttgattcaaatatcaattcagcagctgttgtgagattaaatatttatcaaatatttttgttatgtgcaatgaagttccattgttatatccgggatttatctttcatatgcaaactccacaaaagatattgttctaacatcatacaaatttctttgaggtatgaatgtaatatgatcttaccgttgaactgatattaagactgcctttttctcattgttgatttgattgattttccgcatcaaactaatgccatgcataaattctcaatcaaatgattatgtatacctttctgaatagaatactctaatactaggaattataacctttagtcatttaagttttctttcatgatcaactgccagatacatgtaccagctgataaagaaacaaatgcactccataagtcttaattcagaaattcagccgattcttgtattggagaaggaagaagtggaatggcttggacttcatgcttttgtacaagtactaaagagaaagcaatcacgacataaggagttgctggcaattttgaggtcaaggttgtcatcacatagaatgtctgagagggtgtcacttgaactgaaatatgcaattaataccaaaaattcctctttgctatgggacatcaagtattaactcttaaaggtgagagacatcctacgaaccgatggcgtgatgagttgcgttgaaatgcttatttcttttagttgttttctgattcaacaacaatgtgatactgagtggtaatattggttattatatttggcataatatattttgtttatttttgtctcctggctttgaattcgggagaagagtccatgtcatgtctagttcaacaatacaagttttttgatgagtgataagtatttctttctcatgc

SEQ ID NO: 20542 - protein, 89 aa, Glycine max
MYQLIKKQMHSISLNSEIQPILVLEKEEVEWLGLHAFVQVLKRKQSRHKELLAILRSRLSSHRMSERVSLELKYAINTKNSSLLWDIKY

SEQ ID NO: 20543 - protein, 81 aa, Glycine max
NLKGKLRLFLRPKCHPIFFDSNINSAAVVRLNIYQIFLLCAMKFHCYIRDLSFICKLHKRYCSNIIQISLRYECNMILPLN

SEQ ID NO: 20544 - protein, 81 aa, Glycine max
MHSISLNSEIQPILVLEKEEVEWLGLHAFVQVLKRKQSRHKELLAILRSRLSSHRMSERVSLELKYAINTKNSSLLWDIKY

SEQ ID NO: 20545 - DNA, 1229 bp, Glycine max
acactacagccacttctatagcttcatttaagaatggcactttctcctattcgttcttctactttctcttcatcatcagctattgttacattagctgtgttacttcttcttacaaggacctcttcagctaccctctcaaagaacttctattctaagacatgtccaaacgttttcaacacggtaaaatctgtagtaaaatctgctgtggccaaagaacctcgcattggagcttctattgttcgcctcttcttccatgactgctttgttcaaggttgtgatggaccaatactacttgatgacactccaaccttccagggggagaagactgcagctgctaacaacaattcagtgagaggttatgaattaatcgatgatatcaagtctaaggtcgagaaaatatgccccggtgtggtctcatgtgctgatatcttggacattgcttctcgtgactctgttgttcttcttggaggaccattttggaatgttagacttggaagaagggattctagaagtgccaatttcactgctgcaaacactggtgttattccacctcccacatctaacctcaccaaccttatcacaaggtttcaagatcaaggactctctgctagggacatggttgccttatctggagctcacacatttggcaaagcaaggtgtactagtttcagagatcgcatatacaatcaaaccaacattgacagaacatttgcattggccaggcagaggaggtgccctaggaccaatggcacaggtgacaacaatctagcaaatctagacttcagaactccaaatcattttgacaacaactacttcaaaaaccttctcattaaaaggggactcctcaattctgatcaagtgcttttcaatggtggatccactgattcactggtcagaacatacagccagaataacaaggcctttgattctgactttgttaaagcaatgattaggatgggagatatcaaacccttaactgggtcacaaggggagattaggaagaactgcaggagagtgaattaattagaagtgacacataaatttgtttggtgtacactttgtacccttcaaaagggggaagttgtttggtgtgttgggttgtttaagtgatttctcatgacttggaaattgtgaattgtttgtttagttcagtttaaattgtacttgtgtaaccttataattgtattatggaataaattataaggcattttgccttttgtaccaaaaat

SEQ ID NO: 20546 - protein, 329 aa, Glycine max
MALSPIRSSTFSSSSAIVTLAVLLLLTRTSSATLSKNFYSKTCPNVFNTVKSVVKSAVAKEPRIGASIVRLFFHDCFVQGCDGPILLDDTPTFQGEKTAAANNNSVRGYELIDDIKSKVEKICPGVVSCADILDIASRDSVVLLGGPFWNVRLGRRDSRSANFTAANTGVIPPPTSNLTNLITRFQDQGLSARDMVALSGAHTFGKARCTSFRDRIYNQTNIDRTFALARQRRCPRTNGTGDNNLANLDFRTPNHFDNNYFKNLLIKRGLLNSDQVLFNGGSTDSLVRTYSQNNKAFDSDFVKAMIRMGDIKPLTGSQGEIRKNCRRVN

SEQ ID NO: 20547 - DNA, 1523 bp, Glycine max
aatcataataaccagaaccaccttgccgaccagcttaagaacatgcaaattaacaaccatcccaaaagtggtggtggtggtggaaaccacaacaacaaaggtcagaatcagaaccaacccaaaggtggtggtggtggtggaaatagccaagccaagggtggtggtggtggtggtcaacaacaaggaccaactcctcaacaacaacttcagctgcagctccaacagcagcaacggcttcagcaacagctgcaacaacttcagcaggtgaaagggcttcaagatctgaaccttcctcaattcaaggacctgaaacttccccctcacaatcccaaccccaacgccaaagccgttaagtttgatatcccagaggaagatgacgactacaccgacgacgaattggacgattttgatgacgatgatgacgacttcgacgacgagtttgatgatgatgaaatggacgaccttcctccgagtaaaatgaaaccaccgcccatgatgatggatgctcctcccaaggctgccaacaatggcggtggtggaggcaataacgggagaaaaggaggaggtcctgttcctgttcaagtgcatggaatccccggcaatggaggaggaaagaaaggtggtggtggtggtggtggaaacaatcagaatcaaggtggaggtaacaaaaacaatggtggtaaaagtggaggtggtgccccggagggtaaacatggtggtggaggaaacagaatggtaacggtaacaacaacaacaacaacgggggtaaaaaagtcaatccaatgggtggagttggggttcaacctatgaacggtggattccaaaacatgggtggtggtccccacgttatgtctgggcctaatgtggggcccatgagcatgcctatgcccaacattcccgccgttcaagggcttccggccggccccgtcaacggcggtgggttcttccaaggcgcaggtccggatgcgatgcccggtaaccctttccagcagcagcagcagcagcaacaacaacaacagttacagcaacagtacatggctgctgcgatgatgaaccaacaacgcgcaatgggtaacgacagattccagccaatgatgtacgcgcggccccctcctgccgtcaattatatgtatcctccttacccttatcctcctccagacccttacacccactttttcagcgatgaaaacacctcaagctgcaatgttatgtgatcgatggtggcggtgcgagcttctgatttcagatcttctaatattattattattataccaatgcaaatgagtttttaatttgtagtatcattttccatttttctttcatcccttttattcctcttaagttaaaattaggggttttagttcaccataggggactagtttatagattttataatactatcattattattattactataagattttgagtagtagaggtagtagtagtactgtgataaggtaatatgtctatatgtgtttatatgttgcaaacagaaataaaaaaaattgtttcagaacagt

SEQ ID NO: 20548 - protein, 269 aa, Glycine max
NHNNQNHLADQLKNMQINNHPKSGGGGGNHNNKGQNQNQPKGGGGGGNSQAKGGGGGGQQQGPTPQQQLQLQLQQQQRLQQQLQQLQQVKGLQDLNLPQFKDLKLPPHNPNPNAKAVKFDIPEEDDDYTDDELDDFDDDDDDFDDEFDDDEMDDLPPSKMKPPPMMMDAPPKAANNGGGGGNNGRKGGGPVPVQVHGIPGNGGGKKGGGGGGGNNQNQGGGNKNNGGKSGGGAPEGKHGGGGNRMVTVTTTTTTGVKKSIQWVELGFNL

SEQ ID NO: 20549 - protein, 255 aa, Glycine max
MQINNHPKSGGGGGNHNNKGQNQNQPKGGGGGGNSQAKGGGGGGQQQGPTPQQQLQLQLQQQQRLQQQLQQLQQVKGLQDLNLPQFKDLKLPPHNPNPNAKAVKFDIPEEDDDYTDDELDDFDDDDDDFDDEFDDDEMDDLPPSKMKPPPMMMDAPPKAANNGGGGGNNGRKGGGPVPVQVHGIPGNGGGKKGGGGGGGNNQNQGGGNKNNGGKSGGGAPEGKHGGGGNRMVTVTTTTTTGVKKSIQWVELGFNL

SEQ ID NO: 20550 - protein, 143 aa, Glycine max
MGGVGVQPMNGGFQNMGGGPHVMSGPNVGPMSMPMPNIPAVQGLPAGPVNGGGFFQGAGPDAMPGNPFQQQQQQQQQQQLQQQYMAAAMMNQQRAMGNDRFQPMMYARPPPAVNYMYPPYPYPPPDPYTHFFSDENTSSCNVM

SEQ ID NO: 20551 - DNA, 1796 bp, Glycine max
ttttttcctccatttttcgcctcaatcgcacttctctaccttcgatagtaacagtaatctcgaattttaattccgaatatggaatcgagaactaagagtaatccccaattaactagagctctatgctatggaaacgatggcaagcagcagggaaggtcaccatccgttattgtcattggcggtggcatggctgggattgctgctgctcgtgcactccataatgcttcgtttcaggttgttctcttagagtcaagggatagaattggtggccgaattcacactgattactcatttggttttcctgttgacctgggagcatcatggttgcatggagtttccaacgagaatccgctggcttcggtgattgggaggctaggtctacctctttaccgtactagtggggataactccgtactctatgaccatgatttggaaagctatgcactttttgatatggatgggaaacaagttcctccagagttggtaacaaaagttggtgaaatatttgagacaattttacaggagacagataaaataagacaagaatccagtgaagacatgtctgtacttcgtggtctttccattgtttttgacaggaagccggaattgaggttggaggggcttgcgcataaggtgcttcagtggtacttatgcagaatggagggctggtttgctgcagattctgatactatttcactgaaaggatgggaccaggaggtgctgctccctggtggtcatggtcttatggtccgtggttacttgcctgttataaataccctagccaagggacttgatattctcttggggcacagggtcacaaaagtagttaggcgatataatggagtaaaggtaacagtggaaagtgggaaaacgttttttgctgatgctgctgttattgctgtcccacttggggtgctcaaggcaaagaaaatattgtttaagccaaagcttccagactggaaggaagctgccattgcggatcttgggattggacttgagaataaaatcattttacactttgaaaatgtgttttggcctaatgtggagttcttgggagtagttgcagatacatcttatggatgtagctacttccttaatctccacaaggccgccggtcatgctgttctggtttacatgccttctgggcagcttgccaaagacgttgaaaagatgtctgatgaagcagccgtcaacttcgctttcatgcagctcaagaagattcttccagatgcttcttcaccgattcagtatcttgtgtctcggtggggatcagatataaattcactaggttcatatagctacgatgcagttgggaaaccccatgaactatatgagaggctacgggtcccagtagataacttgttctttgcaggggaagcaacgagtatgagctatccaggatctgtccatggggcattctccactggaatgatggccgctgaagattgccggatgcgtgtgctcgagcgatatggagaggttgatttattccagccagtgatgggagaagaggcttccttgtctatcccacttcagatatctcgtctgtaatcatctttgggtcacaactagtggacagaaacagaatctatgcttgttcttttgttatcaacctataggctatatatagcaaatgttttggcaatagtcttcaagactatgtgtccacttgtgaaatcacattttgtgttgcatttccgtagtcagtgttactggtaatgtgaatattgcgtacctaaggccttgtcacttctatcagtctatatataataaaattgtggcaacaatttatgttc

SEQ ID NO: 20552 - protein, 490 aa, Glycine max
MESRTKSNPQLTRALCYGNDGKQQGRSPSVIVIGGGMAGIAAARALHNASFQVVLLESRDRIGGRIHTDYSFGFPVDLGASWLHGVSNENPLASVIGRLGLPLYRTSGDNSVLYDHDLESYALFDMDGKQVPPELVTKVGEIFETILQETDKIRQESSEDMSVLRGLSIVFDRKPELRLEGLAHKVLQWYLCRMEGWFAADSDTISLKGWDQEVLLPGGHGLMVRGYLPVINTLAKGLDILLGHRVTKVVRRYNGVKVTVESGKTFFADAAVIAVPLGVLKAKKILFKPKLPDWKEAAIADLGIGLENKIILHFENVFWPNVEFLGVVADTSYGCSYFLNLHKAAGHAVLVYMPSGQLAKDVEKMSDEAAVNFAFMQLKKILPDASSPIQYLVSRWGSDINSLGSYSYDAVGKPHELYERLRVPVDNLFFAGEATSMSYPGSVHGAFSTGMMAAEDCRMRVLERYGEVDLFQPVMGEEASLSIPLQISRL

SEQ ID NO: 20553 - protein, 454 aa, Glycine max
MAGIAAARALHNASFQVVLLESRDRIGGRIHTDYSFGFPVDLGASWLHGVSNENPLASVIGRLGLPLYRTSGDNSVLYDHDLESYALFDMDGKQVPPELVTKVGEIFETILQETDKIRQESSEDMSVLRGLSIVFDRKPELRLEGLAHKVLQWYLCRMEGWFAADSDTISLKGWDQEVLLPGGHGLMVRGYLPVINTLAKGLDILLGHRVTKVVRRYNGVKVTVESGKTFFADAAVIAVPLGVLKAKKILFKPKLPDWKEAAIADLGIGLENKIILHFENVFWPNVEFLGVVADTSYGCSYFLNLHKAAGHAVLVYMPSGQLAKDVEKMSDEAAVNFAFMQLKKILPDASSPIQYLVSRWGSDINSLGSYSYDAVGKPHELYERLRVPVDNLFFAGEATSMSYPGSVHGAFSTGMMAAEDCRMRVLERYGEVDLFQPVMGEEASLSIPLQISRL

SEQ ID NO: 20554 - protein, 365 aa, Glycine max
MDGKQVPPELVTKVGEIFETILQETDKIRQESSEDMSVLRGLSIVFDRKPELRLEGLAHKVLQWYLCRMEGWFAADSDTISLKGWDQEVLLPGGHGLMVRGYLPVINTLAKGLDILLGHRVTKVVRRYNGVKVTVESGKTFFADAAVIAVPLGVLKAKKILFKPKLPDWKEAAIADLGIGLENKIILHFENVFWPNVEFLGVVADTSYGCSYFLNLHKAAGHAVLVYMPSGQLAKDVEKMSDEAAVNFAFMQLKKILPDASSPIQYLVSRWGSDINSLGSYSYDAVGKPHELYERLRVPVDNLFFAGEATSMSYPGSVHGAFSTGMMAAEDCRMRVLERYGEVDLFQPVMGEEASLSIPLQISRL

SEQ ID NO: 20555 - DNA, 1329 bp, Glycine max
ttgtccagcttcattatcagctaccaatacagatctttctctctcattgtcttcaaaaatcaagccttctacggaatctgtctgcagtaataatgaagcacctaatagtagttatatgggaataccgtataataatattaagtccccaaggcagtggataccacaggatggaaaggatgagatgcttttaaaactgtttccaagggttcaggagctgcaaaatcagcttcaagaatggacagagtgggccaatcagaaggttatgcaagctgcttgtcgtctgagtaaggaaaaggctgagcttcagacactaaggcaagagaaagaggaagttgaacgtctaaaaaaagagaagcaatctctagaggaaaataccttgaagaagctttctgagatggaaaatgccctgtgtaaagttagtgggcaggtagagcgagctaatgccgctgtccggaagctcgaagtggagaaggctgcattgaggaaagagatggaggctgctaagatacatgccacagaaaccgctgcaagctgtcaagaggtctcaaggagggaaaagaaggcacaaataaagtttcagtcatgggaaaagcagaaatccttctttaaggaagagctaacgattgaaaaacaaaaattggctcagctgctgcatgaattagaacaagctagagtgcaacaggagcaagttgagggtagatggcagcaggaagcaaaggcaaaggaagaacttatcctgcaggccagttctataagaaaggaaagagaacaaattgaggaatcaggaaagtccaaggaggatgcgatcaaattaaaagcagagaggaatctgcaaagttacagagacgacatccaaaaacttgaaaaggaaatttcccaactaagactgaagactgactcttcaaaaattgctacactgaggatgggcattgatggatgctatgccagaaaattcttggacataaaaaatggcactgctcagaaggaaccctgggcttctttcatctcagaactagtcattgaccactcagcaactggcagtgtaaaacgggaacgagaatgtgtgatgtgtctttcagaggagatgtctgttgtattcctcccatgtgctcatcaggttgtttgcacaccatgtaatgagctccatgagaagcaaggtatgcaagattgtccttcttgcaggagccctatccaacagcgtattgctgtgcgctttccacgctattgatttatttatttgcttgagtgagttaggcattttttaataataataataataatgtctatgggattcatgctatgaataatgcattcatgtcatgcttcttg

SEQ ID NO: 20556 - protein, 408 aa, Glycine max
CPASLSATNTDLSLSLSSKIKPSTESVCSNNEAPNSSYMGIPYNNIKSPRQWIPQDGKDEMLLKLFPRVQELQNQLQEWTEWANQKVMQAACRLSKEKAELQTLRQEKEEVERLKKEKQSLEENTLKKLSEMENALCKVSGQVERANAAVRKLEVEKAALRKEMEAAKIHATETAASCQEVSRREKKAQIKFQSWEKQKSFFKEELTIEKQKLAQLLHELEQARVQQEQVEGRWQQEAKAKEELILQASSIRKEREQIEESGKSKEDAIKLKAERNLQSYRDDIQKLEKEISQLRLKTDSSKIATLRMGIDGCYARKFLDIKNGTAQKEPWASFISELVIDHSATGSVKRERECVMCLSEEMSVVFLPCAHQVVCTPCNELHEKQGMQDCPSCRSPIQQRIAVRFPRY

SEQ ID NO: 20557 - protein, 370 aa, Glycine max
MGIPYNNIKSPRQWIPQDGKDEMLLKLFPRVQELQNQLQEWTEWANQKVMQAACRLSKEKAELQTLRQEKEEVERLKKEKQSLEENTLKKLSEMENALCKVSGQVERANAAVRKLEVEKAALRKEMEAAKIHATETAASCQEVSRREKKAQIKFQSWEKQKSFFKEELTIEKQKLAQLLHELEQARVQQEQVEGRWQQEAKAKEELILQASSIRKEREQIEESGKSKEDAIKLKAERNLQSYRDDIQKLEKEISQLRLKTDSSKIATLRMGIDGCYARKFLDIKNGTAQKEPWASFISELVIDHSATGSVKRERECVMCLSEEMSVVFLPCAHQVVCTPCNELHEKQGMQDCPSCRSPIQQRIAVRFPRY

SEQ ID NO: 20558 - protein, 348 aa, Glycine max
MLLKLFPRVQELQNQLQEWTEWANQKVMQAACRLSKEKAELQTLRQEKEEVERLKKEKQSLEENTLKKLSEMENALCKVSGQVERANAAVRKLEVEKAALRKEMEAAKIHATETAASCQEVSRREKKAQIKFQSWEKQKSFFKEELTIEKQKLAQLLHELEQARVQQEQVEGRWQQEAKAKEELILQASSIRKEREQIEESGKSKEDAIKLKAERNLQSYRDDIQKLEKEISQLRLKTDSSKIATLRMGIDGCYARKFLDIKNGTAQKEPWASFISELVIDHSATGSVKRERECVMCLSEEMSVVFLPCAHQVVCTPCNELHEKQGMQDCPSCRSPIQQRIAVRFPRY

SEQ ID NO: 20559 - DNA, 1315 bp, Glycine max
gaacaactgaagtaagaaagagagagagagagagaaagagaagtgtgtagttggtgaagtttttgagaagaatatggaacgaagtggcggaatggtaacggggtcgcatgaaaggaacgaacttgttagagttagacacggttctgacagtgggtctaaacccttgaagaatttaaatggtcagatttgtcaaatatgtggtgacaccattggattaacggctactggtgacctctttgttgcttgtcatgagtgtggcttcccactttgtcattcttgttacgagtatgagctgaaaaatgtgagccaatcttgtccccagtgcaagactacattcacaagtcgccaagagggtgctgaagtggagggagatgatgatgacgaagacgatgctgatgatctagataatgggatcaactatggccaaggaaacaattccaagtcggggatgctgtgggaagaagatgctgacctctcttcatcttctggacatgattctcatataccaaacccccatctagtaaacgggcaaccgatgtctggtgagtttccatgtgctacttctgatgctcaatctatgcaaactacatcagatcctatgggtcaatccgaaaaggttcactcacttccatatgctgatccaaagcaaccaggtcctgagagtgatgaagagataagaagagtgccggagattggaggtgaaagcgctggaacttcagcctctcggccagatgccggttcaaatgctggtacagaacgtgctcaggggacaggggacagccagaagaagagagggagaagcccagctgataaagaaagcaagcggctaaagaggctactgaggaatagagtttcggctcagcaagcaagggagaggaagaaggcatatttgattgatttggaaacaagagtcaaagacttagagaagaagaactcagagctcaaagaaagactttccactttgcagaatgaaaaccaaatgcttagacaaatattgaagaacacaacagcaagcaggagagggagcaatagtggtaccaataatgctgagtaaacttatagatggagtagatatagagagagagaaagagaaaaaaattaaacattagttgatgattctttctaggtgtgcgtttggaatacaatgaagtaaaggatgaaccttaagacatgctttgtcctaaaatagtgtgatctgatgtaccattgttgatgagtaatgtaattatcatacacagttttttacagtctcattttaattaataattatcaaactacttgattacttatggttaacaccatttggtgaggagac

SEQ ID NO: 20560 - protein, 326 aa, Glycine max
MERSGGMVTGSHERNELVRVRHGSDSGSKPLKNLNGQICQICGDTIGLTATGDLFVACHECGFPLCHSCYEYELKNVSQSCPQCKTTFTSRQEGAEVEGDDDDEDDADDLDNGINYGQGNNSKSGMLWEEDADLSSSSGHDSHIPNPHLVNGQPMSGEFPCATSDAQSMQTTSDPMGQSEKVHSLPYADPKQPGPESDEEIRRVPEIGGESAGTSASRPDAGSNAGTERAQGTGDSQKKRGRSPADKESKRLKRLLRNRVSAQQARERKKAYLIDLETRVKDLEKKNSELKERLSTLQNENQMLRQILKNTTASRRGSNSGTNNAE

SEQ ID NO: 20561 - protein, 320 aa, Glycine max
MVTGSHERNELVRVRHGSDSGSKPLKNLNGQICQICGDTIGLTATGDLFVACHECGFPLCHSCYEYELKNVSQSCPQCKTTFTSRQEGAEVEGDDDDEDDADDLDNGINYGQGNNSKSGMLWEEDADLSSSSGHDSHIPNPHLVNGQPMSGEFPCATSDAQSMQTTSDPMGQSEKVHSLPYADPKQPGPESDEEIRRVPEIGGESAGTSASRPDAGSNAGTERAQGTGDSQKKRGRSPADKESKRLKRLLRNRVSAQQARERKKAYLIDLETRVKDLEKKNSELKERLSTLQNENQMLRQILKNTTASRRGSNSGTNNAE

SEQ ID NO: 20562 - protein, 201 aa, Glycine max
MLWEEDADLSSSSGHDSHIPNPHLVNGQPMSGEFPCATSDAQSMQTTSDPMGQSEKVHSLPYADPKQPGPESDEEIRRVPEIGGESAGTSASRPDAGSNAGTERAQGTGDSQKKRGRSPADKESKRLKRLLRNRVSAQQARERKKAYLIDLETRVKDLEKKNSELKERLSTLQNENQMLRQILKNTTASRRGSNSGTNNAE

SEQ ID NO: 20563 - DNA, 1484 bp, Glycine max
ggtaaaaatgaacatgatagtcctgatgctcaatgcatggaaaggctcattgtgagtgatacttcattgcctaaatctgctaccagtcattttgaaagcccagctatttcagagtcttcagacattgtggatgatgggcctgtgaacaagtcaaatggtacagagtgcagaaatacaaatccactaccaggtgcccagaaagacataaaagaagatgaagtctatattaatatcaaactaaatgaagaatataacaagtctgttgatgttgatactcctaccgagtcacatcaagcagaagatgctggactattagtgaaggctgcagaagaccttgctagggagtatacatctcctttaactactgaaccttctgctcagcctgacagggaagtgtccggacttactgctgtgcctgttcaagatcaagctggtaataacttgggtaaacttggttcatccagagttgatgcttcagttgagtcaggtagccggtgtgacagtttggaaggcatctggggctctgtttcagttctgtcaattcaatccgatgcaccagctgttattgatgctgaaaccttgccatcaactggcttgctggcatcaacagaagcagggaaatcaaacttcaacgactcaaaagctacacctgacagacagcagtctggaaaatcagaaatgtttgaagcaccatctttcatgacattggttgatcctggtcaggttagcccaaaagccaatgcttctgaagtccagaagggacagaacacacaacagccagattccacttcacaggctgcttggtttcccactcttacacaagttgtcaatgagtctcaagggagaaagaagaatgaagaaataatagccaaggtgacaaactggagcactagtaaggagcacactcctcttaagagcctcttaggtgaggctgcccatagcagcaagccaagatctccaaaaatggaagaaaaatcagtgagtcagaagagtggtaaagttccggaaaagaatggttctgggttgacaactgttaactccattctgggtcctgaatcccctgtggctcaagtggtaaaaggagaggttgcaaaagaatggaactctccagcaagatatcctgctgatatcaagagagaaaaaaggaaagttaagagcagaccatactggatacaattggtatgctgcacatctgtcagtcctcagcgaaggtagaaaatcactaggttctgataatgcttccactctgatggattctggtcatagacatgctatttgcagtatttttctgtttttagtttgtctttgggtgcatattttgatcatgtgtcttctgttcattttggtagcctcctaggagtttggttgtatatgttgaccatcttcagttattatttatccctgcggtcatacatttttaccatacatagtaacgtatcattattttggcctggacccatattttagtccggtcttagttcttg

SEQ ID NO: 20564 - protein, 404 aa, Glycine max
GKNEHDSPDAQCMERLIVSDTSLPKSATSHFESPAISESSDIVDDGPVNKSNGTECRNTNPLPGAQKDIKEDEVYINIKLNEEYNKSVDVDTPTESHQAEDAGLLVKAAEDLAREYTSPLTTEPSAQPDREVSGLTAVPVQDQAGNNLGKLGSSRVDASVESGSRCDSLEGIWGSVSVLSIQSDAPAVIDAETLPSTGLLASTEAGKSNFNDSKATPDRQQSGKSEMFEAPSFMTLVDPGQVSPKANASEVQKGQNTQQPDSTSQAAWFPTLTQVVNESQGRKKNEEIIAKVTNWSTSKEHTPLKSLLGEAAHSSKPRSPKMEEKSVSQKSGKVPEKNGSGLTTVNSILGPESPVAQVVKGEVAKEWNSPARYPADIKREKRKVKSRPYWIQLVCCTSVSPQRR

SEQ ID NO: 20565 - protein, 392 aa, Glycine max
MERLIVSDTSLPKSATSHFESPAISESSDIVDDGPVNKSNGTECRNTNPLPGAQKDIKEDEVYINIKLNEEYNKSVDVDTPTESHQAEDAGLLVKAAEDLAREYTSPLTTEPSAQPDREVSGLTAVPVQDQAGNNLGKLGSSRVDASVESGSRCDSLEGIWGSVSVLSIQSDAPAVIDAETLPSTGLLASTEAGKSNFNDSKATPDRQQSGKSEMFEAPSFMTLVDPGQVSPKANASEVQKGQNTQQPDSTSQAAWFPTLTQVVNESQGRKKNEEIIAKVTNWSTSKEHTPLKSLLGEAAHSSKPRSPKMEEKSVSQKSGKVPEKNGSGLTTVNSILGPESPVAQVVKGEVAKEWNSPARYPADIKREKRKVKSRPYWIQLVCCTSVSPQRR

SEQ ID NO: 20566 - DNA, 1346 bp, Glycine max
gaaatgagtttcttcgatttcatcgtgttgatgatagggtcgctctttctgttcaaagctttcgattttactttctgtgtctttcttctgcttcttttgattcccccaaatcttcagttttaaaaaccctaatctgctgccatgaggaagaagctcgatacccgtttccctgctgctcggataaagaagataatgcaggcagatgaggatgttggaaagatagcactggctgtgcctgttttagtttctaaagctctagaactatttttgcaagatctttgtgaccgcacttatgaaataactcttcaaagaggagcgaagaccatgaattcattgcatttaaaacattgtgtacaaagctataatgtctttgactttctgagggacgttgttagcagggttcctgactacggccatggccatggccatgctgaggctggtcctgatgatcgggtcattacaaaaagaaggaaagctattggtgatgatggtaatgacagcgatgaagaggctaagaggagcaagatgcttgagttgggccacactggcagtactggtaggggaagaggccgaggtagaggaagaggccgtggccgagggcgaccacctttaaatagagagacatatcatcaagatgctgaatctgagccttgcacttctgttcagccgagcaacccacaaaatacaaacacaagtatagcaatggataatggttctgagtcaaaggagataccaaaggaggagaatattgcagctcccgttgttcctgttgtaagcacggattccctccggaacattgatctgaatgccatcacgaatgaaaacgatgacaaaaaggctagtgcagaagctgatgcctccgcctcggtgcctgaacctgatgcctcattgcctgaacccccaacagagagcaagcatgaagaaattccggggtggtcactttctgatgtggacaagatggccattgattcactgcagcttgcacaacttggtaggccactagaagaggaggaggaagactatgatgaagaggaggggtaaatattattagtctttggtgattagattagtgaaaagttcatcatgataactgtagaataagtacatactagtgttatgattatgagtatccactagctgtcaatgcatgtaccatgttgttggctgaagaaagatctgaatgccccttttcattaatctggtttgtatgtggagctgatttatcttccccttgaccagtaatgttagcttcgtgtacttttaggcctacaatgtatatcacaattctagattgagttaaatttttgcatgcaaactttgtttaatattgctgcaaataactatac

SEQ ID NO: 20567 - protein, 299 aa, Glycine max
MRKKLDTRFPAARIKKIMQADEDVGKIALAVPVLVSKALELFLQDLCDRTYEITLQRGAKTMNSLHLKHCVQSYNVFDFLRDVVSRVPDYGHGHGHAEAGPDDRVITKRRKAIGDDGNDSDEEAKRSKMLELGHTGSTGRGRGRGRGRGRGRGRPPLNRETYHQDAESEPCTSVQPSNPQNTNTSIAMDNGSESKEIPKEENIAAPVVPVVSTDSLRNIDLNAITNENDDKKASAEADASASVPEPDASLPEPPTESKHEEIPGWSLSDVDKMAIDSLQLAQLGRPLEEEEEDYDEEEG

SEQ ID NO: 20568 - protein, 282 aa, Glycine max
MQADEDVGKIALAVPVLVSKALELFLQDLCDRTYEITLQRGAKTMNSLHLKHCVQSYNVFDFLRDVVSRVPDYGHGHGHAEAGPDDRVITKRRKAIGDDGNDSDEEAKRSKMLELGHTGSTGRGRGRGRGRGRGRGRPPLNRETYHQDAESEPCTSVQPSNPQNTNTSIAMDNGSESKEIPKEENIAAPVVPVVSTDSLRNIDLNAITNENDDKKASAEADASASVPEPDASLPEPPTESKHEEIPGWSLSDVDKMAIDSLQLAQLGRPLEEEEEDYDEEEG

SEQ ID NO: 20569 - protein, 238 aa, Glycine max
MNSLHLKHCVQSYNVFDFLRDVVSRVPDYGHGHGHAEAGPDDRVITKRRKAIGDDGNDSDEEAKRSKMLELGHTGSTGRGRGRGRGRGRGRGRPPLNRETYHQDAESEPCTSVQPSNPQNTNTSIAMDNGSESKEIPKEENIAAPVVPVVSTDSLRNIDLNAITNENDDKKASAEADASASVPEPDASLPEPPTESKHEEIPGWSLSDVDKMAIDSLQLAQLGRPLEEEEEDYDEEEG

SEQ ID NO: 20570 - DNA, 1372 bp, Glycine max
gggaagctcaatttcccataggcatctatctccatactctgacagacacacaaaatttgagagaaaaaaaaccatcatcacaagagagtcacatgagaattgaaatggccacaaaacaagttacttctatggttcatgtagatgatgactacattgacatggaactatgttcctccccaaacttcttctcttattcccttagctctccaccatccaacagagagtttgaattccaaatgagtgaaaaagagtcatcaacttctccagctgatgatctcttctacaagggaaaactccttcctcttcaccttccccctcgtttgcaaatggttcaaaagctcgtagaaaactccaccaatgccaactttgagtacatcaaatcagattcagctttggaacacagaacctttcccttcaccactgaccttagagtgccttcaacaaatgccaacaccccttttgaatccaacatctctccttcagaatcacgccgtgtgagcagtgatgtgagcccaaatgaataccaactggggtggttttctgacatgaacaagtacaaccttattggtgatcttcctaagaagtcttggcccaagaaactgaaacagatgaagcagttctggcttggtcagagactcaaggcctcaagggcttacctgaaaactttattcaacaaatctggttgctcagacaagttctgcgccagtgctgcagcaagcaacaacattggagcggagaagaagtcatcaaggtgcaaagagtgtcagaacaagtacatgaaggttgcaaggagaaacccttttgagagtttctatgatggcaagcaccaggtaacttgttctatcatgaagagcatcaaaagagagatgcttgaagttgaagatgatttctgtgaccacaggaggtctttctctggggttggtcagcgacattgttccacaaaggcttcatctttgtccacatcttcatccgggtcctcttcttcgtcttcatctttttctttcagctcagctgggtactatgatttgcaacttttcaagaggagcatcagcgcgaattatgagttggaaagttcaattgagggagccattgctcattgcaaacagtctctgcagcagtgtggttcaaagaatggttcggatgatagcaggatttgttcttaatttgctaccaaaatgcaattggtgggaattagtgaatggccacactagccaacaccatagtgtgtgtgggtgtgtagaggggtgatagtgttgactgttgaaaaaaccttgtaagagaagaaagaggcatttttagttgaaatgctgtagcattttgatggagtttactgtttaaattaatagcttgggttttccagcattaatttgtc

SEQ ID NO: 20571 - protein, 386 aa, Glycine max
EAQFPIGIYLHTLTDTQNLREKKPSSQESHMRIEMATKQVTSMVHVDDDYIDMELCSSPNFFSYSLSSPPSNREFEFQMSEKESSTSPADDLFYKGKLLPLHLPPRLQMVQKLVENSTNANFEYIKSDSALEHRTFPFTTDLRVPSTNANTPFESNISPSESRRVSSDVSPNEYQLGWFSDMNKYNLIGDLPKKSWPKKLKQMKQFWLGQRLKASRAYLKTLFNKSGCSDKFCASAAASNNIGAEKKSSRCKECQNKYMKVARRNPFESFYDGKHQVTCSIMKSIKREMLEVEDDFCDHRRSFSGVGQRHCSTKASSLSTSSSGSSSSSSSFSFSSAGYYDLQLFKRSISANYELESSIEGAIAHCKQSLQQCGSKNGSDDSRICS

SEQ ID NO: 20572 - protein, 356 aa, Glycine max
MRIEMATKQVTSMVHVDDDYIDMELCSSPNFFSYSLSSPPSNREFEFQMSEKESSTSPADDLFYKGKLLPLHLPPRLQMVQKLVENSTNANFEYIKSDSALEHRTFPFTTDLRVPSTNANTPFESNISPSESRRVSSDVSPNEYQLGWFSDMNKYNLIGDLPKKSWPKKLKQMKQFWLGQRLKASRAYLKTLFNKSGCSDKFCASAAASNNIGAEKKSSRCKECQNKYMKVARRNPFESFYDGKHQVTCSIMKSIKREMLEVEDDFCDHRRSFSGVGQRHCSTKASSLSTSSSGSSSSSSSFSFSSAGYYDLQLFKRSISANYELESSIEGAIAHCKQSLQQCGSKNGSDDSRICS

SEQ ID NO: 20573 - protein, 352 aa, Glycine max
MATKQVTSMVHVDDDYIDMELCSSPNFFSYSLSSPPSNREFEFQMSEKESSTSPADDLFYKGKLLPLHLPPRLQMVQKLVENSTNANFEYIKSDSALEHRTFPFTTDLRVPSTNANTPFESNISPSESRRVSSDVSPNEYQLGWFSDMNKYNLIGDLPKKSWPKKLKQMKQFWLGQRLKASRAYLKTLFNKSGCSDKFCASAAASNNIGAEKKSSRCKECQNKYMKVARRNPFESFYDGKHQVTCSIMKSIKREMLEVEDDFCDHRRSFSGVGQRHCSTKASSLSTSSSGSSSSSSSFSFSSAGYYDLQLFKRSISANYELESSIEGAIAHCKQSLQQCGSKNGSDDSRICS

SEQ ID NO: 20574 - DNA, 1548 bp, Glycine max
gaagacgaagggtttggcttagacttagatggagtcgcgtggacactcaaacccgcttctgtcattttccagcttcatccatcaacactgcgtccgcttagggtccgacctcgcgactcgtttggatgacacgaagcgagccctagctcaatctcatcataatcttgtcttccccaaacacgccctcgcccacgccgccactgctaccctgggctcccagcacgtggctaagtccctcgtcggcacctccgttttcaccgtcagcaattccaacaatgagttcgttcttatctccgaccccgacggtgccaagtccattggattgctttgctttcgccaagaggacgccgaagcctttctcgctcaggttcgatcacggagtagagagcttcgaagcaaggctagggttgttccaattactctcgaccaggtatacatgttgaaggttgaaggcattgccttccgattcttacctgatcctgttcaaataaggaatgctttggagcttaaaccagtcaacaagggaggttttgatggagttcctgtttttcagtcggagcttttggttgtgaagaagaggaataagcgttactgccctgtgtatttctctaaggaggatattgagcaggaactgtccaaagtttccagggcatcaagaggacctggtgtttctcagcatatagcggtctagaatctaccatctctttctctttatttaatacttttgacaaatcaatgtatttgtcaaagctgcatactagtttcacaatttttctaatccccaaaagcagtagcatattttattgaaccctcagatagttaatttgtgttgcatatgctttatgcaagacttatcttggataaaaataaacatttaactacctgtatgatcaacatgaaaacttactgaacatttggttgaatcatagtggtttgtgtagtatatcttattgatatttgataaccatgagataaatttattttaaggcagtgattaaggtaagaaatgcttgtgctatttaaatttttctttgaaccaaactatatggctgtggaaacaattatgctaatggaataattagttttcgttctataaatgatttgctttttgttgatgtctttttcaattttcatgggaaacaaagcatctgttcaatggcaatgtggaaatagaaatctaagggatttttttatcaaagaaaatatttttgttctcatttttttgttttcactagtaactatgaaaatgctatgttgtttttattatattccctgtttgcaaaaatttactataggaaatgatgaaaggttaggtgaagatcaaagatttgtattcaccgatttttgtatatatctttgaaaacagttgaccaagtgaaaacaaagtaactattgtaattcttagtgaaaataagaaaagaaaacaaagaacattttttcaaaccaaacagagacttaaattctatccatgttcaattaagctcacgtaactcttgtaatctgtcttccatgaaaaaggttagaggaaaagggagaaacttttttttc

SEQ ID NO: 20575 - protein, 220 aa, Glycine max
MESRGHSNPLLSFSSFIHQHCVRLGSDLATRLDDTKRALAQSHHNLVFPKHALAHAATATLGSQHVAKSLVGTSVFTVSNSNNEFVLISDPDGAKSIGLLCFRQEDAEAFLAQVRSRSRELRSKARVVPITLDQVYMLKVEGIAFRFLPDPVQIRNALELKPVNKGGFDGVPVFQSELLVVKKRNKRYCPVYFSKEDIEQELSKVSRASRGPGVSQHIAV

SEQ ID NO: 20576 - DNA, 1854 bp, Glycine max
gactattcaattatcttcaggaagcaggtttagtttccaccttctgcaatggcttgtattagaatccaaagaggctcttcatcacacacgaagaattttgatgtgtttgtgagctttagaggtctggatactcgtaatagtttcactgatcatctttttgctgctcttcaaaggaaaggcatttttgctttcagggataaccaaaatatcaacaaaggggaactcttggagcctgagctcttgcaggcaatcgaaggatcacatgttttcattgttgtcttctcaaaagactatgcatcatccacatggtgcttgaaagagctgagaaagatttttgatggggttgaagaaacagggcgaagtgtactccctattttctatgatgtcactccttctgaggtccggaaacagagtggaaagtttggaaaagcttttgctgaacacgaagaaaggttcaaagatgaattggaaatggtaaaaaaatggagggaagctctcaaagcaattggcaatcgtagtggttgggatgtacaaaataagccagaacatgaagaaattgaaaaaattgttgaagaagtaatgaacctactgggtcataatcaaattcatagtcaaatttggagtttctctggtgatttagttgatatggactctcgtgtgaaacaattggaagagcttctagatttgagcacaaatgatgttgttcgcgttgtgggaatttgggggatgagtggagtaggaaagacaacacttgttactgctttgtttggtaaaatctctcctcaatatgatgctcgttgttttattgatgatttaaacaaaaaatgtgggaattttggagcaataagtgcacaaaaacaacttctttctctagctctacatcaaggaaatatggagatacacaatctttcccacggaaccatgttgataagaactaggctatgtcacttaaagacacttattgttctggataatgttgatcaggttgaacaattagagaatttggctttgcatcgtgaatatttaggtgaagggagtagaatcatcataatctctacaaatatgcatatcttaagaaattatggagtagatggagtttacaatgttcaactccttaataaggataaggctcttcaattactttgcaaaaaagctttcaaatctgatgatattgtgaaagggtatgaagaggtaacacatgatgtactgaagtatgtcaatggccttccactagcaatcaaagtattgggctcatttttgtttgatcgacatgtttttgagtggagaagtgcattaactagaatgaaagaaaatccaagtaaagatatcatggatgtgttgcgaataagttttgatggattggagacaatggaaaaagaaatatttttagatattgcttgtttcttttcaagtgatcaattccggggttatgacgggtggtttgaaacttctaagaaaattctaggctatcgaggattttatcccgaaattggtatgaaggttcttgttgaaaaatcactcataagttatcatagggggaaaatttgtatgcatgacttgttgaaagagttgggcaagactattgttcgagaaaagacacccaaggaacctagaaagtggagtaggttatgggactacaaggatctccaaaaagttatgatagaaaataaggaagccaaaaatcttgaagcgatagttattgatattgaaaaatatcaagaagagtttctacaacgaacaatgacagtagatgctctatcaaaactgattcatcttaaattactcatgtttaagaatgtgaatttttcaggaatcctcaattatctttctaatgaaatgacgtatttatattgg

SEQ ID NO: 20577 - protein, 602 aa, Glycine max
MACIRIQRGSSSHTKNFDVFVSFRGLDTRNSFTDHLFAALQRKGIFAFRDNQNINKGELLEPELLQAIEGSHVFIVVFSKDYASSTWCLKELRKIFDGVEETGRSVLPIFYDVTPSEVRKQSGKFGKAFAEHEERFKDELEMVKKWREALKAIGNRSGWDVQNKPEHEEIEKIVEEVMNLLGHNQIHSQIWSFSGDLVDMDSRVKQLEELLDLSTNDVVRVVGIWGMSGVGKTTLVTALFGKISPQYDARCFIDDLNKKCGNFGAISAQKQLLSLALHQGNMEIHNLSHGTMLIRTRLCHLKTLIVLDNVDQVEQLENLALHREYLGEGSRIIIISTNMHILRNYGVDGVYNVQLLNKDKALQLLCKKAFKSDDIVKGYEEVTHDVLKYVNGLPLAIKVLGSFLFDRHVFEWRSALTRMKENPSKDIMDVLRISFDGLETMEKEIFLDIACFFSSDQFRGYDGWFETSKKILGYRGFYPEIGMKVLVEKSLISYHRGKICMHDLLKELGKTIVREKTPKEPRKWSRLWDYKDLQKVMIENKEAKNLEAIVIDIEKYQEEFLQRTMTVDALSKLIHLKLLMFKNVNFSGILNYLSNEMTYLYW

SEQ ID NO: 20578 - protein, 461 aa, Glycine max
MVKKWREALKAIGNRSGWDVQNKPEHEEIEKIVEEVMNLLGHNQIHSQIWSFSGDLVDMDSRVKQLEELLDLSTNDVVRVVGIWGMSGVGKTTLVTALFGKISPQYDARCFIDDLNKKCGNFGAISAQKQLLSLALHQGNMEIHNLSHGTMLIRTRLCHLKTLIVLDNVDQVEQLENLALHREYLGEGSRIIIISTNMHILRNYGVDGVYNVQLLNKDKALQLLCKKAFKSDDIVKGYEEVTHDVLKYVNGLPLAIKVLGSFLFDRHVFEWRSALTRMKENPSKDIMDVLRISFDGLETMEKEIFLDIACFFSSDQFRGYDGWFETSKKILGYRGFYPEIGMKVLVEKSLISYHRGKICMHDLLKELGKTIVREKTPKEPRKWSRLWDYKDLQKVMIENKEAKNLEAIVIDIEKYQEEFLQRTMTVDALSKLIHLKLLMFKNVNFSGILNYLSNEMTYLYW

SEQ ID NO: 20579 - protein, 425 aa, Glycine max
MNLLGHNQIHSQIWSFSGDLVDMDSRVKQLEELLDLSTNDVVRVVGIWGMSGVGKTTLVTALFGKISPQYDARCFIDDLNKKCGNFGAISAQKQLLSLALHQGNMEIHNLSHGTMLIRTRLCHLKTLIVLDNVDQVEQLENLALHREYLGEGSRIIIISTNMHILRNYGVDGVYNVQLLNKDKALQLLCKKAFKSDDIVKGYEEVTHDVLKYVNGLPLAIKVLGSFLFDRHVFEWRSALTRMKENPSKDIMDVLRISFDGLETMEKEIFLDIACFFSSDQFRGYDGWFETSKKILGYRGFYPEIGMKVLVEKSLISYHRGKICMHDLLKELGKTIVREKTPKEPRKWSRLWDYKDLQKVMIENKEAKNLEAIVIDIEKYQEEFLQRTMTVDALSKLIHLKLLMFKNVNFSGILNYLSNEMTYLYW

SEQ ID NO: 20580 - DNA, 1490 bp, Glycine max
agtgttgccaataatcttttgacagggcaagttccaatctttgcaaatggtgtagctagtgccaatagttatgcaaataattcaggtctgtgtggtaaacccttattggatgcttgccaggccaaggcttcgaagagtaacacagctgttatagctggagcagctgttggtggtgtgactgttgcagcattaggtttgggcattggaatgttcttctacgtgcgccgtatttcttataggaagaaggaagaggaccctgaaggaaacaagtgggcaagaagtctaaagggaactaaaacaataaaggtttctatgtttgagaagtcaatttcaaaaatgaacttgaatgatctcatgaaggctactgataacttcggcaaaagcaatattattgggactggaagatcaggaactgtttacaaagctgtccttcatgatggcacatcactcatggttaagagattacaggaatctcaacattcagagaaagaatttctgtctgagatgaatatactaggttctgtcaaacatcgtaacttggttccgcttttaggtttttgcgtggctaaaaaggagaggtttttggtctataaaaatatgccaaatggtaccctccatgatcaactacaccctgatgctggtgcatgcaccatggattggcctctaaggctcaaaattgcaattggagcagccaagggattagcatggcttcatcatagctgcaatccccgcattatccaccgaaacataagctctaagtgcatcttgttggatgctgattttgagcccaaaatttctgattttggccttgctagattgatgaacccaattgatacacatttgagtacttttgtgaatggggagtttggggatttaggttatgttgctcctgaatatacaaaaactttggtggctactcctaaaggggatatttatagcttcgggactgtgcttcttgagttggtgacaggtgaaagacctacccatgtgtctaaagctccagaaacttttaaaggaaatttggtagaatggattcaacagcaatctagcaatgcaaaactccatgaagccattgatgaatcactagttgggaagggtgtagaccaggagcttttccaatttctgaaggttgcatgtaactgtgttacagcaatgccaaaggagaggcctaccatgtttgaagtataccagcttctaagagccattgggattaattataatttcacaactgaggatgagatcatgttgcctatggacactggtgatgctgataacttagaagaacttattgtagctcgagagggacatgattgaaaaggtatgtgagatataattagggtatgtaatcaattttaatatgtaagtatctcttgccttgtggtcctaaaataaatgttagtgctatataaggttttatggtttagatccatttgtgtgctatcaatattgaaacatcaatttaatatcatcaaccatgaatgccattatat

SEQ ID NO: 20581 - protein, 437 aa, Glycine max
SVANNLLTGQVPIFANGVASANSYANNSGLCGKPLLDACQAKASKSNTAVIAGAAVGGVTVAALGLGIGMFFYVRRISYRKKEEDPEGNKWARSLKGTKTIKVSMFEKSISKMNLNDLMKATDNFGKSNIIGTGRSGTVYKAVLHDGTSLMVKRLQESQHSEKEFLSEMNILGSVKHRNLVPLLGFCVAKKERFLVYKNMPNGTLHDQLHPDAGACTMDWPLRLKIAIGAAKGLAWLHHSCNPRIIHRNISSKCILLDADFEPKISDFGLARLMNPIDTHLSTFVNGEFGDLGYVAPEYTKTLVATPKGDIYSFGTVLLELVTGERPTHVSKAPETFKGNLVEWIQQQSSNAKLHEAIDESLVGKGVDQELFQFLKVACNCVTAMPKERPTMFEVYQLLRAIGINYNFTTEDEIMLPMDTGDADNLEELIVAREGHD

SEQ ID NO: 20582 - protein, 368 aa, Glycine max
MFFYVRRISYRKKEEDPEGNKWARSLKGTKTIKVSMFEKSISKMNLNDLMKATDNFGKSNIIGTGRSGTVYKAVLHDGTSLMVKRLQESQHSEKEFLSEMNILGSVKHRNLVPLLGFCVAKKERFLVYKNMPNGTLHDQLHPDAGACTMDWPLRLKIAIGAAKGLAWLHHSCNPRIIHRNISSKCILLDADFEPKISDFGLARLMNPIDTHLSTFVNGEFGDLGYVAPEYTKTLVATPKGDIYSFGTVLLELVTGERPTHVSKAPETFKGNLVEWIQQQSSNAKLHEAIDESLVGKGVDQELFQFLKVACNCVTAMPKERPTMFEVYQLLRAIGINYNFTTEDEIMLPMDTGDADNLEELIVAREGHD

SEQ ID NO: 20583 - protein, 333 aa, Glycine max
MFEKSISKMNLNDLMKATDNFGKSNIIGTGRSGTVYKAVLHDGTSLMVKRLQESQHSEKEFLSEMNILGSVKHRNLVPLLGFCVAKKERFLVYKNMPNGTLHDQLHPDAGACTMDWPLRLKIAIGAAKGLAWLHHSCNPRIIHRNISSKCILLDADFEPKISDFGLARLMNPIDTHLSTFVNGEFGDLGYVAPEYTKTLVATPKGDIYSFGTVLLELVTGERPTHVSKAPETFKGNLVEWIQQQSSNAKLHEAIDESLVGKGVDQELFQFLKVACNCVTAMPKERPTMFEVYQLLRAIGINYNFTTEDEIMLPMDTGDADNLEELIVAREGHD

SEQ ID NO: 20584 - DNA, 1772 bp, Glycine max
tcttgctacggaggatcaaattcgtaaaagctatcgtgaaactgccttgaggtttcatcctgacaaacaggctgctcttcttcttgctgaggaaactgaagctgcaaaacaagcaaaaaaggatgaaatagaaagtcactttaaggcaatccaagaagcatatgaagtgttgattgatccattgaagagaagaatttatgattccaccgatgagtttgatgatgagattcccactgattgtgctccacaagacttcttcaaggtgtttggtcctgcttttatgaggaatgggcggtggtcagttaatcaatcaattccatcactaggtgatgataacactccgataaaagaagttgataatttctacaatttttggtactcctttaaaagttggagggagtttcctcatgctgatgagtttgatcttgagcaagctgaatcacgagaccacaagagatggatggaaaggcagaatgcgaaattgacagaaaaagctaggaaggaagactatgcacggatacgcactcttgttgataatgcttataagagagaccccagaattttgagaagaaaggaagaagaaaaagctgagaaacaaaggaaaaaggaggctaagttcctagcaaagaagttgcaggaagaagaggcagccagaatcgcagaagaggataggcagcgaaaagaggaggaagagagacaagccacagaagctgctttacaacagaagaaggtgaaagagaaagagaaaaagctcttgcggaaggagcgagcacgacttcggactctttcaggacctattttatcgcaccatttacttgatatttctgatgatgatgtagaaaggctttgcatgtcactagatatacagcagctaaggagtctctgtgagaacatgggaggcagacagatgttattagagcaagcaaaagttttgagagatgcactgagttctaagaaagaagaggcggttgatgagaaaactaatcaacaaaatgccaatggttccatcaaggctaatggcagtccttcactaagcaacattgagaagaaggagaaaccctggagtaaagaagagattgatctattgaggaaaggaatgcagaaatatcccaaaggaacctcacggagatgggaggttatttcagaatacattggtactggaagatctgttgaagaaattatgaaggctactaaaactgtactccttcagaaacctgattcgtcaaaagcttttgacacatttcttgagaaaaggaaacccggtgcacaatcaattgagtctccattgacaaccagagaagaattaggagtgccagctcctgcctcctctacaaataatgcagaagactctcagaacaaaggtactgatgatcagaactcccctgctaatggagtttcttccagttcagaacaggatgtgtggtctgcggtgcaggaacgagcactagttcaagctttaaaagcctttccaaaggaaacaagccagagatgggagcgtgttgcaacagctgtacctgggaagactgtgaatcagtgtaagaaaaaatttgcattgatgaaggagagtttcaggaacaagaaaactgcagtctaatgttctgttgtgatattttagattatattaaatttttttctcatgagtataggctagtttcgaatatccatatactagtttatgagccaaaatttctagttttcttatcgtattactattggttgcttttgataacgtacttttgaacttggaattaatacattcacttttattgccc

SEQ ID NO: 20585 - protein, 530 aa, Glycine max
LATEDQIRKSYRETALRFHPDKQAALLLAEETEAAKQAKKDEIESHFKAIQEAYEVLIDPLKRRIYDSTDEFDDEIPTDCAPQDFFKVFGPAFMRNGRWSVNQSIPSLGDDNTPIKEVDNFYNFWYSFKSWREFPHADEFDLEQAESRDHKRWMERQNAKLTEKARKEDYARIRTLVDNAYKRDPRILRRKEEEKAEKQRKKEAKFLAKKLQEEEAARIAEEDRQRKEEEERQATEAALQQKKVKEKEKKLLRKERARLRTLSGPILSHHLLDISDDDVERLCMSLDIQQLRSLCENMGGRQMLLEQAKVLRDALSSKKEEAVDEKTNQQNANGSIKANGSPSLSNIEKKEKPWSKEEIDLLRKGMQKYPKGTSRRWEVISEYIGTGRSVEEIMKATKTVLLQKPDSSKAFDTFLEKRKPGAQSIESPLTTREELGVPAPASSTNNAEDSQNKGTDDQNSPANGVSSSSEQDVWSAVQERALVQALKAFPKETSQRWERVATAVPGKTVNQCKKKFALMKESFRNKKTAV

SEQ ID NO: 20586 - protein, 437 aa, Glycine max
MRNGRWSVNQSIPSLGDDNTPIKEVDNFYNFWYSFKSWREFPHADEFDLEQAESRDHKRWMERQNAKLTEKARKEDYARIRTLVDNAYKRDPRILRRKEEEKAEKQRKKEAKFLAKKLQEEEAARIAEEDRQRKEEEERQATEAALQQKKVKEKEKKLLRKERARLRTLSGPILSHHLLDISDDDVERLCMSLDIQQLRSLCENMGGRQMLLEQAKVLRDALSSKKEEAVDEKTNQQNANGSIKANGSPSLSNIEKKEKPWSKEEIDLLRKGMQKYPKGTSRRWEVISEYIGTGRSVEEIMKATKTVLLQKPDSSKAFDTFLEKRKPGAQSIESPLTTREELGVPAPASSTNNAEDSQNKGTDDQNSPANGVSSSSEQDVWSAVQERALVQALKAFPKETSQRWERVATAVPGKTVNQCKKKFALMKESFRNKKTAV

SEQ ID NO: 20587 - protein, 377 aa, Glycine max
MERQNAKLTEKARKEDYARIRTLVDNAYKRDPRILRRKEEEKAEKQRKKEAKFLAKKLQEEEAARIAEEDRQRKEEEERQATEAALQQKKVKEKEKKLLRKERARLRTLSGPILSHHLLDISDDDVERLCMSLDIQQLRSLCENMGGRQMLLEQAKVLRDALSSKKEEAVDEKTNQQNANGSIKANGSPSLSNIEKKEKPWSKEEIDLLRKGMQKYPKGTSRRWEVISEYIGTGRSVEEIMKATKTVLLQKPDSSKAFDTFLEKRKPGAQSIESPLTTREELGVPAPASSTNNAEDSQNKGTDDQNSPANGVSSSSEQDVWSAVQERALVQALKAFPKETSQRWERVATAVPGKTVNQCKKKFALMKESFRNKKTAV

SEQ ID NO: 20588 - DNA, 1368 bp, Glycine max
gacatccaaaaaacatgaaacgaaaccataatttccccttccaccaccggccacgcaagtgggcgatggtgatccccaccgtcacaatatgcttcctcctcctcttcctcccgctccttcccctcaccaaaccctcatcttcatcttcttctttttctgcgacatggtcttcttcttcgctgaatttaacggaagaactagaagtgggtgttccgagattggcgtacatgttgacggcgacgaaaggggagggggcgcagctgaagagggtccttcaggcagtgtaccatcccaggaactactacctgctccatctcgatctagaggcttctgatgcggagaggctggagctggccaaatacgtcaagtccgagactgtgcttgcggcgtttgggaacgtcttggtggtgggtaagcctgatttggtcacctacaagggccccaccatgattgcttctactcttcacggtattgcccttttgctcaagagggccccacactgggactggttaatcaatctcagcgcctctgattatcctctcctctcccaggacgatatcttgcacatcttttcattcttgcccagggatctaaatttcattgagcatacaagtaatattggttggaaagagcatcaaagagctaggcctatcattatagatccaggcttatatcattcaaagaaatctggtgtttactgggctaaagagaagagatctgttccatcttcgttcaagttattcacagggtctgcatgggttgtcctgacaaaatcatttcttgagttttgtgtttggggttgggataatcttcctcgaactctccttatgtattacacaaattttctttcatcccctgagggttacttccatacggtcatttgcaatcataaggactatcaaaacacaaccattaatcatgatttacgttacataaggtgggacaacccgccaaagcagcatccagttttcttgaaattggagcattttgatgacatggtccatagtggtgcaccttttgctcgaaagtttaccaaggatgatccagttctcaacaaaattgataaggaacttttgagaagatcagatggtcactttacaccgggaggttggtgtattggcaatcctcttttgggaaaagatccttgtgctgtttatggaaatccaattgtagttaaacctaccttacaatcaaagaagctagaaaaactaatagtgaaactattagattctgaaaattttaggccgaaacaatgtaaatagtagtcactctgcaacgtgaaatttttatacacaattctattggcatttttaatgcgtcgtctgttcaaatttaacattatgaattgttatgaaacatctttctagc

SEQ ID NO: 20589 - protein, 419 aa, Glycine max
HPKNMKRNHNFPFHHRPRKWAMVIPTVTICFLLLFLPLLPLTKPSSSSSSFSATWSSSSLNLTEELEVGVPRLAYMLTATKGEGAQLKRVLQAVYHPRNYYLLHLDLEASDAERLELAKYVKSETVLAAFGNVLVVGKPDLVTYKGPTMIASTLHGIALLLKRAPHWDWLINLSASDYPLLSQDDILHIFSFLPRDLNFIEHTSNIGWKEHQRARPIIIDPGLYHSKKSGVYWAKEKRSVPSSFKLFTGSAWVVLTKSFLEFCVWGWDNLPRTLLMYYTNFLSSPEGYFHTVICNHKDYQNTTINHDLRYIRWDNPPKQHPVFLKLEHFDDMVHSGAPFARKFTKDDPVLNKIDKELLRRSDGHFTPGGWCIGNPLLGKDPCAVYGNPIVVKPTLQSKKLEKLIVKLLDSENFRPKQCK

SEQ ID NO: 20590 - protein, 415 aa, Glycine max
MKRNHNFPFHHRPRKWAMVIPTVTICFLLLFLPLLPLTKPSSSSSSFSATWSSSSLNLTEELEVGVPRLAYMLTATKGEGAQLKRVLQAVYHPRNYYLLHLDLEASDAERLELAKYVKSETVLAAFGNVLVVGKPDLVTYKGPTMIASTLHGIALLLKRAPHWDWLINLSASDYPLLSQDDILHIFSFLPRDLNFIEHTSNIGWKEHQRARPIIIDPGLYHSKKSGVYWAKEKRSVPSSFKLFTGSAWVVLTKSFLEFCVWGWDNLPRTLLMYYTNFLSSPEGYFHTVICNHKDYQNTTINHDLRYIRWDNPPKQHPVFLKLEHFDDMVHSGAPFARKFTKDDPVLNKIDKELLRRSDGHFTPGGWCIGNPLLGKDPCAVYGNPIVVKPTLQSKKLEKLIVKLLDSENFRPKQCK

SEQ ID NO: 20591 - protein, 398 aa, Glycine max
MVIPTVTICFLLLFLPLLPLTKPSSSSSSFSATWSSSSLNLTEELEVGVPRLAYMLTATKGEGAQLKRVLQAVYHPRNYYLLHLDLEASDAERLELAKYVKSETVLAAFGNVLVVGKPDLVTYKGPTMIASTLHGIALLLKRAPHWDWLINLSASDYPLLSQDDILHIFSFLPRDLNFIEHTSNIGWKEHQRARPIIIDPGLYHSKKSGVYWAKEKRSVPSSFKLFTGSAWVVLTKSFLEFCVWGWDNLPRTLLMYYTNFLSSPEGYFHTVICNHKDYQNTTINHDLRYIRWDNPPKQHPVFLKLEHFDDMVHSGAPFARKFTKDDPVLNKIDKELLRRSDGHFTPGGWCIGNPLLGKDPCAVYGNPIVVKPTLQSKKLEKLIVKLLDSENFRPKQCK

SEQ ID NO: 20592 - DNA, 1472 bp, Glycine max
aaactcatcctctttgcctttggaaagggtcccttatcctccaatcctcccctctctttgcctcacttcgtccccatcgcatgcctccccatcaaattcgaacatgacccaaaacaccaaatcccccaaaagaaacacaaatctcccttcagttatgcttcaacctcaatggttattatattggctgctttaattcctctctacgggaaaaaagagtattttcacccaaagtttgtatttttcttgtacggcctccacatgtacatagggttagagttcattttcgccacggtctccgcagcaacgagaaaactcatcggggttcagctggaaccacagttcaaggagccatacctatgcacttcgttacaagatttctgggggagaaggtggaacatcatggtcaaccgtgttcttcaccccaccgtgtacgatcccgtgaagaatctctctgcacgagtccttgggagaaagtgggccccacttcctgcaattctcgcttcctttgccgtgtccgggatgatgcacgagctcgtgttttactacatcaagcgggaaaagcgcacgtgggaggtatgggagccctcgtgggacgccacgtgtttctttctcattcacggggtgtgtgtggccatggaggttggaatcaagaagagtctcagagggaaaaaacagtggcaggtgcccagggtgctgtcgtggatgctaacgttgctgtttgtgctctacacagcgatggccttctttctgcccgcgctagcgcggtgtcgcgtttatgagaaggcaaccagagagttgaccgctttgacccagtttctcatggatgtttacggtctttattcactccaaggatcacataaatgaacattgttgctttggtttcattcctttctttttcatttgtttcaaatttgtaattgacacctaagactcatatatttcaattccaaattctctttcattctcaagattgggatattttgatcctcccgtttcatgccatatagccttcactgcataaattgagaaaaatccctctaagcaacagcggtcctagctagattcacgcataattacgtaagccaccattaccaaccatgttttacaccttaaactttcgtcatttttcactaatgaaaagacaaatacaaacttatacaatacaatccatttaattatgggtttaaccgaaccactacaaatcacgtcaaaattgctcgcattacgtaaacaaggctcatcattattgcataggcttgatcaattttactttcatgtcattgtctcatatcatgacattatcatttcagcaacacgagtaccaaatccaaaaaaaagaaaaatactatctagcaggaatattgcatcctgttatattaaatttttacatgacatataaatattcacaaatattaataaagtaaccaatttataaaaagataattataaaatatttttcacaataaaataac

SEQ ID NO: 20593 - protein, 287 aa, Glycine max
KLILFAFGKGPLSSNPPLSLPHFVPIACLPIKFEHDPKHQIPQKKHKSPFSYASTSMVIILAALIPLYGKKEYFHPKFVFFLYGLHMYIGLEFIFATVSAATRKLIGVQLEPQFKEPYLCTSLQDFWGRRWNIMVNRVLHPTVYDPVKNLSARVLGRKWAPLPAILASFAVSGMMHELVFYYIKREKRTWEVWEPSWDATCFFLIHGVCVAMEVGIKKSLRGKKQWQVPRVLSWMLTLLFVLYTAMAFFLPALARCRVYEKATRELTALTQFLMDVYGLYSLQGSHK

SEQ ID NO: 20594 - protein, 231 aa, Glycine max
MVIILAALIPLYGKKEYFHPKFVFFLYGLHMYIGLEFIFATVSAATRKLIGVQLEPQFKEPYLCTSLQDFWGRRWNIMVNRVLHPTVYDPVKNLSARVLGRKWAPLPAILASFAVSGMMHELVFYYIKREKRTWEVWEPSWDATCFFLIHGVCVAMEVGIKKSLRGKKQWQVPRVLSWMLTLLFVLYTAMAFFLPALARCRVYEKATRELTALTQFLMDVYGLYSLQGSHK

SEQ ID NO: 20595 - protein, 201 aa, Glycine max
MYIGLEFIFATVSAATRKLIGVQLEPQFKEPYLCTSLQDFWGRRWNIMVNRVLHPTVYDPVKNLSARVLGRKWAPLPAILASFAVSGMMHELVFYYIKREKRTWEVWEPSWDATCFFLIHGVCVAMEVGIKKSLRGKKQWQVPRVLSWMLTLLFVLYTAMAFFLPALARCRVYEKATRELTALTQFLMDVYGLYSLQGSHK

SEQ ID NO: 20596 - DNA, 1619 bp, Glycine max
agaatctgtgacacagtctgatgggattattggtatacaaagcactgagacagtcaatgcaagaatggaagagggatatcatcatgcatccacatctacacagaccagtccagatgaaaatgggatgaaaaatattcaaccagagcaactggaaatacaagaaatggggagaagagagagtgcattaggcaaagatatagagcaacaacctaccctcctagaggagtatcacttgaggaataaatcagaaagaagccctgcaacttatatatctagtcatgactttactgagaatagccattttcctgaaggaaaagaggcacttaatggtgctatggaggagttaaaagatggttacatttctgagaatgggaaactggttcttgatttcttgcaagccatccatgctgcagagaaaaggcaggctgacttagatgcacatgcttttaacgaagagaagaaagtgttaaaggaaaaatatgaaaagaagttgaaagatgcagctgccagagaacttatgctcgctgaggaggctgcaatgttggacagggagctaaaaagagagagagcaaaagcatcccttgctatcaagtcacttcaagaaaagatggaagagaaactgaagacagaactagaacaaaaggagattgaaactgatttgaagtttaaacaaactcaggaattagcaaaggcagagttaaatgcagccatagcaaatgagaaggcagctcaaattgaaaaaatggctgaagcaaatgttaatataaatgccttatgcatggcattttatgctcgatctgaagaagctcgtcaaagtcatgctacacaaaattttgctttgagagcacttgcattggaagatgcactatctaaaggacttccaattgagacagaaatagcatctttgcagtcttatcttggaagcacagataaagattcagttttggatttggtgctagcatcccttcctgaagaaacacgaagcaacggcacagacacacaactgcagttaaagcagaagtttgatgccttaaaaggtagtgtaagacacttcagcttcttcccaccgggagggggaggtatgttggcacattctttggcacatgtagcatcctggttgaaggttagggaagacaatcaatctggtgatgggatcgaatctgtgatcaataaagttgaagtttatttggcagaaggaaaacttgctgaagcagcagcttgtctagaagaaagtgtgagaggcacacaagctgcagaaattgttgcaggttgggtgaggcaagcaagaaacagggctatttctgagcaagcagtgctgcttcttcaatcctatgccaattcccttagctttacatgattctcaaattttgaatatttacaaaaccatgtgaattcaatacatggcagagattatctttggcggattattccaacgggaattattgacctatgaggaaaaaaaataacgtttttgtttcataggagcagaaattagttgattctgtgaattctatgcaactccagtggcattggagttttgaccgaagtgatatcaggctctgtataattttgccttttgttttacctgaataacagaaatgttgcattgcaacatattg

SEQ ID NO: 20597 - protein, 451 aa, Glycine max
ESVTQSDGIIGIQSTETVNARMEEGYHHASTSTQTSPDENGMKNIQPEQLEIQEMGRRESALGKDIEQQPTLLEEYHLRNKSERSPATYISSHDFTENSHFPEGKEALNGAMEELKDGYISENGKLVLDFLQAIHAAEKRQADLDAHAFNEEKKVLKEKYEKKLKDAAARELMLAEEAAMLDRELKRERAKASLAIKSLQEKMEEKLKTELEQKEIETDLKFKQTQELAKAELNAAIANEKAAQIEKMAEANVNINALCMAFYARSEEARQSHATQNFALRALALEDALSKGLPIETEIASLQSYLGSTDKDSVLDLVLASLPEETRSNGTDTQLQLKQKFDALKGSVRHFSFFPPGGGGMLAHSLAHVASWLKVREDNQSGDGIESVINKVEVYLAEGKLAEAAACLEESVRGTQAAEIVAGWVRQARNRAISEQAVLLLQSYANSLSFT

SEQ ID NO: 20598 - protein, 430 aa, Glycine max
MEEGYHHASTSTQTSPDENGMKNIQPEQLEIQEMGRRESALGKDIEQQPTLLEEYHLRNKSERSPATYISSHDFTENSHFPEGKEALNGAMEELKDGYISENGKLVLDFLQAIHAAEKRQADLDAHAFNEEKKVLKEKYEKKLKDAAARELMLAEEAAMLDRELKRERAKASLAIKSLQEKMEEKLKTELEQKEIETDLKFKQTQELAKAELNAAIANEKAAQIEKMAEANVNINALCMAFYARSEEARQSHATQNFALRALALEDALSKGLPIETEIASLQSYLGSTDKDSVLDLVLASLPEETRSNGTDTQLQLKQKFDALKGSVRHFSFFPPGGGGMLAHSLAHVASWLKVREDNQSGDGIESVINKVEVYLAEGKLAEAAACLEESVRGTQAAEIVAGWVRQARNRAISEQAVLLLQSYANSLSFT

SEQ ID NO: 20599 - protein, 410 aa, Glycine max
MKNIQPEQLEIQEMGRRESALGKDIEQQPTLLEEYHLRNKSERSPATYISSHDFTENSHFPEGKEALNGAMEELKDGYISENGKLVLDFLQAIHAAEKRQADLDAHAFNEEKKVLKEKYEKKLKDAAARELMLAEEAAMLDRELKRERAKASLAIKSLQEKMEEKLKTELEQKEIETDLKFKQTQELAKAELNAAIANEKAAQIEKMAEANVNINALCMAFYARSEEARQSHATQNFALRALALEDALSKGLPIETEIASLQSYLGSTDKDSVLDLVLASLPEETRSNGTDTQLQLKQKFDALKGSVRHFSFFPPGGGGMLAHSLAHVASWLKVREDNQSGDGIESVINKVEVYLAEGKLAEAAACLEESVRGTQAAEIVAGWVRQARNRAISEQAVLLLQSYANSLSFT

SEQ ID NO: 20600 - DNA, 1322 bp, Glycine max
gatcatggttggaggacccactaaaggtactagattccgaccattgtcattcaacgtacccaagccactttttccattagcaggacaacccatggttcatcatccaatttctgcttgtaaaaggattcctaatttggctcagatttatctgcttggtttctacgaggaacgcgaatttgccttatatgtatcttctatctcaaatgagcttaaagtccctgttagatacttgaaggaagacaggccacatggttcagctggtggtctttatcattttagagatctgatcatggaagaggatccgtcacatatcttcttgctgaactgtgatgtatgctgcagttttccactgccagaaatgctggatgctcataaaagatatggtgggatgggaacaatactagttgtcaaggtttctgcagagtcagcaagtgagttcggggaattagtagctgatccaaccactaatgaactattgcattacacagagaaacccgaaacttttgtaagtgatcgtataaactgtggtgtgtacgtatttacacctgatatctttacagccattgagggtgtttctactcagcggaaagacagagctaacctaagacgtgtctcaagctttgaagcaatgcagccagacacaaggagtcttccagtcaattatgtcagattggatcaagatatcctctcacctcttgcggggaagaagcaattgtacatttatgaaaccaatgacttttgggaacaaatcaaaactccaggaatgtccataaaatgttctggcttgtatcttgcccaatttcgttacacatccccccatttattagcaaatggagatggtattaaaaaagccagcatcaccggtgatgtttacattcacccatcagcaaaagtgcatccatctgctaagattggtccaagtgtatcaatatctgcaaatgctcgtataggagctggtacaaggctcaaacattgtatcatccttgatgacgttgaaatcaaggaaaatgctcttgttggtcatgcaattgttggatggaaatcatctattggtcgatgggcatgtgttgaggctagtggagattacaatgcaaagctcggggtaacaatacttggtgaatctgtgaccgttgaggatgaggtagtggttttgaatcattgttctgccacataagaccctaaatttgggtgttcaagatgagattcttttatagaacctccaaagctcccattgttgcctttatattttccttgtgattgtatttgcagcgacttttgtttaatttagtatctagtttggaaacccaaaaacagtgggtata

SEQ ID NO: 20601 - protein, 390 aa, Glycine max
IMVGGPTKGTRFRPLSFNVPKPLFPLAGQPMVHHPISACKRIPNLAQIYLLGFYEEREFALYVSSISNELKVPVRYLKEDRPHGSAGGLYHFRDLIMEEDPSHIFLLNCDVCCSFPLPEMLDAHKRYGGMGTILVVKVSAESASEFGELVADPTTNELLHYTEKPETFVSDRINCGVYVFTPDIFTAIEGVSTQRKDRANLRRVSSFEAMQPDTRSLPVNYVRLDQDILSPLAGKKQLYIYETNDFWEQIKTPGMSIKCSGLYLAQFRYTSPHLLANGDGIKKASITGDVYIHPSAKVHPSAKIGPSVSISANARIGAGTRLKHCIILDDVEIKENALVGHAIVGWKSSIGRWACVEASGDYNAKLGVTILGESVTVEDEVVVLNHCSAT

SEQ ID NO: 20602 - protein, 389 aa, Glycine max
MVGGPTKGTRFRPLSFNVPKPLFPLAGQPMVHHPISACKRIPNLAQIYLLGFYEEREFALYVSSISNELKVPVRYLKEDRPHGSAGGLYHFRDLIMEEDPSHIFLLNCDVCCSFPLPEMLDAHKRYGGMGTILVVKVSAESASEFGELVADPTTNELLHYTEKPETFVSDRINCGVYVFTPDIFTAIEGVSTQRKDRANLRRVSSFEAMQPDTRSLPVNYVRLDQDILSPLAGKKQLYIYETNDFWEQIKTPGMSIKCSGLYLAQFRYTSPHLLANGDGIKKASITGDVYIHPSAKVHPSAKIGPSVSISANARIGAGTRLKHCIILDDVEIKENALVGHAIVGWKSSIGRWACVEASGDYNAKLGVTILGESVTVEDEVVVLNHCSAT

SEQ ID NO: 20603 - protein, 360 aa, Glycine max
MVHHPISACKRIPNLAQIYLLGFYEEREFALYVSSISNELKVPVRYLKEDRPHGSAGGLYHFRDLIMEEDPSHIFLLNCDVCCSFPLPEMLDAHKRYGGMGTILVVKVSAESASEFGELVADPTTNELLHYTEKPETFVSDRINCGVYVFTPDIFTAIEGVSTQRKDRANLRRVSSFEAMQPDTRSLPVNYVRLDQDILSPLAGKKQLYIYETNDFWEQIKTPGMSIKCSGLYLAQFRYTSPHLLANGDGIKKASITGDVYIHPSAKVHPSAKIGPSVSISANARIGAGTRLKHCIILDDVEIKENALVGHAIVGWKSSIGRWACVEASGDYNAKLGVTILGESVTVEDEVVVLNHCSAT

SEQ ID NO: 20604 - DNA, 1253 bp, Glycine max
gatgaatggggaaaacaatgatgagtatgatgatgtattgactgcagaggaaagaatgcaattagattctgccctgcatatggggaactctgatgttacttacgaggatgaggaacatggagcctttgatggtcaagaaaatggttctgcagcttcctgtgagacttctgaagccaatggtgtggttaaagaaaagaagagctggtttggttggaacaagaaaagtttgaagagtagcagtgatgatcctgaggattccaaagctgtgaagaaaaattccaggtttggctcagaaggtagcaatcagagatcagctgatcagcaaaagtcagcatctgactttctgagggaggatagtgtagactctaagaagggaaaagataaaaacattaaaaagaagaaaaaaggagcaaacaatgagagtgagtataaaaagggtttaagacctgtgttgtggttgacaccagacttccctctaaaaactgatgagctgctgcctctgcttgacatcttagcaaataaggttaaggctattagaagactcagagagcttttgacaactaagctacctcatggaacttttcctgtcaaggttgctatcccaatagttcctactatccgggtgcttgtcacttttacaaaatttgaggagcttcagccagtagaggagttttcaactccgctctccagcccagcacatttctatgatgccaaatccaaggaatcagaggggtctagttcatggatttcatggatgaaaggaagtcgtggggggcagtccagtgactcagatagtcacagatacaaggatgaagttgatcctttcagcatacctgcggactacaaatgggtggacgccaatgagaagaagcgcagaatgaaggcgaagaaagccagaagtaagaagcataagaagcaagcagcggcaaaaggtggagatggagtgcagcatcaaaggacggaggatgtagaagaacagtaatatcgtggtttggtatctctgggtaaaatcacggctttgataattgttgccaaagagtctttctttgtgcacgccacaactgacgttacagttctatgttggagggcttctacaagaatttactagaaatttcttggccaaccaattgttattagttaagaaaaaggtgcctttatttttttcctcgtatcgcgaagaaagctttgtcttctataaattgttgtattgccagtgaagaggaattgaagagcaagagtgttttgctccctag

SEQ ID NO: 20605 - protein, 326 aa, Glycine max
MNGENNDEYDDVLTAEERMQLDSALHMGNSDVTYEDEEHGAFDGQENGSAASCETSEANGVVKEKKSWFGWNKKSLKSSSDDPEDSKAVKKNSRFGSEGSNQRSADQQKSASDFLREDSVDSKKGKDKNIKKKKKGANNESEYKKGLRPVLWLTPDFPLKTDELLPLLDILANKVKAIRRLRELLTTKLPHGTFPVKVAIPIVPTIRVLVTFTKFEELQPVEEFSTPLSSPAHFYDAKSKESEGSSSWISWMKGSRGGQSSDSDSHRYKDEVDPFSIPADYKWVDANEKKRRMKAKKARSKKHKKQAAAKGGDGVQHQRTEDVEEQ

SEQ ID NO: 20606 - protein, 308 aa, Glycine max
MQLDSALHMGNSDVTYEDEEHGAFDGQENGSAASCETSEANGVVKEKKSWFGWNKKSLKSSSDDPEDSKAVKKNSRFGSEGSNQRSADQQKSASDFLREDSVDSKKGKDKNIKKKKKGANNESEYKKGLRPVLWLTPDFPLKTDELLPLLDILANKVKAIRRLRELLTTKLPHGTFPVKVAIPIVPTIRVLVTFTKFEELQPVEEFSTPLSSPAHFYDAKSKESEGSSSWISWMKGSRGGQSSDSDSHRYKDEVDPFSIPADYKWVDANEKKRRMKAKKARSKKHKKQAAAKGGDGVQHQRTEDVEEQ

SEQ ID NO: 20607 - protein, 300 aa, Glycine max
MGNSDVTYEDEEHGAFDGQENGSAASCETSEANGVVKEKKSWFGWNKKSLKSSSDDPEDSKAVKKNSRFGSEGSNQRSADQQKSASDFLREDSVDSKKGKDKNIKKKKKGANNESEYKKGLRPVLWLTPDFPLKTDELLPLLDILANKVKAIRRLRELLTTKLPHGTFPVKVAIPIVPTIRVLVTFTKFEELQPVEEFSTPLSSPAHFYDAKSKESEGSSSWISWMKGSRGGQSSDSDSHRYKDEVDPFSIPADYKWVDANEKKRRMKAKKARSKKHKKQAAAKGGDGVQHQRTEDVEEQ

SEQ ID NO: 20608 - DNA, 1146 bp, Glycine max
attgatgttgatattgcagatgacagtgtgattgctttggcgactagatgcccccatctgaggtccctaggactgtactactgcaagaacatcacagatagagcaatgtattccttggcacacagcaaggtgaacaacaggatgtggggaactgtgaaaggaggaggaaatgatgaagatggtttaaggactttgaacattagccaatgcactgcactcaccccatctgctgttcaagctgtttgtgactcattcccttctctccacacatgctcagggaggcactcactcatcatgagtggctgcctcaacttgacatcagtgcattgtgcctgtgctgtccatgcgcaccgtgcattcaccactttcccttatcctgcccattaagaagctcatgcttttgatgttgaacacacttcgaggatgtgccccttgaaagggctcagagaagtgaaagaagtgaaatccaccccccttgtagatgtatgcctgcataagagagacttgaatctagctgattatgtacatcttttcttcaactttatgtcttaaactcggtttgctttaatccccgaattgtgtaagctcgagacattttggatgctaaaactggcttgttcctagtaagctattttgagtttatggaaagacatggacttttaaatttgcatggttttatggaagtatatgcaaattttggtatatcttgtgtcgttggcatcacttcaattccagaaaacataggtggaatttgcatttgactaaagtccagataaatttttcaataagtagtattttataggaagaaaagaagtaaaatgattcaacttttggatttcaagaagttaaaattaattttacatttcagcttttaggaaaaataatgatgagagttttaaaaaaaggctaggatattgattttaatttatgaaagatttttgtttttaatttttttatcctttaattttcttttataaacaagttgaagaaaagaaagtcatgtctgtggaaaagtgtaaggatgactgtttttgaactgtactactgattacattccatgtacattatgaaaaaaccttacatttttgcataaagtcataatttagtaagtaagctatataagtttatggaaagacatggactttt

SEQ ID NO: 20609 - protein, 128 aa, Glycine max
IDVDIADDSVIALATRCPHLRSLGLYYCKNITDRAMYSLAHSKVNNRMWGTVKGGGNDEDGLRTLNISQCTALTPSAVQAVCDSFPSLHTCSGRHSLIMSGCLNLTSVHCACAVHAHRAFTTFPYPAH

SEQ ID NO: 20610 - protein, 93 aa, Glycine max
MYSLAHSKVNNRMWGTVKGGGNDEDGLRTLNISQCTALTPSAVQAVCDSFPSLHTCSGRHSLIMSGCLNLTSVHCACAVHAHRAFTTFPYPAH

SEQ ID NO: 20611 - protein, 81 aa, Glycine max
MWGTVKGGGNDEDGLRTLNISQCTALTPSAVQAVCDSFPSLHTCSGRHSLIMSGCLNLTSVHCACAVHAHRAFTTFPYPAH

SEQ ID NO: 20612 - DNA, 1409 bp, Glycine max
aaaaagactctgtgaagtgtgcgtgagaaaggaacagagagaagaaaaagaaaaaagatggaaggagagaaagagaatcccgattgtaacgccactttggtgaactccttctgcgaaatcacttcctcttccaaagaagaagcccttttctttttggagagccacaatttcgacctagacgccgccgtttccactttcctcgacaacgccaacaaccctctcatccctcaaaacgacgacgtcgttgtcgccgcaaacccaaaccccaactccgtttcccctccctccgattctcactccccggacttcaacccttccaggtctccttcgccgtctccgtcgccgactcgcacgccctacgagctccgatcccgcaggtctctcggcaagaaaccctccaccagccgccaaggcaaaattcgcactctcggcgatctcaaacgctcctcccgcgatgatgattccgattccgatcccgatttcgaacccgacgagtactacaccggcggcgaaaagagtgggatgcttgttcgagatcctaccagaggaaacagcaacaacaacaacagtgtggatgatatctttgatcaagcgaggcaggttgctgttgatgcacctccggagaatcctcgaagctcgtcgaggtcgggaagttttagtggcacggcgaggttgctctctggagagagattgccatctgctgctgctgctgctcctgctcctcagcgtgtagaggaagttacccacactgtcactttctggaggaatgggttctctgtcaatgatggtcctctacggaggttggatgatccgcaaaacgcaccgtttctggagagcataaagaagtccgaatgtcccaaagagcttgagccagcagataggaggactgctgtccatgtcaacctcacaaggcgggatgaagactaccctgaaccagtgaagccacgccatcgtgctttccagggtgttggaagaactttaggtagcaccagctccagcaatgatgaacctattcaaacaactggtgcttcaccaagtactgctccattgccaacaatgggtttaattgtagatgaggcacagtcagtgacatcaatccagctgaggttggctgatggcacacgcatggtttctcgcttcaatcaccatcatacaatccgagatgttcgagcattcattgatgcatcaagacccgggggtgtaagaagttaccaactgcagtcaatgggttttcctcccaaacaactcgctaatttggaccagactatagaacaagctggtattgccaactcagttgtcatccaaaagttgtaggttgtttaccagattctattttcagtcgacttgaaattactatttttatgcttaaacattgattgatctacttatattttattagtgaatttgat

SEQ ID NO: 20613 - protein, 418 aa, Glycine max
MEGEKENPDCNATLVNSFCEITSSSKEEALFFLESHNFDLDAAVSTFLDNANNPLIPQNDDVVVAANPNPNSVSPPSDSHSPDFNPSRSPSPSPSPTRTPYELRSRRSLGKKPSTSRQGKIRTLGDLKRSSRDDDSDSDPDFEPDEYYTGGEKSGMLVRDPTRGNSNNNNSVDDIFDQARQVAVDAPPENPRSSSRSGSFSGTARLLSGERLPSAAAAAPAPQRVEEVTHTVTFWRNGFSVNDGPLRRLDDPQNAPFLESIKKSECPKELEPADRRTAVHVNLTRRDEDYPEPVKPRHRAFQGVGRTLGSTSSSNDEPIQTTGASPSTAPLPTMGLIVDEAQSVTSIQLRLADGTRMVSRFNHHHTIRDVRAFIDASRPGGVRSYQLQSMGFPPKQLANLDQTIEQAGIANSVVIQKL

SEQ ID NO: 20614 - protein, 263 aa, Glycine max
MLVRDPTRGNSNNNNSVDDIFDQARQVAVDAPPENPRSSSRSGSFSGTARLLSGERLPSAAAAAPAPQRVEEVTHTVTFWRNGFSVNDGPLRRLDDPQNAPFLESIKKSECPKELEPADRRTAVHVNLTRRDEDYPEPVKPRHRAFQGVGRTLGSTSSSNDEPIQTTGASPSTAPLPTMGLIVDEAQSVTSIQLRLADGTRMVSRFNHHHTIRDVRAFIDASRPGGVRSYQLQSMGFPPKQLANLDQTIEQAGIANSVVIQKL

SEQ ID NO: 20615 - DNA, 1346 bp, Glycine max
ttacttcatatagagtctattttgtcttctatcagaatcgccctacaatttaatgcttgtttcttttacatttgattggctaaacatatcatgaaacaaacaagcaccaagtagaaatgtttttcaaccagtgaaagactgaaagtccattttcaaggcacatgaatcacaaaacatggatagagtaaatatcccagtgcaagctcagaaatagatcttattctgaatactctggtggtcaatagccacagcccacttctattttgtaaattagcttctagcttaagtacatctagatcatgaaaccaaactttgatcttgaagtggaggcatgtgcagcatatgaatctgaagttagcagccaggttgcttccaatgtatctattcaagaaacctctataggtccttgtagtgacagtctcactaacatttccaacatcacaaatccaatagggattcatcctaattcagatgctatttcacttgacttaagtctcaacttcaagaatagtgcgccagggggaagagattcaataggattctccttctcaagcactagcgagagcagcaatgaacctgcctcacaaactacagcagcaaccattccacgagtcttctcttgcaattactgccagcgcaagtttttcagttctcaggctcttggtggacaccagaatgcacacaagagagaaaggacattagcaaaaagggctatgagaatgggatttttctctgaaaggtacgccaatctagcatctctccctctgcatggttctttcaggtccttaggaataaaggcgcactcttcactgcaccatggtttctcaccaacaatgaggcgtcctgagataaagaacaatgcaagatttgatcaagggtatgttggccacccgatattcttggaggatgatgagtcagatttgttgtggcctggtagttttcgtcaagttgctgaggcaggtgatagtcatcagaatttcatactgactggaagttcaaatttgagttttactgaggtgaatccacctgtagacatagataactcaacaccagatttgactttgaaactttgaaggaggttatttggtatggttctgaccttgagttgtcttctttattgctatgttataacacagtaagacatgcatgcaaggggccatgattgccagattgattcctatactcagttgggtttccttttacttttactctcattttcagttttctgttaggaatcttgctttggtattttgctttttatgtttctcattgtataagagctccgggaggacaattttggagcttctgtgcttgttatataaatcatgttatcccttcactgtaag

SEQ ID NO: 20616 - protein, 257 aa, Glycine max
MKPNFDLEVEACAAYESEVSSQVASNVSIQETSIGPCSDSLTNISNITNPIGIHPNSDAISLDLSLNFKNSAPGGRDSIGFSFSSTSESSNEPASQTTAATIPRVFSCNYCQRKFFSSQALGGHQNAHKRERTLAKRAMRMGFFSERYANLASLPLHGSFRSLGIKAHSSLHHGFSPTMRRPEIKNNARFDQGYVGHPIFLEDDESDLLWPGSFRQVAEAGDSHQNFILTGSSNLSFTEVNPPVDIDNSTPDLTLKL

SEQ ID NO: 20617 - DNA, 1416 bp, Glycine max
aacagggtttgtttttgtcgtctcttttgcacacccaacccttcaccagatctcactttgttccgttcagtgcagagaagaaaatggcggtgatggccgttcaccaattcgcgcaatgcatcacttgccacgcttggagccccgatcaatccatggtggctttatgtccaaacaataatgaagtgcacatctataggttggttgaagacaaatgggaaaaggtgcatgttcttcaaaagcatgaccaggtaatttctgggatagactggagcacaagatcaaatagaatagttactgcatcccatgatcggaattcatatgtctggaaccttgaaggatcagaatgggtgcctactcttgttatccttagactaaaccgtgctgctctttgtgttcaatggagtccaaaagaaaacaaatttgcagtgggaagtggagccaaaactgtttgtatatgctactatgagcaggaaaacaactggtgggtcagcaaacttatcaggaaaagacatgattcttccgtgacaagtgtttcttggcatcccgataatattcttcttgctacaacatccacagatgggaaatgccgagtattctccaccttgataaaaggcgttgatgcaaaggattcaaaaaagggtacttcatcagattcaaaatttggagagctgattgttcagcttgatctctcatcatcttggacattcggagtcaagtggtcaccaagtggtaatactctagcatatgcaggtcataattctatgatatattttgttgatgatgttggtccttctcctttggcccaaaacgttgtgttccgtgatttgccgctccgtgatgtgggtattatttgtttccgagagaaaagtgataggtgtgggatttgactgtaacccaatggtttttgccgcagatgaaaggggaatttggagttttgtaagatatttgggagaacgaaaagcagcatcttctggaccaagatatggctcacagttctctgaagcatttggaaagttttatggccaatcaaagcatggagtgagcaatgatgcagttgaaacttctagagctcgtggaactgttcatgaaaactgtataaattgtattatgcctcttggggatcatggcacgttgataaggcgtttcagcacatcaggattggatggaagaattgttgtatgggatttggaaaatgagcaagacctgttggaattataagctcatcattaaattgtcacattttcgtggtaaagtgtctgaagctgattgtctcatgaagctgattacctcatgcagcattataccttgtaaattaatttggttttgagggattgaagtgatctctaatcattatacatggcttgaaagtgtcgtataccagcccctagaatatgtttataaactgtacctggatgt

SEQ ID NO: 20618 - protein, 294 aa, Glycine max
QGLFLSSLLHTQPFTRSHFVPFSAEKKMAVMAVHQFAQCITCHAWSPDQSMVALCPNNNEVHIYRLVEDKWEKVHVLQKHDQVISGIDWSTRSNRIVTASHDRNSYVWNLEGSEWVPTLVILRLNRAALCVQWSPKENKFAVGSGAKTVCICYYEQENNWWVSKLIRKRHDSSVTSVSWHPDNILLATTSTDGKCRVFSTLIKGVDAKDSKKGTSSDSKFGELIVQLDLSSSWTFGVKWSPSGNTLAYAGHNSMIYFVDDVGPSPLAQNVVFRDLPLRDVGIICFREKSDRCGI

SEQ ID NO: 20619 - protein, 267 aa, Glycine max
MAVMAVHQFAQCITCHAWSPDQSMVALCPNNNEVHIYRLVEDKWEKVHVLQKHDQVISGIDWSTRSNRIVTASHDRNSYVWNLEGSEWVPTLVILRLNRAALCVQWSPKENKFAVGSGAKTVCICYYEQENNWWVSKLIRKRHDSSVTSVSWHPDNILLATTSTDGKCRVFSTLIKGVDAKDSKKGTSSDSKFGELIVQLDLSSSWTFGVKWSPSGNTLAYAGHNSMIYFVDDVGPSPLAQNVVFRDLPLRDVGIICFREKSDRCGI

SEQ ID NO: 20620 - protein, 264 aa, Glycine max
MAVHQFAQCITCHAWSPDQSMVALCPNNNEVHIYRLVEDKWEKVHVLQKHDQVISGIDWSTRSNRIVTASHDRNSYVWNLEGSEWVPTLVILRLNRAALCVQWSPKENKFAVGSGAKTVCICYYEQENNWWVSKLIRKRHDSSVTSVSWHPDNILLATTSTDGKCRVFSTLIKGVDAKDSKKGTSSDSKFGELIVQLDLSSSWTFGVKWSPSGNTLAYAGHNSMIYFVDDVGPSPLAQNVVFRDLPLRDVGIICFREKSDRCGI

SEQ ID NO: 20621 - DNA, 1697 bp, Glycine max
gatttcagaacacaatggagcaaccacaactcttgcatgacccaaatttccctctcttcaaaaccccttcttcacccgccgtaaccaccaccgccactcacaaacccctttcaaccacacccatcaccaccacctccaacggtgagcgtcgagaagaccactccgtcgaaaccgccgccaccgttgccgccgacgcggaggcgttcggcgacctcgggctggcggaatgggcggtgaagacgtgccgggagctcgggatgcggaggccgcgccccgtgcagcggcggtgcatcccgcgcgtgctggagggccggcacgtgctgggcatcgacgagacagggagcgggaagacggccgccttcgcgctcccgatcctgcaccgtctcgccgagcatcccttcggcgtgttcgccctcgtggtgacgcccacgcgcgagctcgccttccagctcgccgagcagttccgcgccctcggctccgccgtgcacctccgcatcacggtggttgtcgggggcatggacatgctcaggcagaccaaggagctcgccgcgaggccgcacctcgtcattgccacccccgggaggatccacgccctgctccgcaataaccctgatattccccccgttttctccagaactaagttccttgtcttggatgaagcagatcgtgtcctggatgttggttttcaggaggaattgagatttatctttcagtgcttaccagaaaatcgacaaaacctgttcttttctgcaacaactacaagtaatctgcaaaagttgcgtgaacgttaccaagataagatgtatgtctatgaggcttatgaaggttttaaaacagttgaaacacttaagcaacaggctatattcatccctaaaaaggtgaaggatgtatatttgatgcatattttggctaaaatggaagatatgggaattcggtctgccattgtatttatctcaacatgcagagattgtcatcgtttaagtttaatgctggaagtgcttgatcaagaagcagcagctctgtattcattcaaatcacaagctcagaggcttgaagcacttcaccaatttaaatcaggaaaggtttcaatactgctagcaactgatgttgctagccgcggtttggatattcctacagttgatcttgtcatcaattatgatgttccaaggtttccacgagattatattcatcgtgtaggtcgtacagcaagagcaggtagagggggactggctttgagtcttgtcacccagaatgatgttgatcttattcatgaaatagaagcacttattgagaagcaacttgaaatgattgaatacaaagaaaatgaggtgctttctctcatgaaaaaggttttcagtgctaagaacgtagcagaaatgaagatgatagatgatggctttgaagagaaagctaaagagcggaaaaaacagaagctgaaaatgctagcagataaaggattgttaaataaaagaagtaaaaagagaaaacgaaataaagaatttgcagaggaaggggaagaacaaaaaaatgaggttttcactgttaggaatgtgacggaaatgaagaggatggatgaggatggcattgaggagaaagcagaagaggggggaatacaaaaacttaaaatgcgaacacagaaaggtttgtcaaagaaaaaaaagttaaaagaaagaaataacgaatttgcagatgaaagg

SEQ ID NO: 20622 - protein, 565 aa, Glycine max
FQNTMEQPQLLHDPNFPLFKTPSSPAVTTTATHKPLSTTPITTTSNGERREDHSVETAATVAADAEAFGDLGLAEWAVKTCRELGMRRPRPVQRRCIPRVLEGRHVLGIDETGSGKTAAFALPILHRLAEHPFGVFALVVTPTRELAFQLAEQFRALGSAVHLRITVVVGGMDMLRQTKELAARPHLVIATPGRIHALLRNNPDIPPVFSRTKFLVLDEADRVLDVGFQEELRFIFQCLPENRQNLFFSATTTSNLQKLRERYQDKMYVYEAYEGFKTVETLKQQAIFIPKKVKDVYLMHILAKMEDMGIRSAIVFISTCRDCHRLSLMLEVLDQEAAALYSFKSQAQRLEALHQFKSGKVSILLATDVASRGLDIPTVDLVINYDVPRFPRDYIHRVGRTARAGRGGLALSLVTQNDVDLIHEIEALIEKQLEMIEYKENEVLSLMKKVFSAKNVAEMKMIDDGFEEKAKERKKQKLKMLADKGLLNKRSKKRKRNKEFAEEGEEQKNEVFTVRNVTEMKRMDEDGIEEKAEEGGIQKLKMRTQKGLSKKKKLKERNNEFADER

SEQ ID NO: 20623 - protein, 561 aa, Glycine max
MEQPQLLHDPNFPLFKTPSSPAVTTTATHKPLSTTPITTTSNGERREDHSVETAATVAADAEAFGDLGLAEWAVKTCRELGMRRPRPVQRRCIPRVLEGRHVLGIDETGSGKTAAFALPILHRLAEHPFGVFALVVTPTRELAFQLAEQFRALGSAVHLRITVVVGGMDMLRQTKELAARPHLVIATPGRIHALLRNNPDIPPVFSRTKFLVLDEADRVLDVGFQEELRFIFQCLPENRQNLFFSATTTSNLQKLRERYQDKMYVYEAYEGFKTVETLKQQAIFIPKKVKDVYLMHILAKMEDMGIRSAIVFISTCRDCHRLSLMLEVLDQEAAALYSFKSQAQRLEALHQFKSGKVSILLATDVASRGLDIPTVDLVINYDVPRFPRDYIHRVGRTARAGRGGLALSLVTQNDVDLIHEIEALIEKQLEMIEYKENEVLSLMKKVFSAKNVAEMKMIDDGFEEKAKERKKQKLKMLADKGLLNKRSKKRKRNKEFAEEGEEQKNEVFTVRNVTEMKRMDEDGIEEKAEEGGIQKLKMRTQKGLSKKKKLKERNNEFADER

SEQ ID NO: 20624 - protein, 480 aa, Glycine max
MRRPRPVQRRCIPRVLEGRHVLGIDETGSGKTAAFALPILHRLAEHPFGVFALVVTPTRELAFQLAEQFRALGSAVHLRITVVVGGMDMLRQTKELAARPHLVIATPGRIHALLRNNPDIPPVFSRTKFLVLDEADRVLDVGFQEELRFIFQCLPENRQNLFFSATTTSNLQKLRERYQDKMYVYEAYEGFKTVETLKQQAIFIPKKVKDVYLMHILAKMEDMGIRSAIVFISTCRDCHRLSLMLEVLDQEAAALYSFKSQAQRLEALHQFKSGKVSILLATDVASRGLDIPTVDLVINYDVPRFPRDYIHRVGRTARAGRGGLALSLVTQNDVDLIHEIEALIEKQLEMIEYKENEVLSLMKKVFSAKNVAEMKMIDDGFEEKAKERKKQKLKMLADKGLLNKRSKKRKRNKEFAEEGEEQKNEVFTVRNVTEMKRMDEDGIEEKAEEGGIQKLKMRTQKGLSKKKKLKERNNEFADER

SEQ ID NO: 20625 - DNA, 1651 bp, Glycine max
gacaatcttgtctctttagaacccttccgtgtttctgtctctggttcgaggcgtctcgtttacggtcccttgtctctgtctccgttcattctggctgaacttatcttcgtgggatctgtgtttcgggaggattaatttgtagcagttagccttgtcactgtgtagagaatgcctctgcaactttttgatggcagcgattccgaaaacgaggacatttcaaagatcaagatagacaaggagtatgctcgtaggtttgagcacaataagaaacgggaggacctccagcgatttgaggaattaaaaaagaagggtgttattgattcaccttcacactcgcattctgaaggtgaggaggaatctgagtccgagtcattggatgatgatgatgatgactatgagacgcttgtcaattctagaaggagggacaaggagttctttgatgccttaattaaggtgaagaagcaagatcctattcttaagcaaaaagatgttaggctctttgggtctgatgatagcagtgacgacgaaagtgatgagaaggagaaagttaaatcaaaagacaagaagggtgaaaagccaatgtatttgaaggatgtggtggcaaagcatttgattgaggagggggcagattttggtgatgaagaggaggagatagatgaaaaggaaaaacgtaagggtaagaaggtaatgcctttgaaagataaagactttgttattaaggatgggaagaagacttatggtgatgagcaagaggagttgaaaaaggcttttctgcaagcagtagaaagggagggtttggaagatggtgaagaggagtttttcagtgtgaaggagaaggtaggtgaggaagacaaagtagatagtgatgacaaggaacttgaggagaagctggatgagtattttggtggagatgtagaatcaaatgaaaattccaagtttctaagaagctatttcatgaacaaattgtggatagacaagagtgggaagaatttgaatgttggagaggatgaattggacgagatttcagaggatgaggtggagcttgagagacaggaagaatatgagtacagatttcaggaaaatccaggagatagggtgttgggtcatgctcggaaggtggagggatcagtgaggaagaagatgaatgcaaggaaagagcagagaaagagcaaagaggagagaatggctatagaacaaaaggagagagaggaggagttgaaacgtttaaagaatttgaagaagcaggagatacaggagaaggttaaaaagataatgaagactgcagggatccatggtgatgatattatcccattgtctatggcagaaattgaagaggaatttgacccagaggagtatgacagaatgatgaagaaggcatttgacgagaaatattataatgcagaggatgctgaccttgacttttgtagtgacattgatgacattgagaagccagattttgaaaaggaggatgaattacttgggcttcctaaaggctgggatgcatgcggatctaatggtgggtttttagctgcaagggaaaaagcattgaaagaaaagattgagaatactagtgatgacgatctccctgaagcagaagatgaaaacgaaaggtttgagaatactagtgatgacgatctcccggaaggagaag

SEQ ID NO: 20626 - protein, 494 aa, Glycine max
MPLQLFDGSDSENEDISKIKIDKEYARRFEHNKKREDLQRFEELKKKGVIDSPSHSHSEGEEESESESLDDDDDDYETLVNSRRRDKEFFDALIKVKKQDPILKQKDVRLFGSDDSSDDESDEKEKVKSKDKKGEKPMYLKDVVAKHLIEEGADFGDEEEEIDEKEKRKGKKVMPLKDKDFVIKDGKKTYGDEQEELKKAFLQAVEREGLEDGEEEFFSVKEKVGEEDKVDSDDKELEEKLDEYFGGDVESNENSKFLRSYFMNKLWIDKSGKNLNVGEDELDEISEDEVELERQEEYEYRFQENPGDRVLGHARKVEGSVRKKMNARKEQRKSKEERMAIEQKEREEELKRLKNLKKQEIQEKVKKIMKTAGIHGDDIIPLSMAEIEEEFDPEEYDRMMKKAFDEKYYNAEDADLDFCSDIDDIEKPDFEKEDELLGLPKGWDACGSNGGFLAAREKALKEKIENTSDDDLPEAEDENERFENTSDDDLPEGE

SEQ ID NO: 20627 - protein, 357 aa, Glycine max
MYLKDVVAKHLIEEGADFGDEEEEIDEKEKRKGKKVMPLKDKDFVIKDGKKTYGDEQEELKKAFLQAVEREGLEDGEEEFFSVKEKVGEEDKVDSDDKELEEKLDEYFGGDVESNENSKFLRSYFMNKLWIDKSGKNLNVGEDELDEISEDEVELERQEEYEYRFQENPGDRVLGHARKVEGSVRKKMNARKEQRKSKEERMAIEQKEREEELKRLKNLKKQEIQEKVKKIMKTAGIHGDDIIPLSMAEIEEEFDPEEYDRMMKKAFDEKYYNAEDADLDFCSDIDDIEKPDFEKEDELLGLPKGWDACGSNGGFLAAREKALKEKIENTSDDDLPEAEDENERFENTSDDDLPEGE

SEQ ID NO: 20628 - protein, 321 aa, Glycine max
MPLKDKDFVIKDGKKTYGDEQEELKKAFLQAVEREGLEDGEEEFFSVKEKVGEEDKVDSDDKELEEKLDEYFGGDVESNENSKFLRSYFMNKLWIDKSGKNLNVGEDELDEISEDEVELERQEEYEYRFQENPGDRVLGHARKVEGSVRKKMNARKEQRKSKEERMAIEQKEREEELKRLKNLKKQEIQEKVKKIMKTAGIHGDDIIPLSMAEIEEEFDPEEYDRMMKKAFDEKYYNAEDADLDFCSDIDDIEKPDFEKEDELLGLPKGWDACGSNGGFLAAREKALKEKIENTSDDDLPEAEDENERFENTSDDDLPEGE

SEQ ID NO: 20629 - DNA, 1186 bp, Glycine max
agttagcacttagcagactctgctgcagtgaggtgaggggaggtttgtttgttgtttcgtttttcctttcctttccgccagaatccgttgagaatggcgttgccggtagtcgtcgatgcagagtacctcaaggaggtcgacaaggctcgccgcgatctccgcgcactcatcgctaacaggaactgcgctcctctcatgctccgattagcctggcacgatgccggaacttacgatgctaagaccaagaccggtggacctaacggttcgatccggaacgaggaagagtattctcacggagccaataatggcttgaagaaagctattgatttctgccaggaagtgaaggcaaaatatcctaaaattacatatgcagatctcttccagcttgcgggtgttgttgcagttgaggttactgggggtccaacaattgatttcgttcctggtagaagagattcaaaagtatctcctaatgaagggcggcttcctgatgctaaaaaaggtgttccacatctccgtgatatcttttatcgaatgggcttgactgaccgagatattgttgcactatctggaggacatacactggggagagcacatccagagagatcagggtttgatggcccttggacggaggaccctctgaagtttgataactcatactttgtggaacttttgaaagaagattctgctgggctgcttaaacttccaacagacaaggctttattggaggatgctgaatttcgctgttatgttgagctatatgcaaaggatgaggatgcattttttcgagattatgctgaatcacataagaaactttcagagctaggctttgtgccaagttcaaagccgatttctattaaggaagggaccatactggcacaaggtgctgtaggagttgtagttgctaccgcagtggtgatcctcagttacttgtatgaagttcgcaaaagagggaagtaaactggatttgttcatctcttggctgttacggttgcgtgaccctgaccctgacccatagtgtgcaaaacagggttcatttttgcagcttcagtttctgtttacttagtaacaataaagaataatgctacagacattcagacttttatatgaatagactaaaaacatccctgagtactcaaattgagagcaacttcattatacgtaaatacaaattttaacattcttagtt

SEQ ID NO: 20630 - protein, 287 aa, Glycine max
MALPVVVDAEYLKEVDKARRDLRALIANRNCAPLMLRLAWHDAGTYDAKTKTGGPNGSIRNEEEYSHGANNGLKKAIDFCQEVKAKYPKITYADLFQLAGVVAVEVTGGPTIDFVPGRRDSKVSPNEGRLPDAKKGVPHLRDIFYRMGLTDRDIVALSGGHTLGRAHPERSGFDGPWTEDPLKFDNSYFVELLKEDSAGLLKLPTDKALLEDAEFRCYVELYAKDEDAFFRDYAESHKKLSELGFVPSSKPISIKEGTILAQGAVGVVVATAVVILSYLYEVRKRGK

SEQ ID NO: 20631 - protein, 253 aa, Glycine max
MLRLAWHDAGTYDAKTKTGGPNGSIRNEEEYSHGANNGLKKAIDFCQEVKAKYPKITYADLFQLAGVVAVEVTGGPTIDFVPGRRDSKVSPNEGRLPDAKKGVPHLRDIFYRMGLTDRDIVALSGGHTLGRAHPERSGFDGPWTEDPLKFDNSYFVELLKEDSAGLLKLPTDKALLEDAEFRCYVELYAKDEDAFFRDYAESHKKLSELGFVPSSKPISIKEGTILAQGAVGVVVATAVVILSYLYEVRKRGK

SEQ ID NO: 20632 - DNA, 1013 bp, Glycine max
ttgttaagaaaggagaagagtccaaacctgtgccaatagaccctacaggttctaaccttcctcagggtggcaacaatgatggtgagtattggttggaccttccttctgacaaagccaacaaggaaagggtgaaaaagggtgatttcaagagttgccaagcctatgttcatgccaaacccatgtttggtggaacattcactgaccttgtcatgtgggttttctacccattcaatgggcctggaacagccaaagtagggctcatagatattccactagggaaaataggagaacatattggagactgggagcatgtgacactaagagtaagcaatttcgatggagaactaaaaaaggtgtatctctcacaacatagcaatggtcaatgggttgaagcttctcagctcgagttccaaagtgggaacaaatcagtgtgctattcctccttgaatggccatgccatttatccaaaagcaggacttgtcatgcaaggccttgatgggattggaataaagaatgaaactaagaagagtgagaaggtgattgacatgggtgttggttttgaagttgtttctggtgagtatttggggtcagcaattgtagaaccaccttggttaaactttttgaggcaatggggtccaaaaatcacttatgacattgcaaaggagctggacaatttggcgaaggtgttccctgctttggaagcccttgaagatggtttgccaaatgagttgttgggacaggagggacccacaggacctaagctcaaaagaaattggcaaggtgatgaggtttgaaatggaagacttggtgaatggtggcattattgacaccatgcaattaaaaaaggagactttaatttgctttttcgggtgttcccacaacattaaaaagcatgtgatattgctcttcaaatagtaggtagatggaggacagaagaaaattgaaaagatttttgtgtgcacttggcttataatgattatttttcccaaagatataaatattttatcactaag

SEQ ID NO: 20633 - protein, 263 aa, Glycine max
VKKGEESKPVPIDPTGSNLPQGGNNDGEYWLDLPSDKANKERVKKGDFKSCQAYVHAKPMFGGTFTDLVMWVFYPFNGPGTAKVGLIDIPLGKIGEHIGDWEHVTLRVSNFDGELKKVYLSQHSNGQWVEASQLEFQSGNKSVCYSSLNGHAIYPKAGLVMQGLDGIGIKNETKKSEKVIDMGVGFEVVSGEYLGSAIVEPPWLNFLRQWGPKITYDIAKELDNLAKVFPALEALEDGLPNELLGQEGPTGPKLKRNWQGDEV

SEQ ID NO: 20634 - protein, 204 aa, Glycine max
MFGGTFTDLVMWVFYPFNGPGTAKVGLIDIPLGKIGEHIGDWEHVTLRVSNFDGELKKVYLSQHSNGQWVEASQLEFQSGNKSVCYSSLNGHAIYPKAGLVMQGLDGIGIKNETKKSEKVIDMGVGFEVVSGEYLGSAIVEPPWLNFLRQWGPKITYDIAKELDNLAKVFPALEALEDGLPNELLGQEGPTGPKLKRNWQGDEV

SEQ ID NO: 20635 - protein, 194 aa, Glycine max
MWVFYPFNGPGTAKVGLIDIPLGKIGEHIGDWEHVTLRVSNFDGELKKVYLSQHSNGQWVEASQLEFQSGNKSVCYSSLNGHAIYPKAGLVMQGLDGIGIKNETKKSEKVIDMGVGFEVVSGEYLGSAIVEPPWLNFLRQWGPKITYDIAKELDNLAKVFPALEALEDGLPNELLGQEGPTGPKLKRNWQGDEV

SEQ ID NO: 20636 - DNA, 1737 bp, Glycine max
gaaaaaactaaggttgttggagaatcatcaaccgccgctagtggcgacggttccgttggtggagagggaagtgggaaacgtagctctgagttgtcaactacggagagacaagaaattcagataaagaaagcaaagctaatcaacatgcttgatgaggtggagcaaaggtacaggcagtaccacaaccagatgaagatagtgatatcctcatttgagcaagctgctggaataggctcagcaagaacgtacactgcgcttgcactgcaaacaatttcgaagcaatttcggtgtttgaaggatgcaataacggggcaaatcagagctgcaaacaagagtttgggagaagaggattgttttggtgctaaaattgaaggatctaggctcaaatatgtggaccatcatctaaggcaacagagggctattcagcaactgggaatgatccatcacaatgcttggagaccccagagaggattgccagagagatcggtttctgttctgcgtgcttggctctttgaacactttcttcatccttaccccaaggactcagacaagcacatgcttgctaaacaaacagggcttaccaggagccaggtttcaaattggttcattaatgctagagttcggctttggaagccaatggtggaggaaatgtacttggaggagatgaaagagcatgaactaaatggttctgaggagaaatcaagcaagagtggtgaagatcctgctacaaaaaccataagtccacaagagaaacgtacttcctctgaaattgaatccaaaagtttcaattccaaacaagatgtttccaaacaaagccagaacactccaattcttccaacttctccaccatcaatatcacttatagggggaagtgttaagaaccaatcaggattcagtttcatggggtcatcagaacttgatggaatcacacaaggaagtcctaaaaaaccaaggaaccatgaaattcttcactctccaaaccgtgtcccttcaatcaacatggatgtgaaagccaatgaagcaaacaatgagcaacaactctcaatggatcacgagaggcagaataatagggatagctactccttcatggggaaccaaacaaacttcattagtggctttggacaataccctattgaggaaattggtaggtttgatgctgagcaattcacaccaaggttttcaggtaagaatggagtttccctcactcttggtcttcctcattgtgacacattgtcaggaacacaccaaagttttctcccaaaccaaaacattcaacttggaagagggttggacattggtgaaccaaaccagtttggtgccttgaacaattccaattctcacaattcagcagcatttgagagtatcaacatgcagaacccgaagaggtttgctgcacaattgctaccagactttgtggcctaaataagacattgaagaggggatagatcatagttggtgacattggttatatgggtctctcatattttcttctaatccatgtgcttgtttcttgggagtagtgataaaatcttagtgtaaagaaagaaggaattttactctagtataggtttataccttgcatagaaccattttagtttcttagatagcttagagatttgaaagtctatggttatttgaggttgtatattatttttgtaatttttgaaaatgggatagatgggttggtgtcataaaatttcaattggtaaagattacaatatatcttcgattgagagc

SEQ ID NO: 20637 - protein, 473 aa, Glycine max
EKTKVVGESSTAASGDGSVGGEGSGKRSSELSTTERQEIQIKKAKLINMLDEVEQRYRQYHNQMKIVISSFEQAAGIGSARTYTALALQTISKQFRCLKDAITGQIRAANKSLGEEDCFGAKIEGSRLKYVDHHLRQQRAIQQLGMIHHNAWRPQRGLPERSVSVLRAWLFEHFLHPYPKDSDKHMLAKQTGLTRSQVSNWFINARVRLWKPMVEEMYLEEMKEHELNGSEEKSSKSGEDPATKTISPQEKRTSSEIESKSFNSKQDVSKQSQNTPILPTSPPSISLIGGSVKNQSGFSFMGSSELDGITQGSPKKPRNHEILHSPNRVPSINMDVKANEANNEQQLSMDHERQNNRDSYSFMGNQTNFISGFGQYPIEEIGRFDAEQFTPRFSGKNGVSLTLGLPHCDTLSGTHQSFLPNQNIQLGRGLDIGEPNQFGALNNSNSHNSAAFESINMQNPKRFAAQLLPDFVA

SEQ ID NO: 20638 - protein, 425 aa, Glycine max
MLDEVEQRYRQYHNQMKIVISSFEQAAGIGSARTYTALALQTISKQFRCLKDAITGQIRAANKSLGEEDCFGAKIEGSRLKYVDHHLRQQRAIQQLGMIHHNAWRPQRGLPERSVSVLRAWLFEHFLHPYPKDSDKHMLAKQTGLTRSQVSNWFINARVRLWKPMVEEMYLEEMKEHELNGSEEKSSKSGEDPATKTISPQEKRTSSEIESKSFNSKQDVSKQSQNTPILPTSPPSISLIGGSVKNQSGFSFMGSSELDGITQGSPKKPRNHEILHSPNRVPSINMDVKANEANNEQQLSMDHERQNNRDSYSFMGNQTNFISGFGQYPIEEIGRFDAEQFTPRFSGKNGVSLTLGLPHCDTLSGTHQSFLPNQNIQLGRGLDIGEPNQFGALNNSNSHNSAAFESINMQNPKRFAAQLLPDFVA

SEQ ID NO: 20639 - protein, 410 aa, Glycine max
MKIVISSFEQAAGIGSARTYTALALQTISKQFRCLKDAITGQIRAANKSLGEEDCFGAKIEGSRLKYVDHHLRQQRAIQQLGMIHHNAWRPQRGLPERSVSVLRAWLFEHFLHPYPKDSDKHMLAKQTGLTRSQVSNWFINARVRLWKPMVEEMYLEEMKEHELNGSEEKSSKSGEDPATKTISPQEKRTSSEIESKSFNSKQDVSKQSQNTPILPTSPPSISLIGGSVKNQSGFSFMGSSELDGITQGSPKKPRNHEILHSPNRVPSINMDVKANEANNEQQLSMDHERQNNRDSYSFMGNQTNFISGFGQYPIEEIGRFDAEQFTPRFSGKNGVSLTLGLPHCDTLSGTHQSFLPNQNIQLGRGLDIGEPNQFGALNNSNSHNSAAFESINMQNPKRFAAQLLPDFVA

SEQ ID NO: 20640 - DNA, 1367 bp, Glycine max
atgctgaaattaagaatctgtctcctgattctcctccatctctggagattgatggtaaagttgaagatagaatttcaccagatatgaaattggaagatcttctaaggatttatgaccaagagaaacttaagttcttatcttcatttgttgggcaggtttggtattcaaaacataaatgcactgccaaaatatattcctttagttttaccataaaagatggaacttgaatattattgatcttaacattaaacatatataccttgtgttttgcagaaaattaaaacaaatgtgttagtagcagacagaaaaatgagaaagctcatattctctctaagaccgaaagagaaggaagaattagttgagaagaagagaaatctcatggctaaacttcaagttggggatatagtaaaatgtcgtgtccagaaaattgcttactttgggatttttgttgaggttgaagaagtctctgcattaattcatcagtctgaattatcgtgggatgccactttgaacccagcatcatattttcagattggtcaggttctggaggcaaaagttcaccaaataaactttgctcttgagcgcatatttttatcattgaaggaggtcatgcctgatccattaatgaattccttagaggctatagttggggatcatgaccccttagatggaagactgaaagcagctcaaacagatgtagagtggccagaagtggattcccttgtcgaagaattgcaaaagattgagggagtccagtctgtttcaaaaggccgttttttcagaagccctggattagctccaacttttcaggtttatatggcatccatctttgaggatcagtataagttacttgctcgatctggaaacaaaatacaagaggtgattgttcaaacctctttagataaagaaaggatgaagtcagctgttatgacatgtgcaaacagagtagaataattgtggttggtgacatgacagtaagcctattgttgattgcttttttggtgattgtacattctttcggggagtgcaggctgcaatataaggagtttttcaagctaatttatacatgaggattggtgggaggatcaaatttttctttctttgtaaaaaattagtaataaaggcatatttctaacttctggggagacgtgttgggggtgagaggaggggttgcatataaagaacatgttcttagtcaacatataaaggacaagtagaaaaaactcgaatccttgctcttggatcaagtgatgccatttcttgtttgccactttgccttgtccactgcgaccgctgagaaattgttgatcattgtggttggttaatataagcttattagacagatttatttaaaaaagttgatgaat

SEQ ID NO: 20641 - protein, 214 aa, Glycine max
MRKLIFSLRPKEKEELVEKKRNLMAKLQVGDIVKCRVQKIAYFGIFVEVEEVSALIHQSELSWDATLNPASYFQIGQVLEAKVHQINFALERIFLSLKEVMPDPLMNSLEAIVGDHDPLDGRLKAAQTDVEWPEVDSLVEELQKIEGVQSVSKGRFFRSPGLAPTFQVYMASIFEDQYKLLARSGNKIQEVIVQTSLDKERMKSAVMTCANRVE

SEQ ID NO: 20642 - protein, 191 aa, Glycine max
MAKLQVGDIVKCRVQKIAYFGIFVEVEEVSALIHQSELSWDATLNPASYFQIGQVLEAKVHQINFALERIFLSLKEVMPDPLMNSLEAIVGDHDPLDGRLKAAQTDVEWPEVDSLVEELQKIEGVQSVSKGRFFRSPGLAPTFQVYMASIFEDQYKLLARSGNKIQEVIVQTSLDKERMKSAVMTCANRVE

SEQ ID NO: 20643 - protein, 114 aa, Glycine max
MPDPLMNSLEAIVGDHDPLDGRLKAAQTDVEWPEVDSLVEELQKIEGVQSVSKGRFFRSPGLAPTFQVYMASIFEDQYKLLARSGNKIQEVIVQTSLDKERMKSAVMTCANRVE

SEQ ID NO: 20644 - DNA, 1439 bp, Glycine max
ggattcgggcctttttctatgaataaaacatacccacttgcgtttattgcctgtgattctcaaattccttgtccaacagatctgagtctctgtaaagatatttattgcagggaaaaggatcttctttctggataatctgtgctgtccatttattccattgagtgcagcactcatgattgccaaacatccaatagctgctaagtttgatttagctttatgagaacttccatcaatgtggtctaattgggatagagtggatggatgtatgtgagtcagagcaagcattaaggaaacacagaactagaacaagacaacccttggttcctgctgaaaaaaacaatgcaatcaccaccaccagacgctcagggacaagggaaattacttcacggtataggtcgccttcgcctactccggcaactccatccggtcctcgtcgatgtccctctccaagcctcacaagggcaacgacacctgcatcatccaaattgttacccaaaagagctcaatcagcagagaggaagaggcctgcgactccaccttccccaccaagtccttccacacctgtccaagactcatcaatagatgtgcatttatcatccagaagggtgtctggtagcagaatgccagaggccctttggccttccacgatgcgaagtttgagtgtttcttttcagtcagacactatttccatacctgttatcaagaaggagaagccagtgactagtgcttctgatcgtacactgcggcccaattcaaacgtggctcacaagcaggttgaaacaccaaatgtaagaaaggctactccagagagaaagaggagtcctctcaaagggaagaatgcctctgatcataccgagaattcgaaacccgttgatggtttgcattctcgattgatagatcagcatagatggccaagcagaataggtgggaaggtatgttctagtgcatcaaatagaggtattgatcatgctgataagacaaccagaatgttgaactcttctgttctgggaactggtgtgtcttcactgcgaagattgtctttaccaggtgaagcaagaaggcccttgcagaaagcttctagtaatggtgcaaggctaatgttgcttgttgaaagtggtagaatagtatgcgaggcgaaaccggttgatgacagttttcaagtactaagacctcacaaatttgttccagcaataacattggataaaacaggattagcagcagctggagttagatctcagtccttgtcaaatccaggatcacggctaccatcacccagtaagacctcagtgttgtcctctagtagttcaagaggtgttagtccattgcggtcaaggccttcaactcctcctagaggggctagtccatctcgaataaggccagccaattcatccaaccaatccaacaacgcaatttcagttctcagctttattgctgatttc

SEQ ID NO: 20645 - protein, 394 aa, Glycine max
MDVCESEQALRKHRTRTRQPLVPAEKNNAITTTRRSGTREITSRYRSPSPTPATPSGPRRCPSPSLTRATTPASSKLLPKRAQSAERKRPATPPSPPSPSTPVQDSSIDVHLSSRRVSGSRMPEALWPSTMRSLSVSFQSDTISIPVIKKEKPVTSASDRTLRPNSNVAHKQVETPNVRKATPERKRSPLKGKNASDHTENSKPVDGLHSRLIDQHRWPSRIGGKVCSSASNRGIDHADKTTRMLNSSVLGTGVSSLRRLSLPGEARRPLQKASSNGARLMLLVESGRIVCEAKPVDDSFQVLRPHKFVPAITLDKTGLAAAGVRSQSLSNPGSRLPSPSKTSVLSSSSSRGVSPLRSRPSTPPRGASPSRIRPANSSNQSNNAISVLSFIADF

SEQ ID NO: 20646 - protein, 273 aa, Glycine max
MPEALWPSTMRSLSVSFQSDTISIPVIKKEKPVTSASDRTLRPNSNVAHKQVETPNVRKATPERKRSPLKGKNASDHTENSKPVDGLHSRLIDQHRWPSRIGGKVCSSASNRGIDHADKTTRMLNSSVLGTGVSSLRRLSLPGEARRPLQKASSNGARLMLLVESGRIVCEAKPVDDSFQVLRPHKFVPAITLDKTGLAAAGVRSQSLSNPGSRLPSPSKTSVLSSSSSRGVSPLRSRPSTPPRGASPSRIRPANSSNQSNNAISVLSFIADF

SEQ ID NO: 20647 - protein, 264 aa, Glycine max
MRSLSVSFQSDTISIPVIKKEKPVTSASDRTLRPNSNVAHKQVETPNVRKATPERKRSPLKGKNASDHTENSKPVDGLHSRLIDQHRWPSRIGGKVCSSASNRGIDHADKTTRMLNSSVLGTGVSSLRRLSLPGEARRPLQKASSNGARLMLLVESGRIVCEAKPVDDSFQVLRPHKFVPAITLDKTGLAAAGVRSQSLSNPGSRLPSPSKTSVLSSSSSRGVSPLRSRPSTPPRGASPSRIRPANSSNQSNNAISVLSFIADF

SEQ ID NO: 20648 - DNA, 1457 bp, Glycine max
gagagatcattgtccattatcacagaaatgggtgaagtaagagttctctcttacacaaaaaattcttgtctatatttattcttaatcaatctgtctctttccttttttcgacaacttttgctttgaaaactaactacaccacgggactaggatcgtgttttttaaacttttatgatcttttgtatataatgtctgttttatgatgtatatggtggcatcattatcaagtaatgcatgccacacacacacacacacacatatatatatactctagttctacacatggtggagatttttcaatcacatctttgctatatctaattaatgttctatatatttgcggagaacaaggaagaagaaaagaaagaagagaccacagaggaaaagaaggaaaaagagcctccagagatagtgctcaaggttgatatgcactgtgaagcttgtgcaaggaaagttgcaaaagcattgaaaggatttgaaggagtggaggaggtgactgcagatagcaaggcaagcaaagtggtagtgaaaggaaaggcagcagaccccataaaggtgtgtgagagactacaaaagaaaagtggcaagaaagtagagctcatttcacctttgcctaaacctccagaggagaaaaaagaagaagaaatcaaagaagaaccgcagccagaggagaaaaaggaggagctccctcctgtggtaacagtagtcctcaaagttcgaatgcattgtgaagcatgtgctcaagttatacaaaagcgaatccgcaagattcaaggagtagagtcagtggagacaagcttgggaaatgatcaagtcatagtaaaaggtgtgattgacccagcaaagctagttgattatgtgtacaagaggaccaaaaagcaagcttctatagtgaaagaggaggaaaaggaaaagaaggaagaagaggagaagaaagaggaggagaaaaaggaagagaaagaagaagagaaaaaaggagaagatggtgaagaggttgatactaaaactgacatcaagcgaagtgaatactggccattaagatcccacgttgactacgttgactacccttatgcttctcagattttcagtgatgagaacccaaatgcatgcactgtaatgtagatcagtcttttgtactaactcagtattttatagtagctgatcgatcaactgaagcaacttgtgctgtgtcgttggagcgtggaataagatgcatggttgtgaatgttttcaaggctttgtatatgatttcgcatccctcggagttggcattctatggagatagatgccttatttcttgtgttttatgagctttctacatatttccttggcaaagggtggctagaatcagttgtgttagtgtgtactgaattttggcctacaacttcaattatgtacctaaatgatgacatcaattagtaattttaagtcgtcatgtcatgataaaacttgctgcg

SEQ ID NO: 20649 - protein, 265 aa, Glycine max
MFYIFAENKEEEKKEETTEEKKEKEPPEIVLKVDMHCEACARKVAKALKGFEGVEEVTADSKASKVVVKGKAADPIKVCERLQKKSGKKVELISPLPKPPEEKKEEEIKEEPQPEEKKEELPPVVTVVLKVRMHCEACAQVIQKRIRKIQGVESVETSLGNDQVIVKGVIDPAKLVDYVYKRTKKQASIVKEEEKEKKEEEEKKEEEKKEEKEEEKKGEDGEEVDTKTDIKRSEYWPLRSHVDYVDYPYASQIFSDENPNACTVM

SEQ ID NO: 20650 - protein, 231 aa, Glycine max
MHCEACARKVAKALKGFEGVEEVTADSKASKVVVKGKAADPIKVCERLQKKSGKKVELISPLPKPPEEKKEEEIKEEPQPEEKKEELPPVVTVVLKVRMHCEACAQVIQKRIRKIQGVESVETSLGNDQVIVKGVIDPAKLVDYVYKRTKKQASIVKEEEKEKKEEEEKKEEEKKEEKEEEKKGEDGEEVDTKTDIKRSEYWPLRSHVDYVDYPYASQIFSDENPNACTVM

SEQ ID NO: 20651 - protein, 133 aa, Glycine max
MHCEACAQVIQKRIRKIQGVESVETSLGNDQVIVKGVIDPAKLVDYVYKRTKKQASIVKEEEKEKKEEEEKKEEEKKEEKEEEKKGEDGEEVDTKTDIKRSEYWPLRSHVDYVDYPYASQIFSDENPNACTVM

SEQ ID NO: 20652 - DNA, 1714 bp, Glycine max
aaactcactgatttgcatcgccttgaattaataaacactggagtgagaaaggtaccagcacatttgggaaaactgaagtatcttcaggtatcaatgagtccgtttaaggttggcaaaagtagggagttcagtatccagcagctaggagaactcaatcttcatggaagtctatcaattcagaacctgcagaatgtcgagagtccctcggatgcattagcagtggatttgaaaaataaaacacaccttgtcaagctgaagttagaatgggattcagactggaaccctgatgattcaacaaaagaaagggatgaaactgtaatcgagaatctacagccttccgaacacttgaagaagttgaagatctggaactatgggggtaaacaatttccaaggtggttattcaacaattcatcatgtaatgtggtgtccttaagcttgaagaactgtcgatcttgccaacgtttgcctccccttggacttttgccttctctgaaggagctttcaattggagggcttgatgggatcgtgagtattaatgctgattttttcgggagtagctcttgttcatttacatccttggaatctttggagttctccgatatgaaggaatgggaagaatgggaatgtaaaggtgtgacaggtgcttttccacgtcttcaacatctttctatagtgcgttgtcccaagctgaaagggcacttgccagagcaactatgtcatttaaatgatctaaagatttatgggtgcgaacaacttgtaccttctgctctcagtgcccctgatattcatcaattatccctaggagactgtggaaagctgcaaattgctcatccgacaactttgaaagagcttaccattacaggtcacaacgtggaggcagccttactcgaacagattggacgcagttactcttgttcaaataacaatattcccatgcacagttgctatgatttccttgtaaggttggtcatcaatggtggctgcgactctctaacgaccattccgctagatatcttcccaatactcagggagcttcatatcaggaagtgtcctaatctacagaggatttcacaggggcaggctcataatcatctcaagtttctgtatatcaacgagtgcccccaattagaatcattgcctgaaggaatgcatgtcctccttccatctcttgatgagctgtggatagaggattgtccaaaagttgaaatgtttcccgaaggaggtttgccatcaaatttaaaatgtatgcatctcgatggttgttccaaacttatgtcgttattgaaaagtgccttgggaggcaatcactctctagaaaggttatatattgaaggagtggatgttgagtgtcttcctgacgaaggtgtactgccacactctcttgttactctatggatcagggagtgtccagatctaaaaagactggactacaaaggtctctgccacctctcctctctcaagatattgcatctttataagtgccccaggctccaatgcttaccagaggagggtctgcccaaatccatttcatatttgagaattaataattgtccgttgctcaaacaacgttgccgggaaccccaaggcgaagactggccaaagattgctcacattgaacacgtggatataaggtagtgaggttgatttaaaagaataatggtgaaagttgtagatgcttctctattgcctgcaatttactaattaattgttttcc

SEQ ID NO: 20653 - protein, 544 aa, Glycine max
KLTDLHRLELINTGVRKVPAHLGKLKYLQVSMSPFKVGKSREFSIQQLGELNLHGSLSIQNLQNVESPSDALAVDLKNKTHLVKLKLEWDSDWNPDDSTKERDETVIENLQPSEHLKKLKIWNYGGKQFPRWLFNNSSCNVVSLSLKNCRSCQRLPPLGLLPSLKELSIGGLDGIVSINADFFGSSSCSFTSLESLEFSDMKEWEEWECKGVTGAFPRLQHLSIVRCPKLKGHLPEQLCHLNDLKIYGCEQLVPSALSAPDIHQLSLGDCGKLQIAHPTTLKELTITGHNVEAALLEQIGRSYSCSNNNIPMHSCYDFLVRLVINGGCDSLTTIPLDIFPILRELHIRKCPNLQRISQGQAHNHLKFLYINECPQLESLPEGMHVLLPSLDELWIEDCPKVEMFPEGGLPSNLKCMHLDGCSKLMSLLKSALGGNHSLERLYIEGVDVECLPDEGVLPHSLVTLWIRECPDLKRLDYKGLCHLSSLKILHLYKCPRLQCLPEEGLPKSISYLRINNCPLLKQRCREPQGEDWPKIAHIEHVDIR

SEQ ID NO: 20654 - protein, 513 aa, Glycine max
MSPFKVGKSREFSIQQLGELNLHGSLSIQNLQNVESPSDALAVDLKNKTHLVKLKLEWDSDWNPDDSTKERDETVIENLQPSEHLKKLKIWNYGGKQFPRWLFNNSSCNVVSLSLKNCRSCQRLPPLGLLPSLKELSIGGLDGIVSINADFFGSSSCSFTSLESLEFSDMKEWEEWECKGVTGAFPRLQHLSIVRCPKLKGHLPEQLCHLNDLKIYGCEQLVPSALSAPDIHQLSLGDCGKLQIAHPTTLKELTITGHNVEAALLEQIGRSYSCSNNNIPMHSCYDFLVRLVINGGCDSLTTIPLDIFPILRELHIRKCPNLQRISQGQAHNHLKFLYINECPQLESLPEGMHVLLPSLDELWIEDCPKVEMFPEGGLPSNLKCMHLDGCSKLMSLLKSALGGNHSLERLYIEGVDVECLPDEGVLPHSLVTLWIRECPDLKRLDYKGLCHLSSLKILHLYKCPRLQCLPEEGLPKSISYLRINNCPLLKQRCREPQGEDWPKIAHIEHVDIR

SEQ ID NO: 20655 - protein, 344 aa, Glycine max
MKEWEEWECKGVTGAFPRLQHLSIVRCPKLKGHLPEQLCHLNDLKIYGCEQLVPSALSAPDIHQLSLGDCGKLQIAHPTTLKELTITGHNVEAALLEQIGRSYSCSNNNIPMHSCYDFLVRLVINGGCDSLTTIPLDIFPILRELHIRKCPNLQRISQGQAHNHLKFLYINECPQLESLPEGMHVLLPSLDELWIEDCPKVEMFPEGGLPSNLKCMHLDGCSKLMSLLKSALGGNHSLERLYIEGVDVECLPDEGVLPHSLVTLWIRECPDLKRLDYKGLCHLSSLKILHLYKCPRLQCLPEEGLPKSISYLRINNCPLLKQRCREPQGEDWPKIAHIEHVDIR

SEQ ID NO: 20656 - DNA, 1260 bp, Glycine max
aaatattattactaatcattttcacaaaatcacatacataagcggtgagaatgagacgatagtatctagttaaatattaaccttttctttttccacaaaatctcacatcatgaataatagaatgagttgagagtcttgtgttgttcacctgtaacgtaacaagtaagctccagcactgtcttttattctctttcctttgatccatggaagcctgtgatctcatgtgatagttggtgtgctgcataggaaaggctttctaacgtgtcttctaaggtggtttcactgctccacggttgccgaatctagcttcttgcttctttctccttccaagatatcctttgattcaactttggatcttcacctctgatttcctttcatcgttgggtttatacacccttggggtttcccctcctcacccaactgtgtgcaacaaccacaaagtgtataccgtgtgttcttcctagaggggagaaaaaatggccacactttcagatattggggttgcagctggcttaaacattttgagtgcatttattttctttgtggcttttgctattttgaggcttcaaccttttaatgatcgggtatacttcccaaaatggtacctgaagggtttaagaacagatcctgtccacggaggagcgtttgttcgcaagtttgtcaatttagattggagatcatatcttaggtttttgaattggatgccagctgcacttagaatgccggaacttgaactcattgaccatgctggattggactctgttgtttacttgaggatttacttggttggacttaaaatctttgttccaatagcatttctggcatgggcagttctggttcctgtcaacgccacaagtaccgggctagaaagtgctggtctggacaacataacttcgagtgacattgataaactctcaatttcaaatgtccatagtacatctgaaaggttttgggcacacatactagttgcttatgcatttacattttggacatgctacattttactaaaggagtatgaaaaagttgcctcaatgagattgcaatttcttgcagcagaaaaacgtcgccctgatcaatttacggtgctcgttagaaacattccaccagatcctgatgagtctgtcagtgagcttgtggagcacttttttctggtcaatcatccagataactatctttctcaccaggttgtttataatgcaaacaaacttgcaaagttggttaaaaagaagaagaagttgcagaattggcttgtatattatc

SEQ ID NO: 20657 - protein, 261 aa, Glycine max
MATLSDIGVAAGLNILSAFIFFVAFAILRLQPFNDRVYFPKWYLKGLRTDPVHGGAFVRKFVNLDWRSYLRFLNWMPAALRMPELELIDHAGLDSVVYLRIYLVGLKIFVPIAFLAWAVLVPVNATSTGLESAGLDNITSSDIDKLSISNVHSTSERFWAHILVAYAFTFWTCYILLKEYEKVASMRLQFLAAEKRRPDQFTVLVRNIPPDPDESVSELVEHFFLVNHPDNYLSHQVVYNANKLAKLVKKKKKLQNWLVYY

SEQ ID NO: 20658 - protein, 186 aa, Glycine max
MPAALRMPELELIDHAGLDSVVYLRIYLVGLKIFVPIAFLAWAVLVPVNATSTGLESAGLDNITSSDIDKLSISNVHSTSERFWAHILVAYAFTFWTCYILLKEYEKVASMRLQFLAAEKRRPDQFTVLVRNIPPDPDESVSELVEHFFLVNHPDNYLSHQVVYNANKLAKLVKKKKKLQNWLVYY

SEQ ID NO: 20659 - protein, 180 aa, Glycine max
MPELELIDHAGLDSVVYLRIYLVGLKIFVPIAFLAWAVLVPVNATSTGLESAGLDNITSSDIDKLSISNVHSTSERFWAHILVAYAFTFWTCYILLKEYEKVASMRLQFLAAEKRRPDQFTVLVRNIPPDPDESVSELVEHFFLVNHPDNYLSHQVVYNANKLAKLVKKKKKLQNWLVYY

SEQ ID NO: 20660 - DNA, 1456 bp, Glycine max
agggtgtagtaccgttagaagcgagtccttctacggtccttgcctctgttcagtttcattcactcctcactgtaaaacctagcaagccaaaatcacaaccattccaagtgcatgtgaaatcgcaggtttaaggtttccgtttctccatgcaatgtatcgtgtgtgttccatttgtcgctttgactttcgttctcatttcctttgaccgttaatctcggcttttcttgcggaaagtaactgttggctgatcataaatggcgcccaatccaagagtggtggcggcctttacggcaatggcgaatctcgggattcatgaatcaaaagtgaaaccagtgttgaagaaactgcttaaattgtatgataagaactgggcactcattgaagaagagagttatagggccctggctgatgcaatatttgaggaggaagagaataaggtgaatgagccagaccagaataataaaaacaagaacggagttgtggacgatgaagaagctcatacgcatggggagcctgtgcgacctttgaagaggttgcgtttgagaggccaagagggtcaatctttgcgccctctgactagcagtggccccagctcagctgcatttccgttgaaagcgcctaaattagaagatggggcagtgcccgagagtagttccagacggcagcctcaaagcatggctgcattatctgatggaaatgcaaggattggtgctcgtcatgttcccccacaagatgctgttgtcgacaagggaaagaaacctatatcacctcaacttactcccagagcgagaaggtcccttgcagagccaacagttgaagcaggagctgctctgttggcaaataacaaaatgcctcatccatttattttgatcaagcccaaggatgagcctgttgatggtataccagattatgagattccccttgcagtgattcctcctgaaccatcaagtggaggagactctctaatgggtgcagctggaaagaaagattgccatgacactgtggtatcacagtgcagagatgaaaacgttgaacatgaatatgtttttccttcctcaaattaagaagcaacttctaatgtagatgtagctttgtcgtctatgggtgaggaacaatctgtaaagataacacaaactgatgatgtttcaaaggaatctgagaccaatgactcacctattgtcagaggaaacaaagattcggtcattgcaaatggatcaatcagtgttgagtcttctgccatggctgaacttcaagttcctagttctataccctgctcgagtgatctggataatgctgtaccagctcccaagaaggttggaatgaatggtttcttacaaagtgatagtggaaaggagctggagcatcctataatcccaaattcacgtactttagtggttgttccaaaacatcagcttactaatgatgatgtaagggcagttcatgatgttaatgacct

SEQ ID NO: 20661 - protein, 269 aa, Glycine max
MAPNPRVVAAFTAMANLGIHESKVKPVLKKLLKLYDKNWALIEEESYRALADAIFEEEENKVNEPDQNNKNKNGVVDDEEAHTHGEPVRPLKRLRLRGQEGQSLRPLTSSGPSSAAFPLKAPKLEDGAVPESSSRRQPQSMAALSDGNARIGARHVPPQDAVVDKGKKPISPQLTPRARRSLAEPTVEAGAALLANNKMPHPFILIKPKDEPVDGIPDYEIPLAVIPPEPSSGGDSLMGAAGKKDCHDTVVSQCRDENVEHEYVFPSSN

SEQ ID NO: 20662 - protein, 256 aa, Glycine max
MANLGIHESKVKPVLKKLLKLYDKNWALIEEESYRALADAIFEEEENKVNEPDQNNKNKNGVVDDEEAHTHGEPVRPLKRLRLRGQEGQSLRPLTSSGPSSAAFPLKAPKLEDGAVPESSSRRQPQSMAALSDGNARIGARHVPPQDAVVDKGKKPISPQLTPRARRSLAEPTVEAGAALLANNKMPHPFILIKPKDEPVDGIPDYEIPLAVIPPEPSSGGDSLMGAAGKKDCHDTVVSQCRDENVEHEYVFPSSN

SEQ ID NO: 20663 - DNA, 1151 bp, Glycine max
aattctgagaaaaactccaacgaacttcgcatttccacgaaaatggcttcccaaaacccagcggaggaagaaaattcaaagcgacattggtcccttgaagacttcgagatcggaaaacctctcggtaggggcaaattcggtagagtttacgtcgccagagaagttaagagcaaatttgttgtggcgttgaaggttatatttaaggaacaaattgataagtacagagttcatcaccaactgaggagagagatggagatacagaccagtctccggcacgcaaacatcctgcgtctttacggttggtttcatgatgctgaccgtgttttcttgattcttgagtatgctcataagggagagctttacaaggagctgagaaaaaagggtcatctcactgagaagcaagctgccacgtatattttgagcctcacaaaggcgttggcatattgtcatgagaaacatgttattcatagggatatcaagccagaaaatttgttgcttgaccatgaggggcgtcttaaaattgcagactttggttggtctgttcagtctagaagcaaaagacataccatgtgtggaacattggattatttagcaccagaaatggttgaaaacaaagctcatgactatgcagttgacaactggactttgggtatcctttgttatgagttcctctatggtgctcctccatttgaggctgagagtcaatctgataccttcaaaaggataatgaaggttgatctaagcttcccttccaccccttctgtctctatagaggcgaaaaatctgattagtcggctcctggtgaaagactcctcacgaaggctctctcttcagaagataatggagcatccttggataatcaagaatgcagattttgtgggtatttgctagtagcatcaactcactaatttaactttggccacgagggattaagactgaattctgtatatgatgttataaaatgcatgtaagtgttttgcagtgttcaagtgtttaatcaacttgaatgacacattacctttgctgcgaggttaggaacattaggatggtatatctgcctatttgtaatagttgtattgtaggtgtaatttcttccagttctttgtgcatctaaaccaggcatgactaatgacttgcacagatttattttg

SEQ ID NO: 20664 - protein, 296 aa, Glycine max
NSEKNSNELRISTKMASQNPAEEENSKRHWSLEDFEIGKPLGRGKFGRVYVAREVKSKFVVALKVIFKEQIDKYRVHHQLRREMEIQTSLRHANILRLYGWFHDADRVFLILEYAHKGELYKELRKKGHLTEKQAATYILSLTKALAYCHEKHVIHRDIKPENLLLDHEGRLKIADFGWSVQSRSKRHTMCGTLDYLAPEMVENKAHDYAVDNWTLGILCYEFLYGAPPFEAESQSDTFKRIMKVDLSFPSTPSVSIEAKNLISRLLVKDSSRRLSLQKIMEHPWIIKNADFVGIC

SEQ ID NO: 20665 - protein, 282 aa, Glycine max
MASQNPAEEENSKRHWSLEDFEIGKPLGRGKFGRVYVAREVKSKFVVALKVIFKEQIDKYRVHHQLRREMEIQTSLRHANILRLYGWFHDADRVFLILEYAHKGELYKELRKKGHLTEKQAATYILSLTKALAYCHEKHVIHRDIKPENLLLDHEGRLKIADFGWSVQSRSKRHTMCGTLDYLAPEMVENKAHDYAVDNWTLGILCYEFLYGAPPFEAESQSDTFKRIMKVDLSFPSTPSVSIEAKNLISRLLVKDSSRRLSLQKIMEHPWIIKNADFVGIC

SEQ ID NO: 20666 - protein, 213 aa, Glycine max
MEIQTSLRHANILRLYGWFHDADRVFLILEYAHKGELYKELRKKGHLTEKQAATYILSLTKALAYCHEKHVIHRDIKPENLLLDHEGRLKIADFGWSVQSRSKRHTMCGTLDYLAPEMVENKAHDYAVDNWTLGILCYEFLYGAPPFEAESQSDTFKRIMKVDLSFPSTPSVSIEAKNLISRLLVKDSSRRLSLQKIMEHPWIIKNADFVGIC

SEQ ID NO: 20667 - DNA, 1713 bp, Glycine max
ggtccacttccactcattcccgttttcctttactggtaagttgtaaccctataagccgttgctcccaccgccgccgcgcagatctccgtttcaacttgggttatctctaaggtcctaaacaatcctctttcaaaaacataccgagaaaagtgtggaaatgacgacaccatcattggtagagtctctagttcttcaactccatgagatctcagctgtcaaatttggcaacttcaagctcaaatctggcatcttctcaccaatctacatagacctccgcctcatcatatcttacccttctctcctccaacagatctctcaaacccttatttcttcagtctcttccacttcctttgacctcgtatgcggtgtcccttacactgccttacccattgctacatgtgtctctcttgctcagaacattcccatggtcatgcgccgcaaagaaatcaaagattatggcactgctaaagctattgaaggcgatttcaagcctggccaaagttgcttaatcattgaggatttggttaccagtggcacgtcagttttggaaactgcggcgccattgcgtgctgtgggattaaagatcagtgatgctgttgtgttgatcgatagagagcaaggtggcagagaaaacttggaggagaatggcatcaagctgcatgcaattattaaattgactgaaatggtgaaaattttgggcaatcacgggaagcttgatgaagagatggtaggggttgttacgaagttcttagaggataatcgtaaggttgctgctttggcaaaggtggagaagcctgtaactaaggtcaaagctttgccatttggggagagggctaagctgtcgaagaatccaatgggaaagaggttgtttgagataatggctgagaaggagagtaatctatgtttggctgctgatgttggaactgcagctgaattgcttgaaattgctgagaaggttggacctgagatatgcttgctgaagactcatgtggatatttttccagattttactgctgattttggctctaagcttctctcgattgcagaaaaacataacttcttaatctttgaggatcgtaaatttgctgatattggcaacacagtgaccatgcaatatgaaggaggggtttttcgtatattggattgggctcatatagtaaatgctcacataatctcaggtcctggaattgttgatggattaaaattgaagggtttacctcgtggtaggggtctattactgcttgctgaaatgagctcagctggtaaccttgccaagggagattatacaacttctgcagtaaaaattgctgaggatcattctgactttgtaattggcttcatctcagtcaatcctgcatcatggccaggggcaccaataaatccttctttcattcaggcaacccctggagttcaaatggtaactggtggcgatgctttagggcagcaatataacactccatattctgtgatccatgataggggcagtgacatcatcatcgtgggacgtggcatcatcaaagcagcaaaccctgctgagatagctcgtgaatatcgtcttcaaggatggaatgcatatttggctaaatgtaattgatgcctgcattcctagaataaaattatgagcttaaattatgttttaatgggacatctgatctcactgtaacccagatgaataaggtcttggggtacaatattaagacatttttcggttgc

SEQ ID NO: 20668 - protein, 478 aa, Glycine max
MTTPSLVESLVLQLHEISAVKFGNFKLKSGIFSPIYIDLRLIISYPSLLQQISQTLISSVSSTSFDLVCGVPYTALPIATCVSLAQNIPMVMRRKEIKDYGTAKAIEGDFKPGQSCLIIEDLVTSGTSVLETAAPLRAVGLKISDAVVLIDREQGGRENLEENGIKLHAIIKLTEMVKILGNHGKLDEEMVGVVTKFLEDNRKVAALAKVEKPVTKVKALPFGERAKLSKNPMGKRLFEIMAEKESNLCLAADVGTAAELLEIAEKVGPEICLLKTHVDIFPDFTADFGSKLLSIAEKHNFLIFEDRKFADIGNTVTMQYEGGVFRILDWAHIVNAHIISGPGIVDGLKLKGLPRGRGLLLLAEMSSAGNLAKGDYTTSAVKIAEDHSDFVIGFISVNPASWPGAPINPSFIQATPGVQMVTGGDALGQQYNTPYSVIHDRGSDIIIVGRGIIKAANPAEIAREYRLQGWNAYLAKCN

SEQ ID NO: 20669 - protein, 389 aa, Glycine max
MVMRRKEIKDYGTAKAIEGDFKPGQSCLIIEDLVTSGTSVLETAAPLRAVGLKISDAVVLIDREQGGRENLEENGIKLHAIIKLTEMVKILGNHGKLDEEMVGVVTKFLEDNRKVAALAKVEKPVTKVKALPFGERAKLSKNPMGKRLFEIMAEKESNLCLAADVGTAAELLEIAEKVGPEICLLKTHVDIFPDFTADFGSKLLSIAEKHNFLIFEDRKFADIGNTVTMQYEGGVFRILDWAHIVNAHIISGPGIVDGLKLKGLPRGRGLLLLAEMSSAGNLAKGDYTTSAVKIAEDHSDFVIGFISVNPASWPGAPINPSFIQATPGVQMVTGGDALGQQYNTPYSVIHDRGSDIIIVGRGIIKAANPAEIAREYRLQGWNAYLAKCN

SEQ ID NO: 20670 - protein, 387 aa, Glycine max
MRRKEIKDYGTAKAIEGDFKPGQSCLIIEDLVTSGTSVLETAAPLRAVGLKISDAVVLIDREQGGRENLEENGIKLHAIIKLTEMVKILGNHGKLDEEMVGVVTKFLEDNRKVAALAKVEKPVTKVKALPFGERAKLSKNPMGKRLFEIMAEKESNLCLAADVGTAAELLEIAEKVGPEICLLKTHVDIFPDFTADFGSKLLSIAEKHNFLIFEDRKFADIGNTVTMQYEGGVFRILDWAHIVNAHIISGPGIVDGLKLKGLPRGRGLLLLAEMSSAGNLAKGDYTTSAVKIAEDHSDFVIGFISVNPASWPGAPINPSFIQATPGVQMVTGGDALGQQYNTPYSVIHDRGSDIIIVGRGIIKAANPAEIAREYRLQGWNAYLAKCN

SEQ ID NO: 20671 - DNA, 1152 bp, Glycine max
gaaaaccaaaaagctaagagaatacaccaaaacccaacatgaaaacccttaacaaagcctcacttattttattccctctcttgttcctttccctattcaagcattcccatgctgcaggaatcgctgtctactggggccaaaacggtggagaaggcaccttagcagaagcttgcaacactagaaactaccaatatgtgaacatagccttcttgtccacttttggcaacggccaaactccacaactcaaccttgcaggtcattgtgaccccaacaacaatggctgcactgggttgagcagtgacatcaaaacttgccaagaccttggcatcaaagtgttgctctcccttggtggtggtgctggaagctactccctcagctcagctgatgatgccactcaacttgcaaactacctctggcagaatttccttggaggtcaaaccggatcagggccattaggtaatgttatattggatggcattgactttgacattgaatctggtgggagtgaccattatgatgacctagccagggcattaaatagcttcagctcacaaaggaaggtgtacttgtctgcagccccacagtgcataatccctgatgctcacttggatagagccatccaaactgggctttttgactatgtgtgggttcaattctacaacaacccttcatgccaatactccagtggaaacaccaacaatttgatcaattcatggaaccaatggatcacagtgccagcttctcaaatcttcatggggcttcctgcatctgaggcagctgctccaagtggtggctttgtgcccgctgatgtgttgacttctcaggttcttcctgtgattaaacagtcttcaaagtatggtggagtcatgctctggaacagattcaatgatgtccaaaatggttatagtaatgctattattggaagtgtttaatcatgttatagacttatagaaaaactatgtcattaattccattatttaaataatactaatcaccactcgtgattggtttttctactatatatatatatatatatatatatatatatatatatatattcaatgtgttttgaacgctacatatgtttattgtaatatgtcacctacaagttacatatggtataattaccaaaataataaatagttcattgcg

SEQ ID NO: 20672 - protein, 297 aa, Glycine max
MKTLNKASLILFPLLFLSLFKHSHAAGIAVYWGQNGGEGTLAEACNTRNYQYVNIAFLSTFGNGQTPQLNLAGHCDPNNNGCTGLSSDIKTCQDLGIKVLLSLGGGAGSYSLSSADDATQLANYLWQNFLGGQTGSGPLGNVILDGIDFDIESGGSDHYDDLARALNSFSSQRKVYLSAAPQCIIPDAHLDRAIQTGLFDYVWVQFYNNPSCQYSSGNTNNLINSWNQWITVPASQIFMGLPASEAAAPSGGFVPADVLTSQVLPVIKQSSKYGGVMLWNRFNDVQNGYSNAIIGSV

SEQ ID NO: 20673 - DNA, 1810 bp, Glycine max
aatgcctagtgaattagctatgaacaatgatgagctacatgtggttatgttcccattccttgcatttggccacattagtccatttgttcagctctccaacaagttgttctctcatggtgttcatgtcactttcttgtcagctgcatccaacattcccagaatcagatcaactcttaatctcaatccagccatcaatgttatctcactaaagttcccaaatggtataaccaacactgctgaattgccacctcacttagctggaaatctcatacacgcccttgacctcactcaagatcaggtgaagtcccttttgttggaactcaaaccccactatgttttctttgactttgcacaacattggctcccaaaattagcttctgaagttggcatcaagtctgttcatttctcagtctactctgccatttctgatgcttacattaccgtgccttctagatttgctgatgttgaaggaagaaacatcacttttgaggatcttaaaaagcctccacctgggtatcctcaaaactctaatatttccctcaaggcctttgaggccatggactttatgttcctcttcacaagatttggtgaaaaaaaccttactggttatgagcgagttttgcaaagccttggtgagtgttcattcatagtgttcaaaacgtgcaaggaaatagaaggaccctacttagactacatagaaacgcaatttcgaaaaccagttttgctatctggtccactagtccccgagccatcaaccgatgtgcttgaggaaaagtggtccaaatggttagatggtttccctgccaaatctgtcatattatgctcctttggcagtgagacatttctgagtgattatcaaatcaaagaactagccagtgggttagaactcactggcttacctttcattttggttctgaatttcccatccaatctctctgccaaagctgagttggagagagcattgccaaaagggtatttggaaagagtgaagaataggggagtggtgcacagtggttggtttcagcagcagcttgtgctgaaacactcaagtgtggggtgctatgtatgccatggtggctttagttcagtgattgaagctatggtcaatgagtgtcaactggtgctgttgcctttcaagggtgaccagtttttcaattctaaactcattgccaatgatttaaaggcaggggtagaggtgaataggagtgatgaagatgggttctttcacaaagaggatatactggaggcattgaaaactgtcatgttggaggataacaaagagcaagggaagcaaataagagaaaaccacatgcaatggagcaagtttttatcaaataaggaaattcagaacaaattcatcacagatctggttgcccagttaaagtctatggcttagtcttgtctcttccaatggaaaataaagtctaccaagactagaaagtataaactatagttcaaaatgatcatattatcatatatcaattgagatatgcgtggtcagtctcgttgttcttgtgattttgctttcccgttgtaggttttattctgtgtctcctttctcccgatcaattaatgcagttaggagattcaccttaaaaaagctaaaaattgcttttgtaacttgaagttattgtattcctactgattttggtcaagaccaagaagttgtcttataatttgtgcacatggtttgttttgaaatttagaaaggaaaaaagaaaagaaaaagtagagcatggaacaaatatcgtttgtaatataggtgaccaataaatgtagaaccattctaaataaatatggctttgaatac

SEQ ID NO: 20674 - protein, 464 aa, Glycine max
MPSELAMNNDELHVVMFPFLAFGHISPFVQLSNKLFSHGVHVTFLSAASNIPRIRSTLNLNPAINVISLKFPNGITNTAELPPHLAGNLIHALDLTQDQVKSLLLELKPHYVFFDFAQHWLPKLASEVGIKSVHFSVYSAISDAYITVPSRFADVEGRNITFEDLKKPPPGYPQNSNISLKAFEAMDFMFLFTRFGEKNLTGYERVLQSLGECSFIVFKTCKEIEGPYLDYIETQFRKPVLLSGPLVPEPSTDVLEEKWSKWLDGFPAKSVILCSFGSETFLSDYQIKELASGLELTGLPFILVLNFPSNLSAKAELERALPKGYLERVKNRGVVHSGWFQQQLVLKHSSVGCYVCHGGFSSVIEAMVNECQLVLLPFKGDQFFNSKLIANDLKAGVEVNRSDEDGFFHKEDILEALKTVMLEDNKEQGKQIRENHMQWSKFLSNKEIQNKFITDLVAQLKSMA

SEQ ID NO: 20675 - protein, 458 aa, Glycine max
MNNDELHVVMFPFLAFGHISPFVQLSNKLFSHGVHVTFLSAASNIPRIRSTLNLNPAINVISLKFPNGITNTAELPPHLAGNLIHALDLTQDQVKSLLLELKPHYVFFDFAQHWLPKLASEVGIKSVHFSVYSAISDAYITVPSRFADVEGRNITFEDLKKPPPGYPQNSNISLKAFEAMDFMFLFTRFGEKNLTGYERVLQSLGECSFIVFKTCKEIEGPYLDYIETQFRKPVLLSGPLVPEPSTDVLEEKWSKWLDGFPAKSVILCSFGSETFLSDYQIKELASGLELTGLPFILVLNFPSNLSAKAELERALPKGYLERVKNRGVVHSGWFQQQLVLKHSSVGCYVCHGGFSSVIEAMVNECQLVLLPFKGDQFFNSKLIANDLKAGVEVNRSDEDGFFHKEDILEALKTVMLEDNKEQGKQIRENHMQWSKFLSNKEIQNKFITDLVAQLKSMA

SEQ ID NO: 20676 - protein, 449 aa, Glycine max
MFPFLAFGHISPFVQLSNKLFSHGVHVTFLSAASNIPRIRSTLNLNPAINVISLKFPNGITNTAELPPHLAGNLIHALDLTQDQVKSLLLELKPHYVFFDFAQHWLPKLASEVGIKSVHFSVYSAISDAYITVPSRFADVEGRNITFEDLKKPPPGYPQNSNISLKAFEAMDFMFLFTRFGEKNLTGYERVLQSLGECSFIVFKTCKEIEGPYLDYIETQFRKPVLLSGPLVPEPSTDVLEEKWSKWLDGFPAKSVILCSFGSETFLSDYQIKELASGLELTGLPFILVLNFPSNLSAKAELERALPKGYLERVKNRGVVHSGWFQQQLVLKHSSVGCYVCHGGFSSVIEAMVNECQLVLLPFKGDQFFNSKLIANDLKAGVEVNRSDEDGFFHKEDILEALKTVMLEDNKEQGKQIRENHMQWSKFLSNKEIQNKFITDLVAQLKSMA

SEQ ID NO: 20677 - DNA, 1455 bp, Glycine max
aggatgagctctttttgtggattccagatgtccagagaatattttgctgaaggtgatatcagtaatgcaaaaaagacttttgatagtatagctagcctatacagaaaagagggatgggtaactttattatgggatgtcttgggatatttgcgagaatgcgccaggaaaaatggtactattaaagattttgtggagtattcccttgaaatggctgcgctgccaatatcatctgatactggtgtccagagagacattggtccagctggtcctgcaaatctactgcaaagagaaattgtacagaatgaggtttttgagcttgtcagtggagcttcaggaaaggaaacaaatgaacaccccggtaatctcaagatcatgggagatgaatcacttcaacttgaggttgatcttgttagtcctcttaggttggtgatgcttgcttcagttgctttccacgaacagacaatcaagcctggggcatcaactttgattacagtatcacttctttcccacttaccccatactgttgagattgatcgattagaaatccagttcaaccaatctaattgtaatttcttcattacaaatgcccaaaaacctcaatcagtagaagttagtaatggaattcaacagcatcgaaccgaggcagaaccttctctttcacttgaatcaaacaaatggctaaggttgacctatgacatccaatctggtaagtcagatactcttgacaaacttcactttcctattttgctatcaggtttattcactgcaccctcaaatatttctataagcaaataacctaggcatgttacatgtcaaacattctatattatctgatacaccctacaccaatatcttgtgatccttaatttctgttgtttatgatgctctctgtggctaacaatgggatgatttttcatatatatatatatatatatatatatatatatatatatatatatatattatgttgattgtaatttgggttcattatatgattttccagatcaaagtggaaaacttgaatgcctatctgttattgcaaaaattggatcacacttggcaatctgctgcagagctgaaagccctgcttcactggatagtttacctctttggacattggaggatcatgtacaaactgtaccaataaatgatccaatactcgtgttatctggtcagaagtccacccaagttttggaaccagatccacaggtggatctgcatcttggtgcctctggtcctgcactagtgggagaagttttcttggtacctgtaacattggtctccaaaggacatgatgtctactcaggtgaattgaagatcaatcttgtggatgtgaaggggggtggcttgtttagtccaagagactctgagccatatgctctggatagtcatcatgtccagttgcttggtatatctggaccagaaggagaagatgattctcaattagattctgac

SEQ ID NO: 20678 - protein, 264 aa, Glycine max
RMSSFCGFQMSREYFAEGDISNAKKTFDSIASLYRKEGWVTLLWDVLGYLRECARKNGTIKDFVEYSLEMAALPISSDTGVQRDIGPAGPANLLQREIVQNEVFELVSGASGKETNEHPGNLKIMGDESLQLEVDLVSPLRLVMLASVAFHEQTIKPGASTLITVSLLSHLPHTVEIDRLEIQFNQSNCNFFITNAQKPQSVEVSNGIQQHRTEAEPSLSLESNKWLRLTYDIQSGKSDTLDKLHFPILLSGLFTAPSNISISK

SEQ ID NO: 20679 - protein, 263 aa, Glycine max
MSSFCGFQMSREYFAEGDISNAKKTFDSIASLYRKEGWVTLLWDVLGYLRECARKNGTIKDFVEYSLEMAALPISSDTGVQRDIGPAGPANLLQREIVQNEVFELVSGASGKETNEHPGNLKIMGDESLQLEVDLVSPLRLVMLASVAFHEQTIKPGASTLITVSLLSHLPHTVEIDRLEIQFNQSNCNFFITNAQKPQSVEVSNGIQQHRTEAEPSLSLESNKWLRLTYDIQSGKSDTLDKLHFPILLSGLFTAPSNISISK

SEQ ID NO: 20680 - protein, 255 aa, Glycine max
MSREYFAEGDISNAKKTFDSIASLYRKEGWVTLLWDVLGYLRECARKNGTIKDFVEYSLEMAALPISSDTGVQRDIGPAGPANLLQREIVQNEVFELVSGASGKETNEHPGNLKIMGDESLQLEVDLVSPLRLVMLASVAFHEQTIKPGASTLITVSLLSHLPHTVEIDRLEIQFNQSNCNFFITNAQKPQSVEVSNGIQQHRTEAEPSLSLESNKWLRLTYDIQSGKSDTLDKLHFPILLSGLFTAPSNISISK

SEQ ID NO: 20681 - DNA, 1098 bp, Glycine max
gattggttctggaagctttggtgttgtgtacaaaggcaagctcgcggagggtcgtgaggtggcaatcaagaggggtgaaaccgggtccaagatgaagaagtttcaagagaaagagagtgcatttgagtctgaattggccttcttgtcgcgcctgcaccataagcaccttgttgggctagttgggttctgtgaagagaaagatgagaggctcttggtgtatgagtacatgaagaatggggctttgtatgatcatttgcatgcaaagaacaatgtggagaaggaaagcagtgtattgaataattggaaaatgaggatcaaaattgctttggatgcttcccggggaatagaatatcttcacaattatgcagttccgtctattattcgcagagatataaagtcttccaacattcttcttgatgctacttggacggcaagagtatctgattttggattgtctttgatgagtccagaacctgaccgtgatcaccgaccaatgaaggcagcgggaacagttggatatattgatcctgagtactatggtctaaatgtgttgacagcaaagagtgatgtgtatgggcttggagttgtattgcttgaacttttaacgggaaagagagctatattcaagtatggagaagatggaggcaccccattgagtgtggtggactttgcagtgcctgctattttggccggagaattagtgaaaattttggatccaagggttggaccacccgatgtgaatgaggccgaggcagtggaattagtggcctatacagccattcattgtgtcaatttggaagggaaagatagaccaaccatggctgacattgtggccaatttggagagggctttggctatttgtgagagtagccatgacagcacttccagcggtactatctctgttgtttcagaatgatattgtccaaccccgggaaagggaacaaaatattgaaaattttgtgaattcttattgattctttctcaatttcataactgaattgattttttctggtgttatattggaaataccctgccttgtaaagattaggaaaaccatctaacattacgcagtagtattgcagattatagaatttcgcg

SEQ ID NO: 20682 - protein, 304 aa, Glycine max
IGSGSFGVVYKGKLAEGREVAIKRGETGSKMKKFQEKESAFESELAFLSRLHHKHLVGLVGFCEEKDERLLVYEYMKNGALYDHLHAKNNVEKESSVLNNWKMRIKIALDASRGIEYLHNYAVPSIIRRDIKSSNILLDATWTARVSDFGLSLMSPEPDRDHRPMKAAGTVGYIDPEYYGLNVLTAKSDVYGLGVVLLELLTGKRAIFKYGEDGGTPLSVVDFAVPAILAGELVKILDPRVGPPDVNEAEAVELVAYTAIHCVNLEGKDRPTMADIVANLERALAICESSHDSTSSGTISVVSE

SEQ ID NO: 20683 - protein, 274 aa, Glycine max
MKKFQEKESAFESELAFLSRLHHKHLVGLVGFCEEKDERLLVYEYMKNGALYDHLHAKNNVEKESSVLNNWKMRIKIALDASRGIEYLHNYAVPSIIRRDIKSSNILLDATWTARVSDFGLSLMSPEPDRDHRPMKAAGTVGYIDPEYYGLNVLTAKSDVYGLGVVLLELLTGKRAIFKYGEDGGTPLSVVDFAVPAILAGELVKILDPRVGPPDVNEAEAVELVAYTAIHCVNLEGKDRPTMADIVANLERALAICESSHDSTSSGTISVVSE

SEQ ID NO: 20684 - protein, 229 aa, Glycine max
MKNGALYDHLHAKNNVEKESSVLNNWKMRIKIALDASRGIEYLHNYAVPSIIRRDIKSSNILLDATWTARVSDFGLSLMSPEPDRDHRPMKAAGTVGYIDPEYYGLNVLTAKSDVYGLGVVLLELLTGKRAIFKYGEDGGTPLSVVDFAVPAILAGELVKILDPRVGPPDVNEAEAVELVAYTAIHCVNLEGKDRPTMADIVANLERALAICESSHDSTSSGTISVVSE

SEQ ID NO: 20685 - DNA, 1891 bp, Glycine max
aaaacaaaaaagaccatggtaatggtaaaccctctaaattattggggaagacaaaagaatgagaaagaaagctgccctttctctcgctactcctcctaccccaaacaaaactttcccattacaaattgtggaatgaagaaagaatggcaagacaagtgagtagtagtatagtagtaattgacccatcaaacaaacaagcataacccatgtaattgttattgtagatagatagagtgagtgagtgagcactgtgttgtgtatatagtagtgtgtaaactctccccaacagacagacacgccgccactcaattatttctgtccatttcttcttcccatattgttctcgtgtgttgtgtgtgtcagtgttttggtgtgtgtgtgtgtgtgtgtgtgagtgagagaaagagaaaaaaagaaaagaaaaagagtgtcttggggcggttttggtttgagtttaacactttcatttcgaagatgccgcgcccagggccaaggccttacgagtgcgtgagaagggcttggcacagcgagcgccaccaacccgtgagaggttccatcattcagcagattttcagggtcgtcaatgacgctcacagtcccgcaaccaagaagaacaaggaatggcaggagaagctccccgtggtggttctcaaggccgaagaaatcatgtactccaaagccaattccgaggcagagtacttgaatcctgacacgctctgggaccgcctcaatgatgccgttaacacaatcatacggagagatgagacaaccgagacaggaggcctcttgcccccatgtgttgaagctgcacttaacttgggatgcaaagccgtgagaacttccagaagtgatcggcacaataacccaaggacttacctttctccaaggattcaacagcctccttgtctgcctcctaaacctgttgcggggaatcccttgaactatgcaaaagtcacaactcctgctgtgtcaccaattcctgtgccagattctatccacccaaatagcaggctcatgggttcctctaagtaccctttctcagaaggtatcccttctggtcatcaccagccattgacaatggaagctagaccctcattgaacttgggttcagtttaccctttgtactatggttatgaagccagagaacctgaaccttggacgactgctacagataccacgtgttctgatacaatctttgttggcagaccagtcatttcagtccctgagccttcaggaattggtctatcggaaaacttctcctatggtacattccatcacgttgcaaacagaatgagaaaagagactgctgttggcactcaggaggcagcaccagatagggaatgtgacttgtctttgaggttgggtcaatgtctgcatccgtgttcaagcagcaaaagtagttcagcatatgaagtagatgatgttggtttaggagtttcaccggaaagctgcaagtttagccatttatccttgcagagaaatagagagttctgtttttatcctagagagacaggttatggcaccattgagtccacttctggtaaatgtaatgtagagggtgaagatctgaatttagaggcaactcttcggaagcgcaaagcacctttatgtggtaacaacgaggaagatgggcaattttgccggaatccaggggtcccatccaatcgttttactagtaggccaggttcgtagacagtttcttgttgtatcatagtatatgcatttgcatttctagatagatgaatgatccaaaatgttgtttaatcctcttatgtagactctttatgtgtagctctgcttgtgaaaaattttagaagctggcgttgagttgctaattgcattttctcccaatgtgaactgtatataaaatcttagtttgctttgcttaaag

SEQ ID NO: 20686 - protein, 405 aa, Glycine max
MPRPGPRPYECVRRAWHSERHQPVRGSIIQQIFRVVNDAHSPATKKNKEWQEKLPVVVLKAEEIMYSKANSEAEYLNPDTLWDRLNDAVNTIIRRDETTETGGLLPPCVEAALNLGCKAVRTSRSDRHNNPRTYLSPRIQQPPCLPPKPVAGNPLNYAKVTTPAVSPIPVPDSIHPNSRLMGSSKYPFSEGIPSGHHQPLTMEARPSLNLGSVYPLYYGYEAREPEPWTTATDTTCSDTIFVGRPVISVPEPSGIGLSENFSYGTFHHVANRMRKETAVGTQEAAPDRECDLSLRLGQCLHPCSSSKSSSAYEVDDVGLGVSPESCKFSHLSLQRNREFCFYPRETGYGTIESTSGKCNVEGEDLNLEATLRKRKAPLCGNNEEDGQFCRNPGVPSNRFTSRPGS

SEQ ID NO: 20687 - protein, 341 aa, Glycine max
MYSKANSEAEYLNPDTLWDRLNDAVNTIIRRDETTETGGLLPPCVEAALNLGCKAVRTSRSDRHNNPRTYLSPRIQQPPCLPPKPVAGNPLNYAKVTTPAVSPIPVPDSIHPNSRLMGSSKYPFSEGIPSGHHQPLTMEARPSLNLGSVYPLYYGYEAREPEPWTTATDTTCSDTIFVGRPVISVPEPSGIGLSENFSYGTFHHVANRMRKETAVGTQEAAPDRECDLSLRLGQCLHPCSSSKSSSAYEVDDVGLGVSPESCKFSHLSLQRNREFCFYPRETGYGTIESTSGKCNVEGEDLNLEATLRKRKAPLCGNNEEDGQFCRNPGVPSNRFTSRPGS

SEQ ID NO: 20688 - protein, 225 aa, Glycine max
MGSSKYPFSEGIPSGHHQPLTMEARPSLNLGSVYPLYYGYEAREPEPWTTATDTTCSDTIFVGRPVISVPEPSGIGLSENFSYGTFHHVANRMRKETAVGTQEAAPDRECDLSLRLGQCLHPCSSSKSSSAYEVDDVGLGVSPESCKFSHLSLQRNREFCFYPRETGYGTIESTSGKCNVEGEDLNLEATLRKRKAPLCGNNEEDGQFCRNPGVPSNRFTSRPGS

SEQ ID NO: 20689 - DNA, 1455 bp, Glycine max
acattttctacgtattgaatctcaagattctaagagagattttgctgctctttgaagaagggtgtttgcttgattttggtgatgtcgctgctctcagatctcatcaaccttaacctctcagacactactgagaaggtgatcgcagagtacatatggatcggtggatcaggaatggacctgaggagcaaagcaaggactctcccaggaccagttagcgacccttcaaagcttcccaagtggaactatgatggttccagcacaggccaagctcctggagaagacagtgaagtgattatatacccacaagccattttcagggatccattcagaaggggcaacaatatcttggttatctgtgatgcttacactccagctggagaacccattcccactaacaagaggcacgatgctgccaaggttttcagccatcctgatgttgttgctgaagagacatggtatggtattgagcaggaatacaccttgttgcagaaagatatccaatggcctcttgggtggcctgttggtggtttccctggaccacagggtccatactactgtggtgttggcgctgacaaggcttttggccgtgacattgttgacgcacattacaaagcctgtctttatgctggcatcaacatcagtggaattaatggagaagtgatgcccggtcagtgggaattccaagttggaccttcagttggaatctcagctggtgacgaggtgtgggcagctcgttacatcttggagaggatcactgagattgctggtgtggtggtttcctttgatcccaagccaattcagggtgattggaatggtgctggtgctcacacaaactacagcactaagtccatgagaaatgatggtggctatgaagtgatcaaaaccgccattgagaagttggggaagagacacaaggagcacattgctgcttatggagaaggcaacgagcgtcgtttgacagggcgccacgaaaccgctgacatcaacaccttcttatggggagttgcaaaccgtggagcttcagttagggttgggagggacacagagaaagcagggaagggatattttgaggacagaaggccagcttctaacatggacccatatgtggttacttccatgattgcagacacaaccattctgtggaagccatgagcaaaacttgcatgttgtctccctttggatggaacaaggaacaaggaacaaggaacagttatgcttttctaagtagggtttggtcctttttattttttaccttttgatttttctaggatttcgatttgtggctactttggttggtgcaaccaactgccaagggttgttcattgttttctattcctttccctcgttttccgattgttacaataataataataataatgtaatatggttattttcagtctcaaacaaaagtaatgctgattgtgaagtataataatatatgaaattgtcatgtcc

SEQ ID NO: 20690 - protein, 356 aa, Glycine max
MSLLSDLINLNLSDTTEKVIAEYIWIGGSGMDLRSKARTLPGPVSDPSKLPKWNYDGSSTGQAPGEDSEVIIYPQAIFRDPFRRGNNILVICDAYTPAGEPIPTNKRHDAAKVFSHPDVVAEETWYGIEQEYTLLQKDIQWPLGWPVGGFPGPQGPYYCGVGADKAFGRDIVDAHYKACLYAGINISGINGEVMPGQWEFQVGPSVGISAGDEVWAARYILERITEIAGVVVSFDPKPIQGDWNGAGAHTNYSTKSMRNDGGYEVIKTAIEKLGKRHKEHIAAYGEGNERRLTGRHETADINTFLWGVANRGASVRVGRDTEKAGKGYFEDRRPASNMDPYVVTSMIADTTILWKP

SEQ ID NO: 20691 - protein, 326 aa, Glycine max
MDLRSKARTLPGPVSDPSKLPKWNYDGSSTGQAPGEDSEVIIYPQAIFRDPFRRGNNILVICDAYTPAGEPIPTNKRHDAAKVFSHPDVVAEETWYGIEQEYTLLQKDIQWPLGWPVGGFPGPQGPYYCGVGADKAFGRDIVDAHYKACLYAGINISGINGEVMPGQWEFQVGPSVGISAGDEVWAARYILERITEIAGVVVSFDPKPIQGDWNGAGAHTNYSTKSMRNDGGYEVIKTAIEKLGKRHKEHIAAYGEGNERRLTGRHETADINTFLWGVANRGASVRVGRDTEKAGKGYFEDRRPASNMDPYVVTSMIADTTILWKP

SEQ ID NO: 20692 - DNA, 1861 bp, Glycine max
acaattcctcaaatcacagcgaggaagaaacatcattttctcatgatagcagtatggaactgacagaaaatactagtgatgatccaatgccagaactgcacaatcctactacgctcaaagaaagatgtcttgagtctcttgattttcctggaaccgagacagtcaagaatatgcctgcctttggagctactgaagaacacttgagtggaaagcaaagtttagctggcagttatgataatgaggagaagatatcaagtgacagtgataatatttatcttgtagagatcaaagatactacctcaagttccttaaatgagccagttgaaattataagaagcagtcatgaggaggctccaaccaatgaaacagtcaatgatgttccagaagatttgctatccagtgtgaatacagaaaatccagatatcaaatctgagtcacctggaagagatgttgaaaccaagaatctgaatggtgataatggggaaaaaatttccatgtccaaaagtttagtcctagaaggtttagttagatcactcagatctaatttgattggttcaggagcacctgtaaacgaaccaactgccaacaacagaaaagaaggaattgaaaatgttaaacaggaaactgagactcttgaagagttccctacaaaggaacaatctgaagctcatattagtgctgttgtagaacctgagacccctgtagagaaacagaataacacaggattgtggtacttggtgtataagcacatggtatcaaatatggatgaaaacaattccgagtcactaattgatggggcagatgaaaaagagtcagggtttgatgggagcagaacaagaggagcttccttctctcatgaaagtacacccgtgactgatgaagagatgaaatttaaggaccatgtcgtagctgatccagaagttgcacgccaacagaatgaagccatcaagatggtagaagaagcaattgattcaattcttccagatgatcaggatgacttatcagacaaggaatcactcactgacagcacaatttcagacaactccaaacaatccaacagaactgaaagagtatacagtgaaggcctgaaccaaaaagaagaacagatggaatccgggaacggaatgatccaaaaacaagaagaatcagcaccaaaggagcaaaacaaaacaaaccagaaaatgtctacaagctggagcaatcttaaaaaagtgatcctgcttaggagattcatcaagtcattggaaaaagtaaggaaattcaacccaagagggcctagatatctacctctagagcctgattcagaagctgaaaaagttaacttaaggcatcaagacatggaagaacgaaaaggtacggaagaatggatgcttgattatgcacttcgacaggttgtttccaaattaacccctgctaggaaaagaaaagtggagctgctggtggaagcttttgaaacagtcatgccaactataaaaacttgaaactgggcaaactggcaaagagtggaatagctttgtatgcaaaaaaaattcaagctgaaaggtcaacaaggagatgtatatgatcataatcatttgggatgtcagcagttttttgttttgtggaaactgtgtctggtgtcatatattttttatagtctcttaggaggaaacttagagtatagaatgtttcatgattcagcaacaacaaaattcaatatagggatatttccccctttttttaacctttcatatctctcttggtgttctcaggtggatgttttgtatgaaagatttgcattacaaataccatagacaatctttaaatgtcatgatgtatgtcttttgtgtggaacataatagaatggcctaatccgtattgc

SEQ ID NO: 20693 - protein, 492 aa, Glycine max
NSSNHSEEETSFSHDSSMELTENTSDDPMPELHNPTTLKERCLESLDFPGTETVKNMPAFGATEEHLSGKQSLAGSYDNEEKISSDSDNIYLVEIKDTTSSSLNEPVEIIRSSHEEAPTNETVNDVPEDLLSSVNTENPDIKSESPGRDVETKNLNGDNGEKISMSKSLVLEGLVRSLRSNLIGSGAPVNEPTANNRKEGIENVKQETETLEEFPTKEQSEAHISAVVEPETPVEKQNNTGLWYLVYKHMVSNMDENNSESLIDGADEKESGFDGSRTRGASFSHESTPVTDEEMKFKDHVVADPEVARQQNEAIKMVEEAIDSILPDDQDDLSDKESLTDSTISDNSKQSNRTERVYSEGLNQKEEQMESGNGMIQKQEESAPKEQNKTNQKMSTSWSNLKKVILLRRFIKSLEKVRKFNPRGPRYLPLEPDSEAEKVNLRHQDMEERKGTEEWMLDYALRQVVSKLTPARKRKVELLVEAFETVMPTIKT

SEQ ID NO: 20694 - protein, 475 aa, Glycine max
MELTENTSDDPMPELHNPTTLKERCLESLDFPGTETVKNMPAFGATEEHLSGKQSLAGSYDNEEKISSDSDNIYLVEIKDTTSSSLNEPVEIIRSSHEEAPTNETVNDVPEDLLSSVNTENPDIKSESPGRDVETKNLNGDNGEKISMSKSLVLEGLVRSLRSNLIGSGAPVNEPTANNRKEGIENVKQETETLEEFPTKEQSEAHISAVVEPETPVEKQNNTGLWYLVYKHMVSNMDENNSESLIDGADEKESGFDGSRTRGASFSHESTPVTDEEMKFKDHVVADPEVARQQNEAIKMVEEAIDSILPDDQDDLSDKESLTDSTISDNSKQSNRTERVYSEGLNQKEEQMESGNGMIQKQEESAPKEQNKTNQKMSTSWSNLKKVILLRRFIKSLEKVRKFNPRGPRYLPLEPDSEAEKVNLRHQDMEERKGTEEWMLDYALRQVVSKLTPARKRKVELLVEAFETVMPTIKT

SEQ ID NO: 20695 - protein, 464 aa, Glycine max
MPELHNPTTLKERCLESLDFPGTETVKNMPAFGATEEHLSGKQSLAGSYDNEEKISSDSDNIYLVEIKDTTSSSLNEPVEIIRSSHEEAPTNETVNDVPEDLLSSVNTENPDIKSESPGRDVETKNLNGDNGEKISMSKSLVLEGLVRSLRSNLIGSGAPVNEPTANNRKEGIENVKQETETLEEFPTKEQSEAHISAVVEPETPVEKQNNTGLWYLVYKHMVSNMDENNSESLIDGADEKESGFDGSRTRGASFSHESTPVTDEEMKFKDHVVADPEVARQQNEAIKMVEEAIDSILPDDQDDLSDKESLTDSTISDNSKQSNRTERVYSEGLNQKEEQMESGNGMIQKQEESAPKEQNKTNQKMSTSWSNLKKVILLRRFIKSLEKVRKFNPRGPRYLPLEPDSEAEKVNLRHQDMEERKGTEEWMLDYALRQVVSKLTPARKRKVELLVEAFETVMPTIKT

SEQ ID NO: 20696 - DNA, 1635 bp, Glycine max
tttttatatgatgggcaattgaatgacaaagttatagattctggtgctttgttgctccaactccttctattagctgatcaatttggagtgacttttcttcaacaagaatgctgcaaaatgcttttagaatgtctctcagaggtagtttggcaatcttcactcacaacggaaatcagtacttatttggaagttagaatcatttatcctgtggatgccacttgaactaactgtttggagaagagagttgcggtttcagacttgtgaaaacaaaagaagagatccattttatagtaatcaattctaagatattgatacttctcgtctacatattatatgcagggatgaagttcttctattgggtgaaggtcatacaacaaagtttttctattatacacaaatttaaatggaggaagcagacaaatttggcaactaataataccgtagcctttgaagctaaccgttgaactttgttgcaggactcagtatgtccactcctccaagtggtttcttcaatgccatcatgtagacttattaaagaatcattgcagaggagaatttccatgaactttgactattatatcagtgcgagtactgactttgtgttattagatgagacaactttaatcaatatcattaagcatccagatctgacagtaacgtctgaagagaaagtccttaatgcaattctaatgtttggcatgaatgcaaaacagttgtttgggtgggaagtggtggatcagttaatggaaaattcaaaaccagaactcctttttggtgagaggcttcagttaatctatgacttgttgccatttgtgcgatttccactactacaatattccttacttgagaagttgcagcatagcagcattggccggcatattcctgttttccaaaatcttgttaacgaggctatcaattttgttaaatgtgggctggcagagtcagaaaatgaagagaatgttagattccaacatagacgatccagttacagggaactccagtacatctgtgatggggatgaccatggagttctgtactttgctggaacatcctatggtgaacacccgtgggttaatcctcttttggcagagccaaggaaaattaccatcacagctagcagcccccactcaagatacactgatcccaaggttttggtctcaagaacctaccagggaacatgttttgctgggcctcgattggaaaatggacagaactgtagctggtggatggtggatcttggccaagatcatcagcttatgtgcaactactataccctgaggcaggacggttctaaggccttcccgagatgttggaatgttcagggctcacttgacggaaagagctggacaaacttgagagtccatgaaaatgatcggagtatatgtaaacctggccagtttgcctcttggcccataattggccccaacgctctgcttcccttcaggtatttccgggttgtgctcacaggaaccaccaccgatgccaccaatccctggaatttctgcatttgttacttggaattgtatggctacttcctttaaaagcctagccatgccaataccataccttcctaaaatacaattccagctccttcatgtacattatggtttgcttattgactaaattatttgaatc

SEQ ID NO: 20697 - protein, 342 aa, Glycine max; identical to SEQ ID NO: 17628

SEQ ID NO: 20698 - protein, 326 aa, Glycine max
MNFDYYISASTDFVLLDETTLINIIKHPDLTVTSEEKVLNAILMFGMNAKQLFGWEVVDQLMENSKPELLFGERLQLIYDLLPFVRFPLLQYSLLEKLQHSSIGRHIPVFQNLVNEAINFVKCGLAESENEENVRFQHRRSSYRELQYICDGDDHGVLYFAGTSYGEHPWVNPLLAEPRKITITASSPHSRYTDPKVLVSRTYQGTCFAGPRLENGQNCSWWMVDLGQDHQLMCNYYTLRQDGSKAFPRCWNVQGSLDGKSWTNLRVHENDRSICKPGQFASWPIIGPNALLPFRYFRVVLTGTTTDATNPWNFCICYLELYGYFL

SEQ ID NO: 20699 - protein, 283 aa, Glycine max
MFGMNAKQLFGWEVVDQLMENSKPELLFGERLQLIYDLLPFVRFPLLQYSLLEKLQHSSIGRHIPVFQNLVNEAINFVKCGLAESENEENVRFQHRRSSYRELQYICDGDDHGVLYFAGTSYGEHPWVNPLLAEPRKITITASSPHSRYTDPKVLVSRTYQGTCFAGPRLENGQNCSWWMVDLGQDHQLMCNYYTLRQDGSKAFPRCWNVQGSLDGKSWTNLRVHENDRSICKPGQFASWPIIGPNALLPFRYFRVVLTGTTTDATNPWNFCICYLELYGYFL

SEQ ID NO: 20700 - DNA, 1174 bp, Glycine max
gtcaatctcattggatactgtgccgatggggaccaacgcctcttagtttatgaatttatgccttttggatctttggaggaccaccttcatgatcttcccccggacaaggaaccattagattggaataccaggatgaaaatagctgctggggcagcaaaaggattggaataccttcacgacaaagcaaaccctcctgtcatttatagagacttcaaatcatctaatatattacttgatgaaggttatcatccaaagctttcagactttggtcttgcaaagcttggtccagttggtgacaaatcacacgtttcaacccgtgtcatgggaacttatggttactgtgccccagaatatgctatgactggacagctgactgtgaagtctgatgtatatagttttggggtagtcttcttggagctgattactggccgtaaagccattgacagcactcgaccccatggagaacaaaaccttgtcacatgggcacgtccactgttcagtgaccgcaggaagtttcaaagttagcagatcacagctgcagggacggtatcccatgcggggtctttaccaagctctagctgtggcatcaatgtgcattcaagaacaggctgcagcacgtccactcattggggatgtggtgacagccctttcttttctggccaaccaggcatatgaccataggggagctggtgatgataaaaagaacagggatgataaaggtggaagaatattgaaaaatgatgtaggtggaggatctggacgcagatgggatttggaaggatctgagaaagatgactccccacgtgaaactgcaaggatgttaaacaacagggatcttgatagagaacgtgccgtggctgaagccaagatatggggagagaattggagagaaaaaagacgacaaagtgcgcagggcagttttgatggttctaacgcttagtctcgattgtacaattcccatacgcgtcttctgtatctcagctgtgccccaggtggagctttttgggagctcatctttcataaagctggtgtaggacaagtctgaaaggccgttttggccatttactaggttctgttttgtttagaatttgtcttgtggccatttcttgcagtggctgcaaccaaacataatgaaccgggtaccaaaatcttttctacatcagccttttatgcg

SEQ ID NO: 20701 - protein, 174 aa, Glycine max
VNLIGYCADGDQRLLVYEFMPFGSLEDHLHDLPPDKEPLDWNTRMKIAAGAAKGLEYLHDKANPPVIYRDFKSSNILLDEGYHPKLSDFGLAKLGPVGDKSHVSTRVMGTYGYCAPEYAMTGQLTVKSDVYSFGVVFLELITGRKAIDSTRPHGEQNLVTWARPLFSDRRKFQS

SEQ ID NO: 20702 - protein, 160 aa, Glycine max
MENKTLSHGHVHCSVTAGSFKVSRSQLQGRYPMRGLYQALAVASMCIQEQAAARPLIGDVVTALSFLANQAYDHRGAGDDKKNRDDKGGRILKNDVGGGSGRRWDLEGSEKDDSPRETARMLNNRDLDRERAVAEAKIWGENWREKRRQSAQGSFDGSNA

SEQ ID NO: 20703 - protein, 155 aa, Glycine max
MPFGSLEDHLHDLPPDKEPLDWNTRMKIAAGAAKGLEYLHDKANPPVIYRDFKSSNILLDEGYHPKLSDFGLAKLGPVGDKSHVSTRVMGTYGYCAPEYAMTGQLTVKSDVYSFGVVFLELITGRKAIDSTRPHGEQNLVTWARPLFSDRRKFQS

SEQ ID NO: 20704 - DNA, 1371 bp, Glycine max
taccaagattcagctgttgaatcacaaggagacacctcttctgttggcaatgatactgcatatagatcaaaagagtttgcatttgaaaatcctgctgcttatctttctaggtttgctggttctgaatgtggcactgaactctctatttcttccactcttgattcacctgacatatcagagcctggcgctatggaaaatgaacgagatgccaaagatttaatggaagggattggtaatcttgagaacactataaaccatgatgatgaggccaatgacaatgtttcacgtgtcatcccagcttctaacctagctacttctgttttggataagtcagagattgttgatgacattagtgccaatttgggtcactcagtggtagctgtggactctgaagagcctgctattaagactgagaaaaatgcacctgacctgcagagagagctgccagagtctgttctgcaagatttaagatcatctccagaagcttcacctagaagccatttaactgtccctgaatcacaaggaacgccttcaagtgaagtgtctgtgaaacctaaagatagcactatcaacaagactagatctggcaataaacgtcggagcctatcattgagtaacaaatcacctacaaatccaaatcatgattcaggctcgaaagacagtagggagcaactgcctaaagatcagcagaatggaaagaggcgcaattcctttggctcagtaaagcctgataacattgatcaagaatctagagataatagtactaacaacaattctctaccccatttcatgcaagctacagaatctgctagggccaaggttaatgcaaataactctccaagatcaagtccagatgtacacgaaggagatatcgaagttaagaagagacattccttacctggtgccactggtaggcaagtttctccacgcatccaacgatcaacatctaaggcacagcagagtgcaaaaggaaacaatgtacatcctcctcaagagagaaaatggctgaggtgaattgagggcgaagtgtgccgacaagcttctacgatttcattttttaattctctttgaagcatagctgctccgttttatatgcttttttttctccctctttttatatttcttgactctgtattctttgcctcccttttttgcttccccaaatttgaaggtgctcagtttggttgtgacggttgggaacatgaatatgtaaaagtgagtgaggcttatatatgtacattgttgctctgctcatggttattattgtgccatacatgtaaggcgcacgcgatctgtaagtttcagagttcagactacgactgcgtatgagatattttaatgttaaatatattttgcttgaattttgacaag

SEQ ID NO: 20705 - protein, 337 aa, Glycine max
YQDSAVESQGDTSSVGNDTAYRSKEFAFENPAAYLSRFAGSECGTELSISSTLDSPDISEPGAMENERDAKDLMEGIGNLENTINHDDEANDNVSRVIPASNLATSVLDKSEIVDDISANLGHSVVAVDSEEPAIKTEKNAPDLQRELPESVLQDLRSSPEASPRSHLTVPESQGTPSSEVSVKPKDSTINKTRSGNKRRSLSLSNKSPTNPNHDSGSKDSREQLPKDQQNGKRRNSFGSVKPDNIDQESRDNSTNNNSLPHFMQATESARAKVNANNSPRSSPDVHEGDIEVKKRHSLPGATGRQVSPRIQRSTSKAQQSAKGNNVHPPQERKWLR

SEQ ID NO: 20706 - protein, 274 aa, Glycine max
MENERDAKDLMEGIGNLENTINHDDEANDNVSRVIPASNLATSVLDKSEIVDDISANLGHSVVAVDSEEPAIKTEKNAPDLQRELPESVLQDLRSSPEASPRSHLTVPESQGTPSSEVSVKPKDSTINKTRSGNKRRSLSLSNKSPTNPNHDSGSKDSREQLPKDQQNGKRRNSFGSVKPDNIDQESRDNSTNNNSLPHFMQATESARAKVNANNSPRSSPDVHEGDIEVKKRHSLPGATGRQVSPRIQRSTSKAQQSAKGNNVHPPQERKWLR

SEQ ID NO: 20707 - protein, 264 aa, Glycine max
MEGIGNLENTINHDDEANDNVSRVIPASNLATSVLDKSEIVDDISANLGHSVVAVDSEEPAIKTEKNAPDLQRELPESVLQDLRSSPEASPRSHLTVPESQGTPSSEVSVKPKDSTINKTRSGNKRRSLSLSNKSPTNPNHDSGSKDSREQLPKDQQNGKRRNSFGSVKPDNIDQESRDNSTNNNSLPHFMQATESARAKVNANNSPRSSPDVHEGDIEVKKRHSLPGATGRQVSPRIQRSTSKAQQSAKGNNVHPPQERKWLR

SEQ ID NO: 20708 - DNA, 1271 bp, Glycine max
attttttcttcatcatccaccactttatttgtcacttgctttcatgcaattaacacttctaccaccttttttcattttctcactctcttcactaaaatgagtgacacacaccaacctttcatgtccgtacaaccacccatgaagctccacaaccacccatttaacccacaagcctcaagctcaaattttgacggcgacccaccatgcaaaaccgccggaaaaacaaaaccacctcacacgaagctcctccgggtcattctcaccgaccacgacgccaccgattctgactcctccggcgacgacgaagacccaaaaaacacaaaaaaacacaaaaaggtgaaaagacaaattacccacatcaccataaaccttccctttttctcaaaatccccaactccaacatcaacaccttcttcttcttcgcttgacccgacccgttcgacccgacccaagaaacgactcggcgtccctcgccgccggaacaagttccgcggcgtccggcagcgaccatggggacggtggacggcagaaatccgtgacccgactcagagaaaacgggtctggctcggaaccttcgacacggcggaggaagccgccgccgtgtacgacgaggccgcggtgaagctcaagggccctaacgccgtcaccaacttccccctctccgccgccggaaacacggaacatgatacccctccgccggagacggtgttctccggcgaaggtctttcatctccgacgtccgttctcacttactgcgacggagactcgacgccgttcgacggttttcgttacggcgaggtcgacgcgttcgggtttgagtttgacatcgacgcgccgtttagtttaacggccgttaacttaggggtgctgagtcagcggttcgggaaggaagagtttggcgagtttgacccgaacgagttcttgacgtggccgagttaaggggcttctttgtcatttcgcgaaatatccagggactggtttagtaattctactaaagttctttttgtcgtattgttttgtcctacgtggaattccaaaactaccctcgtgactaaagagtttttgtgcagcttagaagagtgttagagtgctagagagcaatagagtgagaacaatttcgtaatggaagtggaagagaattttgtcctatgttaatttgtgtaattaagccttaattgtattgttatggagaaagaggatatgatggaaagtattagaaggattctattgtagtttcttatataattttataaagtaaaaatgttagtatt

SEQ ID NO: 20709 - protein, 312 aa, Glycine max
IFSSSSTTLFVTCFHAINTSTTFFHFLTLFTKMSDTHQPFMSVQPPMKLHNHPFNPQASSSNFDGDPPCKTAGKTKPPHTKLLRVILTDHDATDSDSSGDDEDPKNTKKHKKVKRQITHITINLPFFSKSPTPTSTPSSSSLDPTRSTRPKKRLGVPRRRNKFRGVRQRPWGRWTAEIRDPTQRKRVWLGTFDTAEEAAAVYDEAAVKLKGPNAVTNFPLSAAGNTEHDTPPPETVFSGEGLSSPTSVLTYCDGDSTPFDGFRYGEVDAFGFEFDIDAPFSLTAVNLGVLSQRFGKEEFGEFDPNEFLTWPS

SEQ ID NO: 20710 - protein, 280 aa, Glycine max
MSDTHQPFMSVQPPMKLHNHPFNPQASSSNFDGDPPCKTAGKTKPPHTKLLRVILTDHDATDSDSSGDDEDPKNTKKHKKVKRQITHITINLPFFSKSPTPTSTPSSSSLDPTRSTRPKKRLGVPRRRNKFRGVRQRPWGRWTAEIRDPTQRKRVWLGTFDTAEEAAAVYDEAAVKLKGPNAVTNFPLSAAGNTEHDTPPPETVFSGEGLSSPTSVLTYCDGDSTPFDGFRYGEVDAFGFEFDIDAPFSLTAVNLGVLSQRFGKEEFGEFDPNEFLTWPS

SEQ ID NO: 20711 - protein, 272 aa, Glycine max
MSVQPPMKLHNHPFNPQASSSNFDGDPPCKTAGKTKPPHTKLLRVILTDHDATDSDSSGDDEDPKNTKKHKKVKRQITHITINLPFFSKSPTPTSTPSSSSLDPTRSTRPKKRLGVPRRRNKFRGVRQRPWGRWTAEIRDPTQRKRVWLGTFDTAEEAAAVYDEAAVKLKGPNAVTNFPLSAAGNTEHDTPPPETVFSGEGLSSPTSVLTYCDGDSTPFDGFRYGEVDAFGFEFDIDAPFSLTAVNLGVLSQRFGKEEFGEFDPNEFLTWPS

SEQ ID NO: 20712 - DNA, 1523 bp, Glycine max
atccaaaatgaagcttgaagaatctgtgtccagctccaacatcattgcccggctgcttccaccggaagatccgaatccgcaaaatggatcaatctccggagcggtgttcaacataacaaccaccatgatcggtgccggaatcatgtccattccggcgaccatgaaggttttaggcatagttccggggttggtggtgatcgtgttggtggcactgataacagatgtgactgtggagtttatgctaaggtacacaagttccggtaaatcctctacttacgctggcatgatggcagagtcctttgcctccataggatccctcgccgttaagatttgcgtcatcatatccaatttgggggtcctcatcatctatttcattatccttggagacgtgctctctggaaacgagtcgaacggaatcacacacttgggtattctacaagaatggtttggcatcaactggtggacctctcgtgcttttgctcttcttattgttgcactcttcataatgcttccacttgttatgttacgacgtgttgattcactgaagtatagttctgctatagcaatcctactagcatttgtgtttgttgtaatatgttcatcaatggcggttagtgcattgttgtctggaaaaactcaaacactaagaatagtgcctgatttctctcaagccaccgtccttgaccttttcaccactatcccagtgtttgtcacgggtttcggattccatgtcaatgttcatccaattagagcagagctaggaaaagttgcacacatgggtttggctgcacggatttcgttgataatctgcgtggctatttactttgctattggtttctttgggtaccttttatttggggactccatcatgcccgatgtgttggtaaactttgaccaaaactcccatacaagtgctggtcgattactcaataccattgttcggttaagttatgcactccatcttgcacttgtgttcccaatcatgaactattccttgagggccaacatagatgaactaattttctcaaacaaaaataagcctccccttgcatcagataccccaagatttgtgtcactcactttgactttgctagccctcacatactttgtggctgtggccatcccaaatatatggtttttttttcagttcttgggatccacaaccattgtttgcacctcattcatcttccctgccgcaattgttctaagggacatgcatggcatatcaaagacaaaagatcaagtgatggcaatagtggtgattgttttggctgtaggaacaagcggaattgctatatggaccaacttgaatggttcaggggctgctcaatgattaaccatgatgctatataacacccagtcttttcaagttttagggaagcctagtgaacagctgcatcaatttggtccttaatttgattaatttatcttatagaaattaatttaataacatttaaaggtgagattgagaattgcacatcttgtattttgaaactatagacgatcctactttgattcaaacg

SEQ ID NO: 20713 - protein, 443 aa, Glycine max
SKMKLEESVSSSNIIARLLPPEDPNPQNGSISGAVFNITTTMIGAGIMSIPATMKVLGIVPGLVVIVLVALITDVTVEFMLRYTSSGKSSTYAGMMAESFASIGSLAVKICVIISNLGVLIIYFIILGDVLSGNESNGITHLGILQEWFGINWWTSRAFALLIVALFIMLPLVMLRRVDSLKYSSAIAILLAFVFVVICSSMAVSALLSGKTQTLRIVPDFSQATVLDLFTTIPVFVTGFGFHVNVHPIRAELGKVAHMGLAARISLIICVAIYFAIGFFGYLLFGDSIMPDVLVNFDQNSHTSAGRLLNTIVRLSYALHLALVFPIMNYSLRANIDELIFSNKNKPPLASDTPRFVSLTLTLLALTYFVAVAIPNIWFFFQFLGSTTIVCTSFIFPAAIVLRDMHGISKTKDQVMAIVVIVLAVGTSGIAIWTNLNGSGAAQ

SEQ ID NO: 20714 - protein, 441 aa, Glycine max
MKLEESVSSSNIIARLLPPEDPNPQNGSISGAVFNITTTMIGAGIMSIPATMKVLGIVPGLVVIVLVALITDVTVEFMLRYTSSGKSSTYAGMMAESFASIGSLAVKICVIISNLGVLIIYFIILGDVLSGNESNGITHLGILQEWFGINWWTSRAFALLIVALFIMLPLVMLRRVDSLKYSSAIAILLAFVFVVICSSMAVSALLSGKTQTLRIVPDFSQATVLDLFTTIPVFVTGFGFHVNVHPIRAELGKVAHMGLAARISLIICVAIYFAIGFFGYLLFGDSIMPDVLVNFDQNSHTSAGRLLNTIVRLSYALHLALVFPIMNYSLRANIDELIFSNKNKPPLASDTPRFVSLTLTLLALTYFVAVAIPNIWFFFQFLGSTTIVCTSFIFPAAIVLRDMHGISKTKDQVMAIVVIVLAVGTSGIAIWTNLNGSGAAQ

SEQ ID NO: 20715 - protein, 402 aa, Glycine max
MIGAGIMSIPATMKVLGIVPGLVVIVLVALITDVTVEFMLRYTSSGKSSTYAGMMAESFASIGSLAVKICVIISNLGVLIIYFIILGDVLSGNESNGITHLGILQEWFGINWWTSRAFALLIVALFIMLPLVMLRRVDSLKYSSAIAILLAFVFVVICSSMAVSALLSGKTQTLRIVPDFSQATVLDLFTTIPVFVTGFGFHVNVHPIRAELGKVAHMGLAARISLIICVAIYFAIGFFGYLLFGDSIMPDVLVNFDQNSHTSAGRLLNTIVRLSYALHLALVFPIMNYSLRANIDELIFSNKNKPPLASDTPRFVSLTLTLLALTYFVAVAIPNIWFFFQFLGSTTIVCTSFIFPAAIVLRDMHGISKTKDQVMAIVVIVLAVGTSGIAIWTNLNGSGAAQ

SEQ ID NO: 20716 - DNA, 1098 bp, Glycine max
tttatttttataggaaaatgcgagtttagtgatgatgaaacagtgtgtgtttgttatgggacttattatggaagtgactgtagtgttttttgtcagccttccgtaaattgttctaataatggtgattgtaaggcagatggaacttgtaattgtggagaaaattattacggagataattgtgaattcacttattgtcccggaaattgcagtggaaatggaatctgtaataattcaacgggagtgtgttcttgcagtgaaaattatttttcaccctcgtgtgaaaattattgcgttgctagtaccacttgtagtggacaaggagattgcagtaataacggaatttgcgaatgttataataattattatggaaataattgtctctctttctgtgattcccaaaccacatgcagcaatcacggaacatgtgtagagatacaaaacagagagagaaaagaaagaggagagagagaagagatagaaagtggagtagaatgccaatgtgattttaattatcataatttggattgtagtgtttattgtaatgatacaataacctgcagcggccatgggacatgcaacaacactggagtgtgcgaatgtaccggagaatatttcgactctgcgtgtgataaattaagttgtcatggatctaatactgacatagaatgcaacggatatgggacgtgcaattacactacgggattgtgcgattgtgattctgattataattgtttattagataccaatactccagctcttttacaaatgacatgtcatccttgtgtggacaacttttggactaagaaacacattattataatttcggtatctgtgggaggatttttattattattaattttaggatgtgttggttgctggttgaggaatagaaaacaacgtcacgaatactctcaaattcaaaattaatgataataacaactacaataataatactaacaattgcaaatgttaacatttttttttctttttaacttttgcactttgcggaggagttactttaattttatctataaataaatggttgtagcaataaattcgggatgtaaataaaatagattataatactgatataactat

SEQ ID NO: 20717 - protein, 308 aa, Glycine max
FIFIGKCEFSDDETVCVCYGTYYGSDCSVFCQPSVNCSNNGDCKADGTCNCGENYYGDNCEFTYCPGNCSGNGICNNSTGVCSCSENYFSPSCENYCVASTTCSGQGDCSNNGICECYNNYYGNNCLSFCDSQTTCSNHGTCVEIQNRERKERGEREEIESGVECQCDFNYHNLDCSVYCNDTITCSGHGTCNNTGVCECTGEYFDSACDKLSCHGSNTDIECNGYGTCNYTTGLCDCDSDYNCLLDTNTPALLQMTCHPCVDNFWTKKHIIIISVSVGGFLLLLILGCVGCWLRNRKQRHEYSQIQN

SEQ ID NO: 20718 - DNA, 1397 bp, Glycine max
gtcttcttcccattaaaattaacccgcgatatcatgttagtgaagagggagagaggatccaaatccaagtacggttgggttggagagaaaatgcgtccctgctgaaaacaccaaaccctaaaacgcgaaaagggttctaagaatttgcgaaggaaagagctagcggagatggagattcactacagtaacagctatttcgagaggcgccccatcctcaagtccaaggctgccgctgtcaaatgggtcaaagaatgggttccccaagatcttgtgacaacaggagggaagtgcatgatcttaaaatgggtaacagaggataccttgaagaccttgaaagaaaagctatgatggctgtggaaagacattcatagatgctggtgcattgaggaaacattctcacatccatggagagaggcagtatgtttgtcactacgatggatgtggaaagaaatttctggatagctcaaagttgaaaagacattttctcattcatacaggggagagggattttgtgtgtcctcatgaaggctgtggtaaggccttctccctggatttcaacttaaggtctcacatgaaaacacattcccaagagaactatcatatctgcccatatccagattgtggaaggagatatgctcatgaatacaagctaaagaatcacattgcatctcatcatgaaaagaatgcatccgtggatgtgacaaagtacactactcccccttcagagaagcaaacaaaaacttctaaaccatctggaggggcatatggttctgcatcatctgaccgtccctatgcatgtccctatgatgggtgcgaaaaggcatacatccatgaatacaagcttagactccatttgaagagggagcatccggggcttatggctgatgaaaatgcagagcatgctcaggctaatgttgacaatgaaatggatgaagcaagtgaccatgatgcctatgttgcgaaacgatcaaatggtaaaattcagaagcagagtaagcctaaaccaaacctcaagttgcctccttccaaaattgcaaaacgcaaactgtccactccctctttaactgtaaataaaaattcttggcccgtgaaagatgaacctttcgatgaagaagatagcgaagaaacagaagaggatcgtgacaatgttgaagatggttggagatatgcaggaggaaacaatgaagatgatgatgaggaaacagaatatgaagactgaatcagttatggcatcctctatgaaacttaccttttccaagaaatatattttctcttctacaaaaaaatttcagttgtctcttttttatttggctgaggaaatgacatcttgtcaaactgtgtgttgctgttacaagcattaggaagaatttatataaataaaatgcgatttaaaaaat

SEQ ID NO: 20719 - protein, 215 aa, Glycine max
MKTHSQENYHICPYPDCGRRYAHEYKLKNHIASHHEKNASVDVTKYTTPPSEKQTKTSKPSGGAYGSASSDRPYACPYDGCEKAYIHEYKLRLHLKREHPGLMADENAEHAQANVDNEMDEASDHDAYVAKRSNGKIQKQSKPKPNLKLPPSKIAKRKLSTPSLTVNKNSWPVKDEPFDEEDSEETEEDRDNVEDGWRYAGGNNEDDDEETEYED

SEQ ID NO: 20720 - protein, 113 aa, Glycine max
MADENAEHAQANVDNEMDEASDHDAYVAKRSNGKIQKQSKPKPNLKLPPSKIAKRKLSTPSLTVNKNSWPVKDEPFDEEDSEETEEDRDNVEDGWRYAGGNNEDDDEETEYED

SEQ ID NO: 20721 - DNA, 2151 bp, Glycine max
gggagttacacattattctctctctcactcacactcagagtggtagctagacaacaacgagagagagagagagagagatggaggatctcgaggaggaagagaacggagcggaggaggtgttggggtcaagcttgaccatggagaaagtggcggctgcgaagaagttcattgagaatcattatagggctcagatgaagaacatccaagagaggaaggagaggcgctgggttttagaaagaaaattggcatcatcagatgtgccaaatgaggagcggatcaacctcatcaaagatttagagaggaaggagactgaatatatgcgattgaaaagacacaagatttgtgttaatgattttgaacttttgaccatcattggaaggggggcttttggggaggttagactgtgccgggagaagaaatctggaaatatttatgctatgaaaaagctgaagaaatctgaaatgcttaggagaggccaggtggaacatgttagagctgagaggaatttgctggccgaagttgccagtcattgcattgtgaaactttactactcatttcaggatgctgagtacttgtatttaattatggagtatctgcctgggggtgacgttatgactctgctgatgagggaagacaccttaagtgaaaatgttgctagattttacattgcacaaagtgttctggccatagaatctattcacaaacacaattacattcacagagatattaaacctgataaccttcttctggataaaaatggtcacatgaagctctctgattttggtctctgtaagcctctggattgtattgccttgtctacactgcatgaaaatcagaccatagatgatgaaactttggcagaaccaatggatgttgatgatgcggacaatcgaagtagctggagaagtccacgtgaacagcttcaacattggcagatgaacaggaggaagttggcattttcaacagtggggacaccagactacattgctcctgaagtacttttgaaaaaaggatatgggatggaatgtgattggtggtcactgggagcaataatgtatgaaatgctggttggttacccaccattttactccgatgatccaataaccacatgcagaaagattgttcattggagaaatcatttaagatttccagatgatgcccagttaacacttgaggctaaggatctaatttataggttgctctgtgatgttgatcataggttaggtactcgaggggccattgaaataaaggctcatccttggttcaagggtgttgattgggataaactgtatgaaatggaggcagcatttaaacctcaagtcaacggggaactggatacccaaaacttcatgaagtttgatgaggttgatccaccaacagcagcaagaaccgggtctggatcctcacgaaagatgctaactaccaaagatctaagtttcgttggttatacttacaagaatttcgatgctgtaaaggaagggctccgtcaatcttttggtgattccatgcaagagtatgcttctaaacgggcagctgaagaaacaagtttacaaatgcttgcatcctctggagatccaatggttccataactttgtgcaaattgaagtccatcctgttgggtttttgtgtacttgctttggctttaaatattcggccaagaacatgtattatggtgtactccaattcctatgccatttgcaagaaaaatgtgtacagcaagcagttgacagcattgtcaaagcttgtagggcaaccccgcgcgtctgtatttgaattttcaacttaggaactgagagttgtgcgactgagtgctcctgtcctggctgcccaggttggctgaggaagacttgccttctctagtggcagttgctggttaaatgttagttatggacaaaaattgctaaggaactattaaagcatcctgaaaattattcgatgtgatgtgtacatttattggaagataacataaattaaactattaaaacaaactatgcttggggatggagtgtggaattgtctttagcagctcagttgcttgccctttttccctttttatctatttcatgtggaaaagtgcaattagtgacgtcaacctcactgtcctggtcactagctaatgcttgattgaatacaaacaactttttcttaaag

SEQ ID NO: 20722 - protein, 503 aa, Glycine max
MEDLEEEENGAEEVLGSSLTMEKVAAAKKFIENHYRAQMKNIQERKERRWVLERKLASSDVPNEERINLIKDLERKETEYMRLKRHKICVNDFELLTIIGRGAFGEVRLCREKKSGNIYAMKKLKKSEMLRRGQVEHVRAERNLLAEVASHCIVKLYYSFQDAEYLYLIMEYLPGGDVMTLLMREDTLSENVARFYIAQSVLAIESIHKHNYIHRDIKPDNLLLDKNGHMKLSDFGLCKPLDCIALSTLHENQTIDDETLAEPMDVDDADNRSSWRSPREQLQHWQMNRRKLAFSTVGTPDYIAPEVLLKKGYGMECDWWSLGAIMYEMLVGYPPFYSDDPITTCRKIVHWRNHLRFPDDAQLTLEAKDLIYRLLCDVDHRLGTRGAIEIKAHPWFKGVDWDKLYEMEAAFKPQVNGELDTQNFMKFDEVDPPTAARTGSGSSRKMLTTKDLSFVGYTYKNFDAVKEGLRQSFGDSMQEYASKRAAEETSLQMLASSGDPMVP

SEQ ID NO: 20723 - protein, 483 aa, Glycine max
MEKVAAAKKFIENHYRAQMKNIQERKERRWVLERKLASSDVPNEERINLIKDLERKETEYMRLKRHKICVNDFELLTIIGRGAFGEVRLCREKKSGNIYAMKKLKKSEMLRRGQVEHVRAERNLLAEVASHCIVKLYYSFQDAEYLYLIMEYLPGGDVMTLLMREDTLSENVARFYIAQSVLAIESIHKHNYIHRDIKPDNLLLDKNGHMKLSDFGLCKPLDCIALSTLHENQTIDDETLAEPMDVDDADNRSSWRSPREQLQHWQMNRRKLAFSTVGTPDYIAPEVLLKKGYGMECDWWSLGAIMYEMLVGYPPFYSDDPITTCRKIVHWRNHLRFPDDAQLTLEAKDLIYRLLCDVDHRLGTRGAIEIKAHPWFKGVDWDKLYEMEAAFKPQVNGELDTQNFMKFDEVDPPTAARTGSGSSRKMLTTKDLSFVGYTYKNFDAVKEGLRQSFGDSMQEYASKRAAEETSLQMLASSGDPMVP

SEQ ID NO: 20724 - protein, 465 aa, Glycine max
MKNIQERKERRWVLERKLASSDVPNEERINLIKDLERKETEYMRLKRHKICVNDFELLTIIGRGAFGEVRLCREKKSGNIYAMKKLKKSEMLRRGQVEHVRAERNLLAEVASHCIVKLYYSFQDAEYLYLIMEYLPGGDVMTLLMREDTLSENVARFYIAQSVLAIESIHKHNYIHRDIKPDNLLLDKNGHMKLSDFGLCKPLDCIALSTLHENQTIDDETLAEPMDVDDADNRSSWRSPREQLQHWQMNRRKLAFSTVGTPDYIAPEVLLKKGYGMECDWWSLGAIMYEMLVGYPPFYSDDPITTCRKIVHWRNHLRFPDDAQLTLEAKDLIYRLLCDVDHRLGTRGAIEIKAHPWFKGVDWDKLYEMEAAFKPQVNGELDTQNFMKFDEVDPPTAARTGSGSSRKMLTTKDLSFVGYTYKNFDAVKEGLRQSFGDSMQEYASKRAAEETSLQMLASSGDPMVP

SEQ ID NO: 20725 - DNA, 748 bp, Glycine max
aaacatgatttcttccgtgtcctttccagcgtctcttcccgccgttaacttctccggcaacgccatggcttcgccgtcgtgccgcgtcaaatcccggccaatagtcgccttcgccaccgccactgccaccgctgaagctcgctcttcctggacggagcaaccgagaccttcctatctgaactcctcttgctcttcgctttacgatatcctcggcatccccgctggcgcctctaaccaagaaatcaaggccgcgtaccggcgactagccagagtctgccaccccgacgtggcggccatcgaccggaaaaattcgtccgctgacgaattcatgaagatccacgccgcgtactctactctttctgatcccgacaagcgcgctaactacgatcggagcctattccggcgacaacggccgttgtcgacggcggcggtgttctccggttacacgcgtcggaactgggaaacggatcagtgctggtagtgagtcactgagtcgactcgctcgagtgaatgagagaagacgcggttattgaagcgcctttctttgcatataagtaattaatcactagttagttagtcgttagagttttatgatactacgtatatgtatagctacatacatacatatacgcgtagagtagaatagactgccacttgtactgagtactcttgtaatataaacttttcatcaaaaattttatggatgaaaaagaaaaaaaaaaaaacagaaaagaaaattgactttggt

SEQ ID NO: 20726 - protein, 159 aa, Glycine max
NMISSVSFPASLPAVNFSGNAMASPSCRVKSRPIVAFATATATAEARSSWTEQPRPSYLNSSCSSLYDILGIPAGASNQEIKAAYRRLARVCHPDVAAIDRKNSSADEFMKIHAAYSTLSDPDKRANYDRSLFRRQRPLSTAAVFSGYTRRNWETDQCW

SEQ ID NO: 20727 - protein, 158 aa, Glycine max
MISSVSFPASLPAVNFSGNAMASPSCRVKSRPIVAFATATATAEARSSWTEQPRPSYLNSSCSSLYDILGIPAGASNQEIKAAYRRLARVCHPDVAAIDRKNSSADEFMKIHAAYSTLSDPDKRANYDRSLFRRQRPLSTAAVFSGYTRRNWETDQCW

SEQ ID NO: 20728 - protein, 138 aa, Glycine max
MASPSCRVKSRPIVAFATATATAEARSSWTEQPRPSYLNSSCSSLYDILGIPAGASNQEIKAAYRRLARVCHPDVAAIDRKNSSADEFMKIHAAYSTLSDPDKRANYDRSLFRRQRPLSTAAVFSGYTRRNWETDQCW

SEQ ID NO: 20729 - DNA, 1621 bp, Glycine max
aattagctataagcaggaaaggaagagagaagtaaagcagtagaggtttgtttgtttagtgatgtgtctggaaacatgaagcagaatgatcggccaagggagtgtttgtctaattcgaattctgaaggttgttctttgtcattgatgggaagagaaccccctcagaatttgttaccttccaaacacgacttccctagactggttctcgtgattgcactcgcatcgctagttgcttggacctgcaacttcctctttacctctctctttcatcccccttccaaacccttctgcgacacaaacctccactctcccgattactttctcgatatttgtcaaccttgtccaagtaatggagaatgcaatgatggcaagttggaatgtcatcagggttaccaaaggcatgggaacttgtgtgcagaagatggagatattaatgaatcagctcgaaaacttctggagagagtggaacatcacctctgtgaaaaatatgctcaatttttgtgcactggaactggaataatttgggttcatgaggatgatttatggaattattttgagccagtgggaaatgtcaaagtggacaatgctctttataattatacaaaacaaagggcagttgagacaatgggcaaattattggagacgaggttaaacagctctcatgggatgaaggagttcaagtgtccagatcagctggcagagcattacaagccatatacctgctgcattcgtcagtggatctcacagcatattctagttgttttgcccatttgtgccatgctttgtgctggaatgtacgacagaagctaagcatgtcaagacgagttgaggagctttacgacaaggtctgtgaaatacttgaagacaatgcattgacgtcaaagagtgcaaatggtgaatgtgaaccctgggttgttgcttctaggttacgcgatcacctgcttttgccaagagagcggaagaaccctttattatggaaaaagttagaagaattggttcaagaagattctcgaatagatcgctatccaaagttggtgaagggtgaatcaaaagtggtatgggaatggcaagtagaaggttctctgagcgcctcaaagatgaagaaaagaagagatgcaagcaaaacgatggtcaatgaaagcacggacctgaatcatcaacagcaccctgcaatgaaaacagagcctacggtaccacttttttgatctggagactcctcccaacagtgactactttcccttgtaaattgtgatggcctaaacttcagcagagggcaatatgtgcggcattggttgtgagtgtgacctgcattttttatgaagcatttttcaccaaaacaagtgtggattcatgggatctgcatgcttattaaggaatgtgcttatgtcttatagagtaataatagcttagggaggaaactcacgtccttgaaaatcctttacacccgcggttctggattgacggctgacaaactagttatgtactagtgctaactaaattagttaagcatttttttctcttgcgaaagaatccaatatttatagcatacaaagaatgttattatatgacattgtagtaaagtcaaggcatatggatgtgactacgaattcggacccattag

SEQ ID NO: 20730 - protein, 244 aa, Glycine max
MKQNDRPRECLSNSNSEGCSLSLMGREPPQNLLPSKHDFPRLVLVIALASLVAWTCNFLFTSLFHPPSKPFCDTNLHSPDYFLDICQPCPSNGECNDGKLECHQGYQRHGNLCAEDGDINESARKLLERVEHHLCEKYAQFLCTGTGIIWVHEDDLWNYFEPVGNVKVDNALYNYTKQRAVETMGKLLETRLNSSHGMKEFKCPDQLAEHYKPYTCCIRQWISQHILVVLPICAMLCAGMYDRS

SEQ ID NO: 20731 - protein, 221 aa, Glycine max
MGREPPQNLLPSKHDFPRLVLVIALASLVAWTCNFLFTSLFHPPSKPFCDTNLHSPDYFLDICQPCPSNGECNDGKLECHQGYQRHGNLCAEDGDINESARKLLERVEHHLCEKYAQFLCTGTGIIWVHEDDLWNYFEPVGNVKVDNALYNYTKQRAVETMGKLLETRLNSSHGMKEFKCPDQLAEHYKPYTCCIRQWISQHILVVLPICAMLCAGMYDRS

SEQ ID NO: 20732 - protein, 130 aa, Glycine max
MSRRVEELYDKVCEILEDNALTSKSANGECEPWVVASRLRDHLLLPRERKNPLLWKKLEELVQEDSRIDRYPKLVKGESKVVWEWQVEGSLSASKMKKRRDASKTMVNESTDLNHQQHPAMKTEPTVPLF

SEQ ID NO: 20733 - DNA, 1104 bp, Glycine max
aaaaacgtgggagccctgaatcgtgcgtgttttgcgattctgacttgtttttcatttttactttttgggcctttgaaagcttaaaaacctaaacgcccaagactcaaaacaaggcagaaccgctcaactgcgccgtgaaactcttcttctcattcacattcagttgcgcgaagcaccatcaggctctgcaaatgccaatggtggatttggagggcacagaaggttacataccttccacagagtatgtggaagacagcaacgaaacactcattaacttgactgactcaactgagcttttgtttcttaagttgccttcttccaatgattttttatctgacatacatgggcagaaattgtttctcactcttcataatgatggtaaactagccagcttcgaggattcatcaggtaaagtatatgattttgtaagctattctgctcaggagccagacgaaacagtttttgttccctctacagaaccaaaaataggaaagatttcgatgcgagtttccactgtccattaccctggtcctaaagaacttgaaaagctcaattcaactaacgcaaaacatgcacatggaaattcttctggagtcactgggacaacttcatctcgatattttcctatgcaaagtggtggagcagcttcatcaaaaggtagcagacagagaagctctctaactgaagctagtgagccatcaagtatttcaaaaagaagacacgcgtctaaatctaaatccaacttgtccgagacttcacatgagcacagcactggcatttcgtccatgtccccaaatcattctcatgaaggaaaggcaaagagaagaaaacataaggaatagtgtttcctatactcgccattggcctatttaatagtgtaatatttagaggttacattctcccaggcctttaaatatgtccggaaagactagtgctaaacttttatgttgcaaaatgataaatttaaatgtttgcattctcttttttgtcttttttttttgcaaatgttcatttgcttcagttggacaatgttcactgatgtaaggagtaagaccctttcgtgctcctatgtatacttaagggcgatgttaattttgttgtgtt

SEQ ID NO: 20734 - protein, 216 aa, Glycine max
MPMVDLEGTEGYIPSTEYVEDSNETLINLTDSTELLFLKLPSSNDFLSDIHGQKLFLTLHNDGKLASFEDSSGKVYDFVSYSAQEPDETVFVPSTEPKIGKISMRVSTVHYPGPKELEKLNSTNAKHAHGNSSGVTGTTSSRYFPMQSGGAASSKGSRQRSSLTEASEPSSISKRRHASKSKSNLSETSHEHSTGISSMSPNHSHEGKAKRRKHKE

SEQ ID NO: 20735 - protein, 214 aa, Glycine max
MVDLEGTEGYIPSTEYVEDSNETLINLTDSTELLFLKLPSSNDFLSDIHGQKLFLTLHNDGKLASFEDSSGKVYDFVSYSAQEPDETVFVPSTEPKIGKISMRVSTVHYPGPKELEKLNSTNAKHAHGNSSGVTGTTSSRYFPMQSGGAASSKGSRQRSSLTEASEPSSISKRRHASKSKSNLSETSHEHSTGISSMSPNHSHEGKAKRRKHKE

SEQ ID NO: 20736 - protein, 113 aa, Glycine max
MRVSTVHYPGPKELEKLNSTNAKHAHGNSSGVTGTTSSRYFPMQSGGAASSKGSRQRSSLTEASEPSSISKRRHASKSKSNLSETSHEHSTGISSMSPNHSHEGKAKRRKHKE

SEQ ID NO: 20737 - DNA, 2140 bp, Glycine max
gattgtctctttgcatcaaaatgaagtgtctactctatcccaagtttactgcaattagctaaactatcaccatgaagtcccttcaagtagggcaagcacaacaagactccgatggaagtgataaggtttcagacaaaagcattgtagttcccaacaaattcatcgcaatagctgatagcttcaaaggagaacattcatggttcattgctcctcaaatcccaacagatttttcaattcaagtccaggaaaccacttataatgttcacaaggtggatctgaaacatttgaaacaattctaaagttctgttatggcctccctatagacttcagcccagataacatagctgcactaagatgtgcatcagagttcctagagatgactgaagaactagaagatggaaacctcatttctaagagtgaagctttcctcacctttgttgtgctttcttcatggaaagacactatcactgttctgaaatcatctgaaaacctatctccatgggctgaaaacctccaaattgtaagaagatgctgtgattccattgcatggaaagcttctaaagatgagctcacaagcgaggatgcagcacctaatcaagaaagctggtggttcaacgatgtggccgccttccgcattgatcattttatgcggatcatttctgcaataagggcaaagggaaccaaaccagagaccattggtaaatgtatcatgcaatatgccaagagatggctgccgggaatggaggtggagttagaagggctaagaggatatgggcatgaaaagtgtaacctacagttcagtatttttagtgggaagaagaaagaaagcagtggaaacagcaaggagcaaagaacaattattgaaagcctaataagcattattcctcctcagcaagatgcagtctcgtgtaagttcatgttgcagttgttaaagatggccatgatgtattctgtatcaccagctctcacaacagaccttgaaaagagagtgagtttggtgttggaagatgctgaggtgagtgatcttctaattccaagatatcaaaatggagatcaaggcaaaacggtcatgtgagtatgttacaattctccttttttttcgcacattggaattggcattaatgccaaaggtcaaatttaactccacagccctctaaaccaattttttttgttaaaaaaaaaacccaagagttatgaaaacgactaatgacactaatgtctatcttttgtcttttcttattcttttccttcattagttgcatgactaattcatctgaagaatgcaccatgctagacatagatgtagtgcaacgaattgtggaatacttcttgatgcatgaacaacagcagattcaacagcaacagaagactaggaaattcaatattagtaggctcttggataattacctagctgaaattgcaagagatccaaatctttcaattaccaagttccaagtttttgctgaattgctaccagaaaatactcgatcatatgatgatggcctatatagagccattgacacctacctcaagacccagccttcactgaccgagcatgaccgtaaaagactctgcaaaatcatgaactgtgaaaaactctcacttgatgcatgcctgcatgctgcacaaaatgagagattgcccctaagaactgttgtccaggttctattttcagagcaagtaaagatgagggcagcaatgcatgagaaagagccagcacaaattggaatccaatctgaacaagaagaaaaccagacatctgcaactatggacattaaggcactcaaagcagaacttgagaatgtaaagtcccaaatggtagaactgcagaatgactattgtgaattacaacaggagtatgaaaagttaagcaacaagccaaagaattcatcaggctggagtttaaattggcggaagattaagaactccttacatacaaaaccagcaggagttgaaattggagacagacaggatgcacccaagtcaccaaacaccattctacgtagactaaaccctagaagaaggctctccatgtcttaaaagtttttcatttttgaagtttcaacataaaaagtcctgtaataaaaacacctagctagccattctttatatgaagcatatagactaaatttagtttctt

SEQ ID NO: 20738 - protein, 277 aa, Glycine max; identical to SEQ ID NO: 20347

SEQ ID NO: 20739 - protein, 274 aa, Glycine max; identical to SEQ ID NO: 20348

SEQ ID NO: 20740 - protein, 259 aa, Glycine max
MTNSSEECTMLDIDVVQRIVEYFLMHEQQQIQQQQKTRKFNISRLLDNYLAEIARDPNLSITKFQVFAELLPENTRSYDDGLYRAIDTYLKTQPSLTEHDRKRLCKIMNCEKLSLDACLHAAQNERLPLRTVVQVLFSEQVKMRAAMHEKEPAQIGIQSEQEENQTSATMDIKALKAELENVKSQMVELQNDYCELQQEYEKLSNKPKNSSGWSLNWRKIKNSLHTKPAGVEIGDRQDAPKSPNTILRRLNPRRRLSMS

SEQ ID NO: 20741 - DNA, 1987 bp, Glycine max
accttgactccctgccacggctgagaaaatagcgacgcggatacacactcgtcttcacgatccagcgattctactctccgatgagtctttgcagggtgaagaatcgcgagtccagccgccggtgaagaatcacgcgattcgtctggaaatcgcgattcatccctgatacagagattcaagcacgattcaggaacaaaaacgagacaacctccgattcgtatcggtagcagctggaatcgtatcgaatcctgtgatacgtatcgtgaattgtacaatactaactatcatgatttaggctagtgctggagcttatttgactaggttatataatgttgttaaatagctgccaagtgctactgcattgccgaatttcttgaattcgcaatcaccacttcgtcaactattgcggtcgctatgggtgtcgtgggtacagaaagcgtcctgcatcctcttctcatctttgtgtaggtatccttcttctcatgagcagtgatgctgccaagacatgttcaaactattggtagtctccttgagagagttatgcaagttcatgttgtgcagctcggaggtataaatacacatgtcgacttgtaatgagctgccaagaaagctcaacaagtctgagaggaaaccacctgtgacaagttttaatgatcttaagcgtcaagctagactgaagaaaaaggagaggcaaaagctactgctgttcgaggcatgaaagcctgggaaaaaatgcgtggaggagcttcaaaacttatggggaagtatgctgtccaaacttgtggatattatccagaggtgcaagtgggacccaaaggtcatagagtacgaaattgtcaagctttcaaacaccagataagggatgggcaacgtgcatggtagggggcaacaattgatgatttggcacctccagtatatgtctatcacatccgagatgatcaacataggaagcctttggtaaatgagttgaaaaggtactatggtatgctgcctgcagtggttgagctatttgcccaggctggggcaccagttgataagaattatgcttctatgatgagggaagatgtcgtaatccctgaaatggatgaggaaaagttggttgtttaaagcaatggtttgattgacttcatatgcatggaagaggcatttgggcaatggaagagtctaaatatgaaaaatttaaggtttaatttctttcaaattataacaggttgtatttgtatatatgctaagatagaggacctgtctaatgttggtaattagacatataataggatgaaacaagagcattgggccactaaactatctcatgttctattggcaatataaggttgcagtattgattatatggaacaaatttacttttggcactcactgcatcatcacctaatttagttatagatgaaaaaagacttggatttcttgctgggattcctttgagaacaactcttcatccctctaccgatctcattcatcacctaatttagttatagtctgatctgcttttatgcaatattttgtattggtagtataatttcctgttactaaaaccaaagaaaactttagcccacaaggttaatttagtatcttctggaatacaagatgcagagggatggtcgacaatgcactagataaggtggaaaaagtgttttacttgccaagcatattaggaagaggaagaaagtgtaaaaggaacttcaaaaattggcaacagtaaagtagttcctgtgctcgagctctatcagattttcagaacaggttgtggctgggttcttcagtgttccacttccaaatccttgttcagctggtgcatcagaatattcttcgagacttcatagaacagttgggagttgggtgccttgaacgatagattgttgttgcttaattaaaacaaattgtatcatctacatatatcctacagtcttgtaatatatattatcatctcgaccttaacactttgttaataattataaccatgtgtgtttgg

SEQ ID NO: 20742 - protein, 55 aa, Glycine max; identical to SEQ ID NO: 19732

SEQ ID NO: 20743 - protein, 49 aa, Glycine max; identical to SEQ ID NO: 19733

SEQ ID NO: 20744 - protein, 45 aa, Glycine max
MSTCNELPRKLNKSERKPPVTSFNDLKRQARLKKKERQKLLLFEA

SEQ ID NO: 20745 - DNA, 1716 bp, Glycine max
tatatatatatatataatccaggtccaagataaagatggagagaaaagatggaagcaagttgatgtaaacttgacggaccatgtcaacatccccacattccccgaaggaaaaacagcggaatcttatgataaatattttcatgattatttatcaagcatagcaatggagcaattaccacaaagcagaccattatgggatattcacataatcaattaccttacaagtgatgcatccagcactataatatttaagcttcaccatgcacttggagatggctattctctcatgggtgcttttctttcttgtcttcaacgagccgatgacccttctcttcccttgtcctttccttctctcaaacaatctaaacaagaaccttcttccactaaaagcttttgcagaaaattttcttggatgtgttcctctgccttcaacactgtctcagattttggatggagtgtattgaagagtagcatcattagtgatgataaaacaccgataaggtttggagacgaaggagccgactatcaaccaatttccatatcaagcatgacattctccattgaccacatcagggacatcaaatcaaggctcggagtgacaataaatgatgtggtcactggaattgtcttctatggaactagattatatatgcaagatatggactccaaatcaaagaccgcacactccacagcattggtattactgaatacgagaaacgttgaaggttaccaatcgatcaatgatatgctaaatactaaagccacgggtccatgggggaacagaattaccttcttgcatgttccaataccgaaattaaatgaaacaagaactacaaaccctcttgaatttatttgggacacacataacataatcaagaggaagaaacaatctctaggagttgtactcaccgggacacttttgaagatagagggcaaattgaggggacaagaggcagtagctaaacgcattcgtggcacattgacaaaatcaagtgcagtgatttcaaacttggctggaccaatacaacaaatggctttagctaaccatcctgtgaaaggcttgtatttcacattggccggtggacctgaagtatgtattctgaatccctttcatttttcaattaatcatcaattcaacatgtgagaatctgaattgaggtgggtggggtgaaataaggcaaaaaaaaaattataatcaatttataatagcgaaaattggaatggtcattttaagaaggctttaatttctaatttattttgcttaaggaaaaaagtttttaacccaacagatctctctttgttcctttacttaactagttgcagtgatacataagaaatatttaaacatcatttgattgtatttgcagagtctagtcatttcagttatgagctatatgggagtcctaagtgttaccctcaaaacggaaaaagacttcatagacgaacataaattgaagttgtgcatgcaaagtgcatttgagataattctccaagcagctatggaaattcctcaggaaaccaaaccttagtatttggtttggatgattggaacagcttattacgaaaattagagagagagagagatatggagaatttaccatattatttctccggatttatcaacgccttaagtaattgcttgtctatagtatatttgtcgtatgtttggaaagatcaatacacgaggcccaccttattttggatctgtttaggcct

SEQ ID NO: 20746 - protein, 380 aa, Glycine max
IYIYIIQVQDKDGEKRWKQVDVNLTDHVNIPTFPEGKTAESYDKYFHDYLSSIAMEQLPQSRPLWDIHIINYLTSDASSTIIFKLHHALGDGYSLMGAFLSCLQRADDPSLPLSFPSLKQSKQEPSSTKSFCRKFSWMCSSAFNTVSDFGWSVLKSSIISDDKTPIRFGDEGADYQPISISSMTFSIDHIRDIKSRLGVTINDVVTGIVFYGTRLYMQDMDSKSKTAHSTALVLLNTRNVEGYQSINDMLNTKATGPWGNRITFLHVPIPKLNETRTTNPLEFIWDTHNIIKRKKQSLGVVLTGTLLKIEGKLRGQEAVAKRIRGTLTKSSAVISNLAGPIQQMALANHPVKGLYFTLAGGPEVCILNPFHFSINHQFNM

SEQ ID NO: 20747 - protein, 326 aa, Glycine max
MEQLPQSRPLWDIHIINYLTSDASSTIIFKLHHALGDGYSLMGAFLSCLQRADDPSLPLSFPSLKQSKQEPSSTKSFCRKFSWMCSSAFNTVSDFGWSVLKSSIISDDKTPIRFGDEGADYQPISISSMTFSIDHIRDIKSRLGVTINDVVTGIVFYGTRLYMQDMDSKSKTAHSTALVLLNTRNVEGYQSINDMLNTKATGPWGNRITFLHVPIPKLNETRTTNPLEFIWDTHNIIKRKKQSLGVVLTGTLLKIEGKLRGQEAVAKRIRGTLTKSSAVISNLAGPIQQMALANHPVKGLYFTLAGGPEVCILNPFHFSINHQFNM

SEQ ID NO: 20748 - protein, 285 aa, Glycine max
MGAFLSCLQRADDPSLPLSFPSLKQSKQEPSSTKSFCRKFSWMCSSAFNTVSDFGWSVLKSSIISDDKTPIRFGDEGADYQPISISSMTFSIDHIRDIKSRLGVTINDVVTGIVFYGTRLYMQDMDSKSKTAHSTALVLLNTRNVEGYQSINDMLNTKATGPWGNRITFLHVPIPKLNETRTTNPLEFIWDTHNIIKRKKQSLGVVLTGTLLKIEGKLRGQEAVAKRIRGTLTKSSAVISNLAGPIQQMALANHPVKGLYFTLAGGPEVCILNPFHFSINHQFNM

SEQ ID NO: 20749 - DNA, 1160 bp, Glycine max
aaacgtgtttcatgaaatatctaacttttaaagagctcaatgtgtacaaactcattgtgagcggatgcaacgttaaataagagcatgaatagactcatgtctacacatctaactagagtagaagccaagacgcactgttctacaaattaaagaaaagactcctttatggataatatttatatcaaacaagcgttggtattgaaggaagttaagcatgtattccaaaagcttattggcgaggatcccatggagagtatgtatatggttgacactatccaaaggcttggcattgaacaccacttcgaagaggaaattgaagctgctcttcagaagcaacatttgatatttagcagtcatctcagtgattttgcgaataaccataaactttgtgaagttgcacttccattccgtttacttagacaaagaggccattatgttcttgcagatgtatttgacaacctgaagagtaacaaaaaagagtttagagaaaaacacggtgaagatgtgaagggtcttatttctctgtatgaggcaacccagctaggtattgaaggagaagacagtcttgatgatgcaggttacctctgccaccaacttcttcatgcatggctgacaagacatgaagagcataatgaagctatgtatgttgctaagactcttcagcatccgcttcattatgacttatcaagattcagggacgacacaagtatacttctaaatgatttcaagaccaagagagaatgggaatgcttagaggaacttgctgaaatcaattccagcatagttaggttcgtgaaccagaatgaaataactcaagtttacaaatggtggaaagaccttgggctgaacaatgaggtgaagttcgctagatatcaacctcttaaatggtacatgtggccaatggcatgcttcacagatccacgcttctcagagcaaaggattgagctcaccaaacctatctctctggtctacattattgatgacattttcgatgtttatgggacattagaccagcttactttatttacagatgctattaaaaggtattcaaatatatatatttctagtgtgtgcggcagacaatcaatagaattagcgatgccaacctagttagaatctttactcctattgtgatgcttaatcatgcaccttttacttac

SEQ ID NO: 20750 - protein, 314 aa, Glycine max
MDNIYIKQALVLKEVKHVFQKLIGEDPMESMYMVDTIQRLGIEHHFEEEIEAALQKQHLIFSSHLSDFANNHKLCEVALPFRLLRQRGHYVLADVFDNLKSNKKEFREKHGEDVKGLISLYEATQLGIEGEDSLDDAGYLCHQLLHAWLTRHEEHNEAMYVAKTLQHPLHYDLSRFRDDTSILLNDFKTKREWECLEELAEINSSIVRFVNQNEITQVYKWWKDLGLNNEVKFARYQPLKWYMWPMACFTDPRFSEQRIELTKPISLVYIIDDIFDVYGTLDQLTLFTDAIKRYSNIYISSVCGRQSIELAMPT

SEQ ID NO: 20751 - protein, 287 aa, Glycine max
MESMYMVDTIQRLGIEHHFEEEIEAALQKQHLIFSSHLSDFANNHKLCEVALPFRLLRQRGHYVLADVFDNLKSNKKEFREKHGEDVKGLISLYEATQLGIEGEDSLDDAGYLCHQLLHAWLTRHEEHNEAMYVAKTLQHPLHYDLSRFRDDTSILLNDFKTKREWECLEELAEINSSIVRFVNQNEITQVYKWWKDLGLNNEVKFARYQPLKWYMWPMACFTDPRFSEQRIELTKPISLVYIIDDIFDVYGTLDQLTLFTDAIKRYSNIYISSVCGRQSIELAMPT

SEQ ID NO: 20752 - protein, 284 aa, Glycine max
MYMVDTIQRLGIEHHFEEEIEAALQKQHLIFSSHLSDFANNHKLCEVALPFRLLRQRGHYVLADVFDNLKSNKKEFREKHGEDVKGLISLYEATQLGIEGEDSLDDAGYLCHQLLHAWLTRHEEHNEAMYVAKTLQHPLHYDLSRFRDDTSILLNDFKTKREWECLEELAEINSSIVRFVNQNEITQVYKWWKDLGLNNEVKFARYQPLKWYMWPMACFTDPRFSEQRIELTKPISLVYIIDDIFDVYGTLDQLTLFTDAIKRYSNIYISSVCGRQSIELAMPT

SEQ ID NO: 20753 - DNA, 1424 bp, Glycine max
tgcttctgtcattgttggccccaaggaaggagacactccagacagagcaaaatacagccaaggaattaagttctttgagccagagataaaaggtgactcaccagaaaaggtagagtacataggaatgagaaatttgatcaaggccgtgaaggacaatcttggacttcgaagagaaaagctattatttggatttgaaggcaataattacaggcagcttccttggggtgctttagatgatgtggtgatgggtggagttagtgaaagtacatttcaaattgacccaagtgggggtgaaaatggtggaccaactgggatttttaaagttcaggtgttgtttctacagcaaacaatggtggctttacaagtatcagaactaagaatttctcagaacctgaaaatctttctgcatatgatggtttggagttccgcctaaaaggtgatgggcgtagatataaaattattgttcgcacaagcagtgattgggatgctcttggttacactgcaggttttacactgagaaaggaaaatggcaatcaattcgagtgccattttcttccttgaggcctgtatttcgagcaagaactgtgtctgatgctccaccatttgatccaagcattgttgtatcattacagctcatgttcagcaagtttgagtatgatggtaaattaaatgaaacttttgtggaaggtccatttgagcttccagtgtctagcatacatgcatatataataaaggatccaataacccccaggtttgtacatgtgagctcagcaggagttacaagacccgaaaggcctggactagatctaagtaaacagcctcctgccgttcgattaaacaaggaactggattatatcctcacatttaaactaaagggcgaggatttacttagagaaagtggcattccctatgtaatcgtgaggccttgtgcattaactgaggagcctgctggtgccgatcttatttttgatcaaggagataatattacgggtaaaatatcaagggaagagattgctcttatgtgtgtagctgcgcttgatagcccttatgcatgtgacaaaacatttgaggtcaaaagtgtcattccatttagtgagccattcactgtggatccagcaaaccctcctccagaaaaggactatgacgtatattttaaaaatttaaaagaaggcattactgggaaggaagctctccaacaaaaccctgtttctgtttagttcggctatgaatattgcagatgtgagagtaccttgagagctgtacagttattgatctaaagagatctaaacttgacaaatctgtgatactacgtttttaaaccaagttagatatggcctttaccttacaatctgcatgtatatcctgtctccaaacatgagtccttttccttctagcaaataggaatgcaaagaatttttatattc

SEQ ID NO: 20754 - protein, 193 aa, Glycine max
MFSKFEYDGKLNETFVEGPFELPVSSIHAYIIKDPITPRFVHVSSAGVTRPERPGLDLSKQPPAVRLNKELDYILTFKLKGEDLLRESGIPYVIVRPCALTEEPAGADLIFDQGDNITGKISREEIALMCVAALDSPYACDKTFEVKSVIPFSEPFTVDPANPPPEKDYDVYFKNLKEGITGKEALQQNPVSV

SEQ ID NO: 20755 - protein, 143 aa, Glycine max
ASVIVGPKEGDTPDRAKYSQGIKFFEPEIKGDSPEKVEYIGMRNLIKAVKDNLGLRREKLLFGFEGNNYRQLPWGALDDVVMGGVSESTFQIDPSGGENGGPTGIFKVQVLFLQQTMVALQVSELRISQNLKIFLHMMVWSSA

SEQ ID NO: 20756 - protein, 102 aa, Glycine max
MRNLIKAVKDNLGLRREKLLFGFEGNNYRQLPWGALDDVVMGGVSESTFQIDPSGGENGGPTGIFKVQVLFLQQTMVALQVSELRISQNLKIFLHMMVWSSA

SEQ ID NO: 20757 - DNA, 1020 bp, Glycine max
agacttgacaaggatttacagtggttcatgggacacaactgttcgagtgtgggaccgtctttcaatgaagtgtactgcagtgttgaggcacagtgactgggtctgggcacttgtccctcataacactactgttgccagcacatcaggttcagatgtgtatgtttgggatactaatagtggggctttggtgaccattgttcataatgctcatgttggtaatacttatgctttggcacggagccatacaggggacttcctttttactggaggtgaagatggtgcaattcacatgtatgagattgttaatgatggctatgagtctaaaacttggcatgttgctgcttggattcctcactctgccgctgtgtattcccttgcctttgagtttccatggcttgtttctgcatcaagtgatggcaagctagcactaattgatgtgagaaagctgttgaggattagcaagcgagctctagggaaaagagtttcaaaggtaaagcatttgggtggagacatagtggagcctccacagaggatgttgcatggatttaagagcaatcttttctctgtggatataggagctgaacgaattgtcagtggaggtgaagaaggtgttgtcaggatctggaatttcacggaagctttggaaattgaacggagagcccgagcattaagaggaatacgattagagcacagaatgaggcgacggaagcttcaaacagagctgagcaataaaagtggtcggagtgatcagtgttcagttgcagccaagaaaaattctgtcacttgtatttggcccactaaacgtggcatgagcggaaagctgaaagcatagtgactgaggcagtctaatgtttgcttatatccaccaattgtcaatcctttttaattttgtttttacaaaattgatgtatacgatatttagtttcaagcaggtaaactgaccaattttaagttctctttacgtattttgatatgagaagtttctgtaggtagtgatcagatcagattactcctctttac

SEQ ID NO: 20758 - protein, 276 aa, Glycine max
DLTRIYSGSWDTTVRVWDRLSMKCTAVLRHSDWVWALVPHNTTVASTSGSDVYVWDTNSGALVTIVHNAHVGNTYALARSHTGDFLFTGGEDGAIHMYEIVNDGYESKTWHVAAWIPHSAAVYSLAFEFPWLVSASSDGKLALIDVRKLLRISKRALGKRVSKVKHLGGDIVEPPQRMLHGFKSNLFSVDIGAERIVSGGEEGVVRIWNFTEALEIERRARALRGIRLEHRMRRRKLQTELSNKSGRSDQCSVAAKKNSVTCIWPTKRGMSGKLKA

SEQ ID NO: 20759 - protein, 255 aa, Glycine max
MKCTAVLRHSDWVWALVPHNTTVASTSGSDVYVWDTNSGALVTIVHNAHVGNTYALARSHTGDFLFTGGEDGAIHMYEIVNDGYESKTWHVAAWIPHSAAVYSLAFEFPWLVSASSDGKLALIDVRKLLRISKRALGKRVSKVKHLGGDIVEPPQRMLHGFKSNLFSVDIGAERIVSGGEEGVVRIWNFTEALEIERRARALRGIRLEHRMRRRKLQTELSNKSGRSDQCSVAAKKNSVTCIWPTKRGMSGKLKA

SEQ ID NO: 20760 - protein, 180 aa, Glycine max
MYEIVNDGYESKTWHVAAWIPHSAAVYSLAFEFPWLVSASSDGKLALIDVRKLLRISKRALGKRVSKVKHLGGDIVEPPQRMLHGFKSNLFSVDIGAERIVSGGEEGVVRIWNFTEALEIERRARALRGIRLEHRMRRRKLQTELSNKSGRSDQCSVAAKKNSVTCIWPTKRGMSGKLKA

SEQ ID NO: 20761 - DNA, 1120 bp, Glycine max
gatacggcaacctcctttctctgtgactctgagtatcgtatcgttttattattatttttaattctctcttatcaggtcattgaatatgtctccttcgttggatcttcctcccaagggtggcttcagttttgatctatgccgaagaaacgcaatgcttcaaaacaagggcctcaaagccccaacctttctcaaaactggcaccactattgtcggtttagttttccaggatggtgtcattcttggtgctgatactagggcaactgaaggacctatagtggctgataaaaactgtgagaaaattcattatatggcacccaacatatattgctgtggagcaggcacagctgctgatacagaggctgtaacagacatggttagctcacagctgcaattacatcgctaccatactggtcgagaatcaagagttgttacagcgctgacccttcttaagaaacaccttttcaattatcaagggcatgtctcagctgctttggtgcttggtggggttgatatcactggacctcatttgcatactatttatcctcatgggtcaactgacaccctcccatttgctacaatgggatcaggttcacttgctgcaatgtctgtatttgagtccaagtacaaggaaagtttgagtagggatgaaggcattaagctagttgttgaggcgatatgcgctggaatatttaatgacctaggaagtggaagtaatgttgacgtttgtgtgataaccaagggacacaaggaatatctcaggaaccaccttctaccaaatcctcgtacctatgtcaatccaaaaggctttgatttccccaaaaagacagaggtcctcttaacaaagattaccccgttgaaggagaaggtggaagtgattgaaggagatgctatggaagagtaacaatcgttccaaaaaatatttggtgtttgagtataaaacttgattgtgcaatggctgtgatatttagttattgtactttcacaactttggctttcattaccaaaaattatgtgaatttaattagattgttgcaagttatttcctcaaatttcttcatttggttggattttggctagaaaatgcttaacaaaacattaaatatatacaatttgattgatg

SEQ ID NO: 20762 - protein, 271 aa, Glycine max
MSPSLDLPPKGGFSFDLCRRNAMLQNKGLKAPTFLKTGTTIVGLVFQDGVILGADTRATEGPIVADKNCEKIHYMAPNIYCCGAGTAADTEAVTDMVSSQLQLHRYHTGRESRVVTALTLLKKHLFNYQGHVSAALVLGGVDITGPHLHTIYPHGSTDTLPFATMGSGSLAAMSVFESKYKESLSRDEGIKLVVEAICAGIFNDLGSGSNVDVCVITKGHKEYLRNHLLPNPRTYVNPKGFDFPKKTEVLLTKITPLKEKVEVIEGDAMEE

SEQ ID NO: 20763 - protein, 249 aa, Glycine max
MLQNKGLKAPTFLKTGTTIVGLVFQDGVILGADTRATEGPIVADKNCEKIHYMAPNIYCCGAGTAADTEAVTDMVSSQLQLHRYHTGRESRVVTALTLLKKHLFNYQGHVSAALVLGGVDITGPHLHTIYPHGSTDTLPFATMGSGSLAAMSVFESKYKESLSRDEGIKLVVEAICAGIFNDLGSGSNVDVCVITKGHKEYLRNHLLPNPRTYVNPKGFDFPKKTEVLLTKITPLKEKVEVIEGDAMEE

SEQ ID NO: 20764 - protein, 197 aa, Glycine max
MAPNIYCCGAGTAADTEAVTDMVSSQLQLHRYHTGRESRVVTALTLLKKHLFNYQGHVSAALVLGGVDITGPHLHTIYPHGSTDTLPFATMGSGSLAAMSVFESKYKESLSRDEGIKLVVEAICAGIFNDLGSGSNVDVCVITKGHKEYLRNHLLPNPRTYVNPKGFDFPKKTEVLLTKITPLKEKVEVIEGDAMEE

SEQ ID NO: 20765 - DNA, 1370 bp, Glycine max
atttgattgctcgtcaaaaaggcattggacaacccaatgaacttgtaactcaggaacagcagctcgttacaactgatctcacatcaatcattattcaattgatctctaccgcaggtagtcttctcccttctgctaggcataaccttgtaaacactagttcattggttggacagattgaccagcttcgtgggacaaccattcctcctgggaccggtgcaagtaacggctgtattcaaccacagaataatggtggaaaaatattgtctgatcagtccatgcagactgatctacctaatagcggtgaaatggagcaaaagtacaatatggtagaacatgacttgaaagatgaagaagatgtagaggatggagaaaaccttgcccctggttcatatgagattctacaattagaaaaagaagaaatccttgctcctcatacccatttctgtacaatttgtgggaaggggttcaagagagatgcaaatcttcgaatgcacatgcgaggccatggtgacgagtacaaaaccccagcagcgcttgccaaaccgcacaaagaatctgcatcaccaaagcctatcaagaggtattcctgcccctatcctggctgcaagcgcaacaaggatcacaagaagttccagcctctgaagacgatcttatgtgtcaaaaaccattacaaaaggacgcattgtgacaagagttacacttgcagtaggtgcaacaccaagaagttctcagtcatggctgatctaaaaactcatgaaaaacactgtggtaaggataaatggctctgttcgtgtggcacaacattttctaggaaagacaagctttttgggcacattgctcttttccaagggcatgcaccagccattcctttggatgacactaaaggggcaggggtagctgaggcacccattcatgatagcaaagagaacaacagtaaggtgcagagcatgaacttcacttttggatcaaatccttcaaatgcaaatgaagttccaaatgccatggatgtaaaaggcgatagcgatgatcctatcaattatttctcatcattgaactttgaagccaactttggtgagtttaatgaattcaccagacctctatttgatgacccagaaggttcgttctcttttgtcacacctggatctttcaaatctggaggagaatctagttctgacaatcttttataacaatggtactaccattggttctgtaataacttaatatctatgtttctcttaattgtgaagatataactttcgggtttgtgttaaatttgtaaagccggtttaatttcatgaccatgcaaatccttaagaaggatgttagattttcttgatgattttataaattataaattgcgcgtctcggtt

SEQ ID NO: 20766 - protein, 394 aa, Glycine max
LIARQKGIGQPNELVTQEQQLVTTDLTSIIIQLISTAGSLLPSARHNLVNTSSLVGQIDQLRGTTIPPGTGASNGCIQPQNNGGKILSDQSMQTDLPNSGEMEQKYNMVEHDLKDEEDVEDGENLAPGSYEILQLEKEEILAPHTHFCTICGKGFKRDANLRMHMRGHGDEYKTPAALAKPHKESASPKPIKRYSCPYPGCKRNKDHKKFQPLKTILCVKNHYKRTHCDKSYTCSRCNTKKFSVMADLKTHEKHCGKDKWLCSCGTTFSRKDKLFGHIALFQGHAPAIPLDDTKGAGVAEAPIHDSKENNSKVQSMNFTFGSNPSNANEVPNAMDVKGDSDDPINYFSSLNFEANFGEFNEFTRPLFDDPEGSFSFVTPGSFKSGGESSSDNLL

SEQ ID NO: 20767 - protein, 303 aa, Glycine max
MQTDLPNSGEMEQKYNMVEHDLKDEEDVEDGENLAPGSYEILQLEKEEILAPHTHFCTICGKGFKRDANLRMHMRGHGDEYKTPAALAKPHKESASPKPIKRYSCPYPGCKRNKDHKKFQPLKTILCVKNHYKRTHCDKSYTCSRCNTKKFSVMADLKTHEKHCGKDKWLCSCGTTFSRKDKLFGHIALFQGHAPAIPLDDTKGAGVAEAPIHDSKENNSKVQSMNFTFGSNPSNANEVPNAMDVKGDSDDPINYFSSLNFEANFGEFNEFTRPLFDDPEGSFSFVTPGSFKSGGESSSDNLL

SEQ ID NO: 20768 - protein, 293 aa, Glycine max
MEQKYNMVEHDLKDEEDVEDGENLAPGSYEILQLEKEEILAPHTHFCTICGKGFKRDANLRMHMRGHGDEYKTPAALAKPHKESASPKPIKRYSCPYPGCKRNKDHKKFQPLKTILCVKNHYKRTHCDKSYTCSRCNTKKFSVMADLKTHEKHCGKDKWLCSCGTTFSRKDKLFGHIALFQGHAPAIPLDDTKGAGVAEAPIHDSKENNSKVQSMNFTFGSNPSNANEVPNAMDVKGDSDDPINYFSSLNFEANFGEFNEFTRPLFDDPEGSFSFVTPGSFKSGGESSSDNLL

SEQ ID NO: 20769 - DNA, 1278 bp, Glycine max
attcccaacgaaccaacacagcctcacaagtaacaaacttataacacacactctctctctctctctctgcaatggctggaatggttcccctttgcattgcatcattggtcactctttttgttgcaacaagtgctagaattcctggggttttcaatggtggtgcatggcagggtgcccacgccactttctacggtggaaatgatgcctctggaacaatgggtggggcatgtgggtacgggaacctatacagccaagggtatggcgtgaacaccgcggccttgagcacggcgctgttcaacaacgggttgagctgcggcgcgtgcttcgagataaagtgcgaccaagatccgaggtggtgcaacccgggaagcccttccatcgtcatcaccgccacgaatttttgccctcccaactttgcccttcccagcgacaacggcggctggtgcaaccctcctcggccccacttcgacctcgccatgcccatgttcctcaagatcgctcagtataaagccggcatcgtgcccgtcagttaccgccgggttccatgcagaaaggtcggtggaatcagatttacgatcaacggttttcgttacttcaacttggttctaatcaccaacgtggcgggtgcaggggatatcgcgcgcgtgagcgttaaaggttccaaaaccgggtggaacagcatgagcagaaactgggggcaaaattggcaatcaaacgcgaatttagtgggccaggccctttccttcagagtcacgggcagtgacagacgcacctcaacctcttggaacgtggcaccttctcattggaagttcggccagaccttcacgggcaagaatttccgcgtctgaaaaaaataacaaaatttaaacatggatgtttgtttttgtagttgcgttttggttttttagttttcccgcgttcaactttccctctattttcccgggaaagtttgaagccgtgttttggtttaagtgtgtagtaggggacagaaagtaagagaagggtagataaggtaaaatgaaagtgactttactataaatgctagtagtgggtgtgagtagatgtttctaccaccttttgttattggagggtgaatttgtgtgatattaattattactaaagtgtattgggtgttgctggcaatatttattacccagcaatgctttttgttgacttggtgggggctgaggaggctgcaaggttcatgtagcccgcatctcctttattatgaactagaaacattatattatgtaatatctttcagttataatgcatgcc

SEQ ID NO: 20770 - protein, 258 aa, Glycine max
MAGMVPLCIASLVTLFVATSARIPGVFNGGAWQGAHATFYGGNDASGTMGGACGYGNLYSQGYGVNTAALSTALFNNGLSCGACFEIKCDQDPRWCNPGSPSIVITATNFCPPNFALPSDNGGWCNPPRPHFDLAMPMFLKIAQYKAGIVPVSYRRVPCRKVGGIRFTINGFRYFNLVLITNVAGAGDIARVSVKGSKTGWNSMSRNWGQNWQSNANLVGQALSFRVTGSDRRTSTSWNVAPSHWKFGQTFTGKNFRV

SEQ ID NO: 20771 - protein, 255 aa, Glycine max
MVPLCIASLVTLFVATSARIPGVFNGGAWQGAHATFYGGNDASGTMGGACGYGNLYSQGYGVNTAALSTALFNNGLSCGACFEIKCDQDPRWCNPGSPSIVITATNFCPPNFALPSDNGGWCNPPRPHFDLAMPMFLKIAQYKAGIVPVSYRRVPCRKVGGIRFTINGFRYFNLVLITNVAGAGDIARVSVKGSKTGWNSMSRNWGQNWQSNANLVGQALSFRVTGSDRRTSTSWNVAPSHWKFGQTFTGKNFRV

SEQ ID NO: 20772 - protein, 210 aa, Glycine max
MGGACGYGNLYSQGYGVNTAALSTALFNNGLSCGACFEIKCDQDPRWCNPGSPSIVITATNFCPPNFALPSDNGGWCNPPRPHFDLAMPMFLKIAQYKAGIVPVSYRRVPCRKVGGIRFTINGFRYFNLVLITNVAGAGDIARVSVKGSKTGWNSMSRNWGQNWQSNANLVGQALSFRVTGSDRRTSTSWNVAPSHWKFGQTFTGKNFRV

SEQ ID NO: 20773 - DNA, 1174 bp, Glycine max
aaccaatttccatttcttcatcaggcataattacatagagataatttatctctatattctcacgttgcttataaataaaattgtctccagtctctacaatatgagatagtgaatattgtccttggaaatcttagttaatctgtggatgaacaaatactcgacacagtagcaccaaacaagtactattgtataattcataggttaatgtcatgccttcaggtttgaatttggttttccctcctatttgctcttttaaaaaataaaataaaataagaaagagcatagaatagtcaaatgatcaaatacagtggtgagtaagtgcattttattagtttgattttatgtttgttataacagcatatctcagcatcaaaaggatatgtagatatttcttcctatcttgttgagcaaggtgtaaatatcaactgtgcagataaatttggcaccactcccttgcttgaagccatcaagaatggacacgaagaagtagcatctatacttgttaacgcaggagctatctttaccattgatgatgttggcaattttctctgcatgactgttgccaagaaggagttggaccttttaaaaagggttctgggttgtggagttaatccaaatgccaaaaattatgatcaacgtacacctcttcacatagctgcctctgaaggtttgtttacaatggcggaagtacttctagaagcaggagcgagtgttttatctaaggacagatggggaaatacacctcttcatgaagctcataccggtggggatagaaatatgatcaaaatgcttgaagtggcaaaagcttctcagttggttgagttgtccaataatattcatgaaactcaagcaacaccaacagatgaaattccgaaaaagagatgtatagtatttcctttccacccatgggatgatcagaaagcggatagaaaagagggagtggtcctaacggttccacaaagcattgaagagcttataaaggaggcgacaaaacatttggaaattccaaacgcttcctgtattttgtcagaacaatgtggcaaaattgtttatgtaggcacgattaacaatgatgagaagctatttctagtgagtgaagcacagaatgaatgaggtgaaatgttcagcagtcccaaccccactagcgggttaatatactttttctttcctcccc

SEQ ID NO: 20774 - protein, 186 aa, Glycine max
MTVAKKELDLLKRVLGCGVNPNAKNYDQRTPLHIAASEGLFTMAEVLLEAGASVLSKDRWGNTPLHEAHTGGDRNMIKMLEVAKASQLVELSNNIHETQATPTDEIPKKRCIVFPFHPWDDQKADRKEGVVLTVPQSIEELIKEATKHLEIPNASCILSEQCGKIVYVGTINNDEKLFLVSEAQNE

SEQ ID NO: 20775 - protein, 144 aa, Glycine max
MAEVLLEAGASVLSKDRWGNTPLHEAHTGGDRNMIKMLEVAKASQLVELSNNIHETQATPTDEIPKKRCIVFPFHPWDDQKADRKEGVVLTVPQSIEELIKEATKHLEIPNASCILSEQCGKIVYVGTINNDEKLFLVSEAQNE

SEQ ID NO: 20776 - protein, 111 aa, Glycine max
MIKMLEVAKASQLVELSNNIHETQATPTDEIPKKRCIVFPFHPWDDQKADRKEGVVLTVPQSIEELIKEATKHLEIPNASCILSEQCGKIVYVGTINNDEKLFLVSEAQNE

SEQ ID NO: 20777 - DNA, 1352 bp, Glycine max
ttgaaattttatcgaggaagtggcatttgctttggactggagcattaataacagtgtcacctccacaaatgctgccattgcaagggataagatcaagaagcaattcagcagtcatttatcacaaaatcaaagtaaaacagatgttgaagataaacagtcttctcgcttgccctcatttgcatatcctgacgaacagtgtgaactcttcaacacacagaatgatcagtgtgatctccttgaagagattagaaaactaaaatatgatttgaggagcacaaaaactgcgaagaaagacttggaagaaaagctgctgtcagtaactgatgagagtcagaacttagcaaaacaatgtcaagaagcacaaaataacatcaaaggtttagaatcagaaatcgaggcactgaaagaatccaaagcaacactagaagatcagattgagaaacagaagattataaatgaagatcttgatacacaacttacaatagctcagaccaaattaaatgacatctttcaaaagttttcgtccttagaagttgaattagaggataaaaagaactcctgtgaggatttagaggcaacatgtctagaacttcaactccagctggaaagcattgcaaagaaggaatctccaacatatggcaaatacgaagtagaaaagatatatcaaactggctgggagatcacaacagcttcatcaaagttggcagagtgccaagaaaccatcctaaaccttaggaaacaactcaaggcacttgcttcatctaatgaagtagcaatttttgacaaggttgtctccacaactaatactatggccaatccaactcagaagaagaacttgatcaaacgatcctctctacgcaatcaaatgcaagcagaggatgaagctaaaggagggatgcataagtctgtccaaactgaagaaactaaaagcgataaagatgtgcagaggccaccccttcttcaatctgaaaccgaaaaatctctgccaagtcccaaaagtctcacttcggagcaacatgatagaagcaaaaccacaggctctttggcaattgtgccaggtaagaagcaaataggctttggttttctgaggaagctgctgtcgagacgaaagaaaggaaggggtaagggaactaagttgttagccaaagcatgaataagaatgatcttggagagaatgcgaagacatgcttctggtgtaacatgcttttgtcttttattagattagattctggtggaacttgtttttatcttgtattggagatgattgaggttggagttgagacacagagtgaaagagaggtttggtgctgtaaatatagctggtgtaaataagttcattggcatttgagatt

SEQ ID NO: 20778 - protein, 114 aa, Glycine max
MANPTQKKNLIKRSSLRNQMQAEDEAKGGMHKSVQTEETKSDKDVQRPPLLQSETEKSLPSPKSLTSEQHDRSKTTGSLAIVPGKKQIGFGFLRKLLSRRKKGRGKGTKLLAKA

SEQ ID NO: 20779 - protein, 95 aa, Glycine max
MQAEDEAKGGMHKSVQTEETKSDKDVQRPPLLQSETEKSLPSPKSLTSEQHDRSKTTGSLAIVPGKKQIGFGFLRKLLSRRKKGRGKGTKLLAKA

SEQ ID NO: 20780 - protein, 85 aa, Glycine max
MHKSVQTEETKSDKDVQRPPLLQSETEKSLPSPKSLTSEQHDRSKTTGSLAIVPGKKQIGFGFLRKLLSRRKKGRGKGTKLLAKA

SEQ ID NO: 20781 - DNA, 1303 bp, Glycine max
acggcaataaatcgcaaggtgcgcgtactcgtgcgctggctgattttaaatcgggcgatattcgtgtactggtggcaactgacatcgctgcgcgcggcctggatattgaagagctgccgcacgtcgtcaactatgaactgccaaacgtacctgaagattatgtccaccgtatcgggcgtaccggtcgtgcggctgctaccggtgaagcgttgtcgctggtgtgtgttgatgaacacaaactgctgcgtgatatcgaaaaactgctgaaaaaagagatcccgcgcattgcgattccgggctatgagccggacccgtcaatcaaagccgaaccgatccagaacggtcgccagcaacgtggcggcggcggtcgtgggcaaggtggtggtcgcggtcaacagcaaccacgccgtggggaaggtggcgcaaaatctgcaagcgcgaaacctgcagaaaaaccgtctcgccgcctcggcgatgccaaaccggcaggcgaacaacaacgtcgccgccgtccgcgtaaacctgccgctgcgcagtaatcttttatgccgggctatgcccggcatcaggctgatgaacaaacgcaaaactgcctgatgcgctacgcttatcaggcctacgtgaactctgcaatatattgaatttgcatgcttttgtaggccggataaggcgtttacgccgcatccggcatttcacaacaagcacttgtcagcaatttgagaacacgggaaaaaatttatctgttttaccgcccataagccaccgagacgttacttctctatagccaattgttcgcgcaactccattaaaaggtagcccagtcgattcttgcccttaccatgaccaccgtctccccagtaagcatcgttttccgtatgctcaaccagttttgcgggcgcggttgccagcaagagcgcacgcagttctgcatgctgttcgaatttagcgcgaagtgcttttcgcatcacctgttctttgaccgactcccagtttttacgcagaggcttagaacgatcgcgccccatgcgtgcggcgaccataggggaagaaacccgacggatctcttcgcggtatttttcatcaaggaatttttgtgcctgaaaatagtgttctgaggtaggccaggttttcccgtcaaccttgatgggccaggcggcaaagttagaaaaatcaccgtagtcatcgctggtgctgtagaaatttatgatggtgtcttgcatgacgtgttggatcctttgtgctcgaacgggcattaaaccgcattatgttggtggttattgcgagccgctttccagaaacagaa

SEQ ID NO: 20782 - protein, 178 aa, Glycine max
GNKSQGARTRALADFKSGDIRVLVATDIAARGLDIEELPHVVNYELPNVPEDYVHRIGRTGRAAATGEALSLVCVDEHKLLRDIEKLLKKEIPRIAIPGYEPDPSIKAEPIQNGRQQRGGGGRGQGGGRGQQQPRRGEGGAKSASAKPAEKPSRRLGDAKPAGEQQRRRRPRKPAAAQ

SEQ ID NO: 20783 - protein, 98 aa, Glycine max
MSRTRQSKPNRSRTVASNVAAAVVGKVVVAVNSNHAVGKVAQNLQARNLQKNRLAASAMPNRQANNNVAAVRVNLPLRSNLLCRAMPGIRLMNKRKTA

SEQ ID NO: 20784 - protein, 91 aa, Glycine max
MTTVSPVSIVFRMLNQFCGRGCQQERTQFCMLFEFSAKCFSHHLFFDRLPVFTQRLRTIAPHACGDHRGRNPTDLFAVFFIKEFLCLKIVF

SEQ ID NO: 20785 - DNA, 1266 bp, Glycine max
gagacacgtttatcatatcatcactcaaacattaagaaaagcttatgcctcagccatcgtttctactcgctagagcgtaagcatgggcactcagagaagcaaacccagttgtaccatcgttgcgatctttctagcattttgttgttttgtttcttcttcgaaagcaaagcttgagagtctccaacatgcgcccaaagctgatgggtctctaagcttcttggtggttggagactggggtagaaaaggtgcttataaccaatctcttgtcgcttttcagatgggtgtaataggagagaaattggacgttgattttgtgatctcaacgggggataacttctacgacaatggattaaccggagtgtttgatccatccttcgaagaatcattcaccaaaatctacacggcacctagcttgcagaagaagtggtacaacgttttgggaaatcatgactacaggggaaatgccaaggcacaaataagccatgtccttagatacagagacaatagatgggtgtgcttcagatcatataccctcaattcagaaaatgtagacttcttttttgtagacacaactccttttgttgataaatacttcattgaggataaaggccataactacgattggagaggcatactacccaggaagcgttatatttctaaccttctcaaggacgtggatttggcactaagacaatcaacagcaacctggaaggtagtgattggccatcatacaatcaaaagcattgggcatcatggagacacccaagaacttttaatacattttctcccacttcttaaggcaaataatgttgatttgtacataaacggacacgatcactgcttggaacatataagtagccttgacagttcagttcaatttttgacaagtggtggtggatcgaaggcatggagaggtgacacgaaacagagcgaaggagatgagatgaagttttactacgacggccaaggcttcatgtctgtgcatatttctcaaactcagcttcgaatttctttctttgatgtcttcggcaatgccatccacaaatggaacacctgcaagtttgactcctgtgacatgtaataagtttactagttaaacaatataaaaacatatgttcacatctcattggctgaatattaaattaaaaataaagccttgaaataaattaaagtttttagaattttaatttagtcatcagagcattttcaactgcgaacttaaatgagttgtttaatttaagtagtgctgtttatttttttttattc

SEQ ID NO: 20786 - protein, 332 aa, Glycine max
MGTQRSKPSCTIVAIFLAFCCFVSSSKAKLESLQHAPKADGSLSFLVVGDWGRKGAYNQSLVAFQMGVIGEKLDVDFVISTGDNFYDNGLTGVFDPSFEESFTKIYTAPSLQKKWYNVLGNHDYRGNAKAQISHVLRYRDNRWVCFRSYTLNSENVDFFFVDTTPFVDKYFIEDKGHNYDWRGILPRKRYISNLLKDVDLALRQSTATWKVVIGHHTIKSIGHHGDTQELLIHFLPLLKANNVDLYINGHDHCLEHISSLDSSVQFLTSGGGSKAWRGDTKQSEGDEMKFYYDGQGFMSVHISQTQLRISFFDVFGNAIHKWNTCKFDSCDM

SEQ ID NO: 20787 - protein, 267 aa, Glycine max
MGVIGEKLDVDFVISTGDNFYDNGLTGVFDPSFEESFTKIYTAPSLQKKWYNVLGNHDYRGNAKAQISHVLRYRDNRWVCFRSYTLNSENVDFFFVDTTPFVDKYFIEDKGHNYDWRGILPRKRYISNLLKDVDLALRQSTATWKVVIGHHTIKSIGHHGDTQELLIHFLPLLKANNVDLYINGHDHCLEHISSLDSSVQFLTSGGGSKAWRGDTKQSEGDEMKFYYDGQGFMSVHISQTQLRISFFDVFGNAIHKWNTCKFDSCDM

SEQ ID NO: 20788 - DNA, 1359 bp, Glycine max
aacacagaagcaaaccgaacggtttcacatcagacgcagcagcaaaaagtttcaaatttggtactttggcaccctccacgtagtagttctcaccatgtccgacactggaagaagtgccaacaacaatggttccaagcggagcctgccatcatgcacgagtgcaagggaaaatgagagcgaaaacagtgcaaagaaaccaaatttggatggcaaaggtgagaaattcggtgaagccgagacacccaacaagagcaaagtccaaaatcaaaatggtggaaaatcttccgcctcatgtttggaatctaaaagcttcaacaagcttctggaaggggtggtttttgtgctttcagggtttgtgaatccggagaggggcatgttgaggtcacgagcgatggaaatgggagcagaatataagcctgattggaactctgattgcactctcttggtttgtgcttttccaaatacccctaagtttagacaagttgaagctgattgtggaaccattgtgtcaaaggtttggataatagagtgttacacccaaaggaagctgattgaaattgacagttaccttttgcatgctgggaaaccatggtgcaaaggaaatggatcaattgaagtaaatgaagataagaaaccatctgtacccaaaaaatcaccgaagcacattgaaagagaacagctttcaacatcaactgcctccctaaaatcaaagggaaaagaccctgatgttgctaggaaatgctttgagcctttggaagtgaaaaagtgggtcattgatgatttgaataaaacaattcagtggctggaaaatcaagaagaaaagccagaccctagtgagttgacaaaaatagctgcagaggggattctaacttgtttgcaagatgcaatatgttctctagaggaaaaacaggacatccggaaaggaactgaggactggatgttcttacctcgggttgttgaggagcttgcaaagtttgatgtagaaggcaacaagggctcattgttaaaggaagaacttcaaagacgggctttggattgtaagcgtatttatgaggaggaactaaatggtttagatcatgaaaggaaaacgaatacaaaggtaaataaagaacagacgagcaaaactagaagaacaaatgccatgtcttctggtgcagttgagtatgatagtgatgagacaattgagatgactgaacaagaaatagaccttgcatataagactttgtcctctaacatttgccacttgtgagtgatgattgaactttgtttctttaaggggttttggttcacctatatttttctttggatattctacggtgtatattacaaaaaaagaaaaggcccaagtgtgttagactg

SEQ ID NO: 20789 - protein, 415 aa, Glycine max
TQKQTERFHIRRSSKKFQIWYFGTLHVVVLTMSDTGRSANNNGSKRSLPSCTSARENESENSAKKPNLDGKGEKFGEAETPNKSKVQNQNGGKSSASCLESKSFNKLLEGVVFVLSGFVNPERGMLRSRAMEMGAEYKPDWNSDCTLLVCAFPNTPKFRQVEADCGTIVSKVWIIECYTQRKLIEIDSYLLHAGKPWCKGNGSIEVNEDKKPSVPKKSPKHIEREQLSTSTASLKSKGKDPDVARKCFEPLEVKKWVIDDLNKTIQWLENQEEKPDPSELTKIAAEGILTCLQDAICSLEEKQDIRKGTEDWMFLPRVVEELAKFDVEGNKGSLLKEELQRRALDCKRIYEEELNGLDHERKTNTKVNKEQTSKTRRTNAMSSGAVEYDSDETIEMTEQEIDLAYKTLSSNICHL

SEQ ID NO: 20790 - protein, 384 aa, Glycine max
MSDTGRSANNNGSKRSLPSCTSARENESENSAKKPNLDGKGEKFGEAETPNKSKVQNQNGGKSSASCLESKSFNKLLEGVVFVLSGFVNPERGMLRSRAMEMGAEYKPDWNSDCTLLVCAFPNTPKFRQVEADCGTIVSKVWIIECYTQRKLIEIDSYLLHAGKPWCKGNGSIEVNEDKKPSVPKKSPKHIEREQLSTSTASLKSKGKDPDVARKCFEPLEVKKWVIDDLNKTIQWLENQEEKPDPSELTKIAAEGILTCLQDAICSLEEKQDIRKGTEDWMFLPRVVEELAKFDVEGNKGSLLKEELQRRALDCKRIYEEELNGLDHERKTNTKVNKEQTSKTRRTNAMSSGAVEYDSDETIEMTEQEIDLAYKTLSSNICHL

SEQ ID NO: 20791 - protein, 291 aa, Glycine max
MLRSRAMEMGAEYKPDWNSDCTLLVCAFPNTPKFRQVEADCGTIVSKVWIIECYTQRKLIEIDSYLLHAGKPWCKGNGSIEVNEDKKPSVPKKSPKHIEREQLSTSTASLKSKGKDPDVARKCFEPLEVKKWVIDDLNKTIQWLENQEEKPDPSELTKIAAEGILTCLQDAICSLEEKQDIRKGTEDWMFLPRVVEELAKFDVEGNKGSLLKEELQRRALDCKRIYEEELNGLDHERKTNTKVNKEQTSKTRRTNAMSSGAVEYDSDETIEMTEQEIDLAYKTLSSNICHL

SEQ ID NO: 20792 - DNA, 1438 bp, Glycine max
gatatacacataaactatagtatactcttcccactttcactttcacatatagactatatataaaatatattagtcttgctgttttcttcggctaattgctgcagagaatggctgctggagtgtataaccaaccaattgttgcttttcaatcccattctcacatcaacaattttaatcatcagcaaaagtttaataatttggtaagactggtgacaaaggactttatcggcagtaatttcctctcaagaagggattgtagagtaattcaatctttagcatctcaaacatctgtggttgacacagtttcatccccttcaaaaagcaaaactagtgatagagacactcacaagaaatcaaatgaagcttctttaatccttattcgacatggtgaatccttgtggaacgaaaagaacttgttcacaggctgtgttgatgtccctctaagcaagaggggtatagatgaggcaattgaagctggcaaaagaattagcagtattcctgtggatctcatatttacatctgctttgattcgagcgcagatgacagccatgcttgccatgacacagcaccgccgcaggaaggtgcctatcataatgcacaatgaaagtgaacaagcaaggggatggagtcaagtttttagtgaggatacagaaaagcaatccattccagtcatagcagcttggcaattgaatgaaagaatgtatggggaactacagggtctcaataagcaagaaacagcagacagatatgggaaagaacaagtacatgagtggcgtcgaagttatgacatacctcctccaaatggtgaaagtttggaaatgtgtgctgaaagggcagtttcctatttcagagaccaaattgaacctcaacttttatctggaaagaatgttatgatttcagctcatgggaattcactgagatccattattatgtatcttgacaaactaacttcccaagaggtgattagtttagaattgtcaactggaattccaatgctttacatttttaaagaaggaagattcgttaggagagggagtccgatagggcccactgaagcaggagtttatgcctacactaggcgtttggctctttacaggcagaggttggatgatatgttccaataattttttgaagggttagggaatacatcacacgttaatcagcagtaaagtattacataaggggtaaaaaagatgttatcagtgttacagttagattgcatgaaaatttgagaggagtttaacacagtttcgaactagtggattaggatccatgcttgactccagtgttgttctcatatggtgaaggagtaattgcttccatgtgcctatatatatacaaataaatcattgaatcttagaaatgttttcgtgtctattacaattaattgtaaatgagttgtcatgtgaatttaattggacattcggaatgtttttat

SEQ ID NO: 20793 - protein, 338 aa, Glycine max
MAAGVYNQPIVAFQSHSHINNFNHQQKFNNLVRLVTKDFIGSNFLSRRDCRVIQSLASQTSVVDTVSSPSKSKTSDRDTHKKSNEASLILIRHGESLWNEKNLFTGCVDVPLSKRGIDEAIEAGKRISSIPVDLIFTSALIRAQMTAMLAMTQHRRRKVPIIMHNESEQARGWSQVFSEDTEKQSIPVIAAWQLNERMYGELQGLNKQETADRYGKEQVHEWRRSYDIPPPNGESLEMCAERAVSYFRDQIEPQLLSGKNVMISAHGNSLRSIIMYLDKLTSQEVISLELSTGIPMLYIFKEGRFVRRGSPIGPTEAGVYAYTRRLALYRQRLDDMFQ

SEQ ID NO: 20794 - protein, 194 aa, Glycine max
MTAMLAMTQHRRRKVPIIMHNESEQARGWSQVFSEDTEKQSIPVIAAWQLNERMYGELQGLNKQETADRYGKEQVHEWRRSYDIPPPNGESLEMCAERAVSYFRDQIEPQLLSGKNVMISAHGNSLRSIIMYLDKLTSQEVISLELSTGIPMLYIFKEGRFVRRGSPIGPTEAGVYAYTRRLALYRQRLDDMFQ

SEQ ID NO: 20795 - protein, 191 aa, Glycine max
MLAMTQHRRRKVPIIMHNESEQARGWSQVFSEDTEKQSIPVIAAWQLNERMYGELQGLNKQETADRYGKEQVHEWRRSYDIPPPNGESLEMCAERAVSYFRDQIEPQLLSGKNVMISAHGNSLRSIIMYLDKLTSQEVISLELSTGIPMLYIFKEGRFVRRGSPIGPTEAGVYAYTRRLALYRQRLDDMFQ

SEQ ID NO: 20796 - DNA, 1512 bp, Glycine max
tttttcttttctttgctatttggatttgcagatttgaaggagatagcgtctcttatcgagaccggttcgtactcgaaggaagttcgtagaattgctcgcgctgttcgccttacaattgcgttgaggcggaaattgacagcatccgctatctcttcttttctcgatcatgttctcactcctggctctgaagttcacgccaaattgtctgcgtatcttcccaaggatgatgatcatgagatggaagtggacgctgcaacatctgcgattcaaaccccagccaaacacttgttgcccgagctagaaatctactgttacctgcttgtactcctttttctgattgatcagaaaaaatacagccaaagcttgttcctcagctagcattgtttggctgaagaacataaacaggagaactgttgatgttattgcatccagactgtatttttactattcgtatagctatgaacttatgggagatcttgctgaaattcggggcaaccttcttgcattgcaccgaattgccaccctccgccatgatgagctgggtcaggaaacacttcttaatttgttacttcgtaactaccttcactacaacctatatgatcaggctgagaagttgaggtcgaaggctcctcgatttgaagcacattcaaaccagcagggaaaattcggacaattcagctggagtataccgatgcaaaagagtctctcctgcaggccgcccggaaagctcctgttgctgcacggggttttcgaattcaatgtaacaagtgggctgtgatagtgcgtttactgttgggagaaatacctgagcggactgtcttcatgcagaaaggaatggagaaagctctaaggccttactttgagcttacaaatgctgtgcggattggagacttggaactgtttaggaatattgcggacaagtttgccactacctttaatgcagacagaacccataatttgattgttcgtttgcggcataatgtcatcaggactggtttacgcaacatcagcatctcctattctcgcatctctctagctgatgttgctaaaaaactgaggctgaactctgcaagtcctgttgcagatgctgagagcattgtatcaaaggctattcgtgatggtgcaattgatgctacattggatcatgccaatggttggatggtgtccaaagaaactggagatatttactccacaaatgagcctcagttagcctttaattctcggattgctttctgtcttaacatgcacaatgaggcggttcgagcacttcgatttccaccaaacacacacaaagagaaggaaagtgctgaaaagagaagagagagacaacagcaagagcaagagctggctaagcatattgcagaggaggatgacgatgatttctgataattgttttttttcaccctatgaattgctatctggataccttcatttccaacgtttgctcatcttttccttttgaagaactttcattatcatttcctttttcaaaaagtgaatttttcatttccc

SEQ ID NO: 20797 - protein, 187 aa, Glycine max; identical to SEQ ID NO: 13802

SEQ ID NO: 20798 - protein, 183 aa, Glycine max; identical to SEQ ID NO: 13803

SEQ ID NO: 20799 - protein, 125 aa, Glycine max
FFFSLLFGFADLKEIASLIETGSYSKEVRRIARAVRLTIALRRKLTASAISSFLDHVLTPGSEVHAKLSAYLPKDDDHEMEVDAATSAIQTPAKHLLPELEIYCYLLVLLFLIDQKKYSQSLFLS

SEQ ID NO: 20800 - DNA, 1289 bp, Glycine max
aatacgaacaagaggtgcatactgtcaaacacaagtctgataaggaatgggttcaaggggctgatcatgatcgtttgatcctccacatatctgaattgtggctggatgaacgtatgcaaatgcagctggaagcagttcataatggttttatggataaatccatagtcgataaactaagtcttgaaatagagactttccttaaagctaaacaaaatagtaggagtacagaaaatattgcagtaaggaattgccgtaattccttggaatctgtaccactgaatgatgccgtcagtgcaccacaagaggttggtgatgacgatgattctgtgggcagtgattcaaattgttttgagttgaacaagccaagcaacaagggatctaaggtacatgaagaagagcctgtcggcaaaatttttgaggagacatcaaaaaccaaccaaccaaagaaaaaaccaataccacgagaagggttaaaacatcgtagcccatgtagcctgcgagtggagtttgaagaacagattgcttgggccatgtcatctgattcgcataagaagtcccagtcaattgatgcagatcaggggaagaccacagatactaggccagttgaaggaattgtatctgaaaagtctgaacactttgagatttacgaaaatgatgattctgagagaaaaaatatccccactgaattgcacagctccagtaaaaatcacattattgataatctcttaagaggtcaacttttggcatcggaaggtggcaatatgcatgctgaaaataattatggtgaggcttcttgcagcaatgctggatggaggaatcaggcaagccctgtgaagcagtggatggcaaaacttgcatcccaagaccttgacatatcagaggcttccaaagtgccttcaggatcaaaggagagtaataatactttgaaagcaaagcttcttgaagctaggtccaaggggcagagatcgcgtttaaaagccttgaaaggttccttttagaggtggtttagcttaaacataacatgttggaaaattcaggctaaaggtaaataataagttgtggggaatttgcatcctgttgatggtggtcattacacttccccctcgtctcttcctttcacgtgcaacttttgttcataattttcactttgtatctgtaacaaatttctcctttgggttttattctctctctatatatactactgtagatgtcacgcatgtagctaaaagaatcggatcgagtcttgagaagtgaaaaaacaagtatacaattttggataaaaaaaaaat

SEQ ID NO: 20801 - protein, 331 aa, Glycine max
YEQEVHTVKHKSDKEWVQGADHDRLILHISELWLDERMQMQLEAVHNGFMDKSIVDKLSLEIETFLKAKQNSRSTENIAVRNCRNSLESVPLNDAVSAPQEVGDDDDSVGSDSNCFELNKPSNKGSKVHEEEPVGKIFEETSKTNQPKKKPIPREGLKHRSPCSLRVEFEEQIAWAMSSDSHKKSQSIDADQGKTTDTRPVEGIVSEKSEHFEIYENDDSERKNIPTELHSSSKNHIIDNLLRGQLLASEGGNMHAENNYGEASCSNAGWRNQASPVKQWMAKLASQDLDISEASKVPSGSKESNNTLKAKLLEARSKGQRSRLKALKGSF

SEQ ID NO: 20802 - protein, 294 aa, Glycine max
MQMQLEAVHNGFMDKSIVDKLSLEIETFLKAKQNSRSTENIAVRNCRNSLESVPLNDAVSAPQEVGDDDDSVGSDSNCFELNKPSNKGSKVHEEEPVGKIFEETSKTNQPKKKPIPREGLKHRSPCSLRVEFEEQIAWAMSSDSHKKSQSIDADQGKTTDTRPVEGIVSEKSEHFEIYENDDSERKNIPTELHSSSKNHIIDNLLRGQLLASEGGNMHAENNYGEASCSNAGWRNQASPVKQWMAKLASQDLDISEASKVPSGSKESNNTLKAKLLEARSKGQRSRLKALKGSF

SEQ ID NO: 20803 - protein, 292 aa, Glycine max
MQLEAVHNGFMDKSIVDKLSLEIETFLKAKQNSRSTENIAVRNCRNSLESVPLNDAVSAPQEVGDDDDSVGSDSNCFELNKPSNKGSKVHEEEPVGKIFEETSKTNQPKKKPIPREGLKHRSPCSLRVEFEEQIAWAMSSDSHKKSQSIDADQGKTTDTRPVEGIVSEKSEHFEIYENDDSERKNIPTELHSSSKNHIIDNLLRGQLLASEGGNMHAENNYGEASCSNAGWRNQASPVKQWMAKLASQDLDISEASKVPSGSKESNNTLKAKLLEARSKGQRSRLKALKGSF

SEQ ID NO: 20804 - DNA, 1853 bp, Glycine max
aataatagctcttgttcctcttttccatcaactgaaccatttaggtgccgtgatgcatttccgggtaagaactcatcacccaccctcttccgattctcgcgtcatgaatcaaccaaagctgaggcacaattggaattggagcaagatgttgccaccgaggatgagcctaatcaggtcattgattttcctggagggaaagtgggatttacttctgaaatgagattcatttctgagtctcctgagaaaagggtgccctgttatcgtgttcttgatgacaatggtgagatcgttaaatacagcaactatgtacaggtatctcactacagcactgttagtaaccaaaacttgattttagcgctgaagtaagtaatgtattaatgttatatttttctaaagaaggtattagataaaaaaaaaaaaaaagaaaaaaagaagtaaatgtgcataatattctaaaagagaaaaaaggaaaaccgataatttgttattagattatagtgtaaagttatttaacatatattggcggtgtataactattaaactcatttttaaaatgataacataaaattgttcgaacaatttttattttacaagtaaaaaattagtagaaagattttatgtaaggatgtagaattaatttttgtgatataatgcacgaaacacatcacatgggaactttattagttaactacctatggagaataattgaacaggttagcaaggaaatgggtgtgaagatgtattctgacatggtcactcttcaaactatggacaacatattctatgaagtgcagaggcaaggtagaatttccttctacctcacccaaatgggggaagaagcagttaacattgcatctgctgctgcacttgctcctgatgatataatattgcctcagtaccgggagcctggagttctattgtggcgtggttttacactgcaacaatttgttcatcaatgctttggaaacacacatgattttggaaaaggcaggcagatgccaatacattatgggtctaaccagcacaattacttcacagtgtcatcccccattgcaacacaacttcctcaagctgttggagctgcttattcccttaaaatggatgggaaaagtgcatgtgcagtcactttttgtggggatggtgccaccagtgagggagattttcatgctgctatgaattttgcagcagtaatggaggcccctgttgtttttatctgtcgtaataatggatgggcaatcagtacacctgtggaagaccaatttcgaagtgatggtattgtagttaagggtaaagcttatggcatctggagcatcagagtagatggaaatgatgctcttgctgtttatagtgcagttcacactgctagagaaatcgctataaaagaaaaaaggccagttttaattgaggctctcacttatagagttggacatcactctacatctgatgattcaactaagtaccggggaactgatgagattgaatattggaagatggcaaggaatccagtgaataggttcaaaagatgggtagaaaggaatggttggtggagtgacaaggatgaattggagcttagaagcagtgtcaggaagcagttaatgcatgcgattcaggtggcagagaaagcacaaaaacctccacttcaggacttatttaatgatgtctatgaccaaataccatcaaaccttcaggagcaagagagactaattagaaaaaccatcgagaagcatcccaaagactacccttctgatgttcctttgtagatattgccaattcaaacaagaaattgtactaaatcttacaatcaaaatataaaataaagggattggatgccctgttcttatcttttaaaaaag

SEQ ID NO: 20805 - protein, 369 aa, Glycine max
MHETHHMGTLLVNYLWRIIEQVSKEMGVKMYSDMVTLQTMDNIFYEVQRQGRISFYLTQMGEEAVNIASAAALAPDDIILPQYREPGVLLWRGFTLQQFVHQCFGNTHDFGKGRQMPIHYGSNQHNYFTVSSPIATQLPQAVGAAYSLKMDGKSACAVTFCGDGATSEGDFHAAMNFAAVMEAPVVFICRNNGWAISTPVEDQFRSDGIVVKGKAYGIWSIRVDGNDALAVYSAVHTAREIAIKEKRPVLIEALTYRVGHHSTSDDSTKYRGTDEIEYWKMARNPVNRFKRWVERNGWWSDKDELELRSSVRKQLMHAIQVAEKAQKPPLQDLFNDVYDQIPSNLQEQERLIRKTIEKHPKDYPSDVPL

SEQ ID NO: 20806 - protein, 363 aa, Glycine max
MGTLLVNYLWRIIEQVSKEMGVKMYSDMVTLQTMDNIFYEVQRQGRISFYLTQMGEEAVNIASAAALAPDDIILPQYREPGVLLWRGFTLQQFVHQCFGNTHDFGKGRQMPIHYGSNQHNYFTVSSPIATQLPQAVGAAYSLKMDGKSACAVTFCGDGATSEGDFHAAMNFAAVMEAPVVFICRNNGWAISTPVEDQFRSDGIVVKGKAYGIWSIRVDGNDALAVYSAVHTAREIAIKEKRPVLIEALTYRVGHHSTSDDSTKYRGTDEIEYWKMARNPVNRFKRWVERNGWWSDKDELELRSSVRKQLMHAIQVAEKAQKPPLQDLFNDVYDQIPSNLQEQERLIRKTIEKHPKDYPSDVPL

SEQ ID NO: 20807 - protein, 344 aa, Glycine max
MGVKMYSDMVTLQTMDNIFYEVQRQGRISFYLTQMGEEAVNIASAAALAPDDIILPQYREPGVLLWRGFTLQQFVHQCFGNTHDFGKGRQMPIHYGSNQHNYFTVSSPIATQLPQAVGAAYSLKMDGKSACAVTFCGDGATSEGDFHAAMNFAAVMEAPVVFICRNNGWAISTPVEDQFRSDGIVVKGKAYGIWSIRVDGNDALAVYSAVHTAREIAIKEKRPVLIEALTYRVGHHSTSDDSTKYRGTDEIEYWKMARNPVNRFKRWVERNGWWSDKDELELRSSVRKQLMHAIQVAEKAQKPPLQDLFNDVYDQIPSNLQEQERLIRKTIEKHPKDYPSDVPL

SEQ ID NO: 20808 - DNA, 1692 bp, Glycine max
gattacgccgatggccggttattcctccggcgccggcgaagacgaaagcgaaaaccgtcgtggcgaggccgttactgatgaaaccaccgactacatctccgatctccctaacgagtgcctggcttcggtgtttcagtttcttagctccgccgatcggaaccgctgctcgctcgtttgccggcggtggctccagatcgaaggacagagtcgtcacaggctttctctgaacgcggatgaggatctgtttccagcgattccgtcgctgttctctcggttcgattcggtgacgaagctcgcgttgaagtgcgaccgcagatccgtgagcataagcgacgacgcgctcgtgctgatctcgcagcggtgccctaacctcacgcgcctcaagctccgcgcgtgccgcgccctcaccgacgctggaatggaagcgttcgcgaagaactgcaagggattgaagaagctctcctgcggatcgtgcacgttcggatccaaaggcatgaacgcggtgctcgacaactgcgccgcgctggaggagctctcagtcaagcgcctccgcggaatcaccgacgcggcggcggcggagccgatcggtcccggcgtggctgcggcgtcgctgaaaatcgtttgcctgaaggagctctacaacggacagtgtttcggaacgctgattctcggggctaagaatctgaaaaccttgaagcttttccggtgctccggggattgggaccggctctttcagttaatggcagatcgagtcacgaacatggtcgaagttcacctcgagaggcttcagattagcgacgttggattgcaagcgatcgcgaatttttcgagtttggagattttgcatctcgttaagactcctgaatgttctgatattggacttgttgctattgcagacaggtgcaagcttttgcggaagcttcacattgatggatggaaggcaaatcgaattggcgacgaagggttgatagctgttgcaaaaggttgccctaatttgcttgaattagtgctaattggggtaaaccctactaaggcgagtttggaaatgttggcatctaattgccggaatcttgagcggttggctttgtgtggaagtgattcggttggtgatactgagatatcttgcattgctgcaaagtgtgtggctttgaagaaactgtgtattaagagttgtcctgtttcggatcaagggatggaggcattggcaaatgggtgtccgaatttggtgaaagttaaggttaagaagtgtaagggggttacccctgagggtggtgattggttgaggaggactagagggtcagttgctgttaatttagatactggtgaggcagagcttcaggaagcgagtgctagtgatggaggggcacaggacaatgttgtagagtttcctcagatgcctgcccaaatcgtggccgcagcagcatctgcatcaagcagcaccactcggtctagttcgttcaagttgagattagggcttttgtctgggaggagtttagtggctagcacttttaagagatggtcaggtggtagcactagtgcacgccatggttagggatagcagggccaaagcaaacctgagtctttggccatttttcattgttttgggttgttgtatcatttgatttttatatttcttgtacttaaatttgaaatttatgccgtgtgatttttattgcctttggaattgaagct

SEQ ID NO: 20809 - protein, 516 aa, Glycine max
ITPMAGYSSGAGEDESENRRGEAVTDETTDYISDLPNECLASVFQFLSSADRNRCSLVCRRWLQIEGQSRHRLSLNADEDLFPAIPSLFSRFDSVTKLALKCDRRSVSISDDALVLISQRCPNLTRLKLRACRALTDAGMEAFAKNCKGLKKLSCGSCTFGSKGMNAVLDNCAALEELSVKRLRGITDAAAAEPIGPGVAAASLKIVCLKELYNGQCFGTLILGAKNLKTLKLFRCSGDWDRLFQLMADRVTNMVEVHLERLQISDVGLQAIANFSSLEILHLVKTPECSDIGLVAIADRCKLLRKLHIDGWKANRIGDEGLIAVAKGCPNLLELVLIGVNPTKASLEMLASNCRNLERLALCGSDSVGDTEISCIAAKCVALKKLCIKSCPVSDQGMEALANGCPNLVKVKVKKCKGVTPEGGDWLRRTRGSVAVNLDTGEAELQEASASDGGAQDNVVEFPQMPAQIVAAAASASSSTTRSSSFKLRLGLLSGRSLVASTFKRWSGGSTSARHG

SEQ ID NO: 20810 - protein, 513 aa, Glycine max
MAGYSSGAGEDESENRRGEAVTDETTDYISDLPNECLASVFQFLSSADRNRCSLVCRRWLQIEGQSRHRLSLNADEDLFPAIPSLFSRFDSVTKLALKCDRRSVSISDDALVLISQRCPNLTRLKLRACRALTDAGMEAFAKNCKGLKKLSCGSCTFGSKGMNAVLDNCAALEELSVKRLRGITDAAAAEPIGPGVAAASLKIVCLKELYNGQCFGTLILGAKNLKTLKLFRCSGDWDRLFQLMADRVTNMVEVHLERLQISDVGLQAIANFSSLEILHLVKTPECSDIGLVAIADRCKLLRKLHIDGWKANRIGDEGLIAVAKGCPNLLELVLIGVNPTKASLEMLASNCRNLERLALCGSDSVGDTEISCIAAKCVALKKLCIKSCPVSDQGMEALANGCPNLVKVKVKKCKGVTPEGGDWLRRTRGSVAVNLDTGEAELQEASASDGGAQDNVVEFPQMPAQIVAAAASASSSTTRSSSFKLRLGLLSGRSLVASTFKRWSGGSTSARHG

SEQ ID NO: 20811 - protein, 377 aa, Glycine max
MEAFAKNCKGLKKLSCGSCTFGSKGMNAVLDNCAALEELSVKRLRGITDAAAAEPIGPGVAAASLKIVCLKELYNGQCFGTLILGAKNLKTLKLFRCSGDWDRLFQLMADRVTNMVEVHLERLQISDVGLQAIANFSSLEILHLVKTPECSDIGLVAIADRCKLLRKLHIDGWKANRIGDEGLIAVAKGCPNLLELVLIGVNPTKASLEMLASNCRNLERLALCGSDSVGDTEISCIAAKCVALKKLCIKSCPVSDQGMEALANGCPNLVKVKVKKCKGVTPEGGDWLRRTRGSVAVNLDTGEAELQEASASDGGAQDNVVEFPQMPAQIVAAAASASSSTTRSSSFKLRLGLLSGRSLVASTFKRWSGGSTSARHG

SEQ ID NO: 20812 - DNA, 821 bp, Glycine max
actcaagcacaacatctctatcgagtaaattaactatgaagcctaccctactattatccctttccttcctgcctctctttgctttcctggctctttcagaagatgttgaacaagttgtggacataagtggcaaccccattttcccaggtggcacatattacattatgccatcaacttggggcgctgccggtggtggattgaaactaggccggacaggaaactcaaactgcccagttactgttttgcaagattactcagaaatcttccgtggcacaccagtcaaattcagcatacctgggataagccctggaatcatctttacaggtactccacttgaaatcgagttcgcagagaaaccttattgtgctgaatcctccaaatgggtggcgtttgtggacaatgaaatccaaaaggcatgtgtgggtattggtggtcctgaaggtcatcctggtcaacaaacatttagtggcacatttagcattcagaaatataaatttggatacaaacttgtgttctgtatcactggctcaggcacttgtttagatattggaaggtttgatgccaaaaatggtgagggaggaagacgtttgaatctcactgagcatgaggccttcgacattgttttcatagaagcttctaaggttgatggaattatcaagtccgtagtttgaatcaaatcaaataatgtcaagggtagctagatagtgttgagttaatgcttaatcatatgtttgtcgttgtgatatgcattaagtactctgctcccggttgctaacaaaaccccaatgcaaaaataagtgataaaataatggttttgcttt

SEQ ID NO: 20813 - protein, 222 aa, Glycine max
SSTTSLSSKLTMKPTLLLSLSFLPLFAFLALSEDVEQVVDISGNPIFPGGTYYIMPSTWGAAGGGLKLGRTGNSNCPVTVLQDYSEIFRGTPVKFSIPGISPGIIFTGTPLEIEFAEKPYCAESSKWVAFVDNEIQKACVGIGGPEGHPGQQTFSGTFSIQKYKFGYKLVFCITGSGTCLDIGRFDAKNGEGGRRLNLTEHEAFDIVFIEASKVDGIIKSVV

SEQ ID NO: 20814 - protein, 211 aa, Glycine max
MKPTLLLSLSFLPLFAFLALSEDVEQVVDISGNPIFPGGTYYIMPSTWGAAGGGLKLGRTGNSNCPVTVLQDYSEIFRGTPVKFSIPGISPGIIFTGTPLEIEFAEKPYCAESSKWVAFVDNEIQKACVGIGGPEGHPGQQTFSGTFSIQKYKFGYKLVFCITGSGTCLDIGRFDAKNGEGGRRLNLTEHEAFDIVFIEASKVDGIIKSVV

SEQ ID NO: 20815 - protein, 168 aa, Glycine max
MPSTWGAAGGGLKLGRTGNSNCPVTVLQDYSEIFRGTPVKFSIPGISPGIIFTGTPLEIEFAEKPYCAESSKWVAFVDNEIQKACVGIGGPEGHPGQQTFSGTFSIQKYKFGYKLVFCITGSGTCLDIGRFDAKNGEGGRRLNLTEHEAFDIVFIEASKVDGIIKSVV

SEQ ID NO: 20816 - DNA, 1754 bp, Glycine max
aagcaaggagatgcaactgaaaaagtgtctgttagaaagaagaggaaaggcagtgaggatacaatggcatctaaatctgtgcagaagagaaaagggttgttcctaaatactgatagaaatgcggcaggtgctgaaaatgatggtggtagttggggcaaagaggatggtgacaatggaacattggcgcagttgaaaaagaagaaaaaatcttttggtattggaaacactagtagtgggagcaaaaaggaaactgatcatgaaggaaaggccaaagtaaaaaatgggaagggttctttgtcaagagaaaggaagaaaagcaagtacctgtcccctccttttgctattccagccagagagcagaggaaaggagagagggaaacagaatcccctaaagtttctggcaaagatcagcaatcagagccactgaccagagcttctgatcaacttctgaagtcccctgtacctttgaagttgaatgatgagccatttcaggagaatgtttcgaaggaacttgtcatagaccaggaccttcctgatagctcaaattaccgaacaccagaatatgatgagaacaagactattgatacaacaaaaatccaggttccatcaggggaagttctgtctgaagtctgttatgcagctattaatccacaaactccaatgaatatcaattctcttgaaagaattgtggactttatttttatctacagaagctcgttatatcgccaaggatcctactacaaaatatacaagaagcataaacctagcaagaagggaaagaagccagaatctgatctggggattttgaggaaagatcaaatacaatctgataaaaaatcagctaataatgattcggagccaaagaagagaagaaagaatgagacaacttcaagtttgcctaaagagaagcaatctgctgcagctaagactggcaagaaggggattgataaaaaagcttcaggtgcttcccttttcatctcatttgggccaggatcctctctgccttcaaattcggatcttaccacactgtatggtaagtttggagctctgaatgaatcagaaacatctatgctctctagtgattgcactgctcgtgtgttcttcctgaaagcctctgatgctgaaaaggccttgagccattcacagaacatgaacccctttggctcttccgaagcctctttcagacttgagtatctttctgctggttccaagtctgaaaaatccaagtttaaagcttcttcaacaaagaagaaagacaagactccagccaagccatctgcttcattgtcaccaggtggtgaagcatccaaattgaactacataaaggaaaaacttcagggtctgacatcaatgctagaagcatcggatgctaaattacctgatatcaagacaaaattagagagtgagatgaaacagcttttggaggatgtgaacagaatggttgaatcttcttcctaaataacgcatggaatacatactagcaattatttagctagtaatcagggtaggtttatgatatgtcatttccatttagcggactgtctttatctgagaatcaatttatttgtctcatttctgagcctagctttagttaagaggtaaaattactcatatcggtttgttgtgtaggatatgtgacctgttgtatgcataggctgtatagacaccaacatccttttttagatcttctgtcctttttatagtggtgaacaaacagctttaaggatcaaaggtataatgttttcatttctgtc

SEQ ID NO: 20817 - protein, 485 aa, Glycine max
KQGDATEKVSVRKKRKGSEDTMASKSVQKRKGLFLNTDRNAAGAENDGGSWGKEDGDNGTLAQLKKKKKSFGIGNTSSGSKKETDHEGKAKVKNGKGSLSRERKKSKYLSPPFAIPAREQRKGERETESPKVSGKDQQSEPLTRASDQLLKSPVPLKLNDEPFQENVSKELVIDQDLPDSSNYRTPEYDENKTIDTTKIQVPSGEVLSEVCYAAINPQTPMNINSLERIVDFIFIYRSSLYRQGSYYKIYKKHKPSKKGKKPESDLGILRKDQIQSDKKSANNDSEPKKRRKNETTSSLPKEKQSAAAKTGKKGIDKKASGASLFISFGPGSSLPSNSDLTTLYGKFGALNESETSMLSSDCTARVFFLKASDAEKALSHSQNMNPFGSSEASFRLEYLSAGSKSEKSKFKASSTKKKDKTPAKPSASLSPGGEASKLNYIKEKLQGLTSMLEASDAKLPDIKTKLESEMKQLLEDVNRMVESSS

SEQ ID NO: 20818 - protein, 464 aa, Glycine max
MASKSVQKRKGLFLNTDRNAAGAENDGGSWGKEDGDNGTLAQLKKKKKSFGIGNTSSGSKKETDHEGKAKVKNGKGSLSRERKKSKYLSPPFAIPAREQRKGERETESPKVSGKDQQSEPLTRASDQLLKSPVPLKLNDEPFQENVSKELVIDQDLPDSSNYRTPEYDENKTIDTTKIQVPSGEVLSEVCYAAINPQTPMNINSLERIVDFIFIYRSSLYRQGSYYKIYKKHKPSKKGKKPESDLGILRKDQIQSDKKSANNDSEPKKRRKNETTSSLPKEKQSAAAKTGKKGIDKKASGASLFISFGPGSSLPSNSDLTTLYGKFGALNESETSMLSSDCTARVFFLKASDAEKALSHSQNMNPFGSSEASFRLEYLSAGSKSEKSKFKASSTKKKDKTPAKPSASLSPGGEASKLNYIKEKLQGLTSMLEASDAKLPDIKTKLESEMKQLLEDVNRMVESSS

SEQ ID NO: 20819 - protein, 265 aa, Glycine max
MNINSLERIVDFIFIYRSSLYRQGSYYKIYKKHKPSKKGKKPESDLGILRKDQIQSDKKSANNDSEPKKRRKNETTSSLPKEKQSAAAKTGKKGIDKKASGASLFISFGPGSSLPSNSDLTTLYGKFGALNESETSMLSSDCTARVFFLKASDAEKALSHSQNMNPFGSSEASFRLEYLSAGSKSEKSKFKASSTKKKDKTPAKPSASLSPGGEASKLNYIKEKLQGLTSMLEASDAKLPDIKTKLESEMKQLLEDVNRMVESSS

SEQ ID NO: 20820 - DNA, 1652 bp, Glycine max
gatattaagtttgggcaaaatataagagttgctcttgatgttggctgtggtgtagctagttttggcgcatacttgttgtctcgaaatgtcataaccatgtctgttgctcccaaggatgttcatgagaatcagatccagtttgctcttgagcgtggtgtgccggcaatggtggctgcattttcaactaggtgtttattatatccaagtcaagcttttgacttgatacattgttcacgctgtagaattaattggactcgagatgatggtattttgctgcttgaagttaataggatgctgagggcgggagggtactttgtttgggctgcccaaccggtttataaacacgaggaagttttagaagaacaatggaaagagatgcttaatcttactaatcgtctatgctggaagttattgaaaaaagatgggtatgtcgcaatatggcagaaaccttctgacaatagctgctatctaaaccgtgaggcaggaactcaaccaccactgtgtgacccaagtgatgacctcgacaatgtttggtatgttaatctaaaatcatgcatctctcaattgcctgagaatggatatggagcaaatgttgctcgatggccggcacgcttgcatacaccacctgataggcttcaaagcataaaatttgatgctttcatatccagaaatgagctttttagggcagaatcaaaatattggggtgagataataggaggctatgtacgtgttttacgctggaagaagatgagattaagaaatgttatggacatgagagctggttttggaggatttgcagctgcattgattgatcagagtatggacagttgggttatgaatgtggttcctgttagtggtccaaataccttgcctgtcatatatgaccgtgggctgattggagttatgcatgactggtgtgaaccatttgacacctacccgagaacctatgatttactgcatgctgcaaatctgctttctgttgagaagaaaagatgcaatttgtcatcaattatgcttgagatggatcgaatactaaggcctggtggacgggcatacatccgtgatactcttgccatcatggatgagcttatggagattggcaaggctatgggctggcaaatgtcactgcaagatacagctgagggtcctcgtgcaagttatagggtcttggtttgtgataagcgccttcgttaatgcaaactcgctcacttgttttttatctcttcaatggggaaatcaacagaatagggtcacactcattttagaagagaagaataggaggacgatgcaagtgtaaatatcacactttcttgtttttgtctgctggttcttgacatcagatcgccagagcagatggggtaggtatagagggtgcatcatttaacttgtttataaaatcaatttatttgcatatcacaaagtttttaggccgaacatctggcatatttaagttaaacgggctttctctggattttgatattattatcaaaacgggtaactactctgtttctcaccatctctcgtgactggggatttctccatttcactcctagatctgttgagtgtttttttaactttatgaaaacttgctatgaaaataagcgtggataatcataaatccatggcttcttatttactagtttgttgtaacc

SEQ ID NO: 20821 - protein, 397 aa, Glycine max
DIKFGQNIRVALDVGCGVASFGAYLLSRNVITMSVAPKDVHENQIQFALERGVPAMVAAFSTRCLLYPSQAFDLIHCSRCRINWTRDDGILLLEVNRMLRAGGYFVWAAQPVYKHEEVLEEQWKEMLNLTNRLCWKLLKKDGYVAIWQKPSDNSCYLNREAGTQPPLCDPSDDLDNVWYVNLKSCISQLPENGYGANVARWPARLHTPPDRLQSIKFDAFISRNELFRAESKYWGEIIGGYVRVLRWKKMRLRNVMDMRAGFGGFAAALIDQSMDSWVMNVVPVSGPNTLPVIYDRGLIGVMHDWCEPFDTYPRTYDLLHAANLLSVEKKRCNLSSIMLEMDRILRPGGRAYIRDTLAIMDELMEIGKAMGWQMSLQDTAEGPRASYRVLVCDKRLR

SEQ ID NO: 20822 - protein, 365 aa, Glycine max
MSVAPKDVHENQIQFALERGVPAMVAAFSTRCLLYPSQAFDLIHCSRCRINWTRDDGILLLEVNRMLRAGGYFVWAAQPVYKHEEVLEEQWKEMLNLTNRLCWKLLKKDGYVAIWQKPSDNSCYLNREAGTQPPLCDPSDDLDNVWYVNLKSCISQLPENGYGANVARWPARLHTPPDRLQSIKFDAFISRNELFRAESKYWGEIIGGYVRVLRWKKMRLRNVMDMRAGFGGFAAALIDQSMDSWVMNVVPVSGPNTLPVIYDRGLIGVMHDWCEPFDTYPRTYDLLHAANLLSVEKKRCNLSSIMLEMDRILRPGGRAYIRDTLAIMDELMEIGKAMGWQMSLQDTAEGPRASYRVLVCDKRLR

SEQ ID NO: 20823 - protein, 342 aa, Glycine max
MVAAFSTRCLLYPSQAFDLIHCSRCRINWTRDDGILLLEVNRMLRAGGYFVWAAQPVYKHEEVLEEQWKEMLNLTNRLCWKLLKKDGYVAIWQKPSDNSCYLNREAGTQPPLCDPSDDLDNVWYVNLKSCISQLPENGYGANVARWPARLHTPPDRLQSIKFDAFISRNELFRAESKYWGEIIGGYVRVLRWKKMRLRNVMDMRAGFGGFAAALIDQSMDSWVMNVVPVSGPNTLPVIYDRGLIGVMHDWCEPFDTYPRTYDLLHAANLLSVEKKRCNLSSIMLEMDRILRPGGRAYIRDTLAIMDELMEIGKAMGWQMSLQDTAEGPRASYRVLVCDKRLR

SEQ ID NO: 20824 - DNA, 1824 bp, Glycine max
gttcttcctaccttaccaggttccctttatcttcaaagggacttcagtgtccaattgtgttcagagtcagaagcaacctcattactggtggcaaatcaccttggtcgtagagttgaggcttcataatgttatattagaaatagattgcaaacatcatatctatgatagttttcattcgggtttaattgtaaggataaacttgctttgataaacaactcatcattgagtttgagtttggttctaatctatagtatgtttgagtatcctgtagggtagtcttcaaattgcgttttatgaatgcaataaaatgtgcagttaaaattgaagccctgttttttcagacccatttttctttccccaccccacttgtccttttctgcctcagcggaaaacccacttccaaacttctgttcctatctctctccacacttctggggacactgttgttgtcgttttcatctgtgtcacttcctagctctcggtttcatttattacatgttgtcgatctgtgtgttgttgggtccagaaacaaggcatggaggttaagattcagaaaacgttgtctatgtgcaagaatttgatgaaggaggtaaagacatggggttgtttgaagcagacagggctgagtttaagatatatgatggagtttggttccaaccccactcccaagaatttactcatctctgctcagttccttcacaaagagcttcccattagaattgcaaggagagccattgagcttcacactctccctcatggcttgtctcacaggcctcctgtcttgaagattggtacttggattctttccgtgaaattagatcttttcctgagatgaagaatatgaatgacgagaaagaattcactgaactgattaagtccatcaaggtgagacacaacaatgtggtacctacaatggccttgggtgttcagcaattgaagaatgtttttgaggaccctgatgagattgatgagtttcttgatcgcatttacatgtcaagaattggaatccgtatgctcatcggttatatacgtacaaatatgtctcctgtgaatgtggcaaggaatgctagtgaggatgcacgttctatgtgttatggtgaatatggaagtgctgcagatgttcgaatttacggggatcctgattttacttttccaactcactgcgtgctgtccaagaccattttatggactctgacgaagttgctcctcccattagaataataatagcagatggaatagaggatgttaccataaaggtctcagatgagggaggtggaataccaaggagtggtcttccaaaaatatttacatatctctacagtacagccagaaatgcatcgtgggatgaaaatgaaccttctgatcttggaacaaccgataatataagtgtaaaaatggctggaaatggttatggacttcctatttgccgcttgtatgctaggtattttggtggcgatcttcaagtaatctctatggaaggatatgggactgacgcatatctccatttgtctcgtttgggggattcgcaagaacctttgccctgaaagtaaatgacttgggtaaatattgtgcacggagaagcaccaaaacgatgcagacgcgggcaataagaactgtttctgtcaatgctattttgattctaacaatttgggactttgttatagaccaatatgtttcctgctagccatggagaatctaattaagaaaagcaaaaagaatttatcttatacaaaagtgtaacttttaaggatattttcatgttaactactttgggggtgtaattaaagttctgtttaaaccaagagagaataaagatttttaacc

SEQ ID NO: 20825 - protein, 129 aa, Glycine max
MKNMNDEKEFTELIKSIKVRHNNVVPTMALGVQQLKNVFEDPDEIDEFLDRIYMSRIGIRMLIGYIRTNMSPVNVARNASEDARSMCYGEYGSAADVRIYGDPDFTFPTHCVLSKTILWTLTKLLLPLE

SEQ ID NO: 20826 - protein, 126 aa, Glycine max
MNDEKEFTELIKSIKVRHNNVVPTMALGVQQLKNVFEDPDEIDEFLDRIYMSRIGIRMLIGYIRTNMSPVNVARNASEDARSMCYGEYGSAADVRIYGDPDFTFPTHCVLSKTILWTLTKLLLPLE

SEQ ID NO: 20827 - protein, 119 aa, Glycine max
MDSDEVAPPIRIIIADGIEDVTIKVSDEGGGIPRSGLPKIFTYLYSTARNASWDENEPSDLGTTDNISVKMAGNGYGLPICRLYARYFGGDLQVISMEGYGTDAYLHLSRLGDSQEPLP

SEQ ID NO: 20828 - DNA, 1262 bp, Glycine max
aagaaccttgctgctgtaagggatgaaataccaaatgctttaagagctgctcctaatgctgcctgtttagttttagattctctggaaggattttactgtacagaagtgtcaaatcaggacgtaaagaaggatgctaacttattgggtcttcgccgaacctgtatcatgctgatggaatgtctctgtgatttcctgagcagctcaggttttgtttctaatgtgatttcagaagatatcaaggacagggcaaaagcagttgctgaagaatggaaacccaggctggatgctcttgacatggatgctagcaatgggaattccttggaggctcatgcatttttacaacttcttgctagttttggaattgcctctggttttgatgaggaggagttatctagattgattccaatggtgtctcggcgccgccaaactgctgatttatgtcgttttcttgggctgtcagaaaagatgcctggtgtaattgaggttttggtgaacagtgggcgacaaattgatgctgttaacttggcttttgcatttgatcttactgaacagttttgtcctgtttctttactgaagtcttacttgaaagatgctagaaaagcttcttctcctgttagaagtgctcactcttctcccactgcacagattgaggtgaatgaacgagagctggttgcacttaaggctgtaatcaagtgcattgaagaacataaacttgatgagcagtatcctctggatcctctccagaaacgattggtgcagctagagaaggccaaagcagacaagaagagggaaactgaagcaacaaagcctcaacccaagagacctcgtgcaaatggtgtgggatacggtccacgtgtcactaacattctttcggataaaacttgctatgctagagttgctgacaggtatccacaatacgtgtatgaccgaccaccttacatgtaccctgcacccactgagaatcattgcccccctctcatgaccactgcaacatataacatctctcccagccatggcaactactttggaaatgggtatcagtaccaagcctcatatctccactagagttagctgatatgtgaaaacaggcaactatgatccttttgtttaatatctagtctttaacctttaagctgttgtatgttgcacttcctcaatgtagtcttaagaacctctgaaaagaggtaaaatgacgagctaaaatttaacttttgtagcacaagatattctgatcctctaatgtatgaactctgttctcgttt

SEQ ID NO: 20829 - protein, 354 aa, Glycine max
KNLAAVRDEIPNALRAAPNAACLVLDSLEGFYCTEVSNQDVKKDANLLGLRRTCIMLMECLCDFLSSSGFVSNVISEDIKDRAKAVAEEWKPRLDALDMDASNGNSLEAHAFLQLLASFGIASGFDEEELSRLIPMVSRRRQTADLCRFLGLSEKMPGVIEVLVNSGRQIDAVNLAFAFDLTEQFCPVSLLKSYLKDARKASSPVRSAHSSPTAQIEVNERELVALKAVIKCIEEHKLDEQYPLDPLQKRLVQLEKAKADKKRETEATKPQPKRPRANGVGYGPRVTNILSDKTCYARVADRYPQYVYDRPPYMYPAPTENHCPPLMTTATYNISPSHGNYFGNGYQYQASYLH

SEQ ID NO: 20830 - protein, 299 aa, Glycine max
MLMECLCDFLSSSGFVSNVISEDIKDRAKAVAEEWKPRLDALDMDASNGNSLEAHAFLQLLASFGIASGFDEEELSRLIPMVSRRRQTADLCRFLGLSEKMPGVIEVLVNSGRQIDAVNLAFAFDLTEQFCPVSLLKSYLKDARKASSPVRSAHSSPTAQIEVNERELVALKAVIKCIEEHKLDEQYPLDPLQKRLVQLEKAKADKKRETEATKPQPKRPRANGVGYGPRVTNILSDKTCYARVADRYPQYVYDRPPYMYPAPTENHCPPLMTTATYNISPSHGNYFGNGYQYQASYLH

SEQ ID NO: 20831 - protein, 297 aa, Glycine max
MECLCDFLSSSGFVSNVISEDIKDRAKAVAEEWKPRLDALDMDASNGNSLEAHAFLQLLASFGIASGFDEEELSRLIPMVSRRRQTADLCRFLGLSEKMPGVIEVLVNSGRQIDAVNLAFAFDLTEQFCPVSLLKSYLKDARKASSPVRSAHSSPTAQIEVNERELVALKAVIKCIEEHKLDEQYPLDPLQKRLVQLEKAKADKKRETEATKPQPKRPRANGVGYGPRVTNILSDKTCYARVADRYPQYVYDRPPYMYPAPTENHCPPLMTTATYNISPSHGNYFGNGYQYQASYLH

SEQ ID NO: 20832 - DNA, 1334 bp, Glycine max
gagtcgatagtggctaacggaaatgatagcatgggacatggccaaaagccttcctgcacagtcgaagttcaaaccaaacagtgttccatggcaccggcctttgacgcaagaaaattgttgattgagaaagccaggaaagaaatcaggaagaaactggaggagatgaggttgtcgtctgaagcagcagcaacagcagctgcagctctgaatgagaaagaaaaatcacaagctgaagttggtcaagtaaaaagagagacatgtagaaaagcagctccgattgtttctggtctacagttagagaatgggaaaactggtccaatctcaattactgttccagattctgactttcatgactttgacaaagataggtcagaggaatgcttcaggccaaagcaaatatgggccttgtatgatgaggaagatggaatgccacggttgtattgtatgatccgtgaggttgtgtctgtcaatccatttaagattcacatcagttacttgagttccaaaactgatagtgagtttggctcagtaaactggcttgattcaggttttaccaaatcttgtggaaatttcagggcttttaattcagatgctgttgatcaagttaacatattttctcatgttctaagtaaggagaaggctggtcgaggtggttgcgttcgaatatatcccagaagtggagatatttgggctgtgtatcgaaattggtcgccggattggaacagatctactccagatgaagtgaggcatcagtatgaaatggttgaggtgctggatgattactctgaggaacttggtgtttgtgttagtcctcttattaagttggctggatttaaaactgtatatcagagtaatacagacaagagtgccataaaatggatacccagaagagagatgttgtgcttttcacatcaagtgccttcttggttgctgaagggggaggctagcaatttgcctgaaaggtgttgggaccttgatccggctgcaactccagatgagcttcttcatgctgctacagaacctaatgctttgtaggttatgcaatagtaaaaacaattatttgggttgtgctttagcattcttcccagagtattttagatttaactgtacactatgtctcacttggttagagaccgatgagatattaacaacggatgttttagaaggtgaaattttattttgtaacatttgtctagtagactttaagatctagtgattgcttgttcggtaaagtttcttctctgtaactcttgtgagagaggtcaggacagattgcctgcttgtaactctatttccgaccagtttttactggttggtaaagaattcattcaatc

SEQ ID NO: 20833 - protein, 344 aa, Glycine max
ESIVANGNDSMGHGQKPSCTVEVQTKQCSMAPAFDARKLLIEKARKEIRKKLEEMRLSSEAAATAAAALNEKEKSQAEVGQVKRETCRKAAPIVSGLQLENGKTGPISITVPDSDFHDFDKDRSEECFRPKQIWALYDEEDGMPRLYCMIREVVSVNPFKIHISYLSSKTDSEFGSVNWLDSGFTKSCGNFRAFNSDAVDQVNIFSHVLSKEKAGRGGCVRIYPRSGDIWAVYRNWSPDWNRSTPDEVRHQYEMVEVLDDYSEELGVCVSPLIKLAGFKTVYQSNTDKSAIKWIPRREMLCFSHQVPSWLLKGEASNLPERCWDLDPAATPDELLHAATEPNAL

SEQ ID NO: 20834 - protein, 334 aa, Glycine max
MGHGQKPSCTVEVQTKQCSMAPAFDARKLLIEKARKEIRKKLEEMRLSSEAAATAAAALNEKEKSQAEVGQVKRETCRKAAPIVSGLQLENGKTGPISITVPDSDFHDFDKDRSEECFRPKQIWALYDEEDGMPRLYCMIREVVSVNPFKIHISYLSSKTDSEFGSVNWLDSGFTKSCGNFRAFNSDAVDQVNIFSHVLSKEKAGRGGCVRIYPRSGDIWAVYRNWSPDWNRSTPDEVRHQYEMVEVLDDYSEELGVCVSPLIKLAGFKTVYQSNTDKSAIKWIPRREMLCFSHQVPSWLLKGEASNLPERCWDLDPAATPDELLHAATEPNAL

SEQ ID NO: 20835 - protein, 315 aa, Glycine max
MAPAFDARKLLIEKARKEIRKKLEEMRLSSEAAATAAAALNEKEKSQAEVGQVKRETCRKAAPIVSGLQLENGKTGPISITVPDSDFHDFDKDRSEECFRPKQIWALYDEEDGMPRLYCMIREVVSVNPFKIHISYLSSKTDSEFGSVNWLDSGFTKSCGNFRAFNSDAVDQVNIFSHVLSKEKAGRGGCVRIYPRSGDIWAVYRNWSPDWNRSTPDEVRHQYEMVEVLDDYSEELGVCVSPLIKLAGFKTVYQSNTDKSAIKWIPRREMLCFSHQVPSWLLKGEASNLPERCWDLDPAATPDELLHAATEPNAL

SEQ ID NO: 20836 - DNA, 1407 bp, Glycine max
tttcctactattatctcttgcaatatactgatcagtggcttgtgtagaattgggaaagtaaatgacgctctaatatttcttcgggatatgattcatcgtggtttgactccagatatagtcacttgtaacagcctgatcaatggtctttgcaagatgggtcatgttcaagaggcatcaaacctttttaacaggttacagagtgaaggaattcatcctgatgctatttcatataacacactgatcagtaggcactgtcatgagggtatgtttgatgatgcgtgcctgcttttatataaaggcatagataacgggttcattcctaatgaagtcacttggttgatactgataaattatcttgtgaaaaaaataccacagggagcaagaatttctaaggattttatggtggaatttggagtttcttttccttgaagccaacttattctttcctgtcttgatcttatttgatttgtctgttggcattctgattatgagctaatgttggctaagaattttggtccatttgctattctcatgggaaattgggactccaacattgtaaattgattttaagatttgtggattgttattgctggttggacttctgagtttgcacaagtgcagaatggggaagggctattttgagttatatcatcaaactggtcgaagttttctgtagttcaagcataaaaattcattttttatgtatatatcagtagagagaaagataggtgtggctgattccactgctcgttaagagaaacaattcctggttggggtggataagaaatcacagggttggtaattgtttgttcccctgaaatggcttgaattataacggccaagggaactggtgtgatagaaggaactgtcagatgaacttgtggggaaaattgtgacagaattggcggaaggaactgtgataatggttggtgtatctggaggtttcatgaatggtgtaggtgcgcttgaatttgcaaggaaaactgtgaaaatctgggatgtggagattttgcttttgtggaagaatggggcagcaaccaatgatgaagagagggtgttactagaaaataggaaatttgagtaaaacagagtcaaagacagcatttcacaatacagaacatggacttccttgtaatataccacaccactatatcagtaattagtttgattttactccgatataaaggttagcaccatgacataaaaggaaggctctgtagaaggaccactttgtgagctcctctgtgtctccttatctcttctgtctgtcagtatctctttaaaaaaactcattgcttttatctgtacacacaagtatgtcatgtttaacaaagaaatttttacccttactcagtcagttatgatttgtttagttgttaatgatgatatggcattaatttgattgtt

SEQ ID NO: 20837 - protein, 142 aa, Glycine max
FPTIISCNILISGLCRIGKVNDALIFLRDMIHRGLTPDIVTCNSLINGLCKMGHVQEASNLFNRLQSEGIHPDAISYNTLISRHCHEGMFDDACLLLYKGIDNGFIPNEVTWLILINYLVKKIPQGARISKDFMVEFGVSFP

SEQ ID NO: 20838 - protein, 113 aa, Glycine max
MIHRGLTPDIVTCNSLINGLCKMGHVQEASNLFNRLQSEGIHPDAISYNTLISRHCHEGMFDDACLLLYKGIDNGFIPNEVTWLILINYLVKKIPQGARISKDFMVEFGVSFP

SEQ ID NO: 20839 - protein, 91 aa, Glycine max
MGHVQEASNLFNRLQSEGIHPDAISYNTLISRHCHEGMFDDACLLLYKGIDNGFIPNEVTWLILINYLVKKIPQGARISKDFMVEFGVSFP

SEQ ID NO: 20840 - DNA, 1288 bp, Glycine max
gatgctacaggtggaatcactggtttcagcgtgcgccggcggatccagcgatcggaaaatcgcctgcgagaccctggccgacgacgtccaccccacggatccgccggagtcccacccggattctccgccggagtccttctggctctcgagggacgaggaatacgactggtgggaccgcaacgccgtttacgagcgcaaagaatccaccaaggcaagtaataataattcaacaaacctaaaccctggcatcaactccagcaacaactcccagcgtttctctctcaatttcaagtccaaggcttccaccatcattggcttacctaagccgcagaaaacctccttcgtcgacgtcaagaaccgccgcaaccacaacaagcccagtaacatcaggctgttcccgaaacgcagcgtttcggtcggaaaatctgagtcaggactcgtcgaaccgtcttcgcccaaagtctcttgcatgggaagagtcagatccaagcgcgatcgaaatcgcaagttgagaagttcacgaaagtcttcccctgacacagacgccaaagaaaaacacagcagaagcggaaagaaacccggttttttcgagagttttcgctctattttccggtccggccgaaaagggaaaccggaccggaagaaaagcgatcccctggccgcggactcaactcatgagacgaagagcggtgccgttaactactctagagcgcggcacagcacgtcgagcttgaacgacgtgtcgttcgaggagtcagtctcgcgaaacagcgtgtcggagagcgaaccgcccggtttgggtggcatgatgcggttcgcgtctgggagaaggtctgagtcgtggggagtaggtgattccgaaggacacgtggcacagtagtattggatgaagataaccgttcggcgagggcaaacacgaagtggggccctttgcccttggatgtaagcaattgagataaaaaggcgagtcttttggcgtgggaccaaggcgttggaagagggagtgacgtggcgcgttgaacaaattttacttgttactgtttggaaagtaaaatctttttccttttgtgctgtgcttgattgaatctggtgtattttgtagccacaaagttttgtcttgtaaatatacacgagtcatgagtggtttttgtttctttgaattgagcagatgtatgtatattttgattttctctcttgggtttcaataattgtatgaattgtccaacggtgcatgcgttgccggttccctctccttttcaattaagcaaaattattaagcatgggtgtt

SEQ ID NO: 20841 - protein, 292 aa, Glycine max
MLQVESLVSACAGGSSDRKIACETLADDVHPTDPPESHPDSPPESFWLSRDEEYDWWDRNAVYERKESTKASNNNSTNLNPGINSSNNSQRFSLNFKSKASTIIGLPKPQKTSFVDVKNRRNHNKPSNIRLFPKRSVSVGKSESGLVEPSSPKVSCMGRVRSKRDRNRKLRSSRKSSPDTDAKEKHSRSGKKPGFFESFRSIFRSGRKGKPDRKKSDPLAADSTHETKSGAVNYSRARHSTSSLNDVSFEESVSRNSVSESEPPGLGGMMRFASGRRSESWGVGDSEGHVAQ

SEQ ID NO: 20842 - DNA, 1184 bp, Glycine max
attaacccctctcgcctcagactcatctacgaggacgtctggctccaatcctccgatggcgttcgccttcacgcttggttcatcaagctcttccctaattgccgaggtccgaccattttgttttttcaagaaaatgctggaaatattgctcatcgtctagaaatggtccgaataatgttgcagcagttacattgcaatgttttcatgctttcttaccgaggttatggagcaagtgatggctatccttctcagcatggaataactaaggatgctcaggctgcattggatcatctttcccaaaggcctgatattgacacatctagaatagttgtgtttggacgatcacttgggggtgcagttggagctgtactaacaaaaaataaccctgacaaggttgctgcactgatacttgaaaatacattcacgtctatattggatatggctggagttttgttaccttttttgaagtggtttattggaggaagctcttcaaatggtcctaaagtactcaattttcttgtacgttctccgtggagtactattgatgttgttggccagatcaaacaacctatcctttttctctctggattgcaagatgagatggtccccccatcacatatgcaaatgctatatgctaaggcagctgctcgaaataatcagtgtctctttgtggattttcctactggcatgcatatggatacttggctggctggtggtgatcagtactggagaacaattcagcagtttcttgagcagcatgccccagagcaaaaggaagacagatcatcccaaaatgcaaatgatattggggcgaggtgattggctggcattaaattatttcaatgatactaattggctaactaaggattcaaacagtttctgccctttgaagttgcagtccgtaagagcaccctgtgagaagatgcttcctactgggacatgctgcaccacgtcaaggtatattattgaacaattttggttgggttgtggtttccagaacttggaagatacgcagacaatttgtgcttacccttttcctatattgttcggcacctacattttgggtgtctgatcgaatttgacaaaatgatatgtagaataataattattcacgtaagctatatattatatacatgtagtgtatgtagtatgttcttagtgaatgggttcatgtctttcatacc

SEQ ID NO: 20843 - protein, 272 aa, Glycine max
INPSRLRLIYEDVWLQSSDGVRLHAWFIKLFPNCRGPTILFFQENAGNIAHRLEMVRIMLQQLHCNVFMLSYRGYGASDGYPSQHGITKDAQAALDHLSQRPDIDTSRIVVFGRSLGGAVGAVLTKNNPDKVAALILENTFTSILDMAGVLLPFLKWFIGGSSSNGPKVLNFLVRSPWSTIDVVGQIKQPILFLSGLQDEMVPPSHMQMLYAKAAARNNQCLFVDFPTGMHMDTWLAGGDQYWRTIQQFLEQHAPEQKEDRSSQNANDIGAR

SEQ ID NO: 20844 - protein, 218 aa, Glycine max
MVRIMLQQLHCNVFMLSYRGYGASDGYPSQHGITKDAQAALDHLSQRPDIDTSRIVVFGRSLGGAVGAVLTKNNPDKVAALILENTFTSILDMAGVLLPFLKWFIGGSSSNGPKVLNFLVRSPWSTIDVVGQIKQPILFLSGLQDEMVPPSHMQMLYAKAAARNNQCLFVDFPTGMHMDTWLAGGDQYWRTIQQFLEQHAPEQKEDRSSQNANDIGAR

SEQ ID NO: 20845 - protein, 214 aa, Glycine max
MLQQLHCNVFMLSYRGYGASDGYPSQHGITKDAQAALDHLSQRPDIDTSRIVVFGRSLGGAVGAVLTKNNPDKVAALILENTFTSILDMAGVLLPFLKWFIGGSSSNGPKVLNFLVRSPWSTIDVVGQIKQPILFLSGLQDEMVPPSHMQMLYAKAAARNNQCLFVDFPTGMHMDTWLAGGDQYWRTIQQFLEQHAPEQKEDRSSQNANDIGAR

SEQ ID NO: 20846 - DNA, 1350 bp, Glycine max
gagcagtagtgatgaattccacagaagaagagtgtcgtggctgcgagattatggagaaagatgctcatgtcaggtttctcgagttaatgtactatatgctcccatctccgtacgagtcccaagagatcaaccatctcaccctcgcttactttgtcatctctggacttgacattctcaactcactccacaaagtcgcgaaggatgctgttatcagttgggttttgtctttccaagctcaccctggtgccaaggctgatctcaatgatggacaattctatggctttcatgggtccaaaacttcgcagtttcctccagatgagaatggggttttgattcacaacaacagtcacttggcaagtacttattgcgccatttccatattgaaaattgttggttatgaattgtccaatcttgattctgaaacaattgtgacttctatgaggaaccttcaacagcctgatggaagtttcatttctattcatactggaggcgaaacagatcttaggtttgtgtattgtgcagctaccatctgtttcatgttggataactggagtggcatggacaaggagaaaaccaaggattacatattacgttgccagtcttacgatggtggctttggattagttcctggtgcagaatctcatggaggtgcaacttattgtgctattgcatctctccgattaatgggattcattggagataatattctctcaagttgtgcttcatcttctttgatagatgcaccattgctgctggactggatcttgcagaggcagggaactgatgggggttttcaaggtagaccaaataaatccagtgatacatgttatgcattttggattggagccgttttaaggattctagggggctgcaaatttgttgacagtaaggctctacgtggatttttgctttcttgtcaatataagtatggtggtttcggaaaattccctggagagtatccagacctgtaccactcctactatggagttaccgctttcagcttgttggaagaatctgctttgaaatcactttgttctgaactgggaattcactgaaaatgctgcactggcactctagcatagattcagaaatggatgcacctttatacctgacatttcttgcatattatatgaagctctcagcactaatccactcttaatggacttttcttttttattctttcacaaatttagatggattgtaaattttcaatttcatttgattgtatttgtgattttgtgtgcatcaattcaggttatcgggcctcttctgtttagatcaagctttttttcattgctttcttttttgttttatttacatttccatgaagtttattaaatatgttaattc

SEQ ID NO: 20847 - protein, 350 aa, Glycine max
AVVMNSTEEECRGCEIMEKDAHVRFLELMYYMLPSPYESQEINHLTLAYFVISGLDILNSLHKVAKDAVISWVLSFQAHPGAKADLNDGQFYGFHGSKTSQFPPDENGVLIHNNSHLASTYCAISILKIVGYELSNLDSETIVTSMRNLQQPDGSFISIHTGGETDLRFVYCAATICFMLDNWSGMDKEKTKDYILRCQSYDGGFGLVPGAESHGGATYCAIASLRLMGFIGDNILSSCASSSLIDAPLLLDWILQRQGTDGGFQGRPNKSSDTCYAFWIGAVLRILGGCKFVDSKALRGFLLSCQYKYGGFGKFPGEYPDLYHSYYGVTAFSLLEESALKSLCSELGIH

SEQ ID NO: 20848 - protein, 347 aa, Glycine max
MNSTEEECRGCEIMEKDAHVRFLELMYYMLPSPYESQEINHLTLAYFVISGLDILNSLHKVAKDAVISWVLSFQAHPGAKADLNDGQFYGFHGSKTSQFPPDENGVLIHNNSHLASTYCAISILKIVGYELSNLDSETIVTSMRNLQQPDGSFISIHTGGETDLRFVYCAATICFMLDNWSGMDKEKTKDYILRCQSYDGGFGLVPGAESHGGATYCAIASLRLMGFIGDNILSSCASSSLIDAPLLLDWILQRQGTDGGFQGRPNKSSDTCYAFWIGAVLRILGGCKFVDSKALRGFLLSCQYKYGGFGKFPGEYPDLYHSYYGVTAFSLLEESALKSLCSELGIH

SEQ ID NO: 20849 - protein, 334 aa, Glycine max
MEKDAHVRFLELMYYMLPSPYESQEINHLTLAYFVISGLDILNSLHKVAKDAVISWVLSFQAHPGAKADLNDGQFYGFHGSKTSQFPPDENGVLIHNNSHLASTYCAISILKIVGYELSNLDSETIVTSMRNLQQPDGSFISIHTGGETDLRFVYCAATICFMLDNWSGMDKEKTKDYILRCQSYDGGFGLVPGAESHGGATYCAIASLRLMGFIGDNILSSCASSSLIDAPLLLDWILQRQGTDGGFQGRPNKSSDTCYAFWIGAVLRILGGCKFVDSKALRGFLLSCQYKYGGFGKFPGEYPDLYHSYYGVTAFSLLEESALKSLCSELGIH

SEQ ID NO: 20850 - DNA, 1218 bp, Glycine max
ggagggtgtgaattctaaaaggaaagaacagctgagctggtcagaaaatcaatggcatcatccttgggttttgagttcctgacgaagaagccttacagtcctccatcctgggcatcccatctccaccctttaccttcccacttcttctctcttgcccatcttcccactccaattcacagatggaaccttcccaatctgcccaccaataccgagctgtggatcaagcgagacgacctttccggaatgcagctgagtggtaacaaagtgaggaaattggagttcctgatggccgatgccattgcgcaaggcgccgactctatcatcacaatcggaggcattcagagcaaccactgtcgcgccaccgccgttgccgccaagtatttaaaccttgactgttttctcatcctccgcacttctgacctcctcgtcgatcaagatccaggacttactggcaatcttctcgtcgaacgtatggttggagctcacgttcacctcatctccaaacaagaatatgccaaaattggcagcgtgacactcaccaatgtcctaaaagaaaaattgatcaaggaagggaggaggccatatgttatacccgttggcggatcaaactctttgggaacatggggttatatagaagcagtacgggaaattgagcagcagattcagaaggggacaggcaatgtcaagtttgatgatattgttgttgcttgtggcaggtacatgcattctctgtttgtgatgacccagattacttccacaactttgctcaaggcttgcttgatggactcaaggctggcgttagctcaagagatattgtccacattcaaaacgccaagggtcttggctatgcaatgaatacatcggaggagcttaattttgtaaaagaagttgctgccactactggtgttgttcttgacccagtatacagtggtaaggctgcttatgcaatgctgaaagatatgtctgaaaatccaaagaagtgggaaaggagaaagatcctcttcatacatacgggtggcctcctaggattgtatgacaaggtcgatcagttggcttcttttgttgggaattggcaacgaatggatgtcaatgaatctgttcctaggcaggatggtattggaaagatgttctagagaaggaaaatgaaaaaacctgacgttgccagcatctatattttgtactatcttgctctaaataaattttatacttatatttaac

SEQ ID NO: 20851 - protein, 267 aa, Glycine max
MASSLGFEFLTKKPYSPPSWASHLHPLPSHFFSLAHLPTPIHRWNLPNLPTNTELWIKRDDLSGMQLSGNKVRKLEFLMADAIAQGADSIITIGGIQSNHCRATAVAAKYLNLDCFLILRTSDLLVDQDPGLTGNLLVERMVGAHVHLISKQEYAKIGSVTLTNVLKEKLIKEGRRPYVIPVGGSNSLGTWGYIEAVREIEQQIQKGTGNVKFDDIVVACGRYMHSLFVMTQITSTTLLKACLMDSRLALAQEILSTFKTPRVLAMQ

SEQ ID NO: 20852 - protein, 203 aa, Glycine max
MQLSGNKVRKLEFLMADAIAQGADSIITIGGIQSNHCRATAVAAKYLNLDCFLILRTSDLLVDQDPGLTGNLLVERMVGAHVHLISKQEYAKIGSVTLTNVLKEKLIKEGRRPYVIPVGGSNSLGTWGYIEAVREIEQQIQKGTGNVKFDDIVVACGRYMHSLFVMTQITSTTLLKACLMDSRLALAQEILSTFKTPRVLAMQ

SEQ ID NO: 20853 - protein, 189 aa, Glycine max
MADAIAQGADSIITIGGIQSNHCRATAVAAKYLNLDCFLILRTSDLLVDQDPGLTGNLLVERMVGAHVHLISKQEYAKIGSVTLTNVLKEKLIKEGRRPYVIPVGGSNSLGTWGYIEAVREIEQQIQKGTGNVKFDDIVVACGRYMHSLFVMTQITSTTLLKACLMDSRLALAQEILSTFKTPRVLAMQ

SEQ ID NO: 20854 - DNA, 1245 bp, Glycine max
gaacaacaccaaaaaaaatggcacttgtgagccacgtttgtgtgagatgtgtagccacacccacttccccagagtccccaaattcggcacccttgccagacccaaggcaaaccaaggttctccttccgaagaagaagcctcagaaatggtccaccggggtggctcccggggagtacggtggccctcccaccaccaccaaactccgcaaatactggggcggcgatgacgaagaccctttggcctctgatgactatatgtggaacaaggagtttatgggtcgcttccaaaagttgattgaggaacccaatgctcaaccccctcctgcaaaggaagagccttcagggtttctaagcttaaatagagtcatgagcctggacagtttggaagttgatttgagcaaagaactcgcagctcctgtaaatcataatgcacacctgcaaattgatgcagaaactaatgtgacaggaagcaatagggtaagatataaatcagcaccaacacgtcgtgagcaagaaaaatgggatagagctaccaaggccgcaactggaggcagtgatgtgatgttccgggaaataaggcagtctcgtgaagatccaaaagttttggctgctcaagctgaggagcagtataataagttaaagaggaagttgcaaatctttaccttgggtataggtggtgttggtctggtttcagcttatgtttcttattcccctgagattgcagctagctttggtgctggctttcttggttctttggcgtatattcgtatgctgggaagtagcgtggactcgctaaggactgatggtgcaaagggatttgtcaagggagcaattgggcagccaagattactggttcctgttgttttggtcatggtctataaccgctggaatgcgattctggttccagaatttggatctatgcacttagaattgataccaatgctagtaggttttttcacatacaagattgcaacttttgctcaagctatagaggaggcaattactgtagctacaagaaagacctgaagaatattaggggtggagggggaggatgccatgtcattatatttgggtttttctctcccacatattgaacatataattgtatttatgtttttccatatttggattattgattataatatccagatatttggtcttaagtcttctctcccacaataagcacatatcgacttcatttttttcatatttacgatcagtgatatcaagggacacaattaaattc

SEQ ID NO: 20855 - protein, 340 aa, Glycine max
TTPKKMALVSHVCVRCVATPTSPESPNSAPLPDPRQTKVLLPKKKPQKWSTGVAPGEYGGPPTTTKLRKYWGGDDEDPLASDDYMWNKEFMGRFQKLIEEPNAQPPPAKEEPSGFLSLNRVMSLDSLEVDLSKELAAPVNHNAHLQIDAETNVTGSNRVRYKSAPTRREQEKWDRATKAATGGSDVMFREIRQSREDPKVLAAQAEEQYNKLKRKLQIFTLGIGGVGLVSAYVSYSPEIAASFGAGFLGSLAYIRMLGSSVDSLRTDGAKGFVKGAIGQPRLLVPVVLVMVYNRWNAILVPEFGSMHLELIPMLVGFFTYKIATFAQAIEEAITVATRKT

SEQ ID NO: 20856 - protein, 335 aa, Glycine max
MALVSHVCVRCVATPTSPESPNSAPLPDPRQTKVLLPKKKPQKWSTGVAPGEYGGPPTTTKLRKYWGGDDEDPLASDDYMWNKEFMGRFQKLIEEPNAQPPPAKEEPSGFLSLNRVMSLDSLEVDLSKELAAPVNHNAHLQIDAETNVTGSNRVRYKSAPTRREQEKWDRATKAATGGSDVMFREIRQSREDPKVLAAQAEEQYNKLKRKLQIFTLGIGGVGLVSAYVSYSPEIAASFGAGFLGSLAYIRMLGSSVDSLRTDGAKGFVKGAIGQPRLLVPVVLVMVYNRWNAILVPEFGSMHLELIPMLVGFFTYKIATFAQAIEEAITVATRKT

SEQ ID NO: 20857 - protein, 256 aa, Glycine max
MWNKEFMGRFQKLIEEPNAQPPPAKEEPSGFLSLNRVMSLDSLEVDLSKELAAPVNHNAHLQIDAETNVTGSNRVRYKSAPTRREQEKWDRATKAATGGSDVMFREIRQSREDPKVLAAQAEEQYNKLKRKLQIFTLGIGGVGLVSAYVSYSPEIAASFGAGFLGSLAYIRMLGSSVDSLRTDGAKGFVKGAIGQPRLLVPVVLVMVYNRWNAILVPEFGSMHLELIPMLVGFFTYKIATFAQAIEEAITVATRKT

SEQ ID NO: 20858 - DNA, 1525 bp, Glycine max
ttctgatgtttatatatcctatctccctttggcacacatttatgagcgagcaaaccaggtcatgacagtacattttggcattgcagtgggattctaccagggggatagtatgaaattaatggatgacatagctgctctaagacctactgtcttttgtagtgttcctcggctatataacagaatatatgctggtattactaatgctgttaaaacatctggtggtctgaaggagagactatttaatgctgcctacaatgctaaaaggcaggctttattgcatgggaagaacccatctccaatgtgggacagattagttttcaacaagataaaagaaaagcttggaggacgagttcggtttatggcatcaggtgcctcacctttatcacctgatatcatggaatttttaaagatttgctttggttgtcgagtgactgaaggatacggaatgacagagagtacttgtgttataagctgcatcgatgagggtgacaaacttggtggtcatgtaggctctcctaatctagcctgtgagataaaactagtggatgttccagaaatgaactatacatctgatgatcagcccaatccccgtggtgaaatttgtgtcaggggtccccttgtttttcgaggttatcacaaagatgaagcccagacgagagatgtcattgatgaagacggatggctacatactggagatattgggacatggttacctggtggtcgtctcaaaattattgataggaagaagaatatctttaagttggcacaaggggagtacattgctcctgagaagattgaaaacgtatatgccaaatgcaaatttgtggcgcaatgctttgtatatggtgatagcctaaatgcttctttggtagctgttgtctctgtggatcatgataacttgaaagcatgggctgcttcagaaggaataatgtataatgatttagcacaactttgcaatgatccaaaagcaagggcagctgtcttggctgagatggatgctgccggacgagaggctcagctgagaggttttgaattcgtaaaagcggtcactttggtgctcgaaccatttacgttggaaaatggcctgttgactccgacattcaaggttaagaggcctcaagcgaaggaatatttcgcaaaagcaatatctgatatgtacagtgagctctcaagaactgatacttctcagaaaacgttgtgaaaattgagagtctccccccatcaccaaccacaacataaaaagagagaggtaaataaagacacgctactcatacgcatcgtatgcaacatagcagaagcatccaatgggaacgattttgcaacttactgttgtattgtattgataataaagagttgtgctagaaccggaatatgattcgtagcattatttatgtagcctacgctccgttacgttcaagttgccttacgccatttttataattttttcttctgaatgatctttaatatattcatttctacactgataaaaaatattcataatcaataattcaatagctacctattc

SEQ ID NO: 20859 - protein, 399 aa, Glycine max
SDVYISYLPLAHIYERANQVMTVHFGIAVGFYQGDSMKLMDDIAALRPTVFCSVPRLYNRIYAGITNAVKTSGGLKERLFNAAYNAKRQALLHGKNPSPMWDRLVFNKIKEKLGGRVRFMASGASPLSPDIMEFLKICFGCRVTEGYGMTESTCVISCIDEGDKLGGHVGSPNLACEIKLVDVPEMNYTSDDQPNPRGEICVRGPLVFRGYHKDEAQTRDVIDEDGWLHTGDIGTWLPGGRLKIIDRKKNIFKLAQGEYIAPEKIENVYAKCKFVAQCFVYGDSLNASLVAVVSVDHDNLKAWAASEGIMYNDLAQLCNDPKARAAVLAEMDAAGREAQLRGFEFVKAVTLVLEPFTLENGLLTPTFKVKRPQAKEYFAKAISDMYSELSRTDTSQKTL

SEQ ID NO: 20860 - protein, 379 aa, Glycine max
MTVHFGIAVGFYQGDSMKLMDDIAALRPTVFCSVPRLYNRIYAGITNAVKTSGGLKERLFNAAYNAKRQALLHGKNPSPMWDRLVFNKIKEKLGGRVRFMASGASPLSPDIMEFLKICFGCRVTEGYGMTESTCVISCIDEGDKLGGHVGSPNLACEIKLVDVPEMNYTSDDQPNPRGEICVRGPLVFRGYHKDEAQTRDVIDEDGWLHTGDIGTWLPGGRLKIIDRKKNIFKLAQGEYIAPEKIENVYAKCKFVAQCFVYGDSLNASLVAVVSVDHDNLKAWAASEGIMYNDLAQLCNDPKARAAVLAEMDAAGREAQLRGFEFVKAVTLVLEPFTLENGLLTPTFKVKRPQAKEYFAKAISDMYSELSRTDTSQKTL

SEQ ID NO: 20861 - protein, 363 aa, Glycine max
MKLMDDIAALRPTVFCSVPRLYNRIYAGITNAVKTSGGLKERLFNAAYNAKRQALLHGKNPSPMWDRLVFNKIKEKLGGRVRFMASGASPLSPDIMEFLKICFGCRVTEGYGMTESTCVISCIDEGDKLGGHVGSPNLACEIKLVDVPEMNYTSDDQPNPRGEICVRGPLVFRGYHKDEAQTRDVIDEDGWLHTGDIGTWLPGGRLKIIDRKKNIFKLAQGEYIAPEKIENVYAKCKFVAQCFVYGDSLNASLVAVVSVDHDNLKAWAASEGIMYNDLAQLCNDPKARAAVLAEMDAAGREAQLRGFEFVKAVTLVLEPFTLENGLLTPTFKVKRPQAKEYFAKAISDMYSELSRTDTSQKTL

SEQ ID NO: 20862 - DNA, 1233 bp, Glycine max
gatttaatatatgactttttggtcatgctgagcaagcgtttaactgaggcagatgtatctatcattttggcattgttacaatgttgtgggatgaaaataagggctgatgatccagctgccatgaaagatttcattcttagtattcagaatacatcaaataagttgaaggcttcctctggagatgacaatgaaaagcaaaatagtaaaagaatggagttcatgcttgaaatcgtatgtgacatcaagaataacaaaagaaagccaaatgaggactctgcacatcacactcggattaagaagtggttacaaaagttgagagttgatgacattttgattagagggtttaaatggagcaagttacttgatcctgacaagaagggccaatggtggttgtctggggatgtggcttcttcaacaggtaatgttgaagaagttgccaacagaatagacaaggatgttcatgaaacccaaagaatgcttcagctcgccgctgctcaaaagatgaacacagatgcccgaagggcaatcttttgtataataatgagtggggaggactatcttgatgcatttgagaagcttctaagattggagttaccaggcaagcaggacagagatatcatgcgggttcttgtggagtgttgcttgcaagagaaagtttttaacaagtattatacagtgctggcttccaagttatgcgagcatgacaaaaatcacaagtttactctacagttttgcctgtgggaccagtttaaggacctggagtcaatgccgctaatgaggtcaatgcaccttgcaaaatttgtggctgaaatggtttcctctttcactctctccctttctgttttgaagactgtggatctgaatgatatcaccctattgacaccaaaaaggatcatgcatttccgcattctgtttgagtccattttagagtatcctgaaaacctggtatggaatatcttcacacgtgcagcagtgacccctgaacttgaaagttttaggcaaggccttgagtttttcataaaggagtatattgtgaaaaacaataaagatctaagtcaaaagtttaagttagcaaaaagggcccttaataatgtggaaggaattttgatgtgaaagtaaattttggattctacccaattttgtagcttaaaatttgtatccatttttatggcaagtacaggttggcacattaatgatgtctctagagaggaactgttaagctttagcggataa

SEQ ID NO: 20863 - protein, 370 aa, Glycine max
DLIYDFLVMLSKRLTEADVSIILALLQCCGMKIRADDPAAMKDFILSIQNTSNKLKASSGDDNEKQNSKRMEFMLEIVCDIKNNKRKPNEDSAHHTRIKKWLQKLRVDDILIRGFKWSKLLDPDKKGQWWLSGDVASSTGNVEEVANRIDKDVHETQRMLQLAAAQKMNTDARRAIFCIIMSGEDYLDAFEKLLRLELPGKQDRDIMRVLVECCLQEKVFNKYYTVLASKLCEHDKNHKFTLQFCLWDQFKDLESMPLMRSMHLAKFVAEMVSSFTLSLSVLKTVDLNDITLLTPKRIMHFRILFESILEYPENLVWNIFTRAAVTPELESFRQGLEFFIKEYIVKNNKDLSQKFKLAKRALNNVEGILM

SEQ ID NO: 20864 - protein, 362 aa, Glycine max
MLSKRLTEADVSIILALLQCCGMKIRADDPAAMKDFILSIQNTSNKLKASSGDDNEKQNSKRMEFMLEIVCDIKNNKRKPNEDSAHHTRIKKWLQKLRVDDILIRGFKWSKLLDPDKKGQWWLSGDVASSTGNVEEVANRIDKDVHETQRMLQLAAAQKMNTDARRAIFCIIMSGEDYLDAFEKLLRLELPGKQDRDIMRVLVECCLQEKVFNKYYTVLASKLCEHDKNHKFTLQFCLWDQFKDLESMPLMRSMHLAKFVAEMVSSFTLSLSVLKTVDLNDITLLTPKRIMHFRILFESILEYPENLVWNIFTRAAVTPELESFRQGLEFFIKEYIVKNNKDLSQKFKLAKRALNNVEGILM

SEQ ID NO: 20865 - protein, 340 aa, Glycine max
MKIRADDPAAMKDFILSIQNTSNKLKASSGDDNEKQNSKRMEFMLEIVCDIKNNKRKPNEDSAHHTRIKKWLQKLRVDDILIRGFKWSKLLDPDKKGQWWLSGDVASSTGNVEEVANRIDKDVHETQRMLQLAAAQKMNTDARRAIFCIIMSGEDYLDAFEKLLRLELPGKQDRDIMRVLVECCLQEKVFNKYYTVLASKLCEHDKNHKFTLQFCLWDQFKDLESMPLMRSMHLAKFVAEMVSSFTLSLSVLKTVDLNDITLLTPKRIMHFRILFESILEYPENLVWNIFTRAAVTPELESFRQGLEFFIKEYIVKNNKDLSQKFKLAKRALNNVEGILM

SEQ ID NO: 20866 - DNA, 1613 bp, Glycine max
gtgttctcttcgaaagcggaatcaatcaatccctcatctcattgctgagatctgcaagctggctatggactacgaaccctacgacagtagcggaactgatgatgaccttccaccaacccatcaaaatagaatttccaggggaggaggaggacgtctcgctgggaatgggagatctgctgttggttcaattccttacccaaggatgtatggtgaaattgatatggagacccaaattcatcagcttgagcaagaagcatacagttcagttctaagagcctttaaagctcaagccgatgccattacttgggagaaagaaagtttgattacagagctgagaaaagaactgagattgtcaaatgaggagcacagagaacttctaggtcgagttaatgctgatgatgtgatacggaggataagggaatggagacaggcaggtggccatcagcctggtgtacttagcactggtcaaggacttcatgattcaattcccagtcccacagtctctgcttctcgcaaaaagcagaagattacaccatctgtaccaccatcacgatctttttgcggaccttctcctccatttcacccccaaacactgactgcgccccaccaaccatcttctgcagcaaaacgtggatctgctcgtgggtcaaagggaaagaagcacaaacctggtcaaatattacctggtgtatcttcaatgaagcagtatccttcgtcaggaccaggtggaaggaatcaggtacctaatagagctgccatgggtgagcatgccgagggagcatcatttgattcgttggttggtaggagagtgcggacaaagtggcctgacgacaataacttctatgaagctgttatcacgaactacaatccagctgatggacgacataatctggtctatgacatggggagtgcaaatgaaacatgggaatgggttaatctatcagagatatctcctgaagatattcagtgggtaggtgaggatcctggaatcaatcatcgtgggggttttgggggccctggtcatgggatgaataggtctgttggacgagatggtgttccaggagctggaagaggtagaggagcagcaaaggggcaatccagaaaagattttttgtcatcacagaatggcataggaaagaaggcgcctgatgatatacaaatacttcacacagacacactaatcaaggaggtggagaaggtattcagtgcaaatcaccctgatccccttgaagttgagaaagcaaagaaagtattgaaggatcatgagcaagctcttattgatgcaattgcaagacttaatgatctttctgatggtgaaagtgatggggctggggctgcccaccatttctcacatgctcaatcaatggatcgagagtgatgagcacctgttaatttgtacaatgagcagaggaggcattaagatagcataattctggaaaagggtgtatttctattgtattatcacataaagattattaccctctaacagtttatagctgtaggcatggttcttgtggattaggcattatgtaggatggcaaatattgtagtttggtaataattatttatttcagtttgaaagttgacctaggaccagctgatgatacttgtac

SEQ ID NO: 20867 - protein, 458 aa, Glycine max
CSLRKRNQSIPHLIAEICKLAMDYEPYDSSGTDDDLPPTHQNRISRGGGGRLAGNGRSAVGSIPYPRMYGEIDMETQIHQLEQEAYSSVLRAFKAQADAITWEKESLITELRKELRLSNEEHRELLGRVNADDVIRRIREWRQAGGHQPGVLSTGQGLHDSIPSPTVSASRKKQKITPSVPPSRSFCGPSPPFHPQTLTAPHQPSSAAKRGSARGSKGKKHKPGQILPGVSSMKQYPSSGPGGRNQVPNRAAMGEHAEGASFDSLVGRRVRTKWPDDNNFYEAVITNYNPADGRHNLVYDMGSANETWEWVNLSEISPEDIQWVGEDPGINHRGGFGGPGHGMNRSVGRDGVPGAGRGRGAAKGQSRKDFLSSQNGIGKKAPDDIQILHTDTLIKEVEKVFSANHPDPLEVEKAKKVLKDHEQALIDAIARLNDLSDGESDGAGAAHHFSHAQSMDRE

SEQ ID NO: 20868 - protein, 437 aa, Glycine max
MDYEPYDSSGTDDDLPPTHQNRISRGGGGRLAGNGRSAVGSIPYPRMYGEIDMETQIHQLEQEAYSSVLRAFKAQADAITWEKESLITELRKELRLSNEEHRELLGRVNADDVIRRIREWRQAGGHQPGVLSTGQGLHDSIPSPTVSASRKKQKITPSVPPSRSFCGPSPPFHPQTLTAPHQPSSAAKRGSARGSKGKKHKPGQILPGVSSMKQYPSSGPGGRNQVPNRAAMGEHAEGASFDSLVGRRVRTKWPDDNNFYEAVITNYNPADGRHNLVYDMGSANETWEWVNLSEISPEDIQWVGEDPGINHRGGFGGPGHGMNRSVGRDGVPGAGRGRGAAKGQSRKDFLSSQNGIGKKAPDDIQILHTDTLIKEVEKVFSANHPDPLEVEKAKKVLKDHEQALIDAIARLNDLSDGESDGAGAAHHFSHAQSMDRE

SEQ ID NO: 20869 - protein, 391 aa, Glycine max
MYGEIDMETQIHQLEQEAYSSVLRAFKAQADAITWEKESLITELRKELRLSNEEHRELLGRVNADDVIRRIREWRQAGGHQPGVLSTGQGLHDSIPSPTVSASRKKQKITPSVPPSRSFCGPSPPFHPQTLTAPHQPSSAAKRGSARGSKGKKHKPGQILPGVSSMKQYPSSGPGGRNQVPNRAAMGEHAEGASFDSLVGRRVRTKWPDDNNFYEAVITNYNPADGRHNLVYDMGSANETWEWVNLSEISPEDIQWVGEDPGINHRGGFGGPGHGMNRSVGRDGVPGAGRGRGAAKGQSRKDFLSSQNGIGKKAPDDIQILHTDTLIKEVEKVFSANHPDPLEVEKAKKVLKDHEQALIDAIARLNDLSDGESDGAGAAHHFSHAQSMDRE

SEQ ID NO: 20870 - DNA, 1710 bp, Glycine max
aagaagagaagagaaaacgcagcgttttggaggcactggttgaggctttctccttgtcttcaatcagggaagcttccatggcctatgagattgcagggggagatcccgacagggcttcggagatcctgaggaagggttcttcggacagattcgaggattcgttctcgtgtttttcttatggttcttcttctagcggcggaagcagcggtgggggcggttcttcttcttgttcggggttggaattgggttcgaaaggtgggaggcagcagaagaagaaggtggttgcttcaactggcactgtttcaacggttttggggaaggaatatgtgaggaggaacaatataaggaacaaggggtttagttctaatggagtttttgaaatggaggaggcagagcaattcctctgctctatgctgggggatgattctgatattaacttggctgttgttagagacgttctttgtcagtgtggatatgatattgaaacggcctcagatgtattgcttgatttagctgcttccacaaatgacaaaccgaatactgatagacatcctaactacagagtggacaacattgatgatgagaggttctttgctgaccccaatgacagtttgatagacaggagatcagagtgcacatctctttcatcggaaggttatctttctgataatccatggccttttggaaggaaatatgtggaggttctcaatagttctaaagctgattctgctattagcccaggatgtacaaagtctgaaattcctcagaaggtgttggaatctttgtttaatattcccaaaagcactgaacatgacaaagataccatgaattggagaaatgtagtaaagaaaatccagtctttgggacctgggttcaatgtttctccgcatgttgcagaatctcagcaacatacgtgtgctaagggagatgaatatcatgtgtttagggaagattcaaagcagcaatgggattcagtgaaatcttattatacgaaagctgcaacagcatataccaaacgggaacgagcttatgctgcatatctttctgaccagggtaaagaacaaactagattagctcagaaagcagacactaaggccagccatgacatatttattgctagaaacaaaggtatagaaaatatgataactattgacttacatgggcagcacgtgaaacaagcaatgagaatgctgaaactacaccttctgtttggatcatatgttccctctgtccagactctaagggttattacaggatgtggatcacatggtgttggaaagtctaagctgaaacaatcagttataaaccttttagatagagaagcaattgaatggagggaagagaaccagggaactgtattgattaaactcagcggatggagagagtatagctttctagacaccagcagtgacagtgacagtaatgattaagcatgtctaagtgcatcagcttgttgtaccatatttagattaatagcctggtgaaaataaataaattagagctgtgacattgacatgtacattattgttagccgagctagatcttgggacttcttggttctatcatatcatgtggaacctgtagctctattgaatctggttgtattgtatgagtcagaattgcatttccggattaggctaatgacccagtggtgtacatacatgaatatgtaaagatgatgtttgattttcaggattttatgtttaattt

SEQ ID NO: 20871 - protein, 475 aa, Glycine max
EEKRKRSVLEALVEAFSLSSIREASMAYEIAGGDPDRASEILRKGSSDRFEDSFSCFSYGSSSSGGSSGGGGSSSCSGLELGSKGGRQQKKKVVASTGTVSTVLGKEYVRRNNIRNKGFSSNGVFEMEEAEQFLCSMLGDDSDINLAVVRDVLCQCGYDIETASDVLLDLAASTNDKPNTDRHPNYRVDNIDDERFFADPNDSLIDRRSECTSLSSEGYLSDNPWPFGRKYVEVLNSSKADSAISPGCTKSEIPQKVLESLFNIPKSTEHDKDTMNWRNVVKKIQSLGPGFNVSPHVAESQQHTCAKGDEYHVFREDSKQQWDSVKSYYTKAATAYTKRERAYAAYLSDQGKEQTRLAQKADTKASHDIFIARNKGIENMITIDLHGQHVKQAMRMLKLHLLFGSYVPSVQTLRVITGCGSHGVGKSKLKQSVINLLDREAIEWREENQGTVLIKLSGWREYSFLDTSSDSDSND

SEQ ID NO: 20872 - protein, 450 aa, Glycine max
MAYEIAGGDPDRASEILRKGSSDRFEDSFSCFSYGSSSSGGSSGGGGSSSCSGLELGSKGGRQQKKKVVASTGTVSTVLGKEYVRRNNIRNKGFSSNGVFEMEEAEQFLCSMLGDDSDINLAVVRDVLCQCGYDIETASDVLLDLAASTNDKPNTDRHPNYRVDNIDDERFFADPNDSLIDRRSECTSLSSEGYLSDNPWPFGRKYVEVLNSSKADSAISPGCTKSEIPQKVLESLFNIPKSTEHDKDTMNWRNVVKKIQSLGPGFNVSPHVAESQQHTCAKGDEYHVFREDSKQQWDSVKSYYTKAATAYTKRERAYAAYLSDQGKEQTRLAQKADTKASHDIFIARNKGIENMITIDLHGQHVKQAMRMLKLHLLFGSYVPSVQTLRVITGCGSHGVGKSKLKQSVINLLDREAIEWREENQGTVLIKLSGWREYSFLDTSSDSDSND

SEQ ID NO: 20873 - protein, 349 aa, Glycine max
MEEAEQFLCSMLGDDSDINLAVVRDVLCQCGYDIETASDVLLDLAASTNDKPNTDRHPNYRVDNIDDERFFADPNDSLIDRRSECTSLSSEGYLSDNPWPFGRKYVEVLNSSKADSAISPGCTKSEIPQKVLESLFNIPKSTEHDKDTMNWRNVVKKIQSLGPGFNVSPHVAESQQHTCAKGDEYHVFREDSKQQWDSVKSYYTKAATAYTKRERAYAAYLSDQGKEQTRLAQKADTKASHDIFIARNKGIENMITIDLHGQHVKQAMRMLKLHLLFGSYVPSVQTLRVITGCGSHGVGKSKLKQSVINLLDREAIEWREENQGTVLIKLSGWREYSFLDTSSDSDSND

SEQ ID NO: 20874 - DNA, 1426 bp, Glycine max
attctctgttgcatttgcttttgtggagtctgagcgagctgataacttcacttgggcactacaaaagctaagaggattgattgtcaaagaggatgacatgccccaagtgattgtgactgtcggagacattgctttgatgagtgcagtgcaggtggtctttccgagctcttctaatttgttatgtcgttttcatatcaaccaaaatgtgaaggctaaatgcaagtcaatagttcattcaaaggagaaacaagacatggtgatggatgcatgggatgttattgtgaattctcctaatgaaggtgaatatatgcagcgtctggcattttttgaaaatgtttgcttagactttcctatttttggtgattatgtgaaaaatacatggctgattccacacaaggaaaaatttgtcactgcatggacaaatcgggtgatgcatttgggtaacacagcaaccaatagggttgaggcgacacattggaggttgaagactttgcttcaagatagcaaggaggatatgtgtagttattgggatgctatgaagaacatgattacattgcaacacacagagattgaggcatcattcgagaaaagcaaaaacgtagtggaacaccggcataatactccattctacgtcaaattggtgggatttgtatcaaggagtgcattgagtcatataactgaggagtatgatcgagttaagactgctggtattgatagttctatctgtgggtgcatagttagaactacacatggtctaccttgtgcatgtgaacttgctaggtacagcacgatgtgtcacccaattcccttggaggcaattcatgctcattggaggaagttaaagtttagtgaccacggaacaaatgacaatgggtctgagttatcattgcaacctgaagttgatgctttgtacaagcgatttcaggaacttgattatgctgggaaaattattctaatggctaaattgcatgaaatggcatttcctgatacagctttgaagtgtctacctcctgaagaggtaggaacaaagggtgctccagagggtctacggtggaaaagtgatggatcaactaaatttgacccttcatatttggagcttgcattgcgtcctgcccgtgatagcacatcatctctctcttcatctcagaaaacagtccatgagtctaaacgcaggagagttctgccaatgatggaccaatttccggttgagatccatccatttattgaagacattattgatgtgaaaggagattcaaattgtggttatcgtgctgttgcagctcaacttggtatgggtgaggagtcatgggctctagtccgtcaggatttaattagagagcttcaacagtggcaagataattatgcgaaactctttggtagcaatgaccgagtggctgaactgaggaaatctttgtatgttggcaag

SEQ ID NO: 20875 - protein, 475 aa, Glycine max
FSVAFAFVESERADNFTWALQKLRGLIVKEDDMPQVIVTVGDIALMSAVQVVFPSSSNLLCRFHINQNVKAKCKSIVHSKEKQDMVMDAWDVIVNSPNEGEYMQRLAFFENVCLDFPIFGDYVKNTWLIPHKEKFVTAWTNRVMHLGNTATNRVEATHWRLKTLLQDSKEDMCSYWDAMKNMITLQHTEIEASFEKSKNVVEHRHNTPFYVKLVGFVSRSALSHITEEYDRVKTAGIDSSICGCIVRTTHGLPCACELARYSTMCHPIPLEAIHAHWRKLKFSDHGTNDNGSELSLQPEVDALYKRFQELDYAGKIILMAKLHEMAFPDTALKCLPPEEVGTKGAPEGLRWKSDGSTKFDPSYLELALRPARDSTSSLSSSQKTVHESKRRRVLPMMDQFPVEIHPFIEDIIDVKGDSNCGYRAVAAQLGMGEESWALVRQDLIRELQQWQDNYAKLFGSNDRVAELRKSLYVGK

SEQ ID NO: 20876 - protein, 443 aa, Glycine max
MPQVIVTVGDIALMSAVQVVFPSSSNLLCRFHINQNVKAKCKSIVHSKEKQDMVMDAWDVIVNSPNEGEYMQRLAFFENVCLDFPIFGDYVKNTWLIPHKEKFVTAWTNRVMHLGNTATNRVEATHWRLKTLLQDSKEDMCSYWDAMKNMITLQHTEIEASFEKSKNVVEHRHNTPFYVKLVGFVSRSALSHITEEYDRVKTAGIDSSICGCIVRTTHGLPCACELARYSTMCHPIPLEAIHAHWRKLKFSDHGTNDNGSELSLQPEVDALYKRFQELDYAGKIILMAKLHEMAFPDTALKCLPPEEVGTKGAPEGLRWKSDGSTKFDPSYLELALRPARDSTSSLSSSQKTVHESKRRRVLPMMDQFPVEIHPFIEDIIDVKGDSNCGYRAVAAQLGMGEESWALVRQDLIRELQQWQDNYAKLFGSNDRVAELRKSLYVGK

SEQ ID NO: 20877 - protein, 430 aa, Glycine max
MSAVQVVFPSSSNLLCRFHINQNVKAKCKSIVHSKEKQDMVMDAWDVIVNSPNEGEYMQRLAFFENVCLDFPIFGDYVKNTWLIPHKEKFVTAWTNRVMHLGNTATNRVEATHWRLKTLLQDSKEDMCSYWDAMKNMITLQHTEIEASFEKSKNVVEHRHNTPFYVKLVGFVSRSALSHITEEYDRVKTAGIDSSICGCIVRTTHGLPCACELARYSTMCHPIPLEAIHAHWRKLKFSDHGTNDNGSELSLQPEVDALYKRFQELDYAGKIILMAKLHEMAFPDTALKCLPPEEVGTKGAPEGLRWKSDGSTKFDPSYLELALRPARDSTSSLSSSQKTVHESKRRRVLPMMDQFPVEIHPFIEDIIDVKGDSNCGYRAVAAQLGMGEESWALVRQDLIRELQQWQDNYAKLFGSNDRVAELRKSLYVGK

SEQ ID NO: 20878 - DNA, 1545 bp, Glycine max
aagcgaaaatccgcgtagttattacaagtgcacgcacccgagttgtccaacaaagaagaaagttgagaggtctttggagggacatatcactgaaatagtatacaagggaagccacaatcatcccaagccacttggtagaaaaaatggttctcaatcaattcatcaaacttcttcgtcctgcactaactcagggatttctgatcaatctgtgggagaggaagatcttgagcaaacatcacagactagttattctggagggggtgatgatgaccttggaaatgaggccaaaagatggaagggggagaatgaaaatgatggccattcctattcttctgctgggagtagaactgttaaggaacctagagttgtagttcaaaccacaagtgaaattgacatacttgatgatggatataggtggaggaaatatggacagaaagtagttaaaggaaatccaaacccaaggtatttccatcttttagattttaatagaagagtttaactgtgatgtactattggactagtgtaaaaaaagtcgactgtaaatcaatcaaaaatttgtggacttttaagttagttattacaaaaatcaacaaacccaacacgatttgtaattggatgatagtataaaaaagcatttatactattcattcatttcaattaaactcttaatagaattgattagtcgtatggttttaagtgttaaaatttctattattaccaaccacttaaggccatgaattaaacaacatattctttctgcaggagttactacaaatgtgtagccccaggttgtccagtgagaaaacatgttgagagagctgcacatgatatgaaagctgtgattacaacttatgaagggaaacatatccatgatgtacctttaggacgaggaaactcaagctatagcatgaacagaacttctctaaacaacaacaccaacaccagcaccagcaatgtaacagctcctgcccctattaggccctcagcagtgactaattattctaactcagcaagtttcacaaactcacttcatgacacaaagccaccaacatctgcaagccaagaaccttttccaatggacgtgttgctgagccccggaagtatcggatttgcggctaatgacctgttccttcagtcttttttgtcaaagaacttttaaatttggaaacagaagaacactagaacgttacacataaaaatatcactgatatgtttatgtatagaatataggaataagaaaatcatgagcttctactaactttggtgtactaaggttagagactagaactacaactttctaaagctagacaagagttaggcctagtttaaacttccaatttagtgataggagagacagaaaacgtgttgaccttgaattctattattcttttgttgcttttgttcaattgctttctaagattaattctagttgttggaaatttctactttggtatacaaatgtctactcttactagttatggttactttgggttgtgttgttgactataaatttttcaatcaaagtccttgtttgttcaaattatg

SEQ ID NO: 20879 - protein, 165 aa, Glycine max
SENPRSYYKCTHPSCPTKKKVERSLEGHITEIVYKGSHNHPKPLGRKNGSQSIHQTSSSCTNSGISDQSVGEEDLEQTSQTSYSGGGDDDLGNEAKRWKGENENDGHSYSSAGSRTVKEPRVVVQTTSEIDILDDGYRWRKYGQKVVKGNPNPRYFHLLDFNRRV

SEQ ID NO: 20880 - protein, 109 aa, Glycine max
MKAVITTYEGKHIHDVPLGRGNSSYSMNRTSLNNNTNTSTSNVTAPAPIRPSAVTNYSNSASFTNSLHDTKPPTSASQEPFPMDVLLSPGSIGFAANDLFLQSFLSKNF

SEQ ID NO: 20881 - protein, 83 aa, Glycine max
MNRTSLNNNTNTSTSNVTAPAPIRPSAVTNYSNSASFTNSLHDTKPPTSASQEPFPMDVLLSPGSIGFAANDLFLQSFLSKNF

SEQ ID NO: 20882 - DNA, 1568 bp, Glycine max
gggaatgccaatacccacctcttagcatggaaataataagtaacataaccccatgtgtattttcatattcctgggaatcaactattcttgggaacgtttttacaaaacttgtagcaaacatgagaatgcgatattctcaagtccatattcatgagaatatttcttgataacttgaaacaaacgcctcctttaggtaaagcatgaggtttctttttccatctctaacaatatgctaccagaaggagcataatgtgaatcttgtctttgagcgttttcatgtcaatagatgcacatggagacacatttacttatttgataatacataaatgttgtactattttatatttgataatgtgtagatgttatgctattttatctatccattcagttataaatagcttaagctgtgttattctcaaattaacgcattattcattatcaaaaaggttcctctctctttggcaataaggatagcatccctcaaagggacattgcggttgcagataaagccacctccgtctgatcaattgtggtttggtttcacatttatgcctgatatagacttcagcttggaatcatttgttggagaacacaagataactaattcacacatagctttgttcctggtcaatcgactcaaggcagcgatccgggaaactttagtgctcccaaattgtgaaagcatatgcattccatggatgctagccgaaaaggatgattgggttcctaggagtgtcgctccgttcatatggatccacccagaatcggggaacgagatttcaacctcagttgataccaataatcaaccttgtggtggattgaaagctagtgcaaggaccttaagtggtgatggtccagaactcaaacaacataaaccgccaaagtgtaccaaatctagtcaggaaccagctaggaaatcagattctgtggcacttccaccaatttcctctagttcagtaacattaaggagcagcaaaagttcggaagaactgacaagacctctgttagagaatgacaaaccacaagaaactagagatttgcaagaacttagaactacttcattgcagaatgataatactaatgaagctagtgaagagaagatgggggatatttctgtgagtgaatcacctcccagaaacgtggtgatggataaacaatatagttcaattgaacaggatgattcaaggccaaggaaaattggaaaaagggaaagaattcttgatttgaaaaagaggatgagtgagaaattggaagaaagagtcggcacattgttgagaagataagaggaccatgagaaatataaacaaagtaaatgtcagaatggttacaaatttgttactgattttttactattgcagacattagtaccattcataaataaaaatgtggggtattaggtattgtttcattgatgagttgtatattttttaggggcttagaagatcatatggaactagatatatacatcacagaaaatactttcatttcgttccacgggagttccacaacactgacgtaatccacttgtaaatttgcaattgtcacagggtataatagaaaactcattt

SEQ ID NO: 20883 - protein, 244 aa, Glycine max
MPDIDFSLESFVGEHKITNSHIALFLVNRLKAAIRETLVLPNCESICIPWMLAEKDDWVPRSVAPFIWIHPESGNEISTSVDTNNQPCGGLKASARTLSGDGPELKQHKPPKCTKSSQEPARKSDSVALPPISSSSVTLRSSKSSEELTRPLLENDKPQETRDLQELRTTSLQNDNTNEASEEKMGDISVSESPPRNVVMDKQYSSIEQDDSRPRKIGKRERILDLKKRMSEKLEERVGTLLRR

SEQ ID NO: 20884 - protein, 194 aa, Glycine max
MLAEKDDWVPRSVAPFIWIHPESGNEISTSVDTNNQPCGGLKASARTLSGDGPELKQHKPPKCTKSSQEPARKSDSVALPPISSSSVTLRSSKSSEELTRPLLENDKPQETRDLQELRTTSLQNDNTNEASEEKMGDISVSESPPRNVVMDKQYSSIEQDDSRPRKIGKRERILDLKKRMSEKLEERVGTLLRR

SEQ ID NO: 20885 - DNA, 1524 bp, Glycine max
ataaaacatttgaaagccagtgtgctaaggagatacgaagaagaaaagaagttgaagaacaattggcaagggaaaagcaagaagtacagaaaatgaagaatcagcgagatgaaatacttgaagaattgcaaatggtccaagaccaaaattcagcacttatgaaccaaatttctgagtcccagtgtacagaaacagagttggaggagaagatcatatcagctgtggacctcttgataagtttcagggaacagagagataggcttaggatagagcatgcaaatgcagttagggaagtcaaagtgctgagaaaaattggggaagcagatacttccttctcttatcgggtagaattccctgcattttcttttgtggagataaatgaggcaactaatgattttgatccatcttggaagattggagaaggaaggtatggaagtgtttacaagggacagcttcgcaacatgcatgttgccataaaaatgttaccctcttatggttgtcagagtttattagagttccaacatcaggtagaggtcttgagtagggtaagacatccaaacctgttaacactaatgggaagctgtgcagagtctcggtcacttgtgtatgagtacataaacaatggcagccttgaaagccatcttgcccacaaagaaaagaatccacttccatggcaaattcgaatatccattgccactgacatatgctctgctctaatcttccttcactccagtgagccttgtattatccatgggaatttgaaacctagtaaggttctccttgatgccaactttgttgccaaactcagtgacttgggcattcctagtttagttcagcgaagtttggattcagctgacacaagcacaatatgtaataacccaaatgaacgtttggcatatgtggatccagagtattttgtcactggcaagcttacaccagaatcggatgtatattcttttggagtcatattgttacaacttctaactggaagaccccttttggggctagttagagatatgaaatgtgcattggaaaaggaaaaccttaaagcagtcttggactcttcagctggtgaatggccgttttttcaaactgaacagctggcatatttagcattgaggtgttgtgaaaagacttggttgaaccggccagaccttgtgtctgaaatctggagtgttcttgaaccattcaaagcaacttgcattgacacgccaccacatttgatttctaagaagcttcgtcggattccttcccattttgtctgccccattgtccaggaagtaatggaagatccatacatagctgcagatggctttacgtacgaagaagaggcaataagaggatggttgaatagtggccacgacacttcccccatgacaaacctcaaactagaccacactgatttggtacctaactatgctctacataatgcaattctggagtggcagcaacagtgattcagtgaaccttcattggccattacacttgcacatattacactggtgtaaatcatacttatcctgc

SEQ ID NO: 20886 - protein, 484 aa, Glycine max
KTFESQCAKEIRRRKEVEEQLAREKQEVQKMKNQRDEILEELQMVQDQNSALMNQISESQCTETELEEKIISAVDLLISFREQRDRLRIEHANAVREVKVLRKIGEADTSFSYRVEFPAFSFVEINEATNDFDPSWKIGEGRYGSVYKGQLRNMHVAIKMLPSYGCQSLLEFQHQVEVLSRVRHPNLLTLMGSCAESRSLVYEYINNGSLESHLAHKEKNPLPWQIRISIATDICSALIFLHSSEPCIIHGNLKPSKVLLDANFVAKLSDLGIPSLVQRSLDSADTSTICNNPNERLAYVDPEYFVTGKLTPESDVYSFGVILLQLLTGRPLLGLVRDMKCALEKENLKAVLDSSAGEWPFFQTEQLAYLALRCCEKTWLNRPDLVSEIWSVLEPFKATCIDTPPHLISKKLRRIPSHFVCPIVQEVMEDPYIAADGFTYEEEAIRGWLNSGHDTSPMTNLKLDHTDLVPNYALHNAILEWQQQ

SEQ ID NO: 20887 - protein, 454 aa, Glycine max
MKNQRDEILEELQMVQDQNSALMNQISESQCTETELEEKIISAVDLLISFREQRDRLRIEHANAVREVKVLRKIGEADTSFSYRVEFPAFSFVEINEATNDFDPSWKIGEGRYGSVYKGQLRNMHVAIKMLPSYGCQSLLEFQHQVEVLSRVRHPNLLTLMGSCAESRSLVYEYINNGSLESHLAHKEKNPLPWQIRISIATDICSALIFLHSSEPCIIHGNLKPSKVLLDANFVAKLSDLGIPSLVQRSLDSADTSTICNNPNERLAYVDPEYFVTGKLTPESDVYSFGVILLQLLTGRPLLGLVRDMKCALEKENLKAVLDSSAGEWPFFQTEQLAYLALRCCEKTWLNRPDLVSEIWSVLEPFKATCIDTPPHLISKKLRRIPSHFVCPIVQEVMEDPYIAADGFTYEEEAIRGWLNSGHDTSPMTNLKLDHTDLVPNYALHNAILEWQQQ

SEQ ID NO: 20888 - protein, 441 aa, Glycine max
MVQDQNSALMNQISESQCTETELEEKIISAVDLLISFREQRDRLRIEHANAVREVKVLRKIGEADTSFSYRVEFPAFSFVEINEATNDFDPSWKIGEGRYGSVYKGQLRNMHVAIKMLPSYGCQSLLEFQHQVEVLSRVRHPNLLTLMGSCAESRSLVYEYINNGSLESHLAHKEKNPLPWQIRISIATDICSALIFLHSSEPCIIHGNLKPSKVLLDANFVAKLSDLGIPSLVQRSLDSADTSTICNNPNERLAYVDPEYFVTGKLTPESDVYSFGVILLQLLTGRPLLGLVRDMKCALEKENLKAVLDSSAGEWPFFQTEQLAYLALRCCEKTWLNRPDLVSEIWSVLEPFKATCIDTPPHLISKKLRRIPSHFVCPIVQEVMEDPYIAADGFTYEEEAIRGWLNSGHDTSPMTNLKLDHTDLVPNYALHNAILEWQQQ

SEQ ID NO: 20889 - DNA, 1560 bp, Glycine max
atatttcaacctcctcagatttctttcttagcaaaccaattttcaaccacatgggtatccctcactttctcgttataccatatccagttctgggtcatgtgaatccccttatgcaattgtctgaggctctaaccaagcatggctgcaaaatcacatttctgaacacagagttcagccacaaaagagcaaacaacgctggtgctggactagacaaccttaaggaatcaggaatcaagtttgtgacactcccagatggcttggaacctgaagatgatagaagtgaccatgagaaagttattttgtctatccaaagcaacatgccttctttgcttccaaagctcatagaagatatcaatgctttggatgctgagaatagcataacttgcatagttgctactatgaatatgggttgggccttggaaattggacacaaacttggaattgaaggagctcttctttggactgcatctgcaacttccttggctgcatgctattgcattccaaggctgattgatgatggaattatagactcagaaggagtagcaaccaagaaacaagaattccagctttccctaaatatgcctatgatggaccctgcagaccttccatggggtggcctacgtaaggttttcttccctcaaatagttaaagagatgaaaatcttggagttaggagaatggtggctttgcaacaccacttgtgatcttgagcctggagcacttgccatatctccaaggttcctcccaattggcccattgatggaaagtgacaccaacaaaaattcattctgggaagaggacataacttgcctagattggttggatcagcagccacctcaatctgttgtgtatgtttcttttggtagtttagcaatagttgaacctaaccaattcaaagaactagctctaggacttgatctccttaacatgccttttctttgggttgtacgttccgacaataataacaaggtaaatagtgcataccctgatgaattccatggaagtaaaggtaaaattgtcaattgggtgcctcagaggaagatattgaaccaccctgccatagcttgcttcattagtcactgtggttggaattcaactatagaaggtgtatgcagtggcatacctttcttgtgttggccatttttctctgaccaatttgttaataggtcgtatatttgtgacgtgtggaaggttggattgaaattagacaaggatggaaatggattaatactgaagggagagataaggaagaaggtggaccaattgcttgggaatgaagacatcaaagctagatcgttgaaactgaaggaattgactgtgaataactcagttaatggtgatcaatcttcaaagaatctagaaaagtttattaactgggcaaagtagtactacctcctgctatagtttggattggaagttgtctctctttaatttttctcaatttttatgtctgaaattcgtttactatagctaaacagcagattgcatctccctgttgggtccaaagatactcaaaagaatcttttccaatttcaaaagaatagaagttaagtccaatgac

SEQ ID NO: 20890 - protein, 460 aa, Glycine max
ISTSSDFFLSKPIFNHMGIPHFLVIPYPVLGHVNPLMQLSEALTKHGCKITFLNTEFSHKRANNAGAGLDNLKESGIKFVTLPDGLEPEDDRSDHEKVILSIQSNMPSLLPKLIEDINALDAENSITCIVATMNMGWALEIGHKLGIEGALLWTASATSLAACYCIPRLIDDGIIDSEGVATKKQEFQLSLNMPMMDPADLPWGGLRKVFFPQIVKEMKILELGEWWLCNTTCDLEPGALAISPRFLPIGPLMESDTNKNSFWEEDITCLDWLDQQPPQSVVYVSFGSLAIVEPNQFKELALGLDLLNMPFLWVVRSDNNNKVNSAYPDEFHGSKGKIVNWVPQRKILNHPAIACFISHCGWNSTIEGVCSGIPFLCWPFFSDQFVNRSYICDVWKVGLKLDKDGNGLILKGEIRKKVDQLLGNEDIKARSLKLKELTVNNSVNGDQSSKNLEKFINWAK

SEQ ID NO: 20891 - protein, 444 aa, Glycine max
MGIPHFLVIPYPVLGHVNPLMQLSEALTKHGCKITFLNTEFSHKRANNAGAGLDNLKESGIKFVTLPDGLEPEDDRSDHEKVILSIQSNMPSLLPKLIEDINALDAENSITCIVATMNMGWALEIGHKLGIEGALLWTASATSLAACYCIPRLIDDGIIDSEGVATKKQEFQLSLNMPMMDPADLPWGGLRKVFFPQIVKEMKILELGEWWLCNTTCDLEPGALAISPRFLPIGPLMESDTNKNSFWEEDITCLDWLDQQPPQSVVYVSFGSLAIVEPNQFKELALGLDLLNMPFLWVVRSDNNNKVNSAYPDEFHGSKGKIVNWVPQRKILNHPAIACFISHCGWNSTIEGVCSGIPFLCWPFFSDQFVNRSYICDVWKVGLKLDKDGNGLILKGEIRKKVDQLLGNEDIKARSLKLKELTVNNSVNGDQSSKNLEKFINWAK

SEQ ID NO: 20892 - protein, 424 aa, Glycine max
MQLSEALTKHGCKITFLNTEFSHKRANNAGAGLDNLKESGIKFVTLPDGLEPEDDRSDHEKVILSIQSNMPSLLPKLIEDINALDAENSITCIVATMNMGWALEIGHKLGIEGALLWTASATSLAACYCIPRLIDDGIIDSEGVATKKQEFQLSLNMPMMDPADLPWGGLRKVFFPQIVKEMKILELGEWWLCNTTCDLEPGALAISPRFLPIGPLMESDTNKNSFWEEDITCLDWLDQQPPQSVVYVSFGSLAIVEPNQFKELALGLDLLNMPFLWVVRSDNNNKVNSAYPDEFHGSKGKIVNWVPQRKILNHPAIACFISHCGWNSTIEGVCSGIPFLCWPFFSDQFVNRSYICDVWKVGLKLDKDGNGLILKGEIRKKVDQLLGNEDIKARSLKLKELTVNNSVNGDQSSKNLEKFINWAK

SEQ ID NO: 20893 - DNA, 1438 bp, Glycine max
aagaacaaaaaataaaaataatattcttcgttattatttcatttcaatttcgttttcgttttcgttttctgttttgatttgatcttccaatggcgtccgatggctttaccgacaagaacaccgtgttcagaaagctcaaggcgaagtctgaaaataagatgtgtttcgattgcaatgcgaagaaccctacctgggcgtccgtcacgtatgggatctttctctgcatcgattgctccgccgtacaccgcagtctcggcgtgcacatcagcttcgtgaggtctacaaatttagactcatggagtcctgagcaactaaaaacaatgagctttggaggaaacaatcgtgcacaggttttctttaagcaacatggttggaatgatggtggtaaaatagaggctaagtacacatctagagctgcagacttgtataggcaaattctttcaaaggaagttgcaaaaagtatggctgaggatggaggcttgccttcatcacctgttgcttctcagtcttcccagggggttaatgggctaccagaagtcaagaccaatgaagtgccaaaagaaaacattctggagaagccagaaaagcctgagagcacttcttcccctagagcttcacatacagtaatttcaagtaccgttaagaaacctattggtgctaagaaagcagtgaagagtggggggctcggcgctcgtaaactcactaaaaagccaagtgagtctctctatgagcagaagcctgaggaaccccctgctccagtttcatcttcaacaaacaatatgcctgctgggccatctccaacgtctcggtttgagtatgcagaaaatgtccaatcatctgagttgaacactggaggttcacatttgcttagtcatgtgtctccaccaaagtcatcaagcttctttgcagactttggaatggatagtggctttccaaagaaatctgggccaagctcctccaaagtgcaaattcaggaaactgatgaagcaagaaggaagttctcaaatgctaaatctatttcttcatcccaatattttggagatcagaacaaggctgcagatgtggattctcaagctacattgtctaagttttcgggttcaagtgccatctccagtgctgatctttttggtgactcaagagacaacaacattgatcttactgctggtgacctcatcaatcgattatctttccaggcacaacaggatctctcttcccttaagaacattgcaggagagactggaaagaagctgagctcattggcctccacattgatgacagatcttcaggaccgaatcctctaaaatgtgtatgctctgtatttaagagaatctttggagttttttacatatgccagccaattatgtttcaaatgtaatagaagagttttcaatatacaattctttgagaaaataagatgctatattttcaggcttgtcac

SEQ ID NO: 20894 - protein, 403 aa, Glycine max
MASDGFTDKNTVFRKLKAKSENKMCFDCNAKNPTWASVTYGIFLCIDCSAVHRSLGVHISFVRSTNLDSWSPEQLKTMSFGGNNRAQVFFKQHGWNDGGKIEAKYTSRAADLYRQILSKEVAKSMAEDGGLPSSPVASQSSQGVNGLPEVKTNEVPKENILEKPEKPESTSSPRASHTVISSTVKKPIGAKKAVKSGGLGARKLTKKPSESLYEQKPEEPPAPVSSSTNNMPAGPSPTSRFEYAENVQSSELNTGGSHLLSHVSPPKSSSFFADFGMDSGFPKKSGPSSSKVQIQETDEARRKFSNAKSISSSQYFGDQNKAADVDSQATLSKFSGSSAISSADLFGDSRDNNIDLTAGDLINRLSFQAQQDLSSLKNIAGETGKKLSSLASTLMTDLQDRIL

SEQ ID NO: 20895 - protein, 380 aa, Glycine max
MCFDCNAKNPTWASVTYGIFLCIDCSAVHRSLGVHISFVRSTNLDSWSPEQLKTMSFGGNNRAQVFFKQHGWNDGGKIEAKYTSRAADLYRQILSKEVAKSMAEDGGLPSSPVASQSSQGVNGLPEVKTNEVPKENILEKPEKPESTSSPRASHTVISSTVKKPIGAKKAVKSGGLGARKLTKKPSESLYEQKPEEPPAPVSSSTNNMPAGPSPTSRFEYAENVQSSELNTGGSHLLSHVSPPKSSSFFADFGMDSGFPKKSGPSSSKVQIQETDEARRKFSNAKSISSSQYFGDQNKAADVDSQATLSKFSGSSAISSADLFGDSRDNNIDLTAGDLINRLSFQAQQDLSSLKNIAGETGKKLSSLASTLMTDLQDRIL

SEQ ID NO: 20896 - protein, 326 aa, Glycine max
MSFGGNNRAQVFFKQHGWNDGGKIEAKYTSRAADLYRQILSKEVAKSMAEDGGLPSSPVASQSSQGVNGLPEVKTNEVPKENILEKPEKPESTSSPRASHTVISSTVKKPIGAKKAVKSGGLGARKLTKKPSESLYEQKPEEPPAPVSSSTNNMPAGPSPTSRFEYAENVQSSELNTGGSHLLSHVSPPKSSSFFADFGMDSGFPKKSGPSSSKVQIQETDEARRKFSNAKSISSSQYFGDQNKAADVDSQATLSKFSGSSAISSADLFGDSRDNNIDLTAGDLINRLSFQAQQDLSSLKNIAGETGKKLSSLASTLMTDLQDRIL

SEQ ID NO: 20897 - DNA, 1440 bp, Glycine max
tttcttttataaaccctgcaattatgaactttttgtgaagcaatctctcaacatggagatggctattgttatggcaagggattctggcatgaactggattcttcatcttgatacagatgaattaatgcacccagctggtgctcgggaatattctttaaggcagttgctccttgatgttccaggacatgttgatatggtcatatttcctaactatgagagcagtatcgagcgagatgatatcaaagaaccttttagtgaggtatcgatgtttaaaaagaattatgaccatcttccaaaggatacatactttggcatgtataaagattctatacgtggcaatccaaactacttcctgacttacggaaatggaaaatcagctgctcggatacaagatcatcttcggcctaatggtgcacatagatggcataattatatgaaaaccccaaatgaaatcaaattggaagaggctgctgttttgcattacacatatgctaaattctcagacttaacttctagacgtgaccgctgtggttgcaaacctacaaaagaagatgtaaaaagatgcttcatgttggaatttgacagaactgcatttatcattgcttcaactgcaactgaagaagaaatgatgaagtggtataatgaacatgttgtgtggggtgataaagacctgaagatgaaacttttgaggaagggagtattgactcgtatatattctcccatggtcataattcaaagtttaagggaatctggagtctttagttctgtcattgcatctgccccatcactttctaaagaaaactttctgctgtcaattgatagtagtaattcttcaagagtctctgcctctgtaaccctcccttctagaaaggttggaaggaccaaagaatctcaagcagctacacggaaggctctgtctgttgaatctgctgcatttcacgaagtggctgtaccaccactgtctcccccagtagtagatgacaatgacctcatttcacataattgatcttatctcagagattccttccatctcctttcatttaagtatcactgtcgtcatgccatattatgccgtattggaagaatctgctggtgaagaaagagcatcttagctgctttttctgattatctgagctctgaatatatttggtgtttgttgctgtccaaatgccaagtattgattgtggtcagtggctgatggccattgatgaaacagttagatatcgttagtcattttttagtatagaaacctcagtgccattaatatgaattcttttttatgccccttttaagtcccttctgaaattgtgactaggatagttgtatattatttcactcgtcaattattctttgtattatacgtatacctcttatgctacacaacgatttcaaagcaactaccatgacatgctattaagaatatttatttattgattcctc

SEQ ID NO: 20898 - protein, 334 aa, Glycine max
FFYKPCNYELFVKQSLNMEMAIVMARDSGMNWILHLDTDELMHPAGAREYSLRQLLLDVPGHVDMVIFPNYESSIERDDIKEPFSEVSMFKKNYDHLPKDTYFGMYKDSIRGNPNYFLTYGNGKSAARIQDHLRPNGAHRWHNYMKTPNEIKLEEAAVLHYTYAKFSDLTSRRDRCGCKPTKEDVKRCFMLEFDRTAFIIASTATEEEMMKWYNEHVVWGDKDLKMKLLRKGVLTRIYSPMVIIQSLRESGVFSSVIASAPSLSKENFLLSIDSSNSSRVSASVTLPSRKVGRTKESQAATRKALSVESAAFHEVAVPPLSPPVVDDNDLISHN

SEQ ID NO: 20899 - protein, 317 aa, Glycine max
MEMAIVMARDSGMNWILHLDTDELMHPAGAREYSLRQLLLDVPGHVDMVIFPNYESSIERDDIKEPFSEVSMFKKNYDHLPKDTYFGMYKDSIRGNPNYFLTYGNGKSAARIQDHLRPNGAHRWHNYMKTPNEIKLEEAAVLHYTYAKFSDLTSRRDRCGCKPTKEDVKRCFMLEFDRTAFIIASTATEEEMMKWYNEHVVWGDKDLKMKLLRKGVLTRIYSPMVIIQSLRESGVFSSVIASAPSLSKENFLLSIDSSNSSRVSASVTLPSRKVGRTKESQAATRKALSVESAAFHEVAVPPLSPPVVDDNDLISHN

SEQ ID NO: 20900 - protein, 315 aa, Glycine max
MAIVMARDSGMNWILHLDTDELMHPAGAREYSLRQLLLDVPGHVDMVIFPNYESSIERDDIKEPFSEVSMFKKNYDHLPKDTYFGMYKDSIRGNPNYFLTYGNGKSAARIQDHLRPNGAHRWHNYMKTPNEIKLEEAAVLHYTYAKFSDLTSRRDRCGCKPTKEDVKRCFMLEFDRTAFIIASTATEEEMMKWYNEHVVWGDKDLKMKLLRKGVLTRIYSPMVIIQSLRESGVFSSVIASAPSLSKENFLLSIDSSNSSRVSASVTLPSRKVGRTKESQAATRKALSVESAAFHEVAVPPLSPPVVDDNDLISHN

SEQ ID NO: 20901 - DNA, 1307 bp, Glycine max
ttcgtctctcctcacattttttcttcttctttcttctttcttttgggcgccgttcctgtctctcctcacatttttcttctctcttctctctcctcggcgccccaccgcgcgacccctcctttccccctcccccttcgcctccgccgcgacacccaccttccccttccggacctccgtgcgacccccccccctccgccgtgttttagttgcaaagttttagagttggattggaagattgtgaacttagaaagatggtgaagttgactatgattgctcgtgttactgatggtcttcctctagctgaaggtctggatgatggtcgtgatcttaaagatgcggaattttacaaactgcaagtcaaggctttgtttaagaatctctcaagaggacattatgaagcatcaaggatgtcagttgaaactggcccttatgtttttcattatattatagaaggacgggtctgttacttgacaatgtgtgatcgtgcataccctaagaaactagcctttcaatatcttgaagagctcaggaacgagtttgagcgtgttaatgggtctcaaattgaaactgctgcaagaccttatgccttcattaagtttgatacatttatgcagaagacaaagaaactttatcaggatacccatactcagcgcaatattgcaaagttgaatgatgaactctatgaagtccaccagataatgactcggaatgtgcaggaagttcttggtgttggtgaacagttggaccaggtcagccaaatgtccagtcgcttatcatcagaatctcgcatatatgctgataaggctagagatttaaaccggcaggctctgattcggaagtgggcccctgttgctattgtttttggagttgtcttcgtacttttctggatcaaaaataaactatggtgatcgagctcagtatgaaatttaaaacctggattctgtggcttcttgcttttctcacatgattatccagatttgcacagattggtgggaaccctttatgcatgagatgatgtcaactttttcttgacaacttcggtttagaaaaaaaaaaaaagactatcctttgttacatctggatcagtctttctggaacaggaaccttttgacctttatagtaaggagccaggatatgagaaaactttatccccgtggggatgcatgtaggcatttcttctttatacttctcaattattttcaggattattgcgttaatgaattaaatatattacctcttcgattttattgtttccatttgagccgctgaattaaaattgcgtttttatatacagctaacataatgac

SEQ ID NO: 20902 - protein, 218 aa, Glycine max
MVKLTMIARVTDGLPLAEGLDDGRDLKDAEFYKLQVKALFKNLSRGHYEASRMSVETGPYVFHYIIEGRVCYLTMCDRAYPKKLAFQYLEELRNEFERVNGSQIETAARPYAFIKFDTFMQKTKKLYQDTHTQRNIAKLNDELYEVHQIMTRNVQEVLGVGEQLDQVSQMSSRLSSESRIYADKARDLNRQALIRKWAPVAIVFGVVFVLFWIKNKLW

SEQ ID NO: 20903 - protein, 213 aa, Glycine max
MIARVTDGLPLAEGLDDGRDLKDAEFYKLQVKALFKNLSRGHYEASRMSVETGPYVFHYIIEGRVCYLTMCDRAYPKKLAFQYLEELRNEFERVNGSQIETAARPYAFIKFDTFMQKTKKLYQDTHTQRNIAKLNDELYEVHQIMTRNVQEVLGVGEQLDQVSQMSSRLSSESRIYADKARDLNRQALIRKWAPVAIVFGVVFVLFWIKNKLW

SEQ ID NO: 20904 - protein, 166 aa, Glycine max
MSVETGPYVFHYIIEGRVCYLTMCDRAYPKKLAFQYLEELRNEFERVNGSQIETAARPYAFIKFDTFMQKTKKLYQDTHTQRNIAKLNDELYEVHQIMTRNVQEVLGVGEQLDQVSQMSSRLSSESRIYADKARDLNRQALIRKWAPVAIVFGVVFVLFWIKNKLW

SEQ ID NO: 20905 - DNA, 1231 bp, Glycine max
aatgtttctctcttggatttgcctgatttgccattggaatgcatccttgagcacctttcaccagctgaattatgcagggtggcaacagtgtgcacatctctgagggatagatgtaggagtgatcatttatggaagaaacacatggagaggaaatggggtaaggtgtttggtgatgctgcttataggcaatggaaatggcatgtagcttccaagaacagagaaaaaatctcctccaaccagcacaatcagaaaggaatatttgctttccttcgtggtggttttctccccttcatatggatcaaagcaaaatcagaaaagggcacagagtcaagtagctcattaccagaagattcaatagcagctttatatctttctcttgaaagtggcaaattttggttccctgctcaagtctataaccgtgagaatggtcatgctgggttcatgctctcatgttatgatgcccaactatgctatgattctcgatccgacacttttctggcaaggtactcgcctcatgggagatggacaactgaggaaaacatacaatgggaccggctaagagtgccaccaattgctacttctccacatgctcttcacatctctgactgtttggatgacttgagacctggagatcacattgagattcagtggagaagaaacaaagaatttccttatggttggtggtatggtgtcattggtcatttggaacaatgtcaaggacatgggaaccattgccattgtcactataatgatatagtgattttggagttcacacagtacactgctgggtccagatggagacaaaccgtgataaacagaaagcatcatatagaaaaaggcaatgaaatagatggtttttatggaggaatcaggaagctgcatagcaaggaagaaattgcaaggtggaagaacctctggccaactaaaattgtgatacatgattgacttgattagaatttttgtaaattaagcagtcacccatcctaaaatgtgaaggattacttttgtcacagaacgatgtcattcctaacaataggtataaacttggaaagagtttatggaagaattttcagaggctgtaacatctgtagcacgacataacaaatagtggatatgttgcagctttcttatacgtgtctatatataattttatagaagaacattggtgcatagtgcatactcctgtttagctgaagcagagagaaggttcattagctccttgattgtgatc

SEQ ID NO: 20906 - protein, 314 aa, Glycine max
NVSLLDLPDLPLECILEHLSPAELCRVATVCTSLRDRCRSDHLWKKHMERKWGKVFGDAAYRQWKWHVASKNREKISSNQHNQKGIFAFLRGGFLPFIWIKAKSEKGTESSSSLPEDSIAALYLSLESGKFWFPAQVYNRENGHAGFMLSCYDAQLCYDSRSDTFLARYSPHGRWTTEENIQWDRLRVPPIATSPHALHISDCLDDLRPGDHIEIQWRRNKEFPYGWWYGVIGHLEQCQGHGNHCHCHYNDIVILEFTQYTAGSRWRQTVINRKHHIEKGNEIDGFYGGIRKLHSKEEIARWKNLWPTKIVIHD

SEQ ID NO: 20907 - protein, 267 aa, Glycine max; identical to SEQ ID NO: 14146

SEQ ID NO: 20908 - protein, 167 aa, Glycine max; identical to SEQ ID NO: 14147

SEQ ID NO: 20909 - DNA, 1212 bp, Glycine max
agttgcattcgttcattcactccctaacatagcaattactaccatttaccaaagtaaacccagagatggagtggtgtgtgtcaatgccaaagattgagctgcatgctcacctcaatggatccatccgagactccacacttcttgaactcactaaggctttgattggaaagggtgtcatgaatttctccgaagtggagcatatcatcctcaaatataaccgttccctaaaagaagttttcaagctgttcgacctaatccacattctcaccactgatcacaacactgttacaagaattaccagagaagttattgaggattttgcatcagagaatgttgtctatctggagttgaggaccactccaaagaaaaatgattctgtgggaatgagcaaacactcttatgttgaagctgtactgaaaggtctaagatcaatcacttcagttgatgtggatttcattccacattgtgaagattcaaagactctttttactcctgcaccggttattaatggacatgtgagaaaaaaaatctttgttaggcttctcttgagcattgacagaagggagacaacagaagctgcaatggaaactgtcaagcttgcattggaaatgaggccttatggggtagttggaattgacctctctggaaatccaagtattggtgattggaccacatatttgccagcattgaaatttgctcgagaacaaggtctttatgtaacacttcattgtggcgagttacctaattcaaaggagataaaaaatatgcttgacttccgtccccaaaggattggacatgcttgtttctttgaggatgaacactggagacagctgaagtcgtcgaacattccggttgaaatttgcttgacatcaaacgttaggacaatgactgttccatctatagatgttcaccactttgctcatttgtacaacgcaaaacatcctttagccctgtgtactgatgactcgggagtcttctctacctgtctctccaaggaatacaaaattgctgctgattcatttgggctgggaaggagggaaatgtttgagctatcaaggaatgctgttgagcatatattcgcagatagcaaagtaaaggaggatttaagaaaaattttcaattcagtggcaaaaaaatatggaagtgtaaccacagtttcatctttagagaatatctgcatttagatataattaatattagagctttgttgac

SEQ ID NO: 20910 - protein, 372 aa, Glycine max
MEWCVSMPKIELHAHLNGSIRDSTLLELTKALIGKGVMNFSEVEHIILKYNRSLKEVFKLFDLIHILTTDHNTVTRITREVIEDFASENVVYLELRTTPKKNDSVGMSKHSYVEAVLKGLRSITSVDVDFIPHCEDSKTLFTPAPVINGHVRKKIFVRLLLSIDRRETTEAAMETVKLALEMRPYGVVGIDLSGNPSIGDWTTYLPALKFAREQGLYVTLHCGELPNSKEIKNMLDFRPQRIGHACFFEDEHWRQLKSSNIPVEICLTSNVRTMTVPSIDVHHFAHLYNAKHPLALCTDDSGVFSTCLSKEYKIAADSFGLGRREMFELSRNAVEHIFADSKVKEDLRKIFNSVAKKYGSVTTVSSLENICI

SEQ ID NO: 20911 - protein, 366 aa, Glycine max
MPKIELHAHLNGSIRDSTLLELTKALIGKGVMNFSEVEHIILKYNRSLKEVFKLFDLIHILTTDHNTVTRITREVIEDFASENVVYLELRTTPKKNDSVGMSKHSYVEAVLKGLRSITSVDVDFIPHCEDSKTLFTPAPVINGHVRKKIFVRLLLSIDRRETTEAAMETVKLALEMRPYGVVGIDLSGNPSIGDWTTYLPALKFAREQGLYVTLHCGELPNSKEIKNMLDFRPQRIGHACFFEDEHWRQLKSSNIPVEICLTSNVRTMTVPSIDVHHFAHLYNAKHPLALCTDDSGVFSTCLSKEYKIAADSFGLGRREMFELSRNAVEHIFADSKVKEDLRKIFNSVAKKYGSVTTVSSLENICI

SEQ ID NO: 20912 - protein, 335 aa, Glycine max
MNFSEVEHIILKYNRSLKEVFKLFDLIHILTTDHNTVTRITREVIEDFASENVVYLELRTTPKKNDSVGMSKHSYVEAVLKGLRSITSVDVDFIPHCEDSKTLFTPAPVINGHVRKKIFVRLLLSIDRRETTEAAMETVKLALEMRPYGVVGIDLSGNPSIGDWTTYLPALKFAREQGLYVTLHCGELPNSKEIKNMLDFRPQRIGHACFFEDEHWRQLKSSNIPVEICLTSNVRTMTVPSIDVHHFAHLYNAKHPLALCTDDSGVFSTCLSKEYKIAADSFGLGRREMFELSRNAVEHIFADSKVKEDLRKIFNSVAKKYGSVTTVSSLENICI

SEQ ID NO: 20913 - DNA, 1186 bp, Glycine max
ttgttctctttttaggaacatccacaaaagcattcttcaagggtgttgaaacatggaaaaaggaaaccataatgaaagaggaagatgctaggaaacaagcgacaaatggtgttggttctgaagtagaatacacaccaattcccagtggacctggcagtgacattgcaaaggacaccagaaacgaggaggtgtctatgcttgaaaatgtgtactggaaggagtttggacttcttgtttttgtttgggtttcattccttggaatacagattgccatgaaccagacaagcaaatgttcaacaatatattgggtactgaacatgttgcagattccaatttcagttggggtatctggatatgaggcagcttccttgtataaaggacggagacaaatttcttcagtgggagatcaagggaaaacttttacttctcagcagctaactatatattgtatctttggtgtattggctggaatagttggtggcttactgggaataggtggaggattcgtaatggggccactctttttggagctgggagtcccacctcaggtttcaagtgccacagccacctttgccatgaccttttcctcatctatgtctgttgtagaatactacctgctcaaacgttttccagttccttatgctctgtactttattgcggttgctgctatttcagcaattgtagggcagcatattgtgagaaagctgatcgatgtgcttgggagagcatctctaatcatctttgttctagccttcacaatacttgtcagcgcagtctcactaggtggagttggcattgtagcaatggtcaaaaagattgaaaatcacgagtatatgggatttgatgacctctgcacatatgattcatagcccatttcactaaattattttatgctttgttttgtctcaagttcccaataaaggagccaagagaacctaggtcgccaaaattgacttaaggtatgcttggattcccgtaaaaaacagtggacttgaaagcaatgcatacatgcttctatgtatttatctgggttttttgtgaggaaaaaaatgttagatgttggacactatttcaaacactcacttgtgctctgtgtgtgcctgggctcttgttaagaggtatgatatgtacatttatatttttgttgctgctaagacatgtattgatgacactgttgaagattgag

SEQ ID NO: 20914 - protein, 288 aa, Glycine max
VLFLGTSTKAFFKGVETWKKETIMKEEDARKQATNGVGSEVEYTPIPSGPGSDIAKDTRNEEVSMLENVYWKEFGLLVFVWVSFLGIQIAMNQTSKCSTIYWVLNMLQIPISVGVSGYEAASLYKGRRQISSVGDQGKTFTSQQLTIYCIFGVLAGIVGGLLGIGGGFVMGPLFLELGVPPQVSSATATFAMTFSSSMSVVEYYLLKRFPVPYALYFIAVAAISAIVGQHIVRKLIDVLGRASLIIFVLAFTILVSAVSLGGVGIVAMVKKIENHEYMGFDDLCTYDS

SEQ ID NO: 20915 - protein, 265 aa, Glycine max
MKEEDARKQATNGVGSEVEYTPIPSGPGSDIAKDTRNEEVSMLENVYWKEFGLLVFVWVSFLGIQIAMNQTSKCSTIYWVLNMLQIPISVGVSGYEAASLYKGRRQISSVGDQGKTFTSQQLTIYCIFGVLAGIVGGLLGIGGGFVMGPLFLELGVPPQVSSATATFAMTFSSSMSVVEYYLLKRFPVPYALYFIAVAAISAIVGQHIVRKLIDVLGRASLIIFVLAFTILVSAVSLGGVGIVAMVKKIENHEYMGFDDLCTYDS

SEQ ID NO: 20916 - protein, 224 aa, Glycine max
MLENVYWKEFGLLVFVWVSFLGIQIAMNQTSKCSTIYWVLNMLQIPISVGVSGYEAASLYKGRRQISSVGDQGKTFTSQQLTIYCIFGVLAGIVGGLLGIGGGFVMGPLFLELGVPPQVSSATATFAMTFSSSMSVVEYYLLKRFPVPYALYFIAVAAISAIVGQHIVRKLIDVLGRASLIIFVLAFTILVSAVSLGGVGIVAMVKKIENHEYMGFDDLCTYDS

SEQ ID NO: 20917 - DNA, 1504 bp, Glycine max
gacaccatttcgttcgttctatatgcttcctcttcaacccttcttctttccatcatctcccaccactttcacgctgctctggaatttacaacactaactcacataaaaccaaagttaaatgatgaatttcattgtaaattttcaattgaaatctgttgtggaaatttcctttgttcattgagattttttcgaggtgcagaagatttcccagttttgaagatatatttctcttcagacgggttttgaaactctgaactttttgcaagtcgtacgtgacaaggacgatcgctacttggccatcgtcgcagacagaagctcagaaatgtgattagtagttgagttttcggcatagatttgcattttccatagctctggaactgaaatctggataattttccaggtttcctacagctttgaacaaagttttagcaggagcagacttaggagatagaaaaatcagctccttttccccttagtttcagaaggaattgattgctcgacgattgctacttttttaaggaacgggttcaagagatggagaacgagtcaattattcagagcaataacaatacgaacacaatgtctagtgttagagaaaaaaacggaggggatgggtcgttgctgttgagggcgaattccgatagcgctaggcaagcaacgacgtcggatttggtgttgcagtgggggaatcggaagcggctaaggtgcatgaaggtgcaggttaaggacgattcttccggtccggttcagaggactacggttcgggtggatcgccgggtcgttagaaccgacaaggattctttaaataagctcactttcggtgtcaataataataatcatcatcatcagagtaacgggtatccgaatctccgtcaacgtccatcttcgccgcaaccacgaattctcaggaactcagaaagttcaagtgccatgagaggaggacaaagcaacgggggcgttagtgttaggggaattgcctcaccggacaggggtgcgcatgataagagagggacccataatgacaataacaagtccgcggcctcatcggatactgcgcacgatagcaagaagggagggtcgccgtccggcagcggagatgcggctgctccgccggtgtggccacccaagttcgtgattgccttgaccaacaaggagaaggaagaagattttctcgccattaagggctcaaagctgcctcagagacccaagaagagagctaaattcattcaacgaaccctcaatctcgttagtcctggcgcatggttgtgcgatcttaccttggaacgatacgaggttagggagaagaagatatccaaaaagcagagaccaagaggtttgaaagcaatgggaaacatggactcggactctgaatagagaatgagtgaaggtgctaagtaagctttatgtttgctaaggatgtgtaggaaatgcatggcatggcatctcagctaggtgccaacgaatccaaatcgaaatacaaaatattttagctttgccgctgctt

SEQ ID NO: 20918 - protein, 279 aa, Glycine max
MENESIIQSNNNTNTMSSVREKNGGDGSLLLRANSDSARQATTSDLVLQWGNRKRLRCMKVQVKDDSSGPVQRTTVRVDRRVVRTDKDSLNKLTFGVNNNNHHHQSNGYPNLRQRPSSPQPRILRNSESSSAMRGGQSNGGVSVRGIASPDRGAHDKRGTHNDNNKSAASSDTAHDSKKGGSPSGSGDAAAPPVWPPKFVIALTNKEKEEDFLAIKGSKLPQRPKKRAKFIQRTLNLVSPGAWLCDLTLERYEVREKKISKKQRPRGLKAMGNMDSDSE

SEQ ID NO: 20919 - protein, 264 aa, Glycine max
MSSVREKNGGDGSLLLRANSDSARQATTSDLVLQWGNRKRLRCMKVQVKDDSSGPVQRTTVRVDRRVVRTDKDSLNKLTFGVNNNNHHHQSNGYPNLRQRPSSPQPRILRNSESSSAMRGGQSNGGVSVRGIASPDRGAHDKRGTHNDNNKSAASSDTAHDSKKGGSPSGSGDAAAPPVWPPKFVIALTNKEKEEDFLAIKGSKLPQRPKKRAKFIQRTLNLVSPGAWLCDLTLERYEVREKKISKKQRPRGLKAMGNMDSDSE

SEQ ID NO: 20920 - protein, 221 aa, Glycine max
MKVQVKDDSSGPVQRTTVRVDRRVVRTDKDSLNKLTFGVNNNNHHHQSNGYPNLRQRPSSPQPRILRNSESSSAMRGGQSNGGVSVRGIASPDRGAHDKRGTHNDNNKSAASSDTAHDSKKGGSPSGSGDAAAPPVWPPKFVIALTNKEKEEDFLAIKGSKLPQRPKKRAKFIQRTLNLVSPGAWLCDLTLERYEVREKKISKKQRPRGLKAMGNMDSDSE

SEQ ID NO: 20921 - DNA, 1261 bp, Glycine max
atgatgaaaaggagagtttagttgaaaaccacaacaatcatgaggcccgggaggaacattacaagggggatgatgcttctagtgctgtggctcatgatactcatgcaactagcactgaaactgagacacttagtttggaaaactctgatgtaaacttagaaatgaatattccaaaacctgaaaatgagacaacttattcagacgaaagtgtcgggaagcaaaatgattcagatttgaaggtttcagaaggtgacatgatagatggtatttcttcaaacacaactgctgttcaagagactggaaataacactttgtccaaccctgtggatgatagctcattactaaataaaacaactgcaacaaactctgacagtcacttggaatcaagcagtaacctgacagtagtgaccactgaagcaagcaataacttgaccggagctggtaatgacacatcaagttcatctgaacaaaataaaaaagtgatgttatctgaatctgaccaagctcaaagcagcacgatgaacacaacaatccctggagatataaaaaatgtgcagacagagggattagagcagagtggcaatagaacttcagatgaaaacctgcatgataccaattcgacgatctctgttaaaactgaaaatggaggtgtggatgcaggagaatcatctaatctagtagcttcgaatgtaaccgagaacacttacagaaatgagaggtctgaatctgatatttctgaaagtggcaagttcaacggtaactctgaaacaagtgaaacagatgaaaatcagaatgttgatgccacagaggatgagatgttcaaaggtgacacactaacaggtgaaactgatgaaacatcagactcttcctctgccaacaaaactatggattcagctgaacaagatgcaattgattcttctgatactcatatacacgaggatgtggctgaggctctaactgatcttgatacactaccagatatcagaaatgaaggagatgacagtgacgaaactgctgcagagtaaagtggaaagaagggcgttgggttcttgaaaagggctctttcagtttttctcctgaccctggtgtttgcatggcagatccacctagttgttagaacctgtttgcttgactcaaaaattgtgtcaagacaagatctttaaagggaaaaacatagtttagcggatatttttaatgattgtatcaaggtctggatgtgtaatttattgttacattcaactgtcaactacttttgttcccc

SEQ ID NO: 20922 - protein, 340 aa, Glycine max
DEKESLVENHNNHEAREEHYKGDDASSAVAHDTHATSTETETLSLENSDVNLEMNIPKPENETTYSDESVGKQNDSDLKVSEGDMIDGISSNTTAVQETGNNTLSNPVDDSSLLNKTTATNSDSHLESSSNLTVVTTEASNNLTGAGNDTSSSSEQNKKVMLSESDQAQSSTMNTTIPGDIKNVQTEGLEQSGNRTSDENLHDTNSTISVKTENGGVDAGESSNLVASNVTENTYRNERSESDISESGKFNGNSETSETDENQNVDATEDEMFKGDTLTGETDETSDSSSANKTMDSAEQDAIDSSDTHIHEDVAEALTDLDTLPDIRNEGDDSDETAAE

SEQ ID NO: 20923 - protein, 287 aa, Glycine max
MNIPKPENETTYSDESVGKQNDSDLKVSEGDMIDGISSNTTAVQETGNNTLSNPVDDSSLLNKTTATNSDSHLESSSNLTVVTTEASNNLTGAGNDTSSSSEQNKKVMLSESDQAQSSTMNTTIPGDIKNVQTEGLEQSGNRTSDENLHDTNSTISVKTENGGVDAGESSNLVASNVTENTYRNERSESDISESGKFNGNSETSETDENQNVDATEDEMFKGDTLTGETDETSDSSSANKTMDSAEQDAIDSSDTHIHEDVAEALTDLDTLPDIRNEGDDSDETAAE

SEQ ID NO: 20924 - protein, 256 aa, Glycine max
MIDGISSNTTAVQETGNNTLSNPVDDSSLLNKTTATNSDSHLESSSNLTVVTTEASNNLTGAGNDTSSSSEQNKKVMLSESDQAQSSTMNTTIPGDIKNVQTEGLEQSGNRTSDENLHDTNSTISVKTENGGVDAGESSNLVASNVTENTYRNERSESDISESGKFNGNSETSETDENQNVDATEDEMFKGDTLTGETDETSDSSSANKTMDSAEQDAIDSSDTHIHEDVAEALTDLDTLPDIRNEGDDSDETAAE

SEQ ID NO: 20925 - DNA, 1779 bp, Glycine max
attccaaaatggtggaaacattaccacaccatactcctcctcctcctaaccatcaccaagtcttggttctaaaatctgcaatatgttcgagactcctcctcgtaaccctaatcatcctcttccgaaccctcgtttccccctacgacacatccgcatccttaaaccctccatgcctctccacccccaaccccaactccaccacccacccttcccccctcgaaaacggcgtcgtttgggactccgtctacttcctccgcatcgcccaatgcggctacgagtacgaacaaaccttcgccttcttacccctccttcctctctctctctccctctcttctcacaccctcttcgcctttctctctccctttctaaaccaaaggcccctcctcgctctctccgcttacgtcatcaacaacatggctttcgttctcgccgctctctacttctacaagctctccctcaccgtcttgaaggacccccaaatagcgcttcgggccaccgttttcttctgctttaatcctgcctctatattttattcatccatatactcggagagtttgtacgcgcttctgtgtttcggaggaatgtaccacttcatgtctggtgggaacaatttggctgttcttttctttgcgctctccggttgtgctaggtctaatggggtgctgaatgctggctatctctgctttcagactatgcatcgcgcttatcatgctatgtttcaagaaaagcgtgttactttggctttgcagattgttattgctggagctttacgtactgcatgtatttttgctccatttgtagctttccaggcttatggctactacaatatgtgtgttggacgttctcctgatgaaataaggccatggtgcaaggcaagaataccattactttacaattacatccaaagtcattattggggtgtaggtttcttgagatattttcagctgaaacagttgcctaactttcttcttgcttccccaatactgtctctggcactttgctcagttgtccattatgctaagtcaaggcctcaaaactttctctcactgggttttttagctcctatggaagaaaagagccgtggagttgtgtttttattagatgaactctcaaggtccaaagaagcccgaagtgtgaagaaatcctctgttagggtagaagcagaacattccaatcttaggagaagaaagaatgtgagcaagggagatgctgctaatgttcacctagaatctgagccagcagcaatttggccaggatacttgtctgcttctgttcttccatttgtgttacacttgggattcatggcatgcactgctttcttcatcatgcatgtacaggtttcaactcgtttcttgtctgccagccctccactttattggtttgcttcatatataatggcatatcctggaaaatactctagatggggatacgtgatgtgggcatactctatagcatatatttttcttggcagtttgctgttttcaaacttctatccttttacttaacgagaagaaaggtagatggttcttgaaagctgttggtcttcttattccatgcaatgcacaaaggcataactatccaccctgaagcgttgctgctgaatttcagatttctgctggttgctgtttgatctttacacgcctgagtagtggagaaaatgcccccttccctccctcaaattagcaatttttttttacgttggtcaaccgggattcttatcatctagatgagtaaactaatagaaatccttttcctttgttgtaattttcatttttgtct

SEQ ID NO: 20926 - protein, 500 aa, Glycine max
SKMVETLPHHTPPPPNHHQVLVLKSAICSRLLLVTLIILFRTLVSPYDTSASLNPPCLSTPNPNSTTHPSPLENGVVWDSVYFLRIAQCGYEYEQTFAFLPLLPLSLSLSSHTLFAFLSPFLNQRPLLALSAYVINNMAFVLAALYFYKLSLTVLKDPQIALRATVFFCFNPASIFYSSIYSESLYALLCFGGMYHFMSGGNNLAVLFFALSGCARSNGVLNAGYLCFQTMHRAYHAMFQEKRVTLALQIVIAGALRTACIFAPFVAFQAYGYYNMCVGRSPDEIRPWCKARIPLLYNYIQSHYWGVGFLRYFQLKQLPNFLLASPILSLALCSVVHYAKSRPQNFLSLGFLAPMEEKSRGVVFLLDELSRSKEARSVKKSSVRVEAEHSNLRRRKNVSKGDAANVHLESEPAAIWPGYLSASVLPFVLHLGFMACTAFFIMHVQVSTRFLSASPPLYWFASYIMAYPGKYSRWGYVMWAYSIAYIFLGSLLFSNFYPFT

SEQ ID NO: 20927 - protein, 498 aa, Glycine max
MVETLPHHTPPPPNHHQVLVLKSAICSRLLLVTLIILFRTLVSPYDTSASLNPPCLSTPNPNSTTHPSPLENGVVWDSVYFLRIAQCGYEYEQTFAFLPLLPLSLSLSSHTLFAFLSPFLNQRPLLALSAYVINNMAFVLAALYFYKLSLTVLKDPQIALRATVFFCFNPASIFYSSIYSESLYALLCFGGMYHFMSGGNNLAVLFFALSGCARSNGVLNAGYLCFQTMHRAYHAMFQEKRVTLALQIVIAGALRTACIFAPFVAFQAYGYYNMCVGRSPDEIRPWCKARIPLLYNYIQSHYWGVGFLRYFQLKQLPNFLLASPILSLALCSVVHYAKSRPQNFLSLGFLAPMEEKSRGVVFLLDELSRSKEARSVKKSSVRVEAEHSNLRRRKNVSKGDAANVHLESEPAAIWPGYLSASVLPFVLHLGFMACTAFFIMHVQVSTRFLSASPPLYWFASYIMAYPGKYSRWGYVMWAYSIAYIFLGSLLFSNFYPFT

SEQ ID NO: 20928 - protein, 363 aa, Glycine max
MAFVLAALYFYKLSLTVLKDPQIALRATVFFCFNPASIFYSSIYSESLYALLCFGGMYHFMSGGNNLAVLFFALSGCARSNGVLNAGYLCFQTMHRAYHAMFQEKRVTLALQIVIAGALRTACIFAPFVAFQAYGYYNMCVGRSPDEIRPWCKARIPLLYNYIQSHYWGVGFLRYFQLKQLPNFLLASPILSLALCSVVHYAKSRPQNFLSLGFLAPMEEKSRGVVFLLDELSRSKEARSVKKSSVRVEAEHSNLRRRKNVSKGDAANVHLESEPAAIWPGYLSASVLPFVLHLGFMACTAFFIMHVQVSTRFLSASPPLYWFASYIMAYPGKYSRWGYVMWAYSIAYIFLGSLLFSNFYPFT

SEQ ID NO: 20929 - DNA, 1534 bp, Glycine max
gaccgaaccttacctgggatatttaggaatcgtcgaatctctctgtatggaaaaccaacaacttcgtgaagtttttaattgaggtgtcaatttgtggttcgggggacaagaaaaatagaaaaacacaagttgtgagagactaaatccaacaagaacaacctcgttacattcacaacactatgcaagcactgtgtccttcattcccagattgcagcactcttcgagtgcccagattctcaatcagtgccactcctccaaattttgcatcttttctgagcccctccaaggctggaatcaaattgagttgtgggattcacaaaccagtttggaggagtaggtgtgatggtttaagggtacagtgtgcagcctccaatggagaaaatgatgatgatgatgggttttacatcagaaggtgtgttgagcttgcaaggaaggctgttgggttcaccagccccaatccattggtggggtgtgttattgtaaaggatggcaaagttgttggtgaaggcttccaccctaaagcaggccaacctcatgctgaggactccaccttgcactgaagctctaattaaagctaaagtgaaaaaggttgttgtcgggatggtggatccaaatcccatagttgccttcaaaggggtggaaagattgagagatgcgggaattgaagttattgtgggtgtagaggaagagctatgcaagagcctcaatgagccctatattcatcgcatgttgactggaaagcctttccttactttgagatattctctttctgtcaatggaaactttttggacttacttgggaatggagttacagactgtggtggataccactcaaggttattacaagaatatgatgcagtggtaatctcttcttccttattcagtgaaaatttgtcagttcctgcatctcaagaacctggagccaaccaaccaattcggattataatacataaagatcctggttcttcaaaacaaattcaactagccatcaatggtgttactggcaaagtaataatctttacagacaataaaacagtaacagctcctgaagtggctcaacaaggaattgaaattgtagttctggatcaaataaatctggatgtgatcttggattattgtaattgtcaaggattgtgcagtgttctgttagatattagagggagttttggtgagtttgaagagcttgttaaggaaggtatcaagaagaactatattaataaatttgtcacagaaattttgccagtttgggacggattggctgagccagatcctctgcagacattgaagagctcagagcaaggactaaaagtggtcaatttgaagtccatggcctcagatcagagtgttgtgattgagggatattttaaactttagtaaatggggtcatgattgcccacaaactcccttttaccattgtttcagtgtcatggattttgccagtgattatttgctgtaggctaaatttacaaagcaattcttgtattttgctggtggaaacttgaggatattttcaataacaatctttattttcatt

SEQ ID NO: 20930 - protein, 295 aa, Glycine max
MAKLLVKASTLKQANLMLRTPPCTEALIKAKVKKVVVGMVDPNPIVAFKGVERLRDAGIEVIVGVEEELCKSLNEPYIHRMLTGKPFLTLRYSLSVNGNFLDLLGNGVTDCGGYHSRLLQEYDAVVISSSLFSENLSVPASQEPGANQPIRIIIHKDPGSSKQIQLAINGVTGKVIIFTDNKTVTAPEVAQQGIEIVVLDQINLDVILDYCNCQGLCSVLLDIRGSFGEFEELVKEGIKKNYINKFVTEILPVWDGLAEPDPLQTLKSSEQGLKVVNLKSMASDQSVVIEGYFKL

SEQ ID NO: 20931 - protein, 279 aa, Glycine max
MLRTPPCTEALIKAKVKKVVVGMVDPNPIVAFKGVERLRDAGIEVIVGVEEELCKSLNEPYIHRMLTGKPFLTLRYSLSVNGNFLDLLGNGVTDCGGYHSRLLQEYDAVVISSSLFSENLSVPASQEPGANQPIRIIIHKDPGSSKQIQLAINGVTGKVIIFTDNKTVTAPEVAQQGIEIVVLDQINLDVILDYCNCQGLCSVLLDIRGSFGEFEELVKEGIKKNYINKFVTEILPVWDGLAEPDPLQTLKSSEQGLKVVNLKSMASDQSVVIEGYFKL

SEQ ID NO: 20932 - protein, 257 aa, Glycine max
MVDPNPIVAFKGVERLRDAGIEVIVGVEEELCKSLNEPYIHRMLTGKPFLTLRYSLSVNGNFLDLLGNGVTDCGGYHSRLLQEYDAVVISSSLFSENLSVPASQEPGANQPIRIIIHKDPGSSKQIQLAINGVTGKVIIFTDNKTVTAPEVAQQGIEIVVLDQINLDVILDYCNCQGLCSVLLDIRGSFGEFEELVKEGIKKNYINKFVTEILPVWDGLAEPDPLQTLKSSEQGLKVVNLKSMASDQSVVIEGYFKL

SEQ ID NO: 20933 - DNA, 1320 bp, Glycine max
atgcaaaaccactgctcagaaagccaacacaagtactagagattaataatgtgtttgcagcagacactattttgtctttatccgacatggccattgaagaaattttggatgatgtacggttggaatgtgcaagatttgggactattaaatcaattaatgtagtcaagcatagcagtggcgagaatttagcaaccaaattagaagaatgcaaagtcataaacaaagtggatgctaaagaagtttctcaagacacaaactgtattactaataatacagaatctagtttttctgacaaggctacttaccccgactttgaaggaacaaatgggatggaaatccatgataacaatgaaatggaagaagttaaagttgacgagggtagctgtgtttatgttgataaaaatgctgaagtttttgactataaatcatgtagagaacacgtggatgattcagcagtagaagatgtgggggataagggcataccttgtagtatcattcaagaatgtcctgatcaacaagatacacccaatgatgggccagaattttatgataagatggttgctaacgatattgatgtgaatattgaaaataatatggaatctaaagacacagtttgtgcatttcaggaaggcttttctgaatgggatatcagtgcagaattggttagtccccaaaagagcattgacacggaagaggatatttatggtcatgtatttaaaccaggttctgttcttgttgagtatggaagagctgaagcatgttgttcggcagcacatagtttgcacggacgattctttgatggcagaattgtgacggtgggatatgttgctctcagcctatacagatcaagatttacaaaatgagcatttcaaagcagcaactcgtggttatatgatgaaacaccaaattatatttttgcatgattgtggaagaatagattaatcaatctgattggttatgccagcctgcttcctggatagctttttaactttcagatttacacttctgatgtttagtatttcaacatttggagtgggtaaaagcttaactgagcaatgtcgatttgaggaaaatgcagtatagcacacatcaagtttgtaactgcagactatctgatgatttgttatgcaaatcgggcatatgatttttatttttttattttgtacgtttaaatgtggttacatttcgagctggtggtcttatgctatttggcaatattttgtgtacatggttatgttgcgttacaaactgattattgtatcgtagttatttttagatgttggttacagggccatacttttcataattattttttttgac

SEQ ID NO: 20934 - protein, 286 aa, Glycine max
AKPLLRKPTQVLEINNVFAADTILSLSDMAIEEILDDVRLECARFGTIKSINVVKHSSGENLATKLEECKVINKVDAKEVSQDTNCITNNTESSFSDKATYPDFEGTNGMEIHDNNEMEEVKVDEGSCVYVDKNAEVFDYKSCREHVDDSAVEDVGDKGIPCSIIQECPDQQDTPNDGPEFYDKMVANDIDVNIENNMESKDTVCAFQEGFSEWDISAELVSPQKSIDTEEDIYGHVFKPGSVLVEYGRAEACCSAAHSLHGRFFDGRIVTVGYVALSLYRSRFTK

SEQ ID NO: 20935 - protein, 258 aa, Glycine max
MAIEEILDDVRLECARFGTIKSINVVKHSSGENLATKLEECKVINKVDAKEVSQDTNCITNNTESSFSDKATYPDFEGTNGMEIHDNNEMEEVKVDEGSCVYVDKNAEVFDYKSCREHVDDSAVEDVGDKGIPCSIIQECPDQQDTPNDGPEFYDKMVANDIDVNIENNMESKDTVCAFQEGFSEWDISAELVSPQKSIDTEEDIYGHVFKPGSVLVEYGRAEACCSAAHSLHGRFFDGRIVTVGYVALSLYRSRFTK

SEQ ID NO: 20936 - protein, 177 aa, Glycine max
MEIHDNNEMEEVKVDEGSCVYVDKNAEVFDYKSCREHVDDSAVEDVGDKGIPCSIIQECPDQQDTPNDGPEFYDKMVANDIDVNIENNMESKDTVCAFQEGFSEWDISAELVSPQKSIDTEEDIYGHVFKPGSVLVEYGRAEACCSAAHSLHGRFFDGRIVTVGYVALSLYRSRFTK

SEQ ID NO: 20937 - DNA, 2188 bp, Glycine max
atgagtgagtgaactttggataagtaagtgttgtgtgaagattttgtatgagtacttgagcttctttgccttgtcagcttttgatttttgatgttgtggtgtggcagtggaagtcatactaaaaaaggtgattcttttgcagtggcaagcatggcaagaggaagagcagatgtgaactccagaaaaaaattggtcacagctgtgttggttttggtgattgttggtggttttttctatttctattctcagaatagtgattcatcttctgttgtgtatggtgataaatctttgagccactttggtttgggaggggacaaagatgatggtgaatcttcctccacagttgttggaggagagggcagtgttgtaccaaagagcattccagtctgtgatgatcgattatccgagctgattccttgtctggacagaaatctcatataccaaacaagattgaagcttgatttatctttgatggagcactatgagagacactgcccaacacctgataggagatacaattgtttaattcctcctcctccagggtacaaggttcctatcaagtggcccaaaagcagagaccaggtgtggaaggcaaatatacctcatacccatctagcaactgaaaaatctgaccagaactggatggttgtgaaaggtgaaacaatagtgtttcctggtggaggaacccacttccattatggtgctggtaaatacattgcttcaattgctaatatgcttaattttccaaacaatgatataaacaatgggggaagagtcaggtctgttcttgatgttggctgtggggttgctagctttggaggatatcttatttcctctaatgtgatagcaatgtcattggcaccaaatgatgttcatcaaaatcaaatccagtttgccttagagaggggaattccagcatatcttggtgtcttggggacccaaagactcccttatccaagtagatcattcgaacttgctcattgctctcgctgtagaatcgattggcttcagagagatggtatacttctgcttgagctggataggttactgaggccaggaggttatttcgcgtactcatctcctgaagcctatgcacaggatgaagaggataggaggatatggcgagaaatgagcactcttgtggagaggatgtgctggaaaatagcttctaagaaggatcagactgttatttgggtcaagcctctcactaatagctgctacttaaagagattgcctggtactaagcctccactctgcaggtctgatgatgatcctgatgctgtttggggagttaaaatgaaagtttgcatctcacgttattcagatcaaatgcacaaagcaaaaggaagtgatttggctccttggcctgctcgattgactactccacctcctcgtctggcagaaattcactattctactgaaatgtttgagaaggacatggaagtttggaaacaacgagttcgtaattactggagcaagctagccagtaagattaagccagacacaattcggaacgtgatggatatgaaggcaaacttgggttcatttgcagcagctttgaaggacaaagatgtttgggttatgaatgtagtgccagaaaatgaacaaaaaactctcaagattatatacgacagaggacttataggaacagttcacaactggtgtgaagctttttcaacctaccctcgaacgtatgatctactccatgcatggactgtgttttctgatattattaagaaagaatgcagtccagaggatttattaattgagatggatagaatcctaaggccaaagggtttcatcattgtccatgataagcgttcagtggtggagtatataaagaaatacttgccagcattacactgggaggctgtgaccatatatgatgtagatgatgatgatacagtgattataattcaaaagaaaatgtggctcacaagtcaaagcatcaaggtctctgaatagtgtcataatattcacttgtataagttaccagtgctactaggtgtataagtgtattatgtagctctattcctaaggcctaagctttcagtgtagctctcttcactatagacgcaagtcacagtgaaagctcacccaaatcgtctttatctttttttgcatttattgaattttgtacgcttcaacatttatatccactctgaagaaatattctaatttaaaaatt

SEQ ID NO: 20938 - protein, 624 aa, Glycine max
MLWCGSGSHTKKGDSFAVASMARGRADVNSRKKLVTAVLVLVIVGGFFYFYSQNSDSSSVVYGDKSLSHFGLGGDKDDGESSSTVVGGEGSVVPKSIPVCDDRLSELIPCLDRNLIYQTRLKLDLSLMEHYERHCPTPDRRYNCLIPPPPGYKVPIKWPKSRDQVWKANIPHTHLATEKSDQNWMVVKGETIVFPGGGTHFHYGAGKYIASIANMLNFPNNDINNGGRVRSVLDVGCGVASFGGYLISSNVIAMSLAPNDVHQNQIQFALERGIPAYLGVLGTQRLPYPSRSFELAHCSRCRIDWLQRDGILLLELDRLLRPGGYFAYSSPEAYAQDEEDRRIWREMSTLVERMCWKIASKKDQTVIWVKPLTNSCYLKRLPGTKPPLCRSDDDPDAVWGVKMKVCISRYSDQMHKAKGSDLAPWPARLTTPPPRLAEIHYSTEMFEKDMEVWKQRVRNYWSKLASKIKPDTIRNVMDMKANLGSFAAALKDKDVWVMNVVPENEQKTLKIIYDRGLIGTVHNWCEAFSTYPRTYDLLHAWTVFSDIIKKECSPEDLLIEMDRILRPKGFIIVHDKRSVVEYIKKYLPALHWEAVTIYDVDDDDTVIIIQKKMWLTSQSIKVSE

SEQ ID NO: 20939 - protein, 604 aa, Glycine max
MARGRADVNSRKKLVTAVLVLVIVGGFFYFYSQNSDSSSVVYGDKSLSHFGLGGDKDDGESSSTVVGGEGSVVPKSIPVCDDRLSELIPCLDRNLIYQTRLKLDLSLMEHYERHCPTPDRRYNCLIPPPPGYKVPIKWPKSRDQVWKANIPHTHLATEKSDQNWMVVKGETIVFPGGGTHFHYGAGKYIASIANMLNFPNNDINNGGRVRSVLDVGCGVASFGGYLISSNVIAMSLAPNDVHQNQIQFALERGIPAYLGVLGTQRLPYPSRSFELAHCSRCRIDWLQRDGILLLELDRLLRPGGYFAYSSPEAYAQDEEDRRIWREMSTLVERMCWKIASKKDQTVIWVKPLTNSCYLKRLPGTKPPLCRSDDDPDAVWGVKMKVCISRYSDQMHKAKGSDLAPWPARLTTPPPRLAEIHYSTEMFEKDMEVWKQRVRNYWSKLASKIKPDTIRNVMDMKANLGSFAAALKDKDVWVMNVVPENEQKTLKIIYDRGLIGTVHNWCEAFSTYPRTYDLLHAWTVFSDIIKKECSPEDLLIEMDRILRPKGFIIVHDKRSVVEYIKKYLPALHWEAVTIYDVDDDDTVIIIQKKMWLTSQSIKVSE

SEQ ID NO: 20940 - protein, 497 aa, Glycine max
MEHYERHCPTPDRRYNCLIPPPPGYKVPIKWPKSRDQVWKANIPHTHLATEKSDQNWMVVKGETIVFPGGGTHFHYGAGKYIASIANMLNFPNNDINNGGRVRSVLDVGCGVASFGGYLISSNVIAMSLAPNDVHQNQIQFALERGIPAYLGVLGTQRLPYPSRSFELAHCSRCRIDWLQRDGILLLELDRLLRPGGYFAYSSPEAYAQDEEDRRIWREMSTLVERMCWKIASKKDQTVIWVKPLTNSCYLKRLPGTKPPLCRSDDDPDAVWGVKMKVCISRYSDQMHKAKGSDLAPWPARLTTPPPRLAEIHYSTEMFEKDMEVWKQRVRNYWSKLASKIKPDTIRNVMDMKANLGSFAAALKDKDVWVMNVVPENEQKTLKIIYDRGLIGTVHNWCEAFSTYPRTYDLLHAWTVFSDIIKKECSPEDLLIEMDRILRPKGFIIVHDKRSVVEYIKKYLPALHWEAVTIYDVDDDDTVIIIQKKMWLTSQSIKVSE

SEQ ID NO: 20941 - DNA, 726 bp, Glycine max
actttcactttcatagtttctttccttctctctctctggagctagcgcgagtgaccggagcggcgaagatagagtcagatcggaagcggaagaaggcgtcgacctcggcggcggagaaggagaaccggaataagcataagaagtcgaagatgtcgtcgtcgtcgtcgaagggtggtggcggtattgaggttagggcttcgcacatattgataaagcacgaaggttctagaaggaaggcctcgtggaaggatcctgaaggtcgcatcatcaagagcacaaccagagaaaacgcggtttctcagctcaaggccctccgcgacgacatcgtttcgggcaaggcctccttcgaggacatcgcctctcgcttctccgattgcagctccgccaagcgcgggggtgatctcggtccttttggtcgtggccagatgcagaagccttttgaagaagcaacttttgctcttaaagttggtgaaattagtgacattgtggatactgacagtggagtccacattattaagagaacaaaatgagattattacacggagtaatctcctaataaggagagacattaacatctgtagaatatttccaggattcttgctactcaagatctgttgatatatgttttagacatggcggtgtcttgtttttggatgatatattgtttttgtgacaattaaaaacatatgcttgtaattttgaaagacaattataaggtttggattc

SEQ ID NO: 20942 - protein, 175 aa, Glycine max
FHFHSFFPSLSLELARVTGAAKIESDRKRKKASTSAAEKENRNKHKKSKMSSSSSKGGGGIEVRASHILIKHEGSRRKASWKDPEGRIIKSTTRENAVSQLKALRDDIVSGKASFEDIASRFSDCSSAKRGGDLGPFGRGQMQKPFEEATFALKVGEISDIVDTDSGVHIIKRTK

SEQ ID NO: 20943 - protein, 126 aa, Glycine max
MSSSSSKGGGGIEVRASHILIKHEGSRRKASWKDPEGRIIKSTTRENAVSQLKALRDDIVSGKASFEDIASRFSDCSSAKRGGDLGPFGRGQMQKPFEEATFALKVGEISDIVDTDSGVHIIKRTK

SEQ ID NO: 20944 - DNA, 1752 bp, Glycine max
gaattttcttggacataacacaccttggatgtcccaaaccccccttcgagggccatggattgcttctccaactcctgtaactgacaatagcccccagatttctgcatcacctgcctcagatacaattaagctaggatcagtcaaaggatctctgcctccttcctctggcataaagaatgttacttctggtgtctctacttccagtacaggtttgcaaagtatctttacaggaactgcctctctgcttgatgcaaacaacgtgacagtatcacctgctcaacacaattcagatccaaagcccaaaaaaaagaaaaaaagttgtggtctctgaggatctaggccagagggctttgcaatcactggctcctggtgttggtagccatacatctactcctgttgcagttgtggcccctgttgggaatgtgccaataactactattgaaaaatcagttttgtctgtatctcctcttgctgatcaatccaaaaatgatcggaatgttgagaagaggattatgtcagatgagtctcttatgaaagttaaagaggctagggtacatgcagaggaagcttctgctctctctgctgctgcagtgaatcatagcctagagttatggaatcagttggataaacataaaaattctgggttgatgcctgatattgaggctaaactagcttctgcagcagttgcagttgcagctgctgcaaccattgcaaaggcagcagctgcagctgccaatgttgcctcaaatgctgctcttcaagcaaaactaatggctgatgaagcattgctttcatctggttatgataattccagccaaagtaatcaaatttctctttctgaggggaccaataacttgggaaaagctacccctgcttccatcttgaaaggtgctaatggaatcaatagtcctggttctatcattgttgctgccaaggaagctgttaaaaggagagtggaagctgcttcagctgccaccaaaagagctgaaaatatggatgccattgtgagggctgctgagctggcagcagaagctgtatctcaagcaggaaaaattgtaactatgggtgatcctttgcctataagtcagttggtagaagctggcccagagggatgtttgaaagcaacccgagagtcttctcagcaagttggattattcaaagacattaacagagatatggtgaacaataatgtgagagatattcctgaaacttcttatacacataacagagacattttatctggtggcatttctgctcctattaagatcaatgaaaagaattcaagaggagcaaagggacacaaggttgtttctgatttagtcaagcctattgacgtggttcctggatctgagcctgaaattcaggctcctccttttactgttagtaatggatctgaaaatctggtggaaagtagcatcaaggagggcttactcgtagaggttttcaaagatgaggaagggttcaaagctgcctggttctcagccaatattttgactttgaaggataataaagcttatgtaggctacacttcacttgtagctgctgaaggtgcagggccattaaaagaatgggtttcacttgaatgtgatggagacaaaccccctagaatacgtgctgctcgtcctcttaatactttacaatatgaaggaacaagaaagagacgtagagctgctatgggagattatgcatggtctgttggggatagagttgatgcatggatacaagaaagctggcaggaaggagtcataacag

SEQ ID NO: 20945 - protein, 413 aa, Glycine max
MSDESLMKVKEARVHAEEASALSAAAVNHSLELWNQLDKHKNSGLMPDIEAKLASAAVAVAAAATIAKAAAAAANVASNAALQAKLMADEALLSSGYDNSSQSNQISLSEGTNNLGKATPASILKGANGINSPGSIIVAAKEAVKRRVEAASAATKRAENMDAIVRAAELAAEAVSQAGKIVTMGDPLPISQLVEAGPEGCLKATRESSQQVGLFKDINRDMVNNNVRDIPETSYTHNRDILSGGISAPIKINEKNSRGAKGHKVVSDLVKPIDVVPGSEPEIQAPPFTVSNGSENLVESSIKEGLLVEVFKDEEGFKAAWFSANILTLKDNKAYVGYTSLVAAEGAGPLKEWVSLECDGDKPPRIRAARPLNTLQYEGTRKRRRAAMGDYAWSVGDRVDAWIQESWQEGVIT

SEQ ID NO: 20946 - protein, 407 aa, Glycine max
MKVKEARVHAEEASALSAAAVNHSLELWNQLDKHKNSGLMPDIEAKLASAAVAVAAAATIAKAAAAAANVASNAALQAKLMADEALLSSGYDNSSQSNQISLSEGTNNLGKATPASILKGANGINSPGSIIVAAKEAVKRRVEAASAATKRAENMDAIVRAAELAAEAVSQAGKIVTMGDPLPISQLVEAGPEGCLKATRESSQQVGLFKDINRDMVNNNVRDIPETSYTHNRDILSGGISAPIKINEKNSRGAKGHKVVSDLVKPIDVVPGSEPEIQAPPFTVSNGSENLVESSIKEGLLVEVFKDEEGFKAAWFSANILTLKDNKAYVGYTSLVAAEGAGPLKEWVSLECDGDKPPRIRAARPLNTLQYEGTRKRRRAAMGDYAWSVGDRVDAWIQESWQEGVIT

SEQ ID NO: 20947 - protein, 368 aa, Glycine max
MPDIEAKLASAAVAVAAAATIAKAAAAAANVASNAALQAKLMADEALLSSGYDNSSQSNQISLSEGTNNLGKATPASILKGANGINSPGSIIVAAKEAVKRRVEAASAATKRAENMDAIVRAAELAAEAVSQAGKIVTMGDPLPISQLVEAGPEGCLKATRESSQQVGLFKDINRDMVNNNVRDIPETSYTHNRDILSGGISAPIKINEKNSRGAKGHKVVSDLVKPIDVVPGSEPEIQAPPFTVSNGSENLVESSIKEGLLVEVFKDEEGFKAAWFSANILTLKDNKAYVGYTSLVAAEGAGPLKEWVSLECDGDKPPRIRAARPLNTLQYEGTRKRRRAAMGDYAWSVGDRVDAWIQESWQEGVIT

SEQ ID NO: 20948 - DNA, 1366 bp, Glycine max
aagcacgatcattgcgtggtttaacatctatagaatggaaaaataaacaagaaagcaactaagtgtactagtttaagcagtagaagtggaaagtggttgcagagtagaagtcgagatggccaaccttccaaattcaaagctttatgggaaagagaagatgaaaggagagcaagaattagaagatgaagaaagcttctcgcgtgctatgctgctttgcagctccgttgtggtttccatggcgctgcaatcggcaacggagctgggcgtatttgacgtgttgcaagaagcgggggctaagctctctgcgaaagagatagcatccaagctttcctgcgacaacaaccctgaagcagactcaatgctggatcgccttctagcccttctagcctctcactccattcttaactgttctctcattctcgaccaccaaaacctggggacctttcagaggctctacaccatcactcccgtcgccagattctttgctcgcaattctgatggggtttccttgggacccttgatggccttgcttcaagacaagatcttcctacatagctggtcggagctgaaagattcaattcgggaagggggtattccattcaacagggtttatggcactcatgcttttgagtatccaaggttggacgcaaggttcaatcaagtttttaacacagcaatgatcaatcacaccactatagtgatgaagaaggttctggagtgctacaaaggttttgagaacataaaaatgcttgtggatgttggtggtggtcttgggatcaacatcaacttgatcacttccaaataccctcatatccagggtatcaattttgacttgcctcatgtcctagaacatgctccttcctatcctggagtggaacacgttggcggagatatgtttgaaaatgtgcctaaaggagacgccatctttatgaagtggatacttcatgattggagtgatgaatactgtctgaagttgttgaagaactgctatgacgcaattcctgatgatggaaaggtgatagttgtggaggcagttcttccaattataccagagacgtcaaatgctgcttggaaggccgtttcccaaacggatgttctgatgatgactcaaaacccgggaggcaaagagcgatctgatcaagaattcatggatttggcaactgcagctggatttagtggcatcagatatgaatgctatgttcgaaccttttggatcatggagttcttcaagtaaacaaccatatactactctgcatgcccctttatgcttttcgtcatttttaattaacaaaacacgctcaggtgtgtattatcataagtttgtttttttttaaataattatctgatgaaatctaattcagtttac

SEQ ID NO: 20949 - protein, 372 aa, Glycine max
MANLPNSKLYGKEKMKGEQELEDEESFSRAMLLCSSVVVSMALQSATELGVFDVLQEAGAKLSAKEIASKLSCDNNPEADSMLDRLLALLASHSILNCSLILDHQNLGTFQRLYTITPVARFFARNSDGVSLGPLMALLQDKIFLHSWSELKDSIREGGIPFNRVYGTHAFEYPRLDARFNQVFNTAMINHTTIVMKKVLECYKGFENIKMLVDVGGGLGININLITSKYPHIQGINFDLPHVLEHAPSYPGVEHVGGDMFENVPKGDAIFMKWILHDWSDEYCLKLLKNCYDAIPDDGKVIVVEAVLPIIPETSNAAWKAVSQTDVLMMTQNPGGKERSDQEFMDLATAAGFSGIRYECYVRTFWIMEFFK

SEQ ID NO: 20950 - protein, 358 aa, Glycine max
MKGEQELEDEESFSRAMLLCSSVVVSMALQSATELGVFDVLQEAGAKLSAKEIASKLSCDNNPEADSMLDRLLALLASHSILNCSLILDHQNLGTFQRLYTITPVARFFARNSDGVSLGPLMALLQDKIFLHSWSELKDSIREGGIPFNRVYGTHAFEYPRLDARFNQVFNTAMINHTTIVMKKVLECYKGFENIKMLVDVGGGLGININLITSKYPHIQGINFDLPHVLEHAPSYPGVEHVGGDMFENVPKGDAIFMKWILHDWSDEYCLKLLKNCYDAIPDDGKVIVVEAVLPIIPETSNAAWKAVSQTDVLMMTQNPGGKERSDQEFMDLATAAGFSGIRYECYVRTFWIMEFFK

SEQ ID NO: 20951 - protein, 342 aa, Glycine max
MLLCSSVVVSMALQSATELGVFDVLQEAGAKLSAKEIASKLSCDNNPEADSMLDRLLALLASHSILNCSLILDHQNLGTFQRLYTITPVARFFARNSDGVSLGPLMALLQDKIFLHSWSELKDSIREGGIPFNRVYGTHAFEYPRLDARFNQVFNTAMINHTTIVMKKVLECYKGFENIKMLVDVGGGLGININLITSKYPHIQGINFDLPHVLEHAPSYPGVEHVGGDMFENVPKGDAIFMKWILHDWSDEYCLKLLKNCYDAIPDDGKVIVVEAVLPIIPETSNAAWKAVSQTDVLMMTQNPGGKERSDQEFMDLATAAGFSGIRYECYVRTFWIMEFFK

SEQ ID NO: 20952 - DNA, 1261 bp, Glycine max
gaataaaaaagaccgggaaaggagggaagaaaagcaaactcgtcactttaagacaaaaaataacttccttaataactaagaaggacaatctcatttcatttgttagttttcacatcctccaacataagtttctgagtttgaaacacagcataaacaaagcaaaatatgaatgccactctccctttttaaatggaaacaaagctgaagacaccacacgagcaatcgatagataacaaactaaagatagagtgagagtgagagacatgtataggttcagcaacacagtaatcgggttcttgaacttgttcacacttttagcatccataccaataattggagcaggtctatggatggcaaggagcagcacaacctgtgagaattttctccaaacccctcttttggttataggattcgttgtgctagtggtgtcactagcaggcttcattggtgcatgttttcatgtggcatgtgcactatggttgtacttggtggtcatgttgttcctcatagcagcactcatgggcttcacaatatttggttttggtgtgactagcaagggcggtggtgtggaagtgcctggaagggtttacaaggagtatcgtcttcaagattactcaccatggttgaggaagagaattcaggatcctcgctattggaacactattagaggctgtattttggggtctaaaacttgtgaaaagcttgcctcttggacccctcttgattatatgcaaagggatatgtctccaatacagtctggatgttgtaagccaccaactgcttgcacttacaacgtggcaacaacaatgatgactcaagaccctgattgctacaggtggaacaatgcccctaatttgctatgctatgagtgtgattcttgcaaagctggtgtgcttgaagacataagagggaattggcacaagctctcggttctcacagtcaccatgcttgtgcttctcatagggatttattccattgggtgctgtgctttcagaaacacaagaagagctgaaacggattatccctatggtgaaaaccgcatgaccaaagtccgacctagatgggattaccattggtggaggtggttacatgacaggagagaacagctttattagctgagaagctctaactacaatccatggtatagactagagaaggcatcaaggcctttccattccctgaatggctgcttttttgtataaagcataatttcgctttatctcaaatatcgtaacacgccgttactttttctcattactag

SEQ ID NO: 20953 - protein, 283 aa, Glycine max; identical to SEQ ID NO: 12001

SEQ ID NO: 20954 - protein, 254 aa, Glycine max; identical to SEQ ID NO: 12002

SEQ ID NO: 20955 - protein, 206 aa, Glycine max; identical to SEQ ID NO: 12003

SEQ ID NO: 20956 - DNA, 2029 bp, Glycine max
ggttttcaatttggggaaataaaaatagggggaaatattctggagagagtgtgtagaaaatatggttgtcgatgatatgacgctgtgcatcatcgtcggctatggaggttcctcttcttctcgtttctccgatgcttatcccaaaaggggtttgatggaggggagatatagtggggattgatatgatgaaggtgtttataaggttgttttgttgaattgtgtttttgggatggcaatattgtacgaaccagcaataaaactcatccaccagatgagctagcatgggcgattcttgtcttacttctatgtcaatggagaatcaccacccctccacgctcttgtcaatggactcaagtgcatcttctcacgaggaactggatttggagatgaatcgccaaatcatactcactcgtccgcccgatattaacctgcccctctccgccgagcgcagcccgccgccacagccgtggaattctgagccctgtgatattctggatgttggtcttggtactcaaggctacgagactgagagttttcttaatctgcccaaagctggtaggaagtgcgcgaagcgtgttgatagcatatggggtgcttggtttttcttcagtttttactttaaacctgctttgaacgataagtccaaggccaagattgtcagggacagcaatggtgtctcagggttcgataagtctgatctgaagctggatgttttcatggttcagcacgacatggaaaacatgtacatgtgggttttcaaggagaggccggagaacgcacttggtaagatgcagctgaggagttacatgaatgggcattctcgccaaggggagcgcccgtttccgttcagtgttgacaagggttttgctcggtcccacaggatgcagcgaaagcattatagaggactatcaaaccctcagtgcgtgcatggtgttgaggttgtttttgcacccagtctgatgaccctggatgaggatgatcgaaaaaggtggatagaactcactggccgggatttgaatttcacaatcccacctgaagcaagtgatttcagttcatggagaaatcttcccaacacggactttgagcttgagagaccacctcccccaatcaagagtggtcctaatgcacacccgaagaagctgcttaatggatccggacttaatggatctggacttcatctatctaaccacagtaatggtgatgggttggacctctctcctgtcagcagcaaaaaaaggaaggactttttccctcatggaaatgaagaagaatgttacttggctgttaatcctccatctgatcgtataccagatatagaaatgcacccaaccgagccacactggttgaatgacttcagcggggtgataaagagtgtttatggacctgttacagctgcaaaaactatttatgaggatgaacaaggttacttgattattatcagtctgccctttgtagatcttccaagtgtgaaagtttcatggaggaacactctgactcacggtatcataaaggtttcttgtatgagcacatctcggaagcctctcatcaagagacatgataggacattcaagcttacagatccatcgtcagagcactgcccccctggagagttcgtccgagaaatccctctttcaactcgaattcctgaagatgccaacatagaagcatactacgatgggccaggatcagtgcttgagatcctggtgccaaaacatcgcgtgggaccagaagagcatgaagtccgggtttgcctccgccctcatctgggagggaatgatctcaagttaacttgagataggcacttaaaaaaatttgttagggattccggtatggttcgtatgtcattgtttttctaactttgtaccatacagtgttatttgcaatagaattgtgtctcttatgtttgtctctagcaattttagctcactgactgccctggttcttttgttccggtgcatctgtattatgcttttgattgtaagcagtattgaacagctagttctcataatttataagaaattaccaaatc

SEQ ID NO: 20957 - protein, 503 aa, Glycine max
MGDSCLTSMSMENHHPSTLLSMDSSASSHEELDLEMNRQIILTRPPDINLPLSAERSPPPQPWNSEPCDILDVGLGTQGYETESFLNLPKAGRKCAKRVDSIWGAWFFFSFYFKPALNDKSKAKIVRDSNGVSGFDKSDLKLDVFMVQHDMENMYMWVFKERPENALGKMQLRSYMNGHSRQGERPFPFSVDKGFARSHRMQRKHYRGLSNPQCVHGVEVVFAPSLMTLDEDDRKRWIELTGRDLNFTIPPEASDFSSWRNLPNTDFELERPPPPIKSGPNAHPKKLLNGSGLNGSGLHLSNHSNGDGLDLSPVSSKKRKDFFPHGNEEECYLAVNPPSDRIPDIEMHPTEPHWLNDFSGVIKSVYGPVTAAKTIYEDEQGYLIIISLPFVDLPSVKVSWRNTLTHGIIKVSCMSTSRKPLIKRHDRTFKLTDPSSEHCPPGEFVREIPLSTRIPEDANIEAYYDGPGSVLEILVPKHRVGPEEHEVRVCLRPHLGGNDLKLT

SEQ ID NO: 20958 - protein, 495 aa, Glycine max
MSMENHHPSTLLSMDSSASSHEELDLEMNRQIILTRPPDINLPLSAERSPPPQPWNSEPCDILDVGLGTQGYETESFLNLPKAGRKCAKRVDSIWGAWFFFSFYFKPALNDKSKAKIVRDSNGVSGFDKSDLKLDVFMVQHDMENMYMWVFKERPENALGKMQLRSYMNGHSRQGERPFPFSVDKGFARSHRMQRKHYRGLSNPQCVHGVEVVFAPSLMTLDEDDRKRWIELTGRDLNFTIPPEASDFSSWRNLPNTDFELERPPPPIKSGPNAHPKKLLNGSGLNGSGLHLSNHSNGDGLDLSPVSSKKRKDFFPHGNEEECYLAVNPPSDRIPDIEMHPTEPHWLNDFSGVIKSVYGPVTAAKTIYEDEQGYLIIISLPFVDLPSVKVSWRNTLTHGIIKVSCMSTSRKPLIKRHDRTFKLTDPSSEHCPPGEFVREIPLSTRIPEDANIEAYYDGPGSVLEILVPKHRVGPEEHEVRVCLRPHLGGNDLKLT

SEQ ID NO: 20959 - protein, 493 aa, Glycine max
MENHHPSTLLSMDSSASSHEELDLEMNRQIILTRPPDINLPLSAERSPPPQPWNSEPCDILDVGLGTQGYETESFLNLPKAGRKCAKRVDSIWGAWFFFSFYFKPALNDKSKAKIVRDSNGVSGFDKSDLKLDVFMVQHDMENMYMWVFKERPENALGKMQLRSYMNGHSRQGERPFPFSVDKGFARSHRMQRKHYRGLSNPQCVHGVEVVFAPSLMTLDEDDRKRWIELTGRDLNFTIPPEASDFSSWRNLPNTDFELERPPPPIKSGPNAHPKKLLNGSGLNGSGLHLSNHSNGDGLDLSPVSSKKRKDFFPHGNEEECYLAVNPPSDRIPDIEMHPTEPHWLNDFSGVIKSVYGPVTAAKTIYEDEQGYLIIISLPFVDLPSVKVSWRNTLTHGIIKVSCMSTSRKPLIKRHDRTFKLTDPSSEHCPPGEFVREIPLSTRIPEDANIEAYYDGPGSVLEILVPKHRVGPEEHEVRVCLRPHLGGNDLKLT

SEQ ID NO: 20960 - DNA, 1498 bp, Glycine max
atctagtatatatcttacccttagacacaacaaattccacataacaatttcatctagcaatgttaaaaaaccaaccacaaccagattggcctgagcccattgtccgggttcagtccttatccgaaaactgcatagattcaatccctgaaaggtacatcaagccttctactgatagaccatccataagaagttctaattttgatgatgccaatattccaatcatcgaccttggtggtctgtttggtgctgaccaacgtgtctcagactcaattcttaggcaaatctcagaggcttgcaaagagtggggcttcttccaagtcactaaccatggtgttagccctgatttgatggacaaggctagggaaacttggcgtcaattctttcacatgcccatggaggtgaagcagcaatatgccaactcgccaaaaacctatgaagggtacggaagcagacttggaattgagaaaggtgctattcttgattggagtgattactattttcttcactatcttcccttgccactcaaggactataacaaatggcctgcctcgcctccctcttgcaggaaagtgtttgatgagtatgggagagagttagtgaagctatgtgggaggttgatgaaggctttgtcaataaaccttggattagatgaaaaaattcttcaaaatggttttgggggagaagacataggggcatgtctaagagtgaatttttaccctaaatgtccacggccagagttgacgttgggtttgtcatcacactcagaccctggaggaatgactatgttgcttccagatgatcaagttcctggtcttcaagttcgaaaatgtgataattggattaccgtgaagcctgcacgccatgcttttatcgtcaatatcggagaccaaattcaggttctaagcaatgcaatttacaagagtgtggagcacagagtgatagtaaattcagataaagagagagtttctctggcatttttctacaaccccaaaagtgatatacccattgagccaataaaagagctggtaacaccggaaaagccctcactctacccagcaatgaccttcgatgaatacagactcttcattagaatgagaggacctcgaggcaaatctcaagttgaatctttaaagtctcccagatgatcaattctgctcataggcttttattgcttgcattctatgtccatttcaaatagtaagtcactatatatgacgtgtttggtttcacgtctttacagcgtgcgtgcgtgtttagtttcacgtcttggatgtgattttttttacatcttagatgttattttaagaagttaatagttatatatagttttcatgtctgaaatgtgattccttacttctcaagagtttacaagcacgctataccttattggtgtataattaattgtaaatcttgtaactagatcgggatttgtttgcacattgagccacagagtaaggatatgtaagagagattggatatatagatatgatattgtttt

SEQ ID NO: 20961 - protein, 361 aa, Glycine max
MLKNQPQPDWPEPIVRVQSLSENCIDSIPERYIKPSTDRPSIRSSNFDDANIPIIDLGGLFGADQRVSDSILRQISEACKEWGFFQVTNHGVSPDLMDKARETWRQFFHMPMEVKQQYANSPKTYEGYGSRLGIEKGAILDWSDYYFLHYLPLPLKDYNKWPASPPSCRKVFDEYGRELVKLCGRLMKALSINLGLDEKILQNGFGGEDIGACLRVNFYPKCPRPELTLGLSSHSDPGGMTMLLPDDQVPGLQVRKCDNWITVKPARHAFIVNIGDQIQVLSNAIYKSVEHRVIVNSDKERVSLAFFYNPKSDIPIEPIKELVTPEKPSLYPAMTFDEYRLFIRMRGPRGKSQVESLKSPR

SEQ ID NO: 20962 - protein, 265 aa, Glycine max
MDKARETWRQFFHMPMEVKQQYANSPKTYEGYGSRLGIEKGAILDWSDYYFLHYLPLPLKDYNKWPASPPSCRKVFDEYGRELVKLCGRLMKALSINLGLDEKILQNGFGGEDIGACLRVNFYPKCPRPELTLGLSSHSDPGGMTMLLPDDQVPGLQVRKCDNWITVKPARHAFIVNIGDQIQVLSNAIYKSVEHRVIVNSDKERVSLAFFYNPKSDIPIEPIKELVTPEKPSLYPAMTFDEYRLFIRMRGPRGKSQVESLKSPR

SEQ ID NO: 20963 - protein, 252 aa, Glycine max
MPMEVKQQYANSPKTYEGYGSRLGIEKGAILDWSDYYFLHYLPLPLKDYNKWPASPPSCRKVFDEYGRELVKLCGRLMKALSINLGLDEKILQNGFGGEDIGACLRVNFYPKCPRPELTLGLSSHSDPGGMTMLLPDDQVPGLQVRKCDNWITVKPARHAFIVNIGDQIQVLSNAIYKSVEHRVIVNSDKERVSLAFFYNPKSDIPIEPIKELVTPEKPSLYPAMTFDEYRLFIRMRGPRGKSQVESLKSPR

SEQ ID NO: 20964 - DNA, 1504 bp, Glycine max
agaagatgttactgaatttgcagatgaggatgagaattgtgatagtatgcctccgtcagagttattaaatagaaaaaatttgcaaggcaacttggttgttgagaaattagatagcctaatggtgctggcatttttgcaccttgaatcctgtcaaagcagtggccgtttgactgaggtattcgatactctactagcttcatttcagagaaccgtattgaatgcgtacaagtcaaaatttacccagtatgtgatgttctatgcatgtgcactggaccctgaaggatgtggtgtgaaatttgccatggttcttgctgatatgtttggatgtgatgttaatccccctattactaggatgagtgctgctgcttatcttgctagttatttgactcgtgcaaagttcctttcagctgcattggtcactaacatcatacaaagcttggttgattggtgttatgcatattgcaagttacgtgattttgatatgaacccacgagcacatcaagttttttattctgggtgccaggccattatgtatattctgtgttttcgcatgagatctttgatggatattcctaggcttaaattgcagctgcttaatatgcccatggaggcaatcttgaaacataaattgagtcccttgaaggtgtgtttgcctactgtagtagtggaatttcttagacaggcaaaggctgctcaacttttcatggcgtcagagtcatttgtttttgatgatatgcttgagtctgatctttccaaggcttttggcgggattgatagacttgacatgtttttcccatttgatccatgtttgttgaagaaaagtgaaagctcataaggccacattttgttcgctggtcaaaagtcagaactacatatgatgatgatgacaatgacgaactcagtgatagtggcagtgaagtatcagatgatgattttatcgacaggaacacaaaggatatgattgatgatgatatgatggtgagcgttgaaggttttgattttaaccctgacttgaacaaaatgtctataacccccagaaaatcttttaaacatgggtttgagacacagttgaatcaatgtaagcgaatgccagctagaatcagaccatccactagtccggagtctctgtgatacctatctgtttgtgatctcttttacgtaaaataggaaatctgtcgattttgcagtgttcattacaggaactaatcagcatagtggtgtcctaaaaaatagggcattgatattttttgggccgttgtaattttggatgagtcctatacaactacttaaaagtaaagtgtgaaattatagccgttgatttaagtaattctgcacattagagaagcagagacaaattcgtaatgttcatacagtattcattttctactgtgttaaagtgagtaggagcagcaaactctaagattcgttccctgctatattgtaagtataatttatgttttgaggatacgctacatgaaatacagtatttgttgagttggaggac

SEQ ID NO: 20965 - protein, 277 aa, Glycine max
EDVTEFADEDENCDSMPPSELLNRKNLQGNLVVEKLDSLMVLAFLHLESCQSSGRLTEVFDTLLASFQRTVLNAYKSKFTQYVMFYACALDPEGCGVKFAMVLADMFGCDVNPPITRMSAAAYLASYLTRAKFLSAALVTNIIQSLVDWCYAYCKLRDFDMNPRAHQVFYSGCQAIMYILCFRMRSLMDIPRLKLQLLNMPMEAILKHKLSPLKVCLPTVVVEFLRQAKAAQLFMASESFVFDDMLESDLSKAFGGIDRLDMFFPFDPCLLKKSESS

SEQ ID NO: 20966 - protein, 262 aa, Glycine max
MPPSELLNRKNLQGNLVVEKLDSLMVLAFLHLESCQSSGRLTEVFDTLLASFQRTVLNAYKSKFTQYVMFYACALDPEGCGVKFAMVLADMFGCDVNPPITRMSAAAYLASYLTRAKFLSAALVTNIIQSLVDWCYAYCKLRDFDMNPRAHQVFYSGCQAIMYILCFRMRSLMDIPRLKLQLLNMPMEAILKHKLSPLKVCLPTVVVEFLRQAKAAQLFMASESFVFDDMLESDLSKAFGGIDRLDMFFPFDPCLLKKSESS

SEQ ID NO: 20967 - protein, 238 aa, Glycine max
MVLAFLHLESCQSSGRLTEVFDTLLASFQRTVLNAYKSKFTQYVMFYACALDPEGCGVKFAMVLADMFGCDVNPPITRMSAAAYLASYLTRAKFLSAALVTNIIQSLVDWCYAYCKLRDFDMNPRAHQVFYSGCQAIMYILCFRMRSLMDIPRLKLQLLNMPMEAILKHKLSPLKVCLPTVVVEFLRQAKAAQLFMASESFVFDDMLESDLSKAFGGIDRLDMFFPFDPCLLKKSESS

SEQ ID NO: 20968 - DNA, 1430 bp, Glycine max
aggaactgcatatggaagcttagaggcccccaaactaacctttagcgaaagtgtgaggctcagagctggtgttaacaaaatctctcttctaagtgttgcagttgggcttccgaatgttggtccacattttgaaagatggaatgctggtgttctaggcccaattacattaagtggtctcaatgagggtaggagggacttaacttggcagaagtggtcatacaaggttggtcttaaaggtgaagccttgaatcttcattctcttagtggaagttcctctgttgagtggcttcaggggtttttagtttccagaagacagccattgacttggtacaaaactacctttgatgccccagctggagttgcaccgttggctttagacatgggcagcatgggcaaaggtcaagtgtggataaatgggcaaagcctaggccgctactggcctgcttacaaagcatccggttcttgtggttactgtaactatgctggaacttacaatgagaagaaatgtggaagtaactgtggcgaggcttctcaacgatggtatcatgttcctcactcatggctgaagccaagtggaaatttattggttgtgtttgaggaattgggtggggatccgaacgggatctttttggttagaagggatatagatagtgtatgtgctgacatctatgagtggcagccaaatcttgtaagttatgagatgcaagcttctggcaaagtcagaagtcctgtgagaccaaaagcacatttgtcatgtggacctggacaaaaaatatcatcaatcaagtttgctagctttggcactccagtagggtcttgtggaagctaccgcgaaggaagttgtcatgctcacaagtcatatgatgctttcctaaagaattgtgttggccagagctggtgcacagtgacagtgtctcctgaaatttttggaggagatccttgtccaagagtcatgaagaaactctctgtggaggccatttgcacctgatcattttcaacatctgaaaataagtggaataaagtttccatattgatttattctgcaattgaatacatggtgttttgggtcagctaagtttacacttgtagaccaccactggcattaatttggctttaccaaggtgaaattgcaaatgaatacacaccatgtggttgaaagcctgctgggatgattgttgtggttttatgtgtatatatattggtgttgtggttgttatactgaagtggaggagagggtgaaaaagttacctgatgcacattgagacgacatcgattgagtccatgtgcaaaattggtttttgtttgtgtggaagtctctagcttcctgtgatgtaatgttataatattaccttgtagttgtaaggagaaagcaatttggcgctttcttataagaaaacaacccaatgtaataacataaggtttattaattc

SEQ ID NO: 20969 - protein, 328 aa, Glycine max
GTAYGSLEAPKLTFSESVRLRAGVNKISLLSVAVGLPNVGPHFERWNAGVLGPITLSGLNEGRRDLTWQKWSYKVGLKGEALNLHSLSGSSSVEWLQGFLVSRRQPLTWYKTTFDAPAGVAPLALDMGSMGKGQVWINGQSLGRYWPAYKASGSCGYCNYAGTYNEKKCGSNCGEASQRWYHVPHSWLKPSGNLLVVFEELGGDPNGIFLVRRDIDSVCADIYEWQPNLVSYEMQASGKVRSPVRPKAHLSCGPGQKISSIKFASFGTPVGSCGSYREGSCHAHKSYDAFLKNCVGQSWCTVTVSPEIFGGDPCPRVMKKLSVEAICT

SEQ ID NO: 20970 - protein, 202 aa, Glycine max
MGSMGKGQVWINGQSLGRYWPAYKASGSCGYCNYAGTYNEKKCGSNCGEASQRWYHVPHSWLKPSGNLLVVFEELGGDPNGIFLVRRDIDSVCADIYEWQPNLVSYEMQASGKVRSPVRPKAHLSCGPGQKISSIKFASFGTPVGSCGSYREGSCHAHKSYDAFLKNCVGQSWCTVTVSPEIFGGDPCPRVMKKLSVEAICT

SEQ ID NO: 20971 - protein, 199 aa, Glycine max
MGKGQVWINGQSLGRYWPAYKASGSCGYCNYAGTYNEKKCGSNCGEASQRWYHVPHSWLKPSGNLLVVFEELGGDPNGIFLVRRDIDSVCADIYEWQPNLVSYEMQASGKVRSPVRPKAHLSCGPGQKISSIKFASFGTPVGSCGSYREGSCHAHKSYDAFLKNCVGQSWCTVTVSPEIFGGDPCPRVMKKLSVEAICT

SEQ ID NO: 20972 - DNA, 1191 bp, Glycine max
gaactcattcttcttcaactcaacagagcaagggttcgcactcgcagattcttgagcaagaataatggggaagaaaagaaaacacagtgagactactcaagctgtagcacaacccaaaaaggaagaggctgctccagagagaccggctaggacccttttggggtggaaggataagaatcaagttgaggatgattcaccaatatttaggaacaaagagaagctattggtcacttgctctaggcgcatcaattacaggtaccggcatttgatgttgaatttggtcacacttttgcctcattgtaagaaggataacaaagttgaatcaaaggaaactaaaggagccaccctcaacgagcttgttgagctaaaaaattgttcctcttgtttattttttgagtgcaggaagcataaagatctttatctctggatggcaaaatgccccaatggcccatctgtaaagtttctagttagtgccgttcacacaatggaggaattgaagctaacgggaaatcacctacaaggttcgcgtccaattttgacattttcagcaaattttgaaaaagatgcacattggaaactattaaaggagatgttgttacagatatttgaaacaccaaaggaccacagaaaggccaagcctttccatgatcacgtttttgttttctcaatagttgatgaccatatatggttccggaattatcagatctctgctcatcataatgagtcggacaaattacctagaggtggccttgataaaatgacattgattgaggttggtccgcgattctgcttgaacccaattaaaatatttggtggcagttttggaggcccaactttatatgagaatccgctctatgtgtcaccaaatcagattggagctttggagaaaaagaagaagtctggaaagtttgcaaagaaggtcaaagcaaagacaaggaggaaaatgcacgagatgtccaatcctctggagcctgatgagtttgcagatatgtggaaagattgattttaaatacaaccgcagctaccacataaaagaaaaacccatatttctcctatattatcctcgcattatattccataacattaaagggagacttttgtgattctataatgttattttcagtaatttcaggtggggtcgggttattctcttttatcagacattggccctagtggaaattaaattttgac

SEQ ID NO: 20973 - protein, 312 aa, Glycine max
MGKKRKHSETTQAVAQPKKEEAAPERPARTLLGWKDKNQVEDDSPIFRNKEKLLVTCSRRINYRYRHLMLNLVTLLPHCKKDNKVESKETKGATLNELVELKNCSSCLFFECRKHKDLYLWMAKCPNGPSVKFLVSAVHTMEELKLTGNHLQGSRPILTFSANFEKDAHWKLLKEMLLQIFETPKDHRKAKPFHDHVFVFSIVDDHIWFRNYQISAHHNESDKLPRGGLDKMTLIEVGPRFCLNPIKIFGGSFGGPTLYENPLYVSPNQIGALEKKKKSGKFAKKVKAKTRRKMHEMSNPLEPDEFADMWKD

SEQ ID NO: 20974 - protein, 244 aa, Glycine max
MLNLVTLLPHCKKDNKVESKETKGATLNELVELKNCSSCLFFECRKHKDLYLWMAKCPNGPSVKFLVSAVHTMEELKLTGNHLQGSRPILTFSANFEKDAHWKLLKEMLLQIFETPKDHRKAKPFHDHVFVFSIVDDHIWFRNYQISAHHNESDKLPRGGLDKMTLIEVGPRFCLNPIKIFGGSFGGPTLYENPLYVSPNQIGALEKKKKSGKFAKKVKAKTRRKMHEMSNPLEPDEFADMWKD

SEQ ID NO: 20975 - protein, 191 aa, Glycine max
MAKCPNGPSVKFLVSAVHTMEELKLTGNHLQGSRPILTFSANFEKDAHWKLLKEMLLQIFETPKDHRKAKPFHDHVFVFSIVDDHIWFRNYQISAHHNESDKLPRGGLDKMTLIEVGPRFCLNPIKIFGGSFGGPTLYENPLYVSPNQIGALEKKKKSGKFAKKVKAKTRRKMHEMSNPLEPDEFADMWKD

SEQ ID NO: 20976 - DNA, 1299 bp, Glycine max
gagcgtgtgttgaagcaagtagtagaagaagaagagggtggaaaatcaaaaatgggagaagagagagaagatccacagaagctaaagcgattagcggcagattcatacgactacgacaacgactctcgatggcccgattactggaacaacgttctcatccctccccacatggcctctcgtgacgacgtcgtttcccacttcaagcgcaagttctaccagcgctacgttgatcctgattttgtggtggagccaatgtctgttggtggcagttcatcccagccagtgcgttcatcaactacctcctcatcgtcgcccctgacaaataatcaacctcgtgcaagaagttctggatcaactaatagaacttcagggacatccacaactgcaggtccaggtcctagtccaacacctttgcgttgggatcggcagacagttctattttctgtcaatgcttgggtttttgttgtggcttttcttgcagccattccactggtaccaaagcatctttctcatagggcttatcgcctttgttttctgggcactctttgctcttctttgtactcattgtactcacaatatgggaaaccaagagcatggaattggcaggccttgcaagtttactttcagtcaataattgcttcgaaggattttttatacttcatctactgccttacatttgttacatctcatctttgccttaaatttgctttgatccctatcttatgttggtcctttgaacatgttgccaagttccttagacgtaatttcagtcgctctaccttgtacaggaagtacttggaagagccttgtgtttgggtggagtcaaacagttctaccctcaatatagtgacatcacatgccgagattggacttggattcctgctgataatctcattgttctcgtggcagcggaacataatacaagcattcatgtactggcagcttctgaagctcatgtatcatattcctgttaccgccccttaccatcagagtgtttgggcccaaattgggaggtcggttaatccgctcatccaacgccatgcgccattcttgaagactcctatatctacaattcaaagatggtggctaaggtagaaggttggctaaaatgttttcatatggaacaccaagtatacattttctgttcctttttcttaaattacgagattggtttgacatcatgtggccagttggtcatgttacaaagaaccgaagtagattttgggatgaataatcttataacaccatgaatcttagttagtttgattgaatagtgtgtttatttacacttcagcattc

SEQ ID NO: 20977 - protein, 364 aa, Glycine max
ERVLKQVVEEEEGGKSKMGEEREDPQKLKRLAADSYDYDNDSRWPDYWNNVLIPPHMASRDDVVSHFKRKFYQRYVDPDFVVEPMSVGGSSSQPVRSSTTSSSSPLTNNQPRARSSGSTNRTSGTSTTAGPGPSPTPLRWDRQTVLFSVNAWVFVVAFLAAIPLVPKHLSHRAYRLCFLGTLCSSLYSLYSQYGKPRAWNWQALQVYFQSIIASKDFLYFIYCLTFVTSHLCLKFALIPILCWSFEHVAKFLRRNFSRSTLYRKYLEEPCVWVESNSSTLNIVTSHAEIGLGFLLIISLFSWQRNIIQAFMYWQLLKLMYHIPVTAPYHQSVWAQIGRSVNPLIQRHAPFLKTPISTIQRWWLR

SEQ ID NO: 20978 - protein, 347 aa, Glycine max
MGEEREDPQKLKRLAADSYDYDNDSRWPDYWNNVLIPPHMASRDDVVSHFKRKFYQRYVDPDFVVEPMSVGGSSSQPVRSSTTSSSSPLTNNQPRARSSGSTNRTSGTSTTAGPGPSPTPLRWDRQTVLFSVNAWVFVVAFLAAIPLVPKHLSHRAYRLCFLGTLCSSLYSLYSQYGKPRAWNWQALQVYFQSIIASKDFLYFIYCLTFVTSHLCLKFALIPILCWSFEHVAKFLRRNFSRSTLYRKYLEEPCVWVESNSSTLNIVTSHAEIGLGFLLIISLFSWQRNIIQAFMYWQLLKLMYHIPVTAPYHQSVWAQIGRSVNPLIQRHAPFLKTPISTIQRWWLR

SEQ ID NO: 20979 - protein, 308 aa, Glycine max
MASRDDVVSHFKRKFYQRYVDPDFVVEPMSVGGSSSQPVRSSTTSSSSPLTNNQPRARSSGSTNRTSGTSTTAGPGPSPTPLRWDRQTVLFSVNAWVFVVAFLAAIPLVPKHLSHRAYRLCFLGTLCSSLYSLYSQYGKPRAWNWQALQVYFQSIIASKDFLYFIYCLTFVTSHLCLKFALIPILCWSFEHVAKFLRRNFSRSTLYRKYLEEPCVWVESNSSTLNIVTSHAEIGLGFLLIISLFSWQRNIIQAFMYWQLLKLMYHIPVTAPYHQSVWAQIGRSVNPLIQRHAPFLKTPISTIQRWWLR

SEQ ID NO: 20980 - DNA, 1424 bp, Glycine max
tttagatgaacttgcaaccatccttggctgcgccgagaggaaaacactcttggttttgccggttttttctcacgtgcgacaccgggaagatagttatggagaagcgttggttaagcacgaagaaaggttcgagcataacacggagaagttgcagaaatggaaaatgactttgtatcaagtagctctcttgtctggctatcatttcaaatatggagatggatatgagtatgagttcattgggaggattgttgagcgggtctgcatcaagattaatcttactcatttacatgttgcgggttatttggttggactagagtcacaagtgccaagagccatgaagcttttggatgttggatctgatgatggtgtgcacatgatagagatccactgtataggtggaatagggaaaacaacattttagaatttgattgctaactgtttttgtggttcatgttttctttaagatgtgagagaaaaatcaagcaaacatggattacaacatttccagagcatccttctttcagaaataattaaactcataagtttaaaagaacatatgagctgaaagaattgagtaaggatgatgctcttcaattgcttactcaaaaaaagcttttaaaatgaaacaagttgatccaatacatgtggaggtcttaatggtgttgaaacatatgcatgaggccttccattgactttggaagtaataggttccaacttgttttgaaaaagtaagaagaagggaatatgctatcaaacaatatcaagaaattcctaataatcaaatcctagagatacttaaagtaagctttgatgcattggaagaagaagaaaaaagtgtttttcttgacattgcttgttgcttcaaaggatatgcattcatagaggttaaagatatacttgtgctcatcatggtgataacatgaaatatcatgttggcatgttagttgagaaatctctcataaaagttaagactgttacattgcatgacttgactgaggacatgggtaaaaaatttgtcactcaaggatcagcaagagagctgggaagcaaaggaagctataatccaagttttggaagacaacagagtgagaggaattggtgaacttgaaatcatatgtcttgatttctccatatttaccaaagaaatagtagaatggagtagaggacatgggtaaaaaaattgtcactcaagaatcaccaagagagctggggaagcaagtagattacagttagtggaagctataatccaagttttggaagacaacaccgcgagtgagactcatgaatgggaactagtgaaattgaaatcatatgccttgatttctccatatttaccaaagaaataatagaatggaatagaaaggccttcaagaggatgtaaaacctcaaacacttaatattagaaatggcaaattttccaaagg

SEQ ID NO: 20981 - protein, 139 aa, Glycine max
LDELATILGCAERKTLLVLPVFSHVRHREDSYGEALVKHEERFEHNTEKLQKWKMTLYQVALLSGYHFKYGDGYEYEFIGRIVERVCIKINLTHLHVAGYLVGLESQVPRAMKLLDVGSDDGVHMIEIHCIGGIGKTTF

SEQ ID NO: 20982 - protein, 85 aa, Glycine max
MTLYQVALLSGYHFKYGDGYEYEFIGRIVERVCIKINLTHLHVAGYLVGLESQVPRAMKLLDVGSDDGVHMIEIHCIGGIGKTTF

SEQ ID NO: 20983 - DNA, 1232 bp, Glycine max
gggatgcttgctgatccaaaggaggcacgagctggtatcagggaggtccactttcttccattcaatcctgtggacaagaggactgctctaacttacattgattctgatggaaattggcatcgatctagcaaaggagctcccgagcagatattgaacctctgcaactgcaaagaggatgtaaggaaaagggttcatggaacgattgacaagtttgctgagcgtggactccgttctttaggtgttgctagacaggaagtacctgagaaaaacaaggatagtcctggtgcaccatggcaatttgttggtctgctaccactttttgatcctccaaggcatgacagtgcggaaaccatcacaagagctctaaaccttggtgtgaatgttaagatgatcaccggtgatcagcttgccattgccaaagaaactggccgaaggcttgggatgggaacaaacatgtacccatcttcttcattgcttggtcaaagcaaggatgctgctgtttcagcagttccagttgatgaattgattgagaaggctgatggatttgctggagtacttcctgaacacaaatatgaaattgtgaagaggctgcaagagaggaagcatatttgtggaatgacaggtgatggtgtcaacgatgctcctgcattaaagaaagcagacattggaattgctgttgctgacgctacagatgctgctagaagtgcttcggacattgtcctcactgaacctggtctgagtgtcattattagtgcagtgctcaccagcagggcaattttccaaaggatgaagaattatactatctatgctgtgtcaatcaccattcgtatagtgtttggtttcatgtttattgcattgatttggaaatttgattttgcacccttcatggtgttgattattgccatactaaacgatggtaccatcatgacaatatccaaggatcgagtgaaaccatctccaatgccagacagctggaagctgagggagatatttgccactggtgttgtgctaggagcttacatggcactaatgacagtagtatttttctggctcatgaaggataccgacttcttctcggacaagttcggtgtgaggtctataaggaacagccccggagaaatgatggcagccctgtacctacaagtcagtattataagtcaagcactaatttttgtgacaaggtcccgcagctggtcctatgttgaaagacctggtcttctcctactgagtgc

SEQ ID NO: 20984 - protein, 410 aa, Glycine max
GMLADPKEARAGIREVHFLPFNPVDKRTALTYIDSDGNWHRSSKGAPEQILNLCNCKEDVRKRVHGTIDKFAERGLRSLGVARQEVPEKNKDSPGAPWQFVGLLPLFDPPRHDSAETITRALNLGVNVKMITGDQLAIAKETGRRLGMGTNMYPSSSLLGQSKDAAVSAVPVDELIEKADGFAGVLPEHKYEIVKRLQERKHICGMTGDGVNDAPALKKADIGIAVADATDAARSASDIVLTEPGLSVIISAVLTSRAIFQRMKNYTIYAVSITIRIVFGFMFIALIWKFDFAPFMVLIIAILNDGTIMTISKDRVKPSPMPDSWKLREIFATGVVLGAYMALMTVVFFWLMKDTDFFSDKFGVRSIRNSPGEMMAALYLQVSIISQALIFVTRSRSWSYVERPGLLLLS

SEQ ID NO: 20985 - protein, 409 aa, Glycine max
MLADPKEARAGIREVHFLPFNPVDKRTALTYIDSDGNWHRSSKGAPEQILNLCNCKEDVRKRVHGTIDKFAERGLRSLGVARQEVPEKNKDSPGAPWQFVGLLPLFDPPRHDSAETITRALNLGVNVKMITGDQLAIAKETGRRLGMGTNMYPSSSLLGQSKDAAVSAVPVDELIEKADGFAGVLPEHKYEIVKRLQERKHICGMTGDGVNDAPALKKADIGIAVADATDAARSASDIVLTEPGLSVIISAVLTSRAIFQRMKNYTIYAVSITIRIVFGFMFIALIWKFDFAPFMVLIIAILNDGTIMTISKDRVKPSPMPDSWKLREIFATGVVLGAYMALMTVVFFWLMKDTDFFSDKFGVRSIRNSPGEMMAALYLQVSIISQALIFVTRSRSWSYVERPGLLLLS

SEQ ID NO: 20986 - protein, 281 aa, Glycine max
MITGDQLAIAKETGRRLGMGTNMYPSSSLLGQSKDAAVSAVPVDELIEKADGFAGVLPEHKYEIVKRLQERKHICGMTGDGVNDAPALKKADIGIAVADATDAARSASDIVLTEPGLSVIISAVLTSRAIFQRMKNYTIYAVSITIRIVFGFMFIALIWKFDFAPFMVLIIAILNDGTIMTISKDRVKPSPMPDSWKLREIFATGVVLGAYMALMTVVFFWLMKDTDFFSDKFGVRSIRNSPGEMMAALYLQVSIISQALIFVTRSRSWSYVERPGLLLLS

SEQ ID NO: 20987 - DNA, 1633 bp, Glycine max
gggagaggtgaattcgcagacgaacattccgctcccatcgcatctgtaacaatggaagcgcgccatgcaactcttggtcgacgaacgttggaggaaattcggcaaaagagggccgcggagagattgagtaaaacctcttcgggaccagatctcacgcaggttcccagcacctccgagattgcgggaatgagcaagtccgagagcgcaaataagctctctgagacagatcttagtgctctattgtctcaattgaaaggactgcaaaagaagaacacggagttggaggaagaaaacacaaaaattagtttaaagcttcaaacgatggaaattgataatgagacaatgcacaagcaattaaatgatgtggaacaaaatacagtgccatctctaaggaaagctctgagggatgtcgcaatggagaaagatgctgcagttgttgcacgggaggacctttcagcacagcttcgtaccctgaagaaacgtcttaaggaagcagaagatgagcaatatcgtgccgaggaagatgcagcagcgttgagagcagaattgaactcaattcagcaacaagcaatgactaatacagttagcacaatttcatcatttggtaatccacccgatcattttcaaattcaaagattacaaaaggagctagatgatttaaaactggaactgcagcgagaatcacttttgaggcaccaggagcaggaacaattagcaaaagagcaagcctgcattgcctcactgatatctgaaaagcaggagttggaagagaaactcatgtccatatctagagagcctgcagaagcctcagataaagctgctcacaaagcattttctttggaagacaagcagaaacttgataggcagttgtatgatatggctatagccattgagaggttggaaagcagtaggcagaaacttctaatggagattgactcacaatctacagaaatagagaggctttttgaggaaaattctagtctctcaaattcataccaagaggcaattggagcagcagcgagatgggaaaaccaggtgatggattgtcttaagcaaaatgaagagcttcgtgggattctagataatttgagaatggaacaggctaggggtttgccagactcttctaaaaatggggcacatgagattgcttccttggcatctatgaagggccaacttgtgacagaacagagcagagcagaggcgctatctgcagaagtcatgcagctttctgctcaacttgaacaagtcaaacaagcatatgatggtcttgcacgcttctataggccagtgctgcgcaacattgaaagcaatctcataaaaatgaagcaagacaactcgttggctgtacgatgatggtaatgagcagtttcatgatgatattccggttgtaattgtgaagcccttctttgaagacatttccaatgcccacagaattgtttttaaccatttgatgttattagtttggtaaaagtggaacgagatggctcagtaactggtggtaatggttcttcattcttgagctgttttgttttgtggtaatactctgcataagaagcccttgttatacccaaacgtgaatttgtaaaacttgtcattctttatactaatattaatttgtaaacaagcacaaccg

SEQ ID NO: 20988 - protein, 450 aa, Glycine max
GRGEFADEHSAPIASVTMEARHATLGRRTLEEIRQKRAAERLSKTSSGPDLTQVPSTSEIAGMSKSESANKLSETDLSALLSQLKGLQKKNTELEEENTKISLKLQTMEIDNETMHKQLNDVEQNTVPSLRKALRDVAMEKDAAVVAREDLSAQLRTLKKRLKEAEDEQYRAEEDAAALRAELNSIQQQAMTNTVSTISSFGNPPDHFQIQRLQKELDDLKLELQRESLLRHQEQEQLAKEQACIASLISEKQELEEKLMSISREPAEASDKAAHKAFSLEDKQKLDRQLYDMAIAIERLESSRQKLLMEIDSQSTEIERLFEENSSLSNSYQEAIGAAARWENQVMDCLKQNEELRGILDNLRMEQARGLPDSSKNGAHEIASLASMKGQLVTEQSRAEALSAEVMQLSAQLEQVKQAYDGLARFYRPVLRNIESNLIKMKQDNSLAVR

SEQ ID NO: 20989 - protein, 433 aa, Glycine max
MEARHATLGRRTLEEIRQKRAAERLSKTSSGPDLTQVPSTSEIAGMSKSESANKLSETDLSALLSQLKGLQKKNTELEEENTKISLKLQTMEIDNETMHKQLNDVEQNTVPSLRKALRDVAMEKDAAVVAREDLSAQLRTLKKRLKEAEDEQYRAEEDAAALRAELNSIQQQAMTNTVSTISSFGNPPDHFQIQRLQKELDDLKLELQRESLLRHQEQEQLAKEQACIASLISEKQELEEKLMSISREPAEASDKAAHKAFSLEDKQKLDRQLYDMAIAIERLESSRQKLLMEIDSQSTEIERLFEENSSLSNSYQEAIGAAARWENQVMDCLKQNEELRGILDNLRMEQARGLPDSSKNGAHEIASLASMKGQLVTEQSRAEALSAEVMQLSAQLEQVKQAYDGLARFYRPVLRNIESNLIKMKQDNSLAVR

SEQ ID NO: 20990 - protein, 388 aa, Glycine max
MSKSESANKLSETDLSALLSQLKGLQKKNTELEEENTKISLKLQTMEIDNETMHKQLNDVEQNTVPSLRKALRDVAMEKDAAVVAREDLSAQLRTLKKRLKEAEDEQYRAEEDAAALRAELNSIQQQAMTNTVSTISSFGNPPDHFQIQRLQKELDDLKLELQRESLLRHQEQEQLAKEQACIASLISEKQELEEKLMSISREPAEASDKAAHKAFSLEDKQKLDRQLYDMAIAIERLESSRQKLLMEIDSQSTEIERLFEENSSLSNSYQEAIGAAARWENQVMDCLKQNEELRGILDNLRMEQARGLPDSSKNGAHEIASLASMKGQLVTEQSRAEALSAEVMQLSAQLEQVKQAYDGLARFYRPVLRNIESNLIKMKQDNSLAVR

SEQ ID NO: 20991 - DNA, 1404 bp, Glycine max
gatattacattccagagttcatctgatcgaggcaaaggggtcacagatctgaaatctgctcttcagacaattttcgctgagactcttgttgatagcaaggatgaattccttcagaaatatttggcagataatgactttgtcagaacaaacatctcaaatggagaaactttgaagcacaaagcttttaaggagaacatttgtgattctaaccagcttacagattcttctacttctactgttgaggttgtccgtttggtggctggcaacatggctactggacaactttacagtcatctaatacccctcacactacttcttgttgatggtagcagtccaattgatgttaccgattcacagtgggagctgtatattgtgtgtcagaagaaaactgatcagcagggagagatccaatataggttgactggttttactgctgtttatcgattttatcactatcctgatgattcccgattgcgactaagccagatactggtattacctccttaccagcacaagggttatggtcgattccttctagaggtgctatacgatgttgctatatctgaaaatgtttttgacttcacagtagaagagccattagatcacttccaacgtgtccgcacatgtgttgacgcacttcgcctgcttcgttttggcccaattcagaatatagttactaaagccgtttcacttctgaagcaagaaaagttatcaaagaaagcacattgtcctcgacttttaccacctcccagtgctattgaggatgtaaggaaaagtctgaaaattaataagcaacagtttctccagtgttgggaggttttgatctacattggccttaatcctgttgacaagaacatggagaactttgttagtattattttgaaccgtgttaagtatgatatcttagggaaagattctgggacgtctgggaagcaacttattgaagtaccaagtgatgttgaccaggagatgtcatttgtcatgttcagatcagaagctaacgaagctagtactgtgcaaatggatgacaatcaggctaatcaagaagagcaactccagaagttagttcaggaaagggtgaaagaaattcagttgattgcggaaaaggtaaccctgcatcttgggagctcagggttggtggttaattagatttgtccttcccaagatggcatgggatgaaaaggtcatgcatctatgatattgtgtgatttttttcctgtggaccaattagagtttgtttttctggacaatcactcagtagtgtatttgggttcttccttctaggatgttttaagattctcttatagtagtctgtgaaggaaccagtgatctgttaagctgtaattactgagattaaccacaacaaagttgattgagtgacattcagtggttattgtccattcc

SEQ ID NO: 20992 - protein, 382 aa, Glycine max
DITFQSSSDRGKGVTDLKSALQTIFAETLVDSKDEFLQKYLADNDFVRTNISNGETLKHKAFKENICDSNQLTDSSTSTVEVVRLVAGNMATGQLYSHLIPLTLLLVDGSSPIDVTDSQWELYIVCQKKTDQQGEIQYRLTGFTAVYRFYHYPDDSRLRLSQILVLPPYQHKGYGRFLLEVLYDVAISENVFDFTVEEPLDHFQRVRTCVDALRLLRFGPIQNIVTKAVSLLKQEKLSKKAHCPRLLPPPSAIEDVRKSLKINKQQFLQCWEVLIYIGLNPVDKNMENFVSIILNRVKYDILGKDSGTSGKQLIEVPSDVDQEMSFVMFRSEANEASTVQMDDNQANQEEQLQKLVQERVKEIQLIAEKVTLHLGSSGLVVN

SEQ ID NO: 20993 - protein, 293 aa, Glycine max
MATGQLYSHLIPLTLLLVDGSSPIDVTDSQWELYIVCQKKTDQQGEIQYRLTGFTAVYRFYHYPDDSRLRLSQILVLPPYQHKGYGRFLLEVLYDVAISENVFDFTVEEPLDHFQRVRTCVDALRLLRFGPIQNIVTKAVSLLKQEKLSKKAHCPRLLPPPSAIEDVRKSLKINKQQFLQCWEVLIYIGLNPVDKNMENFVSIILNRVKYDILGKDSGTSGKQLIEVPSDVDQEMSFVMFRSEANEASTVQMDDNQANQEEQLQKLVQERVKEIQLIAEKVTLHLGSSGLVVN

SEQ ID NO: 20994 - DNA, 1986 bp, Glycine max
aaaaagaaaaggaagggcgaagttgaaaaaccaaaacccttggcgagtgaagccctagactcactagactacacacttcgcaatggcggttgttgctcaaacccctgacatcgccggcgagcggcagtccggccaagacgttcgcacccaaaacgttgtggcatgccaagccgttgccaacatcgtcaaaagctctttaggccccgttggcctcgacaagatgctcgtcgacgacattggcgacgtcaccatcaccaacgacggcgccacgattctcaagatgctggaagtggagcatcctgctgccaaggttttggttgaactcgccgagcttcaggatcgagaagtcggagacggcactacttctgtcgtcattgtagctgctgagcttctcaaaagggcaaatgaccttgtcaggaacaagattcatcctacctcgattatcagtggatatagacttgctatgcgagaggcttgtaaatatgtagaagaaaaactagctgtcaaggttgaaaagctgggaaaggattcactaattaactgtgccaagaccagtatgtcctcaaagttgatagctggtgatagtgacttctttgccattttggttgtagatgcagtgcaagctgtaaagatgaccaatgctcgaggtgaagttaaatacccaatcaagggaatcaatatcttgaaagctcatggaaaaagtgctagagacagctttctgatgaatggttatgctctaaatactggccgtgctgctcaaggaatgcctcttagggttgcccctgcaagaattgcctgtcttgatttcaatcttcagaagacaaaaatgcagttgggtgttcaagttttagttactgatcctagggagctagagaaaattcgtcaaagagaggctgatatgactaaggaacgtattgaaaaactgctgaaggctggagctaatgttattctgacaactaaaggaattgatgacatggctcttaagtactttgttgaggctggggcaattgctgtaagacgtgtgcggaaagaggacatgcgccatgttgccaaggctactggtgcaacattggtctcaacatttgctgatatggaaggggaggaaacatttgaaccatcttttcttggatatgctgatgaggttgttgaggagcgaatttctgatgatgctgtagttatgatcaaagggaccaaaactacaagcgcagtcactttgattctaagaggtgcaaatgaccatatgcttgatgagatggacagagctctgcatgatgcattgtcaattgtcaagagaactcttgaatcaaatacggtggtagctggtggaggtgctgttgaggcagcattatcagtttatttagagtaccttgctacaactttaggatctcgggagcagttggctatagcagaatttgctgagtctctgttaattattccaaaggtgctttctgttaatgctgctaaggatgccactgagctggtcgcaaaattacgggcctaccaccattcagcacaaactaaagccgataagaaacatttatcaagtatgggtttggacctttctgaagggaaaatcagaaacaacttggaggctggagtcattgagcctgcaatgagcaaagtaaaaattattcagtttgcaactgaagctgccattactatccttcgaattgatgacatgatcaagcttatcaaggatgaaagtcaaaatgaggattaaagtataactgaatctaggaggcatctactccccagtgcttacaaaagggagggttgtgctagtgtgcatttgaagagggtatctgcatttaatcttcaatgcccttgttcttgaaggaaaactgctctaattatttttctgaaagtagctttattatatttacatctttgcattttatattccaacaatttttaggcaaacatttttggtcatgcattggctggttgcatgtttgtacatttctttgaggcagtgtttgatttgtg

SEQ ID NO: 20995 - protein, 545 aa, Glycine max
MAVVAQTPDIAGERQSGQDVRTQNVVACQAVANIVKSSLGPVGLDKMLVDDIGDVTITNDGATILKMLEVEHPAAKVLVELAELQDREVGDGTTSVVIVAAELLKRANDLVRNKIHPTSIISGYRLAMREACKYVEEKLAVKVEKLGKDSLINCAKTSMSSKLIAGDSDFFAILVVDAVQAVKMTNARGEVKYPIKGINILKAHGKSARDSFLMNGYALNTGRAAQGMPLRVAPARIACLDFNLQKTKMQLGVQVLVTDPRELEKIRQREADMTKERIEKLLKAGANVILTTKGIDDMALKYFVEAGAIAVRRVRKEDMRHVAKATGATLVSTFADMEGEETFEPSFLGYADEVVEERISDDAVVMIKGTKTTSAVTLILRGANDHMLDEMDRALHDALSIVKRTLESNTVVAGGGAVEAALSVYLEYLATTLGSREQLAIAEFAESLLIIPKVLSVNAAKDATELVAKLRAYHHSAQTKADKKHLSSMGLDLSEGKIRNNLEAGVIEPAMSKVKIIQFATEAAITILRIDDMIKLIKDESQNED

SEQ ID NO: 20996 - protein, 499 aa, Glycine max
MLVDDIGDVTITNDGATILKMLEVEHPAAKVLVELAELQDREVGDGTTSVVIVAAELLKRANDLVRNKIHPTSIISGYRLAMREACKYVEEKLAVKVEKLGKDSLINCAKTSMSSKLIAGDSDFFAILVVDAVQAVKMTNARGEVKYPIKGINILKAHGKSARDSFLMNGYALNTGRAAQGMPLRVAPARIACLDFNLQKTKMQLGVQVLVTDPRELEKIRQREADMTKERIEKLLKAGANVILTTKGIDDMALKYFVEAGAIAVRRVRKEDMRHVAKATGATLVSTFADMEGEETFEPSFLGYADEVVEERISDDAVVMIKGTKTTSAVTLILRGANDHMLDEMDRALHDALSIVKRTLESNTVVAGGGAVEAALSVYLEYLATTLGSREQLAIAEFAESLLIIPKVLSVNAAKDATELVAKLRAYHHSAQTKADKKHLSSMGLDLSEGKIRNNLEAGVIEPAMSKVKIIQFATEAAITILRIDDMIKLIKDESQNED

SEQ ID NO: 20997 - protein, 479 aa, Glycine max
MLEVEHPAAKVLVELAELQDREVGDGTTSVVIVAAELLKRANDLVRNKIHPTSIISGYRLAMREACKYVEEKLAVKVEKLGKDSLINCAKTSMSSKLIAGDSDFFAILVVDAVQAVKMTNARGEVKYPIKGINILKAHGKSARDSFLMNGYALNTGRAAQGMPLRVAPARIACLDFNLQKTKMQLGVQVLVTDPRELEKIRQREADMTKERIEKLLKAGANVILTTKGIDDMALKYFVEAGAIAVRRVRKEDMRHVAKATGATLVSTFADMEGEETFEPSFLGYADEVVEERISDDAVVMIKGTKTTSAVTLILRGANDHMLDEMDRALHDALSIVKRTLESNTVVAGGGAVEAALSVYLEYLATTLGSREQLAIAEFAESLLIIPKVLSVNAAKDATELVAKLRAYHHSAQTKADKKHLSSMGLDLSEGKIRNNLEAGVIEPAMSKVKIIQFATEAAITILRIDDMIKLIKDESQNED

SEQ ID NO: 20998 - DNA, 1336 bp, Glycine max
aagtagctgtcaagaggctttcaagaaagtctagccaaggtttagaggagttcaagaatgaaatggtgctcatagccaaactgcaacatagaaatctggttagactattggggtgttgcattcaaggggaagaaaagatactggtatatgagtacttgccaaacaaaagcttggactgctttttatttgatccggtgaagcaaacacaactagattgggcaaaacgctttgaaataatcgagggcattgcaagagggctactttatctgcaccgggattctagacttagaataattcatcgtgatttaaaagcaagcaacattttgttggatgaaagcatgaatccaaaaatttcagactttggcttggccagaatatttgggggaaaccaaaatgaagccaacacaaacagagtggttggtacatatggttatatgtccccagaatatgcaatggaaggtctgttttcaatcaaatctgatgtctatagttttggtgtattgctacttgagattatgagtggccgcaagaacacaagctttcgtgacacagatgactcaagtctcattggatatgcctggcacctttggagtgagcagagagtaatggagcttgttgatccttcccttggtgattcaattcctaagactaaagcgttgaggttcatacaaatagggatgttatgcgtgcaagattcagcatctcgtagaccaaacatgtcatctgtgttgttgatgctgggaagtgaatcaacagctctacctttgcctaagcaacctttgctcactacttccatgaggatacttgatgatggagaatcttatagcgaaggccttgatgtgtcaaatgatttgacagtttcaatggtgacaacagggagatagaagtgttaattacattttttggtttttcccattctgtttagctttgtttagactcttttcaatctacataagttcacagcaaaaagttttccttttaattttacctcccatttgaaacaagcctcttaatattgagtctattgtatatactataatttataaaccaaaatatcttttgagagtccaaaaaagtgccttgattcctggtcattgaaagaattcttctaggttgaaggttctcatgtgaggagatcattggaaaagtagcggaatctgtggttagcagttgcattttgattagttttttgaggcgtgattttgatatactatcatgtataaagttgtatattgttcacaattattatattcttgggagagcatcttcatttttaaatgtctctttgttgaactcttgtatgactagtttcgtacatgtctccaaatggcatttg

SEQ ID NO: 20999 - protein, 293 aa, Glycine max
VAVKRLSRKSSQGLEEFKNEMVLIAKLQHRNLVRLLGCCIQGEEKILVYEYLPNKSLDCFLFDPVKQTQLDWAKRFEIIEGIARGLLYLHRDSRLRIIHRDLKASNILLDESMNPKISDFGLARIFGGNQNEANTNRVVGTYGYMSPEYAMEGLFSIKSDVYSFGVLLLEIMSGRKNTSFRDTDDSSLIGYAWHLWSEQRVMELVDPSLGDSIPKTKALRFIQIGMLCVQDSASRRPNMSSVLLMLGSESTALPLPKQPLLTTSMRILDDGESYSEGLDVSNDLTVSMVTTGR

SEQ ID NO: 21000 - protein, 273 aa, Glycine max
MVLIAKLQHRNLVRLLGCCIQGEEKILVYEYLPNKSLDCFLFDPVKQTQLDWAKRFEIIEGIARGLLYLHRDSRLRIIHRDLKASNILLDESMNPKISDFGLARIFGGNQNEANTNRVVGTYGYMSPEYAMEGLFSIKSDVYSFGVLLLEIMSGRKNTSFRDTDDSSLIGYAWHLWSEQRVMELVDPSLGDSIPKTKALRFIQIGMLCVQDSASRRPNMSSVLLMLGSESTALPLPKQPLLTTSMRILDDGESYSEGLDVSNDLTVSMVTTGR

SEQ ID NO: 21001 - protein, 181 aa, Glycine max
MNPKISDFGLARIFGGNQNEANTNRVVGTYGYMSPEYAMEGLFSIKSDVYSFGVLLLEIMSGRKNTSFRDTDDSSLIGYAWHLWSEQRVMELVDPSLGDSIPKTKALRFIQIGMLCVQDSASRRPNMSSVLLMLGSESTALPLPKQPLLTTSMRILDDGESYSEGLDVSNDLTVSMVTTGR

SEQ ID NO: 21002 - DNA, 1303 bp, Glycine max
agtgatagaattcctgattttcatcttctggatcaggctgaacaatctgctaagaggcaaaagctgaaaatctgggagaattttgttgaaggagaggaagtatctaatggtgcagcagttgaaaacaaacagcaagaagtacttaaggtaattgttacagaagtcttgggtggtggtaaattctatgtccagacagttggagatcaaaagatcgcatccattcagcaacaacttgcttctttgaacctgaaggatgctcctgtgcttggtgctttcaatcctaagaagggtgacatagtcctttgttattttcatgctgacaagtcttggtaccgggcaatggttgtcaatacaccccgaggaccagttgaatcacctaacgacttgttcgaagtattctatattgattatggaaatcaagaagtagtaccctacagtcaactacggcctgttgatccatctgtgtctgctgctccgggtcttgctcaactgtgtagccttgcatacatcaagattccaaacttggaagaggattttggccaagaagcagctgaatatttgagtgaactcactttaaacagtggaaaagagttcagggccaaggttgaggagaaagatacttccggaggaaaagtgaaagggcagggaactgggacagtccttgctgtaactcttgttgccgtggatgctgaaatcagcgttaatgctgccatgctacaggaagggcttgctaggacagaaaaaagaaacaggtgggacagaaaagacagacagacagctcttgataatttggagaatttccaggaagaagcaaagaccagcaggcgcggaatgtggcagtatggagatattcagtcagatgacgaggacactgctcctcctcctagaaaggctgctggtggccgtaaataagtgtaacaggaggtaaattataaaataggcatcttgagagaacatgactgaagttataggcttgaacaatttttatttttttgagctagagagaaaaaagaaaatgccgtgcggattcctttgtaagttttgttttatttttcgtttaaattttgtctttaggttggtgggacaattgttttctatagatgtcttaataaggtacatgcggcaaggttctctgttaccatgaggacaacaaagatgttttgttgtagtttaatatttcttgcttgtcttttggtcttttaagaaattgtcttcctttttttctaggtttagtttcgacttagggggagttttaaccgtaataaagttgagtagaattgattttaatagatttttttttttc

SEQ ID NO: 21003 - protein, 303 aa, Glycine max
SDRIPDFHLLDQAEQSAKRQKLKIWENFVEGEEVSNGAAVENKQQEVLKVIVTEVLGGGKFYVQTVGDQKIASIQQQLASLNLKDAPVLGAFNPKKGDIVLCYFHADKSWYRAMVVNTPRGPVESPNDLFEVFYIDYGNQEVVPYSQLRPVDPSVSAAPGLAQLCSLAYIKIPNLEEDFGQEAAEYLSELTLNSGKEFRAKVEEKDTSGGKVKGQGTGTVLAVTLVAVDAEISVNAAMLQEGLARTEKRNRWDRKDRQTALDNLENFQEEAKTSRRGMWQYGDIQSDDEDTAPPPRKAAGGRK

SEQ ID NO: 21004 - protein, 190 aa, Glycine max
MVVNTPRGPVESPNDLFEVFYIDYGNQEVVPYSQLRPVDPSVSAAPGLAQLCSLAYIKIPNLEEDFGQEAAEYLSELTLNSGKEFRAKVEEKDTSGGKVKGQGTGTVLAVTLVAVDAEISVNAAMLQEGLARTEKRNRWDRKDRQTALDNLENFQEEAKTSRRGMWQYGDIQSDDEDTAPPPRKAAGGRK

SEQ ID NO: 21005 - DNA, 1504 bp, Glycine max
gatgtgaatcttggtgatagcaattatagctttggggaggctgaggcattgagtgatgagatggaagaagagtctcggtatgttgcggagattttgaggatcagggatgttctgcttaaccctgaagatgagtctgaggctgtgttatttgattcattgaggcggcttcagttgatggaactcaccgtggactgtttaaaggcaactgagattggcaaggctgtcaatcctctccgaaagcatggatcaaaagatattcgtcaactttcaaggactcttatcgatggctggaaagaaatggtggatgagtgggtcaaggccactactaccacagctatcacaggttcagaagaaggtacaccggattcagtgaatccatctgttgtagatgatgatgaagaagaaggacttccatcacctcccttggatgaaggggctttctttgtcactcaggctggttcaatggaactgtcacagttctttgatggcatggacgacgacggaaatcctcgaccaactgggccattcagcaagaaccgtgagaatggcagaaagccggttttcgacagccatgttgtagagaagaggaagtcgcaggcttcccatgacacagccatcattgaccgggatgttaagagtcagcagcaagcaaagaaaaatgaggctgttgtgcctgagaggccaaataaaccagtaacagctgattccgggcctggcagacccccaaaatcaaatatgcagagaaaaagtaatatggagccaaagatgcagcaaaaaatggagaacaattcaatcacaaggaggcctccaaccggtcagctagataaatccaagcgttcagatgactcggcagtccaagtgaagctagaagccaccaagaggaaacttcaggagagctatcaacaagctgaaaacgccaagaggcagaggacaatacaagttatggaaataaacgatcttcccaagcaaggtttgcaccgaaacacacatttcaaacctggatatcacaataggcattgggctaatggtcgaagataaagctattattctatggtggacctgcagatttaacagcatttccaagctgtttgttctttggattgaagattggtccccttgactatagaaaataacaaaatccattcaccatttggactgcatagaattattccaatagagagggaagtaaacctttaaacactgtttatttcccagtttataggagttaagtaaataggaattttgttcatcctagattggatttagaagaggatcctagcttggcacctctacttttgacttgcttccataatgatggtctatagaaatctcaattgtttctgatcacatttttcttgcacatatgacatactagggtctcatatacaagttagtatatataccctttggaagtgctttgtcacaacctcaatgggctttaaacttgtagatgtgattatgttagcaggtgtatgagaattttaatatgaaataacattaaatc

SEQ ID NO: 21006 - protein, 345 aa, Glycine max
DVNLGDSNYSFGEAEALSDEMEEESRYVAEILRIRDVLLNPEDESEAVLFDSLRRLQLMELTVDCLKATEIGKAVNPLRKHGSKDIRQLSRTLIDGWKEMVDEWVKATTTTAITGSEEGTPDSVNPSVVDDDEEEGLPSPPLDEGAFFVTQAGSMELSQFFDGMDDDGNPRPTGPFSKNRENGRKPVFDSHVVEKRKSQASHDTAIIDRDVKSQQQAKKNEAVVPERPNKPVTADSGPGRPPKSNMQRKSNMEPKMQQKMENNSITRRPPTGQLDKSKRSDDSAVQVKLEATKRKLQESYQQAENAKRQRTIQVMEINDLPKQGLHRNTHFKPGYHNRHWANGRR

SEQ ID NO: 21007 - protein, 325 aa, Glycine max
MEEESRYVAEILRIRDVLLNPEDESEAVLFDSLRRLQLMELTVDCLKATEIGKAVNPLRKHGSKDIRQLSRTLIDGWKEMVDEWVKATTTTAITGSEEGTPDSVNPSVVDDDEEEGLPSPPLDEGAFFVTQAGSMELSQFFDGMDDDGNPRPTGPFSKNRENGRKPVFDSHVVEKRKSQASHDTAIIDRDVKSQQQAKKNEAVVPERPNKPVTADSGPGRPPKSNMQRKSNMEPKMQQKMENNSITRRPPTGQLDKSKRSDDSAVQVKLEATKRKLQESYQQAENAKRQRTIQVMEINDLPKQGLHRNTHFKPGYHNRHWANGRR

SEQ ID NO: 21008 - protein, 287 aa, Glycine max
MELTVDCLKATEIGKAVNPLRKHGSKDIRQLSRTLIDGWKEMVDEWVKATTTTAITGSEEGTPDSVNPSVVDDDEEEGLPSPPLDEGAFFVTQAGSMELSQFFDGMDDDGNPRPTGPFSKNRENGRKPVFDSHVVEKRKSQASHDTAIIDRDVKSQQQAKKNEAVVPERPNKPVTADSGPGRPPKSNMQRKSNMEPKMQQKMENNSITRRPPTGQLDKSKRSDDSAVQVKLEATKRKLQESYQQAENAKRQRTIQVMEINDLPKQGLHRNTHFKPGYHNRHWANGRR

SEQ ID NO: 21009 - DNA, 1266 bp, Glycine max
actggaccaaagaatgtacacgtagtacctgcagctagcaattatgtaaagattcgaggcttggcatcacctgcattacttgttggatgggtagctcagagtgcaagtcttggtatgaaagattccttgggacccttgaaagctttagctgctgctacagttataaatgtcgctggttgtgtacttttgtgcacctatttaggttatggaattgtaggggctgcgtgggctacaatggtttcacaagttgttgcttcttacatgatgattcaaaatctaaatatgaagggatataatgcacttgccttctccattccttcagggaaggaacttctgacgatatttgggcttgctgctcctgtttttataacattgatgtcaaaggtggctttttacgcactacttatatattttgctacatcaatgggtacacatacaatggctgctcatcaagtcatggtccaaacctatttaatgtgtaccgtatggggtgaacctctctcccaaacctctcaatcatttatgcctgaattgatatatggagtaaatcggagtttgtcaaaggcccgaatgcttctaaggtctctcgtgataattggagctatacttggattgttgttagggattattggaacatcggttccttggttatttcccaatatttttacacctgatcggatggtcatccaggagatgcataaggtgctgattccatactttatagccctggctgtaacaccccctactgtcagccttgagggaacgttgctggctggacgggatctgaaatttataagtttgtcaatgagtggatgcttttgtgtgggttcactagtattatgggctttgagtagtagatacggtttgcttggctgctggttttccctcgcattatttcaatgggctcggttttcaatggccctccagcgccttctttctcccaaaggcatcttatactcggaagatacagaacagtataagctgctaaagctaaggactgcctagtttgatgaagtcatcacaccagttacaaggatagaagtatgttttaataaaaaaaaaagaggatagtagtatgttggaccatctcagcttatgggttaagcgagttaagaccaggacaaccggctaaaaagtgagccatcgtttttataatttgtttagtccgcgagctgggttggctcataggttggagttcactttgatacttatatgtgtatgattgctataataattagcatgaaaaattaattcagattcttaatt

SEQ ID NO: 21010 - protein, 334 aa, Glycine max
TGPKNVHVVPAASNYVKIRGLASPALLVGWVAQSASLGMKDSLGPLKALAAATVINVAGCVLLCTYLGYGIVGAAWATMVSQVVASYMMIQNLNMKGYNALAFSIPSGKELLTIFGLAAPVFITLMSKVAFYALLIYFATSMGTHTMAAHQVMVQTYLMCTVWGEPLSQTSQSFMPELIYGVNRSLSKARMLLRSLVIIGAILGLLLGIIGTSVPWLFPNIFTPDRMVIQEMHKVLIPYFIALAVTPPTVSLEGTLLAGRDLKFISLSMSGCFCVGSLVLWALSSRYGLLGCWFSLALFQWARFSMALQRLLSPKGILYSEDTEQYKLLKLRTA

SEQ ID NO: 21011 - protein, 296 aa, Glycine max
MKDSLGPLKALAAATVINVAGCVLLCTYLGYGIVGAAWATMVSQVVASYMMIQNLNMKGYNALAFSIPSGKELLTIFGLAAPVFITLMSKVAFYALLIYFATSMGTHTMAAHQVMVQTYLMCTVWGEPLSQTSQSFMPELIYGVNRSLSKARMLLRSLVIIGAILGLLLGIIGTSVPWLFPNIFTPDRMVIQEMHKVLIPYFIALAVTPPTVSLEGTLLAGRDLKFISLSMSGCFCVGSLVLWALSSRYGLLGCWFSLALFQWARFSMALQRLLSPKGILYSEDTEQYKLLKLRTA

SEQ ID NO: 21012 - protein, 256 aa, Glycine max
MVSQVVASYMMIQNLNMKGYNALAFSIPSGKELLTIFGLAAPVFITLMSKVAFYALLIYFATSMGTHTMAAHQVMVQTYLMCTVWGEPLSQTSQSFMPELIYGVNRSLSKARMLLRSLVIIGAILGLLLGIIGTSVPWLFPNIFTPDRMVIQEMHKVLIPYFIALAVTPPTVSLEGTLLAGRDLKFISLSMSGCFCVGSLVLWALSSRYGLLGCWFSLALFQWARFSMALQRLLSPKGILYSEDTEQYKLLKLRTA

SEQ ID NO: 21013 - DNA, 1309 bp, Glycine max
tcaacctcacttgatcaattctccaaatacctaatatggagtttcacattcttcccatcattacttttctcatgcttgttgtggcaactaatgctgatgctgcattacctcctgcattttactggaagtccaagcttcctaccacaccaatgccgaaagccatcactgatttgctacaacctgattggaaggaagagaaagacacctctgtggatgtagggaaaggtggagtaaatgttggtgtagaaaagggaaaccaaggaccaggagatggcactgatgttaatgttggtggtggagacggtggagtgaatgtgcacacaggaccaaagggtaagccagttcacgttggagtgggcccacattctccatttgattacaactatgcagccagcgagacccaattacatgatgaccccaatgtggcactcttcttcttggaaaaggacttgcaccacggaacaaaattgaaccttcacttcactatctactacacctcaaatgttgatgccacgttcttgcctcgatcagtttctgattccatacccttttcgtcaaacaaggtgaatgatgtattaaacaagttttcaatcaaggacgggtcagatgaggctaaaactgtgaagaacactattaatgagtgtgaaggacctagcattaagggagaggaaaagcgttgcgtgacttcacttgagtccatggttgatttcgccactaccaagctcgggagcaacaatgttgatgctgtttccacagaagtgacaaaaaaagataatgagttacaacagtatacaatggcaccaggggttaagaggttgggtgaggacaaggctagtgttgtgtgtcacaaggagaattacccttatgcagtgttttattgccacaaatcagaaaccacaaaagcctattctgtcccattggagggtgctgatggaagcagggtcaaagcagttgcagtgtgccatactgacacatcaaagtggaatcccaagcatttggcgtttcaagtgcttaaggttcagccaggaactgttcctgtctgccacttcctgcctcaggatcatgttgtctttgttcccaagtagaaacacacacgagtcccatttctgatgttggtgaataatttggcagttttaatagcatgaaatgagcttttaaaactgaatgcgtagtatttgcattatgttatcctacgttgtcagcatgtttgcttttacaggtttactgttatctcaatatatgtatatgtactagtgatgtattaaatgtgctaatatgtgatatatatatatatatagctttttcattc

SEQ ID NO: 21014 - protein, 349 aa, Glycine max
MEFHILPIITFLMLVVATNADAALPPAFYWKSKLPTTPMPKAITDLLQPDWKEEKDTSVDVGKGGVNVGVEKGNQGPGDGTDVNVGGGDGGVNVHTGPKGKPVHVGVGPHSPFDYNYAASETQLHDDPNVALFFLEKDLHHGTKLNLHFTIYYTSNVDATFLPRSVSDSIPFSSNKVNDVLNKFSIKDGSDEAKTVKNTINECEGPSIKGEEKRCVTSLESMVDFATTKLGSNNVDAVSTEVTKKDNELQQYTMAPGVKRLGEDKASVVCHKENYPYAVFYCHKSETTKAYSVPLEGADGSRVKAVAVCHTDTSKWNPKHLAFQVLKVQPGTVPVCHFLPQDHVVFVPK

SEQ ID NO: 21015 - protein, 337 aa, Glycine max
MLVVATNADAALPPAFYWKSKLPTTPMPKAITDLLQPDWKEEKDTSVDVGKGGVNVGVEKGNQGPGDGTDVNVGGGDGGVNVHTGPKGKPVHVGVGPHSPFDYNYAASETQLHDDPNVALFFLEKDLHHGTKLNLHFTIYYTSNVDATFLPRSVSDSIPFSSNKVNDVLNKFSIKDGSDEAKTVKNTINECEGPSIKGEEKRCVTSLESMVDFATTKLGSNNVDAVSTEVTKKDNELQQYTMAPGVKRLGEDKASVVCHKENYPYAVFYCHKSETTKAYSVPLEGADGSRVKAVAVCHTDTSKWNPKHLAFQVLKVQPGTVPVCHFLPQDHVVFVPK

SEQ ID NO: 21016 - protein, 311 aa, Glycine max
MPKAITDLLQPDWKEEKDTSVDVGKGGVNVGVEKGNQGPGDGTDVNVGGGDGGVNVHTGPKGKPVHVGVGPHSPFDYNYAASETQLHDDPNVALFFLEKDLHHGTKLNLHFTIYYTSNVDATFLPRSVSDSIPFSSNKVNDVLNKFSIKDGSDEAKTVKNTINECEGPSIKGEEKRCVTSLESMVDFATTKLGSNNVDAVSTEVTKKDNELQQYTMAPGVKRLGEDKASVVCHKENYPYAVFYCHKSETTKAYSVPLEGADGSRVKAVAVCHTDTSKWNPKHLAFQVLKVQPGTVPVCHFLPQDHVVFVPK

SEQ ID NO: 21017 - DNA, 1483 bp, Glycine max
gtccttttgccacgcttaagatcacccaagagagaacctaagacacacaacacaacacaaacacacagagttagaggagaaatcatcatggcatcagcagcatctgggtttgtgttgtcacttaatgttgcagctgccaccacaaactcaagggtggtcatgttcaacacaaagaacaacgcttctaggcttgttgtaagggcttcagatgagcctgcagcggcggcacccgccaccgccacacccccagctgaagctgaagctaaaccaaagccaccacctattggccccaagagaggtgctaaggtaagttacttcaaaactcaactctttagtacggtagtttctcatgttgtgcagagtaatcgcttttattccatgaacatgatccttaattgttgattgtttgtgagtatactaggctagctccccccattggaattggtatgagaaaatgtttttagttataaatatgtcctcttattttccttttcttttgtgtcatcaaagatttatattatatagtaaatagtaaaaattggattttctctaactaaacacaaaaccctttttttcaaactatgaattaacaagtttactattaagcgcatggatcatccgacgggattgttctagcttcaccagtgatttttaagtttgagtctaggatatgtagcgcctggttcaaatttaagcttctatattgcatctaaagctgtaataagtgtattaaaggggtttcttgttacaaatatatatttaaagaggaagaattcagaatagaggagtgagtgatattaacacactccttcaatagaaactacaaaatcacaagtgaaactcatcaaatatgaagtggaacctgtgcaattttatgattcttattaaatttcatcataaatgaagaatatattcaagagcatatgctagcaagtctgttgttagcatttctctacagaatgtataggaaaaaaagacagtgatgaaacttgtatgttaattcattagagactctgttagaaatagtttgaaagttgaaatttgtattgagccagctgtgtagcaacaaggttagtttctaatttttcttttcaatcaacaggtgaagattcttaggaaggaatcttactggtacaaaggcactggttcagtggttgctgttgatcaggttagtgcccctaaactcactctaatgcataccctctcaattttctaccatcccatgcattatgcaaactcagttcctgttttattgttgtgcaggaccccaacactcgctaccctgttgtggttcgattcaacaaagtcaactatgccaatgtatcaacaaacaactatgctttggatgagattgtggaagtggaatgagtctaatttatttgtaattttgattctggtcatgctatcgcagttactagcctaaggtttttttatgtcaaaaacaaaaaagaatttgtatcatattctctctgttatctaaaag

SEQ ID NO: 21018 - protein, 133 aa, Glycine max
VLLPRLRSPKREPKTHNTTQTHRVRGEIIMASAASGFVLSLNVAAATTNSRVVMFNTKNNASRLVVRASDEPAAAAPATATPPAEAEAKPKPPPIGPKRGAKVSYFKTQLFSTVVSHVVQSNRFYSMNMILNC

SEQ ID NO: 21019 - protein, 104 aa, Glycine max
MASAASGFVLSLNVAAATTNSRVVMFNTKNNASRLVVRASDEPAAAAPATATPPAEAEAKPKPPPIGPKRGAKVSYFKTQLFSTVVSHVVQSNRFYSMNMILNC

SEQ ID NO: 21020 - protein, 80 aa, Glycine max
MFNTKNNASRLVVRASDEPAAAAPATATPPAEAEAKPKPPPIGPKRGAKVSYFKTQLFSTVVSHVVQSNRFYSMNMILNC

SEQ ID NO: 21021 - DNA, 1329 bp, Glycine max
aatctgcaatttgttatatattatactagaatattccatcttatgagttttttatttgctgattttgttctaatttccatgtcatctcttgtaagtaaaagattcttgtctaatgctgcttttatctctaatgttaatgattttcgtttgttgtttgatgactcaatatttctattatcttatacttagatcaatagtgtctagaatagaagattattcatatgacggatccaaaaatgtcaaatcagtgtaaaaaagaaaagaaaaatcataaagtcaaatctgtcaagaaagcaatattaagggtgacttctacagttggctggcaactaggttggcgattgattggttcgcctcaattaaagtttatagacatgacctggattatattttctcatttgcattcattctgattttattttaccattttgttttgtatttattcaaataattaattttttgttctttttatttttcttgtgtgcatgtacaccagcctgcacatattttaggaaacttagactttgttcccttgttatccagggggaacagggtgctcagataattgttgtacctgaactcgttgaatttctcatgtcaacactggttaaggttcgtaatgttcctgcatcttgcaccaagattccattaatttctcttgattatgaaccaccaaggttcagtattggcctgggctcaacttcacataatatttgtgtcagtcagactttaccaattttgtttattgtgcagaacaaaatcattcaaaactatagaagcatcactatgagttgatgcactagctagtgctggatttaaagtttctcgttcaaagctagttgacatgatcagcaatggtgatgtgcgtatcaactggatccatgttactaccaaaggaaccacactcaagagtggagatattgtatcagttagtggcaagggaagattaaagataggagaaataaactcctcaaagaaaggaaagtttgcagtggagctcattcagtatttgtagacgtttagcaagagctatcttcctaggcagtgcatgtttggattaaagttgagagagttcagaagtacttttattctcaaagtaacaattttttccttcatttgtgcattggaattcacaaacatatttttcaaactttaatccaacatagccgtagtctgtctaaagtctaaacggcatacttttactttttgtggaaaattttgcttagtctcatgtaactaaaatttatgatgaagatagaaaaaaatgtacagacagaacattcatcttctaatatttttactccctccatttcaagactattgatgttc

SEQ ID NO: 21022 - protein, 66 aa, Glycine max
MSTLVKVRNVPASCTKIPLISLDYEPPRFSIGLGSTSHNICVSQTLPILFIVQNKIIQNYRSITMS

SEQ ID NO: 21023 - protein, 63 aa, Glycine max
MTDPKMSNQCKKEKKNHKVKSVKKAILRVTSTVGWQLGWRLIGSPQLKFIDMTWIIFSHLHSF

SEQ ID NO: 21024 - protein, 62 aa, Glycine max
NLQFVIYYTRIFHLMSFLFADFVLISMSSLVSKRFLSNAAFISNVNDFRLLFDDSIFLLSYT

SEQ ID NO: 21025 - DNA, 1273 bp, Glycine max
aattcccctgattcattggagacgcacttgctctcttttgaattatatacaaggaaacaaaagattttgcttgccttgcaggctgtaaagcagttactgagattggatgctgaacaccctgattctcatcgttgtttgattaaattcttccataaagtgggatccatgaatgcttctgtgactgacagtgagaaactgatttggagtgtcttagaggctgagcgcccaactattagtcagctgcatgagaaatccctgtttgaggcaaacaactcattccttgaaaaacataaagattctttgatgcatagagcagcttttgcagaaatattgcatattttggattcaaacagaaagtctgaggctgttaagttcattgaagagtcaacaaataacattgtgcccagaaatggagcacttggaccaatcagggaatggaatcttaaagactgtattgcagttcacaagcttcttggaacagttcttgctgatcaggatgctgcattgagatggaaggtgcgttgtgcagagtacttcccatattctacatactttgagggatgccacagctctgcctctcccaactcggccttcaatcagttacgtaagaactctgaaaatgagagtcctaaccattcagtgggtggtcaaaatgtgggctccatcacatcaaacgggaaactagaggcatttaaagatctcactatctaatcaagtcgaaatacacatccatgaggctaaatatatatgcgtgttacccagcttggatgcttgcaaaaccaaacggcgtttgacacttccagaaacgactgtgttgcaatttgcagcaacaacggtcacagttttggtgcgggttatggcaaattctacacacgttattccgatgtattttctttgcatgatttcccccccccccccagctgtgaaatttatttggtttgcaaatgtgtataattttacctcaattatgtcttaggattgactttttcaatttgttcacccctttttttctgggaggtggtagaccggagctgcatggtctttgtaccgttgtcttagattttcattttggtcgttgggagagttacataatttttgttttctggtcctgtatccagtcaacatacatctaggagagcatgttgtatctttcctattttattggcttattcatcatgtataaacattatgtgaaaattttgctactggatgccaaaatgacatgtaattttggatgaattcagtaaaaaaaatggaggttaatattgctgtc

SEQ ID NO: 21026 - protein, 236 aa, Glycine max
NSPDSLETHLLSFELYTRKQKILLALQAVKQLLRLDAEHPDSHRCLIKFFHKVGSMNASVTDSEKLIWSVLEAERPTISQLHEKSLFEANNSFLEKHKDSLMHRAAFAEILHILDSNRKSEAVKFIEESTNNIVPRNGALGPIREWNLKDCIAVHKLLGTVLADQDAALRWKVRCAEYFPYSTYFEGCHSSASPNSAFNQLRKNSENESPNHSVGGQNVGSITSNGKLEAFKDLTI

SEQ ID NO: 21027 - protein, 181 aa, Glycine max
MNASVTDSEKLIWSVLEAERPTISQLHEKSLFEANNSFLEKHKDSLMHRAAFAEILHILDSNRKSEAVKFIEESTNNIVPRNGALGPIREWNLKDCIAVHKLLGTVLADQDAALRWKVRCAEYFPYSTYFEGCHSSASPNSAFNQLRKNSENESPNHSVGGQNVGSITSNGKLEAFKDLTI

SEQ ID NO: 21028 - protein, 135 aa, Glycine max
MHRAAFAEILHILDSNRKSEAVKFIEESTNNIVPRNGALGPIREWNLKDCIAVHKLLGTVLADQDAALRWKVRCAEYFPYSTYFEGCHSSASPNSAFNQLRKNSENESPNHSVGGQNVGSITSNGKLEAFKDLTI

SEQ ID NO: 21029 - DNA, 1342 bp, Glycine max
gacccgccaaaccattacaaaactaaacacccagctaccacattgtctagtatggctcttaatctcttaatttcaatcccattctttttactctttgtagtgaatccatttcactttgttgagccaagaaccttagaagtctccgagcatccattcaccagaactctccgaaaactcaaggacatcaacaagggacaaagggtgagaggcgtgggcgagctcaaaagctacctaaaaaaatttggctacctaacaacaaatgacaattcttcaaacaacaaccacttcgacaaaaacgttgagtttgctctcaaagaataccaagtgttccatcacttacgtcccacgggtcgtgtggatgccgaaaccatcaaaagaatgggcctcccacgttgtggtgtgcctgatattatcacccctcaaaaccataagcttaaggggttggtgattcttgcaaactatagcttcttctcgggttcaccaaaatgggaagagtctaaaagggcactaacctacacattcgtatcaagtgctaacgtgttgaggatgtatgatgtgaggctagcaacaaggaatgccttccaaagttgggcaagagcctctaacttcacatttatggaaatgccaagtgagtataataacctagctaacatagtcctagggtttcatcgtggggaccatggtgatgggtacccatttgatgggccgggccaggttttggcccacacttttgcaccacaagatggtaggttgcattttgatgctgatgaaccatggagcattgaatcaacaagctggaatgtaggaccaggatggaatgtgggttgggattggaggaggtgggtgcgtcctagatggcaaagccgaaggaccattgatttgcaaaccgtggctttgcatgaaataggtcaccttttagggctagggcatagtaacgttcccggctccattatgtatccctcttatgaaggggtaaagagggatctaactcaggatgatgtggatggcatacgggctctatatagattgcccaactagaacttgagaaatgttgttccacttgagttttgtgaaatagttgtcaagtgtaacaactaagccttggtgggttgttaacttaaattggttaagtagtgtgtttcgtaacaagttgatttgcattgatcgaggtttcttgaatcaataagtaggtgcttttatgttgattttattgttatcttatagtgactgtagatttctaatgtcttactagctatatgcttgaatgtttttatcttaaaagcaaatttactataaaacttagtgtaaaatttccaattcaacacagaagttactttttatt

SEQ ID NO: 21030 - protein, 345 aa, Glycine max
DPPNHYKTKHPATTLSSMALNLLISIPFFLLFVVNPFHFVEPRTLEVSEHPFTRTLRKLKDINKGQRVRGVGELKSYLKKFGYLTTNDNSSNNNHFDKNVEFALKEYQVFHHLRPTGRVDAETIKRMGLPRCGVPDIITPQNHKLKGLVILANYSFFSGSPKWEESKRALTYTFVSSANVLRMYDVRLATRNAFQSWARASNFTFMEMPSEYNNLANIVLGFHRGDHGDGYPFDGPGQVLAHTFAPQDGRLHFDADEPWSIESTSWNVGPGWNVGWDWRRWVRPRWQSRRTIDLQTVALHEIGHLLGLGHSNVPGSIMYPSYEGVKRDLTQDDVDGIRALYRLPN

SEQ ID NO: 21031 - protein, 328 aa, Glycine max
MALNLLISIPFFLLFVVNPFHFVEPRTLEVSEHPFTRTLRKLKDINKGQRVRGVGELKSYLKKFGYLTTNDNSSNNNHFDKNVEFALKEYQVFHHLRPTGRVDAETIKRMGLPRCGVPDIITPQNHKLKGLVILANYSFFSGSPKWEESKRALTYTFVSSANVLRMYDVRLATRNAFQSWARASNFTFMEMPSEYNNLANIVLGFHRGDHGDGYPFDGPGQVLAHTFAPQDGRLHFDADEPWSIESTSWNVGPGWNVGWDWRRWVRPRWQSRRTIDLQTVALHEIGHLLGLGHSNVPGSIMYPSYEGVKRDLTQDDVDGIRALYRLPN

SEQ ID NO: 21032 - protein, 219 aa, Glycine max
MGLPRCGVPDIITPQNHKLKGLVILANYSFFSGSPKWEESKRALTYTFVSSANVLRMYDVRLATRNAFQSWARASNFTFMEMPSEYNNLANIVLGFHRGDHGDGYPFDGPGQVLAHTFAPQDGRLHFDADEPWSIESTSWNVGPGWNVGWDWRRWVRPRWQSRRTIDLQTVALHEIGHLLGLGHSNVPGSIMYPSYEGVKRDLTQDDVDGIRALYRLPN

SEQ ID NO: 21033 - DNA, 1179 bp, Glycine max
gttcaacaacgccaccctcttcttcttcagattgtcatagcaaggaagcttgtttgcatatataatagagaaaatggtactgttgttagtttattgcaggtttgagtggttgattattacttcgtaaaagttagctggtaacaacaaataagtaaatcttgactctatggaagactacaatttttttgtcggtcaaaagttccatgatgtgaaggcatttcggaatgcaattaaagaagctgccattgcacagcattttgagcttcgtactattaaaagtgacctgattcgctactttgctaagtgtgcctcagatggctgtccatggcggattcgtgctgtcaagctccctaatgccccaacatttactattagaagtattgatgggacacatacctgtgggagaaatgcaaacaatgggcaccatcaggcttctgttgattggattgtgagtttcatagaagaaaggttgcgagataacatcaattataaaccaaaagatattttgcatgacatccataaacaatatggtataaccataccatataagcaagcttggcgtgcaaaggagaggggtcttgcggctatatatggctcttctgaagaaggatattacctacttccttcatactgtgaacaaattaagaaaacaaatcctggaagtgttgcagaggtatttactggtgcagataaccgttttcagagattctttgtttccttttatgcatcaattaatggttttgttaatggttgtttgccaattgttggacttggtggaatccagctgaaaagtaaataccttagcacattgctttcagcaacttcatttgatgctgatggtgggttgtttccacttgcgtttggtgttgttgatgtagaaaatgatgacagttggacatggttcctgtctgagttgcataaggtactagaggtgaatactgaatgcatgccaaagtttatatttttgtcagatgggcaaaagggtattacagatgcagtaagaaggaagttcccaagttcttctcatgcactctgcatgcgtcacttgactgaaagcattggcaaagagttcaagaactctaggcttgtgcatcttctgtggaaggcttcacatgccacaacaaccattgcatttaaagaaaaaatgggtgaaatagaggaggtttctcctgaagctgc

SEQ ID NO: 21034 - protein, 337 aa, Glycine max
MEDYNFFVGQKFHDVKAFRNAIKEAAIAQHFELRTIKSDLIRYFAKCASDGCPWRIRAVKLPNAPTFTIRSIDGTHTCGRNANNGHHQASVDWIVSFIEERLRDNINYKPKDILHDIHKQYGITIPYKQAWRAKERGLAAIYGSSEEGYYLLPSYCEQIKKTNPGSVAEVFTGADNRFQRFFVSFYASINGFVNGCLPIVGLGGIQLKSKYLSTLLSATSFDADGGLFPLAFGVVDVENDDSWTWFLSELHKVLEVNTECMPKFIFLSDGQKGITDAVRRKFPSSSHALCMRHLTESIGKEFKNSRLVHLLWKASHATTTIAFKEKMGEIEEVSPEA

SEQ ID NO: 21035 - DNA, 1176 bp, Glycine max
tgaatgaagcatattcattttctagtaccattcctatgtacagtgatcgcagtggcatgaacttctcatctcatggagttgaaaagatcaaaaactcagcaggccaaatcatgaaacaagagaaacttgaaagggacaagtctcagcttgaaaaactacaagttcctggaaatcatgattcaccactgtgctcaatagatttaaatgatgtagtcaactatgaggagtttatgagaaacttgacaaatgaagagcagcagcaattactgaagtatctcccggtggttgatactgctaaatttcctgatagccttagaaacatgttcaatagcttccaattcaaggagaacttaatctattttcagcaacttcttggggaaggagtctttgacatctctttgttgggggcaaaacctgaagaatggaagacattaaaaaggcttgcgttatctaatctgtcaaagtcaaaatgggtagaacactataatttcctgaagaaatgtgaaaacaaatctggaaaatctattggtttgggatctactgctatggaatctagttatgttacaactgccaagagaatgcgtgagcatgacagccaaaatcaaaattttccagaattgaagacaacaatgagaagccccaaaagggtgttcataaagcctagctgtgaggtcaaagaagttgtagaagaaggctctagcttcagtccaaaaagcctatttgctttaccccatggtgttggtagcttgcacatgttggattctttcaactttgttggtgagagttctgaagatctgctgttagaggtgccttctaacagttcttttccacaggcagagcttctgcacccatctttaagctatggtgctcaggtcagcaccactagtagctcagtacactctcttgttactcatccttaactaatctttactaggttacttggatgggtatggacacaatatttagtcataatagggttcacatgttttgcatctgaaacaccaaaattcctgtacaagagatatcatggttgtgtttttgtttccttgcaaccttgagcttggatttacaaaggatggaagttgaatgggcttttttttttttttttttgtatagattggtaatagattgtaacatatagcatgaaattcggagtgatcatctccggagttttgt

SEQ ID NO: 21036 - protein, 305 aa, Glycine max
NEAYSFSSTIPMYSDRSGMNFSSHGVEKIKNSAGQIMKQEKLERDKSQLEKLQVPGNHDSPLCSIDLNDVVNYEEFMRNLTNEEQQQLLKYLPVVDTAKFPDSLRNMFNSFQFKENLIYFQQLLGEGVFDISLLGAKPEEWKTLKRLALSNLSKSKWVEHYNFLKKCENKSGKSIGLGSTAMESSYVTTAKRMREHDSQNQNFPELKTTMRSPKRVFIKPSCEVKEVVEEGSSFSPKSLFALPHGVGSLHMLDSFNFVGESSEDLLLEVPSNSSFPQAELLHPSLSYGAQVSTTSSSVHSLVTHP

SEQ ID NO: 21037 - protein, 294 aa, Glycine max
MYSDRSGMNFSSHGVEKIKNSAGQIMKQEKLERDKSQLEKLQVPGNHDSPLCSIDLNDVVNYEEFMRNLTNEEQQQLLKYLPVVDTAKFPDSLRNMFNSFQFKENLIYFQQLLGEGVFDISLLGAKPEEWKTLKRLALSNLSKSKWVEHYNFLKKCENKSGKSIGLGSTAMESSYVTTAKRMREHDSQNQNFPELKTTMRSPKRVFIKPSCEVKEVVEEGSSFSPKSLFALPHGVGSLHMLDSFNFVGESSEDLLLEVPSNSSFPQAELLHPSLSYGAQVSTTSSSVHSLVTHP

SEQ ID NO: 21038 - protein, 287 aa, Glycine max
MNFSSHGVEKIKNSAGQIMKQEKLERDKSQLEKLQVPGNHDSPLCSIDLNDVVNYEEFMRNLTNEEQQQLLKYLPVVDTAKFPDSLRNMFNSFQFKENLIYFQQLLGEGVFDISLLGAKPEEWKTLKRLALSNLSKSKWVEHYNFLKKCENKSGKSIGLGSTAMESSYVTTAKRMREHDSQNQNFPELKTTMRSPKRVFIKPSCEVKEVVEEGSSFSPKSLFALPHGVGSLHMLDSFNFVGESSEDLLLEVPSNSSFPQAELLHPSLSYGAQVSTTSSSVHSLVTHP

SEQ ID NO: 21039 - DNA, 1137 bp, Glycine max
aaatttatttttaaatataattttacaataattttttttaaggtatattagtactaaaaaaaatttgggatcttttttttttgaacctaaagccgttgtttgggccttaagccagcctgtcgctgaacatataagctattaacgaatgtcacacaataataatagagatcaaaaataaaattttaactttttgcgggatgaaaattacaagtaaaattataaggaaaaaaaaatcaaaattactaattttatagaaattaaaaatatatttaagtcaaattataaagatacacccacttttattacaatctcaaagcttttttacctaagaatataatgtcaaagaagatgaattcataattaatttgtaaactacagattaagtcgtcaccgtgtacgtgttttggtaaaattagcatgtactttatcacatttgtatgtttctatttgttgtattgttttgcagtgttagaggaacgatcgataggtacaagaaagcatgtgctgcctccacaaatccagaatctgtctctgaagctaatacacagttttatcagcaggaagcgtccaaattaaaacgacaaatcagagacattcagaatctaaacaggcacatccttggtgaagctcttagctctctgagtctgaaggaattaaagaacctggagagtagactggagaaaggtttaagcagagttagatccagaaagcatgaaactttgtttgccgatatcgagttcatgcaaaagcgggaaatagagctgcaaaaccataataattttctgagagctaagatagctgaacacgagaaagcacaacaacggcaacaggatatgataccgggaaatgtgtgcgagtcaaccatacctccacaatcatatgaccgcaatttcttccctgttaatctcatagattccaataatcaatattcaaatcaagaccagactgctcttcaacttgtcctttcaagtggtgtgggatcccttacatcgtcctatgtttcgtgaaggagagtgcccttagaaactcctctgctaaagttcttacaacggagaacaagagaaaaactaatcagcatttgtaccaatacatcatttgatattgtttatgtatctttcaatatatatagtttctatt

SEQ ID NO: 21040 - protein, 189 aa, Glycine max
MFLFVVLFCSVRGTIDRYKKACAASTNPESVSEANTQFYQQEASKLKRQIRDIQNLNRHILGEALSSLSLKELKNLESRLEKGLSRVRSRKHETLFADIEFMQKREIELQNHNNFLRAKIAEHEKAQQRQQDMIPGNVCESTIPPQSYDRNFFPVNLIDSNNQYSNQDQTALQLVLSSGVGSLTSSYVS

SEQ ID NO: 21041 - DNA, 1651 bp, Glycine max
attataaagtgaaacttcattttgctgagatagcattctctgatgaccaatcatattgcaaccttggaaagcgtgtattcgatgtatcaattcaaggttttaaatatctgaaagattttaacattgcgaaagaagctggtggagttggtaagggaatcactagggagtttaatgttaatgttacagaaagcaccttggaaatccacttatcctgggcaggaaaaggaactaatgccattcctataataggtgtatatggacctctcatatctgctatcactgtgaccccaaactttaaagtttatgcacatgggttctctactggaacaattgttggaattgttgctggggcatgtgtgattgtcatattgatgctctttgctctttggaagatgggtttcctttgtcagaaagatcaaacagaccaagaacttctaggtctgaaaacaggttatttcagtttaagacaaattaaagctgctactaataactttgacccagcaaataagataggtgaaggaggctttggaccagtattcaagggtgtactatcagatggtgctgtgattgctgttaagcagctctcctccaaatcaaagcaagggaatcgtgaattcatcaatgaaataggcatgatatctgctttgcagcatccaaaccttgtgaaactttatggctgctgcattgaaggaaaccagctgctgctagtatatcagtacatggagaacaatagtcttgctcgtgcactttttggtaaagaacatgagaggatgcaattggactggcccagaagaatgcaaatttgtctgggtatagcaaagggcttagcttatcttcatgaggaatcaaggttgaaaatagtgcacagggatattaaggcaaccaatgtcttacttgataaacatctgcatgccaagatctctgactttggtttagccaaacttgatgaagaagagaatactcatatcagcacaagaatagctgggacaattggttacatggctcctgagtatgctatgaggggttacttgactgacaaagcagatgtctatagctttggaattgtagctttagagattgttagtggaaagagcaacacaaattataggccaaaggaggagtttgtatatcttttagattgggcctatgttctccaagagcaaggaaaccttctggagctggtggatccaagtcttggttcaaagtactcctcagaagaggccatgagaatgctgctgttagcactcttgtgcaccaacccttctcccactcttagaccatgtatgtcatcagtagtgagcatgcttgagggaaaaactccaattcaagcaccaataattaaacgcggtgacagtgcagaagatgtaagatttaaagcctttgagatgctatcacaagacagtcaaactcatgtctcttctgcattctcagaagaaagtatagagcaaagaagcaaatcaatggggggaccatggcttgactcctccatatcacttccaagtagaattgattaggcttcaaccgatcaacttattagatattccaattatgtgtgatttgcaagtcggggaagttaactcattaaattttaattcatagttgcttgctatatgtatggtggtttaaaggctattaatggaggtttccaacg

SEQ ID NO: 21042 - protein, 503 aa, Glycine max
YKVKLHFAEIAFSDDQSYCNLGKRVFDVSIQGFKYLKDFNIAKEAGGVGKGITREFNVNVTESTLEIHLSWAGKGTNAIPIIGVYGPLISAITVTPNFKVYAHGFSTGTIVGIVAGACVIVILMLFALWKMGFLCQKDQTDQELLGLKTGYFSLRQIKAATNNFDPANKIGEGGFGPVFKGVLSDGAVIAVKQLSSKSKQGNREFINEIGMISALQHPNLVKLYGCCIEGNQLLLVYQYMENNSLARALFGKEHERMQLDWPRRMQICLGIAKGLAYLHEESRLKIVHRDIKATNVLLDKHLHAKISDFGLAKLDEEENTHISTRIAGTIGYMAPEYAMRGYLTDKADVYSFGIVALEIVSGKSNTNYRPKEEFVYLLDWAYVLQEQGNLLELVDPSLGSKYSSEEAMRMLLLALLCTNPSPTLRPCMSSVVSMLEGKTPIQAPIIKRGDSAEDVRFKAFEMLSQDSQTHVSSAFSEESIEQRSKSMGGPWLDSSISLPSRID

SEQ ID NO: 21043 - protein, 380 aa, Glycine max
MLFALWKMGFLCQKDQTDQELLGLKTGYFSLRQIKAATNNFDPANKIGEGGFGPVFKGVLSDGAVIAVKQLSSKSKQGNREFINEIGMISALQHPNLVKLYGCCIEGNQLLLVYQYMENNSLARALFGKEHERMQLDWPRRMQICLGIAKGLAYLHEESRLKIVHRDIKATNVLLDKHLHAKISDFGLAKLDEEENTHISTRIAGTIGYMAPEYAMRGYLTDKADVYSFGIVALEIVSGKSNTNYRPKEEFVYLLDWAYVLQEQGNLLELVDPSLGSKYSSEEAMRMLLLALLCTNPSPTLRPCMSSVVSMLEGKTPIQAPIIKRGDSAEDVRFKAFEMLSQDSQTHVSSAFSEESIEQRSKSMGGPWLDSSISLPSRID

SEQ ID NO: 21044 - protein, 373 aa, Glycine max
MGFLCQKDQTDQELLGLKTGYFSLRQIKAATNNFDPANKIGEGGFGPVFKGVLSDGAVIAVKQLSSKSKQGNREFINEIGMISALQHPNLVKLYGCCIEGNQLLLVYQYMENNSLARALFGKEHERMQLDWPRRMQICLGIAKGLAYLHEESRLKIVHRDIKATNVLLDKHLHAKISDFGLAKLDEEENTHISTRIAGTIGYMAPEYAMRGYLTDKADVYSFGIVALEIVSGKSNTNYRPKEEFVYLLDWAYVLQEQGNLLELVDPSLGSKYSSEEAMRMLLLALLCTNPSPTLRPCMSSVVSMLEGKTPIQAPIIKRGDSAEDVRFKAFEMLSQDSQTHVSSAFSEESIEQRSKSMGGPWLDSSISLPSRID

SEQ ID NO: 21045 - DNA, 1249 bp, Glycine max
gaaggaagaagagaaggagaatgacggaaagttgcatccgatccgtcgtagaagccattcactcctctcctttccaagccgttctccatctcgccggtggagcttctcaggtggtgggttcgttgctatcagttcccggtgcttcgaatactgtgctcgaagttgtggttccttactctaagatgtctctcattcagttactcggaaagattccatcccaattttgtggccaacagactgctgaagatatggctttattggcgtataatcgcgctcttaagctctccaagccaggatccccggctgttggagtgggtttcactggttctttggccagcagtcgtccaaaactcggggaacacagattttatatgtcaacaaggacagccgaccaactttggatatcaagtgtgaccttgactaaggggcttcgtactcgagaagaagaggatagagtttctagtcatcttttgatcaaggcaattggaaatgcatgcaaagttcccggagcatctgttttgttgttgagtgagtcagatgtatctgatgaatgtgaaacacaattcaatgaagatcaacagttagaacaacttataaatggacaaatatgctttaaaatttacccatttgaaaatgagatatcagccgaaaggaaaataataatgcctggttctttcaatccattacatgatgggcatctgaagcttatggatgttgctactcgcatttgtggtgatgggtatccttgctttgaaatatcggcagtcaatgcagacaaacctccattatcagtgtctcagatcaaagatcgcatcaagcaatttgaaaaagttggaaagacggtaattatatccaatcagccttatttttataagaaggctgaacttttcccaggcagtgcttttgtaattggggccgacacggcagtgaggcttattaaccctgaatactacgatggtgactacaacaagatgctgaagatacttgttggttgtaaagaaacaggatgcactttccttgtgggtggtcggaatgttgatggtgctttcaaggttcttgacgatattgatgttccaaaagaactaaaagacatgttcgtctccattccagctgaacagttccgcatggatatatcctccactgaaataagaaatagaagtgggatgtaaataatttcatggctaaaggtcaatgtttaatctaggatgaaatcactaacacttaaaaaaaaaagggtttatattttttg

SEQ ID NO: 21046 - protein, 388 aa, Glycine max
RKKRRRMTESCIRSVVEAIHSSPFQAVLHLAGGASQVVGSLLSVPGASNTVLEVVVPYSKMSLIQLLGKIPSQFCGQQTAEDMALLAYNRALKLSKPGSPAVGVGFTGSLASSRPKLGEHRFYMSTRTADQLWISSVTLTKGLRTREEEDRVSSHLLIKAIGNACKVPGASVLLLSESDVSDECETQFNEDQQLEQLINGQICFKIYPFENEISAERKIIMPGSFNPLHDGHLKLMDVATRICGDGYPCFEISAVNADKPPLSVSQIKDRIKQFEKVGKTVIISNQPYFYKKAELFPGSAFVIGADTAVRLINPEYYDGDYNKMLKILVGCKETGCTFLVGGRNVDGAFKVLDDIDVPKELKDMFVSIPAEQFRMDISSTEIRNRSGM

SEQ ID NO: 21047 - protein, 382 aa, Glycine max
MTESCIRSVVEAIHSSPFQAVLHLAGGASQVVGSLLSVPGASNTVLEVVVPYSKMSLIQLLGKIPSQFCGQQTAEDMALLAYNRALKLSKPGSPAVGVGFTGSLASSRPKLGEHRFYMSTRTADQLWISSVTLTKGLRTREEEDRVSSHLLIKAIGNACKVPGASVLLLSESDVSDECETQFNEDQQLEQLINGQICFKIYPFENEISAERKIIMPGSFNPLHDGHLKLMDVATRICGDGYPCFEISAVNADKPPLSVSQIKDRIKQFEKVGKTVIISNQPYFYKKAELFPGSAFVIGADTAVRLINPEYYDGDYNKMLKILVGCKETGCTFLVGGRNVDGAFKVLDDIDVPKELKDMFVSIPAEQFRMDISSTEIRNRSGM

SEQ ID NO: 21048 - protein, 328 aa, Glycine max
MSLIQLLGKIPSQFCGQQTAEDMALLAYNRALKLSKPGSPAVGVGFTGSLASSRPKLGEHRFYMSTRTADQLWISSVTLTKGLRTREEEDRVSSHLLIKAIGNACKVPGASVLLLSESDVSDECETQFNEDQQLEQLINGQICFKIYPFENEISAERKIIMPGSFNPLHDGHLKLMDVATRICGDGYPCFEISAVNADKPPLSVSQIKDRIKQFEKVGKTVIISNQPYFYKKAELFPGSAFVIGADTAVRLINPEYYDGDYNKMLKILVGCKETGCTFLVGGRNVDGAFKVLDDIDVPKELKDMFVSIPAEQFRMDISSTEIRNRSGM

SEQ ID NO: 21049 - DNA, 1353 bp, Glycine max
gtgttgaatttgtaatggacattgattgcatgcctttgaattcatcagataatatgccagaagctctgaggaggcatattggttccccaatatcctctttcatgaataaagagccacaaattagtggaaattcaaattttggggggtgcgaaatgaatcattcctcacccgtgaaggcaaaggttgctaccgttgataatctctgtgcacaagcaggttgtgctcaaccatgtaaagtaacacaccatcaagctaaggaagctgacatacaggcagtttctgaactaaagcatgctctagataaaaaggagacattgttgatggagcttcgaagtgcaaatagcgacatattggaaaacaaaaatggcatagactgcttaaaagattctgaggttttcaagaagcattatgcgacggtttctgatgctatgctacaactgaggcaacgcaatacttacagaggaaactctctgccatcctggatgaagccacaagcaagtttcaatgttcatgatgatcttcccagtatgttggatagttctctgacacaagagttagggtcaactgttgttcaagttattaaaggatccaggctaagggcacatgcaatggtagatgctgcatttcaggcattgtctttggcaaaggaaggtgaagatgctttcataaagattgggcaagcattggattctataaatcatcagcagttagcctcccagtctaggttacccgtgatcaggtctcaagagcaagtgaacgcgaatggcagtttttatcatcttaatcattcaactagcggtgtatcagaacctatacttaatgatccatcgcttccaaaaccacataattgttctgacaaatttgatactgaacttccatcagatcttatcacttcgtgtgttgctacattaatcatgattcagacttgtactgaacggcaataccctccagctgatgtggctcagatattagattctgccgttaccagtctgcatccatgctgttctcaaaaccttcctatttatagagaaattcaaatgtgcatgggaagaatcaaaacgcagatgttagctctcatccctacttgacttacatcttttcttctgcagatctctctctaatgtagctgctgctgtacatatgatgctgaagctgaactattagttcagaacttcagatcacatacgggctcgtcgcctaccttgtaatgtctttattgagaggtacaataatttatttcttttactccacaccgatagggtcaaacggtggtattagaaatcatgtaattcactaccgtgtctttttttatctttggtgtcaaatggtggtacttaataaaaatgattattt

SEQ ID NO: 21050 - protein, 361 aa, Glycine max
VEFVMDIDCMPLNSSDNMPEALRRHIGSPISSFMNKEPQISGNSNFGGCEMNHSSPVKAKVATVDNLCAQAGCAQPCKVTHHQAKEADIQAVSELKHALDKKETLLMELRSANSDILENKNGIDCLKDSEVFKKHYATVSDAMLQLRQRNTYRGNSLPSWMKPQASFNVHDDLPSMLDSSLTQELGSTVVQVIKGSRLRAHAMVDAAFQALSLAKEGEDAFIKIGQALDSINHQQLASQSRLPVIRSQEQVNANGSFYHLNHSTSGVSEPILNDPSLPKPHNCSDKFDTELPSDLITSCVATLIMIQTCTERQYPPADVAQILDSAVTSLHPCCSQNLPIYREIQMCMGRIKTQMLALIPT

SEQ ID NO: 21051 - protein, 357 aa, Glycine max
MDIDCMPLNSSDNMPEALRRHIGSPISSFMNKEPQISGNSNFGGCEMNHSSPVKAKVATVDNLCAQAGCAQPCKVTHHQAKEADIQAVSELKHALDKKETLLMELRSANSDILENKNGIDCLKDSEVFKKHYATVSDAMLQLRQRNTYRGNSLPSWMKPQASFNVHDDLPSMLDSSLTQELGSTVVQVIKGSRLRAHAMVDAAFQALSLAKEGEDAFIKIGQALDSINHQQLASQSRLPVIRSQEQVNANGSFYHLNHSTSGVSEPILNDPSLPKPHNCSDKFDTELPSDLITSCVATLIMIQTCTERQYPPADVAQILDSAVTSLHPCCSQNLPIYREIQMCMGRIKTQMLALIPT

SEQ ID NO: 21052 - protein, 352 aa, Glycine max
MPLNSSDNMPEALRRHIGSPISSFMNKEPQISGNSNFGGCEMNHSSPVKAKVATVDNLCAQAGCAQPCKVTHHQAKEADIQAVSELKHALDKKETLLMELRSANSDILENKNGIDCLKDSEVFKKHYATVSDAMLQLRQRNTYRGNSLPSWMKPQASFNVHDDLPSMLDSSLTQELGSTVVQVIKGSRLRAHAMVDAAFQALSLAKEGEDAFIKIGQALDSINHQQLASQSRLPVIRSQEQVNANGSFYHLNHSTSGVSEPILNDPSLPKPHNCSDKFDTELPSDLITSCVATLIMIQTCTERQYPPADVAQILDSAVTSLHPCCSQNLPIYREIQMCMGRIKTQMLALIPT

SEQ ID NO: 21053 - DNA, 1305 bp, Glycine max
tttttctgtgtagttccatcgcatcaaaccctggcaatggcagctacggccatacagaggttcccccaacacaaatacgtagacgcagttcgctggcttcccctacaatccgcattcgaccgattcgcagttttggcactcttcgacttcgattccgatgcttcctccatcgaaatccactctctcaacccaaaccccctctcattggaaccacactcttcgtggtcctctccttcccgcgtttcctccctcaaggcctcgcacttcctccagaagcccctcattgtcgcttccacttcctccggttctctccacttcctcttctccgattcctccgtcgcaacgctcgagtccgaggtctccattcccgagggcgcgctgcattccgttcccgcttcttgcgttgacctattggacggtggcgtcgagtgcgtgaccgttggggaagatgggaaggtcaacttggttggtattggggattccaatttgaactaccggaggttgtttgatagcgccggcctggtctcctacacggcggtgagctgggcgtctccgatggagttcgccaccggtggctacggcttcggtcttcattggtgggaccaacggaaaccgggaggtccggtttctcaatttaagggtaactgggataaaaaattgacatctgggattgtgcactctattgatattcatccgtcgcgaaagcatacttgcctggctggtggttccttaggtactgtttttgcctgggatcttaggtggcagcaacaaccgattatactttcaggcgcaggggctggtgctggtggcaacactgctgtccagtcaatatctgaaagtgaggtttgggaggttcagtatgatcgttgtataaaaccaaatacttcatctacccggatcttaccttccatgatctgctctgaggatggaattctcggtgtgattgagcaaggcgaggaacctattgagctgctggctgaaccttgtgccatcaatagctttgatattgatcgacataatccatcggatgtgatatgtagtttagaatgggaagcagtagccatattgacaagacaataacattcggggtttctactttttggtggcttgaatttcagaaagtttgtaactgatagaaggagtggagctcttaacggacaatttgtgttttttatgtattccggaatgttctattccttttctaaagccatttgcatgcaaatggattttgggattgtacaatatgtagcatgtgtataattgactttacacattggatcaatgctactaccatccgctttgcct

SEQ ID NO: 21054 - protein, 359 aa, Glycine max
FFCVVPSHQTLAMAATAIQRFPQHKYVDAVRWLPLQSAFDRFAVLALFDFDSDASSIEIHSLNPNPLSLEPHSSWSSPSRVSSLKASHFLQKPLIVASTSSGSLHFLFSDSSVATLESEVSIPEGALHSVPASCVDLLDGGVECVTVGEDGKVNLVGIGDSNLNYRRLFDSAGLVSYTAVSWASPMEFATGGYGFGLHWWDQRKPGGPVSQFKGNWDKKLTSGIVHSIDIHPSRKHTCLAGGSLGTVFAWDLRWQQQPIILSGAGAGAGGNTAVQSISESEVWEVQYDRCIKPNTSSTRILPSMICSEDGILGVIEQGEEPIELLAEPCAINSFDIDRHNPSDVICSLEWEAVAILTRQ

SEQ ID NO: 21055 - protein, 347 aa, Glycine max
MAATAIQRFPQHKYVDAVRWLPLQSAFDRFAVLALFDFDSDASSIEIHSLNPNPLSLEPHSSWSSPSRVSSLKASHFLQKPLIVASTSSGSLHFLFSDSSVATLESEVSIPEGALHSVPASCVDLLDGGVECVTVGEDGKVNLVGIGDSNLNYRRLFDSAGLVSYTAVSWASPMEFATGGYGFGLHWWDQRKPGGPVSQFKGNWDKKLTSGIVHSIDIHPSRKHTCLAGGSLGTVFAWDLRWQQQPIILSGAGAGAGGNTAVQSISESEVWEVQYDRCIKPNTSSTRILPSMICSEDGILGVIEQGEEPIELLAEPCAINSFDIDRHNPSDVICSLEWEAVAILTRQ

SEQ ID NO: 21056 - DNA, 1317 bp, Glycine max
aagcaaactcataaattctcctacaccgacaaaaaatggaactttcaccacaagaattcattttccgttccccactccccgatattcccatccccacacacctcccattgtactcttactgcttccaaaagttgtcacagttccatgaccgtccatgcctcatcgacggcgacaccagcgaaaccctcacctacgccgacgtcgatctctccgctcgccgcatctccgccggcctccacaaaatcggcatctgccagggtgacgtcatcatgctcgtcctccgcaactgcccgcagttcgcactcgccttcctgggcgccactcaccgcggcgccgtcgtcaccaccgccaaccccttctacactccggcggagctcgcgaagcaagcgatggccacgaaaaccaggctggtcataacgcaatccgcgtaccttgagaaaatcaagagtttcgcggacgacagcgatgtcatggtgatgtgcattgatgacgattattcttctgaaaacgatggcgttttgcatttctcaacgctcaccaacgccgacgaaagggaagcccctgccgttaagattaaccctgacgacctcgttgcgcttccgttttcttctggcacgtctgggctccccaagggggttatgttatcgcatgaaaacttggttaccacgatatcgcagttagttgacggcgaaaacccgcaccagtacacgcacagcgaggatgtgttactctgtgtgctgcctatgtttcacatctatgcgctcaattctattttgctctgcgggattcgatctggtgcggctgtacttattgtgcaaaagtttgagatcactactctgtttgagctcatcgagaagtacaaggtgacggttgcgtcgtttgttcctcccatcgttttggcgttggttaagagcggagagactcatcgctacgacctgtcgtctattcgcgctgtggtcaccggtgcggcaccgttgggaggggaactccaagaagccgttaaggctaggctaccacacgctacttttggacaggtttcattttcattattatttttaaaaattaattagtttataaaaaggacattttcatttttcaagatttaacttctaattttacaaagtgacatggcaaattttgattggtttataacaagtcagattttagcgacctaagctgcagtaacagtcgcagtcgcagtttcttcacacgcttcttcacgatataataactacaaaacacttaatttctattcataaaattaaggaaaatgttttatcaacacccattaacctatttaacatcgagaaagagaat

SEQ ID NO: 21057 - protein, 344 aa, Glycine max
MELSPQEFIFRSPLPDIPIPTHLPLYSYCFQKLSQFHDRPCLIDGDTSETLTYADVDLSARRISAGLHKIGICQGDVIMLVLRNCPQFALAFLGATHRGAVVTTANPFYTPAELAKQAMATKTRLVITQSAYLEKIKSFADDSDVMVMCIDDDYSSENDGVLHFSTLTNADEREAPAVKINPDDLVALPFSSGTSGLPKGVMLSHENLVTTISQLVDGENPHQYTHSEDVLLCVLPMFHIYALNSILLCGIRSGAAVLIVQKFEITTLFELIEKYKVTVASFVPPIVLALVKSGETHRYDLSSIRAVVTGAAPLGGELQEAVKARLPHATFGQVSFSLLFLKIN

SEQ ID NO: 21058 - protein, 266 aa, Glycine max
MLVLRNCPQFALAFLGATHRGAVVTTANPFYTPAELAKQAMATKTRLVITQSAYLEKIKSFADDSDVMVMCIDDDYSSENDGVLHFSTLTNADEREAPAVKINPDDLVALPFSSGTSGLPKGVMLSHENLVTTISQLVDGENPHQYTHSEDVLLCVLPMFHIYALNSILLCGIRSGAAVLIVQKFEITTLFELIEKYKVTVASFVPPIVLALVKSGETHRYDLSSIRAVVTGAAPLGGELQEAVKARLPHATFGQVSFSLLFLKIN

SEQ ID NO: 21059 - protein, 226 aa, Glycine max
MATKTRLVITQSAYLEKIKSFADDSDVMVMCIDDDYSSENDGVLHFSTLTNADEREAPAVKINPDDLVALPFSSGTSGLPKGVMLSHENLVTTISQLVDGENPHQYTHSEDVLLCVLPMFHIYALNSILLCGIRSGAAVLIVQKFEITTLFELIEKYKVTVASFVPPIVLALVKSGETHRYDLSSIRAVVTGAAPLGGELQEAVKARLPHATFGQVSFSLLFLKIN

SEQ ID NO: 21060 - DNA, 1459 bp, Glycine max
ttttgaatccatggggattagaatttttgaagtgttattctacagggaaagatctgatagaaaccagtggaacctctgctactgctgagcaaattgcatggatggtttctggtgcagctgatacttttgtcagaaaagagaaagaagggttgtcctttcccgggccttttcttttattccttgtaccctcccaagaaaaatctacccaggttcgaacagtttgcaagcctttaaaatctgttggaatacatacagtgagtattcatccaggtgcttccttagatcatcagattcaaggtctgaaaacttgtgagcctgagtttcttgtttctactcctgagaggctattggagcttgtttctacgaaggcaattgatatttctggggtatccatgctggttattgatgggcttaatactatctgtagtgctggccacgctgatacagtaaaatccatcaagaattgtatttctggcaatccccgtgttgtgattttcaatgattgtgtcagccacatgtcgatcccaatggttcgatatcttctgacaggatcaatttgtagagtctctctcaataattcaattaacagcctaagttcgtacattatccaatctgttgaagtgtgtacgtcagaagaagataaagttgttatgagcatcgaagccctggatcaatttcagagcaacagtacacagaattcaaacatgctatatattttaagcaaagatgtcaagtgccataaattggtcaagactctcaaatccaagggttattccgtttcacttgattctgatgcagcaaatattaatgatagggtggattcagaccgcagagcagcggtttctttgattgatttggtgcaaatctctactacggatatagggacgtatgatgtggtagtcctacctagttttgtaccctcaattgacacttacgtgcatattttgacaaagatggctcgcacaagtgtcaatggtgtattgcacagtttcttaacaaaaagagatacagaacttgctgcaccgttgattgcggttcttgaacaatgcggtcaggaagtgcctcagacccttcaggatctgaatcatacatcgaacatgttggaagattgaatgttgaaggtgcttagtcatcaatttttttatgttcattccgtctctgcggctcatgatatcaaaagatcaattccttttactttggaatttgggctgggagctgagtggtagggattgtaggtttcctatgcttggaatttggaaaccttcacgttaagaatcccattaagaaattttttgcaatattatctctgcttctgtttcaagactgtattttactgtaatcgaatgagcttctttgtcgcaacatcattttgttgcttttgtagcagcatagaaacaaacatttaattctttagatactatcttttattaaaattaagattttattttagtaacttaag

SEQ ID NO: 21061 - protein, 369 aa, Glycine max
LNPWGLEFLKCYSTGKDLIETSGTSATAEQIAWMVSGAADTFVRKEKEGLSFPGPFLLFLVPSQEKSTQVRTVCKPLKSVGIHTVSIHPGASLDHQIQGLKTCEPEFLVSTPERLLELVSTKAIDISGVSMLVIDGLNTICSAGHADTVKSIKNCISGNPRVVIFNDCVSHMSIPMVRYLLTGSICRVSLNNSINSLSSYIIQSVEVCTSEEDKVVMSIEALDQFQSNSTQNSNMLYILSKDVKCHKLVKTLKSKGYSVSLDSDAANINDRVDSDRRAAVSLIDLVQISTTDIGTYDVVVLPSFVPSIDTYVHILTKMARTSVNGVLHSFLTKRDTELAAPLIAVLEQCGQEVPQTLQDLNHTSNMLED

SEQ ID NO: 21062 - protein, 336 aa, Glycine max
MVSGAADTFVRKEKEGLSFPGPFLLFLVPSQEKSTQVRTVCKPLKSVGIHTVSIHPGASLDHQIQGLKTCEPEFLVSTPERLLELVSTKAIDISGVSMLVIDGLNTICSAGHADTVKSIKNCISGNPRVVIFNDCVSHMSIPMVRYLLTGSICRVSLNNSINSLSSYIIQSVEVCTSEEDKVVMSIEALDQFQSNSTQNSNMLYILSKDVKCHKLVKTLKSKGYSVSLDSDAANINDRVDSDRRAAVSLIDLVQISTTDIGTYDVVVLPSFVPSIDTYVHILTKMARTSVNGVLHSFLTKRDTELAAPLIAVLEQCGQEVPQTLQDLNHTSNMLED

SEQ ID NO: 21063 - protein, 239 aa, Glycine max
MLVIDGLNTICSAGHADTVKSIKNCISGNPRVVIFNDCVSHMSIPMVRYLLTGSICRVSLNNSINSLSSYIIQSVEVCTSEEDKVVMSIEALDQFQSNSTQNSNMLYILSKDVKCHKLVKTLKSKGYSVSLDSDAANINDRVDSDRRAAVSLIDLVQISTTDIGTYDVVVLPSFVPSIDTYVHILTKMARTSVNGVLHSFLTKRDTELAAPLIAVLEQCGQEVPQTLQDLNHTSNMLED

SEQ ID NO: 21064 - DNA, 1404 bp, Glycine max
attgcattatgcacaagaattgaagctggtcttgagcagcagattgctcttccacgggattcctaccttcagggttatttcagtaacatatctgagtaccttagagttggaccacccttatattttgttgtaaaggattacaactacagtttggaatccaaacacacaaaccagctatgctccattagccactgtgattcaaattctcttttaaatgagatatctagagcatcattagtgccaacatcaagctacatagccaaaccagctgcctcatggcttgatgattttcttgtatggatatcacctgaagcttttagttgctgtcgaaaattcacaaatgactcttattgtccacctgatgatcagccaccttgctgtttaccagatgaagggccatgtgggttgggtggagtgtgcaaagactgtacaacatgtttccgccactcggatttggttaatgatcgtccatctacagcacagttcagagagaagcttccctggtttcttgatgcactgccatcagctgattgtgcaaagggtggccatggagcttacaccaacagtgtagatctgaatggttatgaggggggtgtcatccaagcttctgagttccgtacttatcacacaccacttaatagacaaggtgactatgttaatgcaatacgagctgcaagggacttttcggcaataatttcttcgtctttaaagatggatatttttccgtactcagtgttttatatcttctttgaacaatacctggatatatggaagttagccctgatcaacattaccgtagcactaggtgctatttttgttgtctgtctgatcatcacatccagcgtgtggagttcagcaatcttattacttgttctgatcatgataattttggacctcatgggtgtaatggcaattttgggtattcaactcaatgcggtgtctgttgtaaaccttattatgtcaataggaattgctgtggagttctgtgtgcatatagtacatgcattcatggtaagcttgggggataggagccaacgagcaaagacagcattgtgtaccatgggggcttctgtattcagtggaatcacacttacaaaattagtcggagtcctcgtcctttgcttctcaacatcagaaatttttgtggtgtattacttccagatgtatctggccttggttatcattggcttcttacacggtcttgtgtttctacctgtggtattgagcttgtttggtcctccgttaagatatagtcattaaggagcagctagaagacatgccttctgcttcatcagaacagcctctaattagatgaaagttagattttaattacgctgatcacatacttaatgaacaagaaaaaatgttttgattatagaggattaatagtatcttttgactttc

SEQ ID NO: 21065 - protein, 419 aa, Glycine max
IALCTRIEAGLEQQIALPRDSYLQGYFSNISEYLRVGPPLYFVVKDYNYSLESKHTNQLCSISHCDSNSLLNEISRASLVPTSSYIAKPAASWLDDFLVWISPEAFSCCRKFTNDSYCPPDDQPPCCLPDEGPCGLGGVCKDCTTCFRHSDLVNDRPSTAQFREKLPWFLDALPSADCAKGGHGAYTNSVDLNGYEGGVIQASEFRTYHTPLNRQGDYVNAIRAARDFSAIISSSLKMDIFPYSVFYIFFEQYLDIWKLALINITVALGAIFVVCLIITSSVWSSAILLLVLIMIILDLMGVMAILGIQLNAVSVVNLIMSIGIAVEFCVHIVHAFMVSLGDRSQRAKTALCTMGASVFSGITLTKLVGVLVLCFSTSEIFVVYYFQMYLALVIIGFLHGLVFLPVVLSLFGPPLRYSH

SEQ ID NO: 21066 - DNA, 1291 bp, Glycine max
gaatcttaaataagagaacagcccaaaacctttcaaaatacacatgctgcaaattgctcacccaatcaccagccatgggagaggttgacgcagcattcatccaagacccaccacacaggccaaagctctccaccatccaagccgaaggaattcccataattgatctctctccaataaccaaccacagagtttcagacccttctgctattgaaggcttagtgaaggagataggtagtgcatgcaacgagtggggtttcttccaagtaacaaaccatggagtgcccctcactctaaggcaaaacattgagaaagcctcaaaattgttctttgcacagagtgcggaggaaaagagaaaggttagcagaaatgagagctctccagcgggttattatgacacagaacacaccaaaaacgttagggactggaaagaagtctttgattttctagccaaagaacccactttcattcctgtcacttctgatgaacatgatgatcgagtcaatcagtggactaatcaatcccctgaataccctctaaactttagggttgtaacacaagagtatattcaagagatggaaaagctgtcctttaagattttagagcttatagctttgagcttaggccttgaagcaaagaggtttgaagaatttttcatcaaagaccaaactagctttattcgactcaaccactatcctccatgcccttatcctgaccttgctcttggcgtcggtcgacacaaggaccctggtgccttaaccattcttgcacaggatgaggttggaggacttgaagtgagacgtaaagcagatcaagagtggataagagtgaaacccaccccagatgcttatatcatcaacattggtgacactgttcaggtttggagcaatgatgcatatgagagtgtggatcacagagtggtggtcaactctgagaaggaaaggttttccattcctttcttcttcttccctgcacacgacaccgaagttaagcctttggaggagctgataaatgagcaaaacccttcaaaatataggccatacaagtggggcaagtttcttgtccacagagggaacagcaattttaagaagcaaaatgaggagaacattcaaatttatcattacaagatagcttaaagggtaaattgtgtatgatattatcatgatatgaggcagcgttgatccaagacaacgttactgatatgaataagtccgatcaacttcactgctaaatttcctagtgtgccttatgtattgaacaatcactgaataaaagaactaaattattaccattt

SEQ ID NO: 21067 - protein, 376 aa, Glycine max
ILNKRTAQNLSKYTCCKLLTQSPAMGEVDAAFIQDPPHRPKLSTIQAEGIPIIDLSPITNHRVSDPSAIEGLVKEIGSACNEWGFFQVTNHGVPLTLRQNIEKASKLFFAQSAEEKRKVSRNESSPAGYYDTEHTKNVRDWKEVFDFLAKEPTFIPVTSDEHDDRVNQWTNQSPEYPLNFRVVTQEYIQEMEKLSFKILELIALSLGLEAKRFEEFFIKDQTSFIRLNHYPPCPYPDLALGVGRHKDPGALTILAQDEVGGLEVRRKADQEWIRVKPTPDAYIINIGDTVQVWSNDAYESVDHRVVVNSEKERFSIPFFFFPAHDTEVKPLEELINEQNPSKYRPYKWGKFLVHRGNSNFKKQNEENIQIYHYKIA

SEQ ID NO: 21068 - protein, 352 aa, Glycine max
MGEVDAAFIQDPPHRPKLSTIQAEGIPIIDLSPITNHRVSDPSAIEGLVKEIGSACNEWGFFQVTNHGVPLTLRQNIEKASKLFFAQSAEEKRKVSRNESSPAGYYDTEHTKNVRDWKEVFDFLAKEPTFIPVTSDEHDDRVNQWTNQSPEYPLNFRVVTQEYIQEMEKLSFKILELIALSLGLEAKRFEEFFIKDQTSFIRLNHYPPCPYPDLALGVGRHKDPGALTILAQDEVGGLEVRRKADQEWIRVKPTPDAYIINIGDTVQVWSNDAYESVDHRVVVNSEKERFSIPFFFFPAHDTEVKPLEELINEQNPSKYRPYKWGKFLVHRGNSNFKKQNEENIQIYHYKIA

SEQ ID NO: 21069 - DNA, 1591 bp, Glycine max
aagaaagaagtgagaatacgaaagaaggggttttattgccaaatgaagaaggctcacgagacacgcatggggtcagccacatgctatccctcctcctcctccttctctctccggtggtggtgactcgccggaaaacacccactgccacctctaacgccgccgccggcgaacacccttctcaaaatctcacccgacccaattcacctttctcctctctcttctcaattccccatctgggtatccctgtttccctcaaagttctcttctttttcgtgattcagaagtgctcagtgatacccttttcttagaacaatgagagcggggaaagggagtcaggaagaggatgagtacgaggaagaagagtttggttcttccaagaaacagggcacttcctctgcccctaacaccaataaagcagatggaaaagccatcgataaggctagtgcgataagatcgaaacattctgtgactgagcagcggagaaggagcaagataaatgagagattccagatattgagggatctcatacctcatagtgatcaaaagagggacacggcatcatttttattagaggtgatagagtatgttcagtacttacaggagaaggtacaaaagtatgaaggttcatatcaaggttggggtcaagaaccctcgaagttgatgccatggagaaatagtcattggcgtgtccagagctttgccggtcaacccacggctgtaaagaatggtttgggtccagtatcaccttttcctggaaagtttgatgaaagcaatgttagtatctctccaactatgcttaatggctcccagaatacaatagatcctgatcagagcagggatattgtcaacaaaacggctgagaggcaacctgatttagtaagcaagggaatacctcttccccttgctatgcatgcaaacatgtctgttcctgtcagaagtgatggcgtacttgcacatcctcttcagggaactgtttctaatgcacaatcaactgaatgcccaacaactagtgaaccacagaatcaacaggatgaactctcggttgaaggagggacaattagcatctcaagtgcatactcccaagggttgttgaataatctaactcaagcgctacaaagtgctggtttagatctgtctcaggctagcatatcagttcagattaatcttgggaaacgggcaaacaaaggactgaattgtgggacctcttctctcaagcatcatgacaacccttcttcaaacaatcaaacaattgcacattttagagatgcaggcagtggagaagactctgatcaagcacaaaaaagaatgaaaacatataagtgatatatatgtggcattttcatgagaatccacttgcatccagatttctcacttattcttggtgcagcatataacttgtggttactgtacatccttccccatttgtttgacttttaatggttattttaaaactatttaaaccttgaacacgatcatttgtggagatattgaggcttctactgtagggagcatgtcatctatttcgcttgtatgatacatattataattataattattcagtattattgagcttttggatggcaattttatg

SEQ ID NO: 21070 - protein, 336 aa, Glycine max
MRAGKGSQEEDEYEEEEFGSSKKQGTSSAPNTNKADGKAIDKASAIRSKHSVTEQRRRSKINERFQILRDLIPHSDQKRDTASFLLEVIEYVQYLQEKVQKYEGSYQGWGQEPSKLMPWRNSHWRVQSFAGQPTAVKNGLGPVSPFPGKFDESNVSISPTMLNGSQNTIDPDQSRDIVNKTAERQPDLVSKGIPLPLAMHANMSVPVRSDGVLAHPLQGTVSNAQSTECPTTSEPQNQQDELSVEGGTISISSAYSQGLLNNLTQALQSAGLDLSQASISVQINLGKRANKGLNCGTSSLKHHDNPSSNNQTIAHFRDAGSGEDSDQAQKRMKTYK

SEQ ID NO: 21071 - protein, 220 aa, Glycine max
MPWRNSHWRVQSFAGQPTAVKNGLGPVSPFPGKFDESNVSISPTMLNGSQNTIDPDQSRDIVNKTAERQPDLVSKGIPLPLAMHANMSVPVRSDGVLAHPLQGTVSNAQSTECPTTSEPQNQQDELSVEGGTISISSAYSQGLLNNLTQALQSAGLDLSQASISVQINLGKRANKGLNCGTSSLKHHDNPSSNNQTIAHFRDAGSGEDSDQAQKRMKTYK

SEQ ID NO: 21072 - protein, 176 aa, Glycine max
MLNGSQNTIDPDQSRDIVNKTAERQPDLVSKGIPLPLAMHANMSVPVRSDGVLAHPLQGTVSNAQSTECPTTSEPQNQQDELSVEGGTISISSAYSQGLLNNLTQALQSAGLDLSQASISVQINLGKRANKGLNCGTSSLKHHDNPSSNNQTIAHFRDAGSGEDSDQAQKRMKTYK

SEQ ID NO: 21073 - DNA, 1517 bp, Glycine max
tctccaacaccatctccttcgacacgcgtgagatgcgaaaactaatggattgccacaatctggaggagcgcgactggatcttctctctcatcctccagagccccctcttcaacccccgccaccgcgccggaagggtgttcgtctcccccgactacaaccagcccatggaacaccagcgccaggccaccatgaagcgcatcggttatctcctccaaaaaggggtcttccgaggatggctcacgggaaatggccccgaacaagagctcaggaagctcgcgctgcatgaggtcattgggatgtatgatcattctctcgcggttaagcttggcgttcacttcttcttgtggggtggagccgtaaagtttctgggaaccaagcgccatcatgacaagtggttgaattctactgaaaactatgatatcaagggttgttttgctatgtctgagttaggccatggaagtaatgttcgaggaattgaaacagtcactacttatgattcaaacaccggagaatttgtcatcaataccccatgtgaatcgggtcagaagtatttgattggtggtgcggcaaatcatgcaacccacactatagtcttttcacagctctatataaatggaagcaatcaaggggtgcatgcatttattgcccaaatcagggattcagatggaaacatatgtccaaacatccgaatagctgattgtggtcacaaaattggtttaaatggagttgataatggccgtatctggtttgataatgtgaggatacccagagagaatttgttgaattctgtggctgatgtttcaccaagtggtgaatatttgagtgcaataaagaatgcagatcagaggtttgctgcgttcttagcccctttgacttctggtcgtgttactattgctgttagtgctgtttacatatccaagattagcttggccattgctataagatatgcattgacaaggcaagcattctccattacaccaaacgggcctgaagtcttcctgcttgattaccctagtcatcaacggcgtctgttacctttacttgcaaaggtatatgcaatgagttttgccgcaaatgagctcaaaattatgtatgtcaacagaacgcccaagtcaaacaaagcaattcatattgtttctagtgcttacaaggctactttaacttggaataatatgcgaactctccaggaatgccgtgaagcctgtggaggacaaggagttaaatctgaaaatcgtgttggcaatttcatgggtgaatttgatgtgcattcgacatttgagggggacaacaatgttctgatgcagcagattagcaaggcactctttgcagaatatatagcatgtcagaagaaaaacaaaccattcagtggtttgggattagaacacatgaacaaacctctgcctgttatcccatctcagctaacaagttccactgttaggagcagtgaatttcagattgatctgttccacctaagagagcgagacctattgagacgttttgctgaagaggtctcagaa

SEQ ID NO: 21074 - protein, 505 aa, Glycine max
SNTISFDTREMRKLMDCHNLEERDWIFSLILQSPLFNPRHRAGRVFVSPDYNQPMEHQRQATMKRIGYLLQKGVFRGWLTGNGPEQELRKLALHEVIGMYDHSLAVKLGVHFFLWGGAVKFLGTKRHHDKWLNSTENYDIKGCFAMSELGHGSNVRGIETVTTYDSNTGEFVINTPCESGQKYLIGGAANHATHTIVFSQLYINGSNQGVHAFIAQIRDSDGNICPNIRIADCGHKIGLNGVDNGRIWFDNVRIPRENLLNSVADVSPSGEYLSAIKNADQRFAAFLAPLTSGRVTIAVSAVYISKISLAIAIRYALTRQAFSITPNGPEVFLLDYPSHQRRLLPLLAKVYAMSFAANELKIMYVNRTPKSNKAIHIVSSAYKATLTWNNMRTLQECREACGGQGVKSENRVGNFMGEFDVHSTFEGDNNVLMQQISKALFAEYIACQKKNKPFSGLGLEHMNKPLPVIPSQLTSSTVRSSEFQIDLFHLRERDLLRRFAEEVSE

SEQ ID NO: 21075 - protein, 495 aa, Glycine max
MRKLMDCHNLEERDWIFSLILQSPLFNPRHRAGRVFVSPDYNQPMEHQRQATMKRIGYLLQKGVFRGWLTGNGPEQELRKLALHEVIGMYDHSLAVKLGVHFFLWGGAVKFLGTKRHHDKWLNSTENYDIKGCFAMSELGHGSNVRGIETVTTYDSNTGEFVINTPCESGQKYLIGGAANHATHTIVFSQLYINGSNQGVHAFIAQIRDSDGNICPNIRIADCGHKIGLNGVDNGRIWFDNVRIPRENLLNSVADVSPSGEYLSAIKNADQRFAAFLAPLTSGRVTIAVSAVYISKISLAIAIRYALTRQAFSITPNGPEVFLLDYPSHQRRLLPLLAKVYAMSFAANELKIMYVNRTPKSNKAIHIVSSAYKATLTWNNMRTLQECREACGGQGVKSENRVGNFMGEFDVHSTFEGDNNVLMQQISKALFAEYIACQKKNKPFSGLGLEHMNKPLPVIPSQLTSSTVRSSEFQIDLFHLRERDLLRRFAEEVSE

SEQ ID NO: 21076 - protein, 491 aa, Glycine max
MDCHNLEERDWIFSLILQSPLFNPRHRAGRVFVSPDYNQPMEHQRQATMKRIGYLLQKGVFRGWLTGNGPEQELRKLALHEVIGMYDHSLAVKLGVHFFLWGGAVKFLGTKRHHDKWLNSTENYDIKGCFAMSELGHGSNVRGIETVTTYDSNTGEFVINTPCESGQKYLIGGAANHATHTIVFSQLYINGSNQGVHAFIAQIRDSDGNICPNIRIADCGHKIGLNGVDNGRIWFDNVRIPRENLLNSVADVSPSGEYLSAIKNADQRFAAFLAPLTSGRVTIAVSAVYISKISLAIAIRYALTRQAFSITPNGPEVFLLDYPSHQRRLLPLLAKVYAMSFAANELKIMYVNRTPKSNKAIHIVSSAYKATLTWNNMRTLQECREACGGQGVKSENRVGNFMGEFDVHSTFEGDNNVLMQQISKALFAEYIACQKKNKPFSGLGLEHMNKPLPVIPSQLTSSTVRSSEFQIDLFHLRERDLLRRFAEEVSE

SEQ ID NO: 21077 - DNA, 1278 bp, Glycine max
gtccgtgagcgtgaagcacagcagcatgtggaagttgaggtcagctcgaatctcttatctgctttgtagattgagtcaaatcaaagtaagcgaagcccagattaagcaccaccgtttctgtcacagtcaagtgtcgtcggtattgcctcctccatctaatttgcaacaccaacagacacagtgtgatcctcctcacaccgcagttcccaggaattatattggggaaaatgtatctagaaaagataagaacaaatatctttacactacgcttcttgaactcaacgacagtaaggaggctgtttatggtgctcttgatgcctgggttgcatgggagcaaaacttccccatcgcctcattgaaaacaatattgatttctcttgagaaggaccagcagtggcatagggttgtgcaggtaattaaatggatgctgagcaaaggacaggggatgacaatgggcacatatggtcaactgatacgagctttagatatggaccatagagtcgaagaagctcagaaattctgggaaatcaaaattggttctgatttgcattcagttccttggcaattgtgtcatctcatgatatctgtttattatcgaaacaacatgctccaagatcttgttaagcttttcaagggactggaagcttttgatcgaaaacctcgggataaatctatcattcagaaagtggcaaatgcatatgaggtgttaggcttagttaaagagaaagagagggtactggaaaaatataaccatctcttcacagagacaggaccaaccaagagacataaaaggaactcatttgaggcaaagaaacatgtgcatcctacaaaagagaaaaggcatcagaagcaatctagaaaggcctcatctgaggaaaagtacaagtcagagcaaaaagatccaaaattggatattggacatatctagtgcactcttttctgatgccatgatggtattatgatatgatagtagaccaaagtgcctccatgttcaagtattctgctaacctatgtgggaagcccatcaaggctagaagtgcagcttgatgaaacggaaccaaatgtatgtcacctatggacgtcaaaagctgtttcaaatttatataccaaaagaaaaatgcttttccaagtttgctgcacggtttatagatttagttattggactacggaagtccagaggccatcatgtgtgaagtgtgaacatttttattcagtgaacatttgtcctaaattaactcaaatccttgttatgtaattatttattttccaatcttttag

SEQ ID NO: 21078 - protein, 308 aa, Glycine max
SVSVKHSSMWKLRSARISYLLCRLSQIKVSEAQIKHHRFCHSQVSSVLPPPSNLQHQQTQCDPPHTAVPRNYIGENVSRKDKNKYLYTTLLELNDSKEAVYGALDAWVAWEQNFPIASLKTILISLEKDQQWHRVVQVIKWMLSKGQGMTMGTYGQLIRALDMDHRVEEAQKFWEIKIGSDLHSVPWQLCHLMISVYYRNNMLQDLVKLFKGLEAFDRKPRDKSIIQKVANAYEVLGLVKEKERVLEKYNHLFTETGPTKRHKRNSFEAKKHVHPTKEKRHQKQSRKASSEEKYKSEQKDPKLDIGHI

SEQ ID NO: 21079 - protein, 300 aa, Glycine max
MWKLRSARISYLLCRLSQIKVSEAQIKHHRFCHSQVSSVLPPPSNLQHQQTQCDPPHTAVPRNYIGENVSRKDKNKYLYTTLLELNDSKEAVYGALDAWVAWEQNFPIASLKTILISLEKDQQWHRVVQVIKWMLSKGQGMTMGTYGQLIRALDMDHRVEEAQKFWEIKIGSDLHSVPWQLCHLMISVYYRNNMLQDLVKLFKGLEAFDRKPRDKSIIQKVANAYEVLGLVKEKERVLEKYNHLFTETGPTKRHKRNSFEAKKHVHPTKEKRHQKQSRKASSEEKYKSEQKDPKLDIGHI

SEQ ID NO: 21080 - protein, 167 aa, Glycine max
MLSKGQGMTMGTYGQLIRALDMDHRVEEAQKFWEIKIGSDLHSVPWQLCHLMISVYYRNNMLQDLVKLFKGLEAFDRKPRDKSIIQKVANAYEVLGLVKEKERVLEKYNHLFTETGPTKRHKRNSFEAKKHVHPTKEKRHQKQSRKASSEEKYKSEQKDPKLDIGHI

SEQ ID NO: 21081 - DNA, 1738 bp, Glycine max
ggccccaatcttggaatgactcagagacctgttgtagtaagtatggtggacatttagtgtcattgacatcgcttcaggagctacaatttgctcaaagcctatgtggtgaatctataaatagttgctggattggtgggcaaagactcaactctacagctggttatcagtggatgtggtctaacaattcaccgtggaacaactccatattttctatggtcaatgttccaccccattgtaatggaactggaccgtcctgtcataggaacagtacagacaatttgtgtacagtagtgactaataattcaaactctctcataactgagagatgcgacaatcctcatgcttctctatgtatacttgatatagatacaaaacggaaccaaatgcaccgtcgcagagaataccttatcatcctcacagtggtgagtaccttgatactctccacaacattatcagtggtagtttggcttcttgtatataagcgaggcaagaaaagaaggcggtctagaaaactatctattccaggagcttctcttccatcatggaaagtctttaccaaagaggaattaaggtcaattacaaagaatttcagtgaaggtaaccgtcttgttggggatgccaagactggtggtacatacagtggggttttatcagatggttcaaaagtcgcagttaagagattaaagaggtcaagctttcagaggaaaaaggagttctattctgaaattagcagggttgctcggcttcgtcatcctaatctggtggctgtgatgggatgctgctatgatcatggtgaccgctacattgtttatgagtttgtagctaatgggcccttagataaatggctacatcatataccaaggggaggtcgcaacttagattgggctatgaggatgaaaattgcaactacgcttgctcaaggaattgcgtttctgcacgacaaggttaagccacaagttgtgcatcgagatatacgtgctagcaatgttctgctggatgaggagtttggagcacagcttatgggtgttggtctgtccaagtttgtgccatatgaggtaatgcacgagaggactgtgatggcaggtggaacttatggatatcttgccccggagtttgtgtacagaaatgagctcacaacaaagagtgatgtgtatagttttggtgtgctactacttgaaattgtaagtggacgtagacctgcacaggcagtggattctgtgggttggcagagtatatttgaatgggcgacgcctcttgtgcaagctcatcgctatcacgaactcttggatcttcatataacttcctcctctatcatcccagaggctagtaccatccaaaaggttgtagaccttgtttattcttgcacgcagcatgtcccgtctatgcgccctagaatgtctcatgttgttcaccagctgcaacagattgcccagccacctgcaaagtaaagctaatgaagcagtagtcttgacctcaagtttttgtatctataacttcaaagtggaggggggttttttgttttaaatattaacagatatttatgtatgtactttaacctgcccttttttagggtcgaaactaaattaagtgggaattagagttagcccaggcaaattctgctagacaatatttgatgtcatacatgtaatgtaggtgtagttgtaatatggtactattgatggaattgtaccccttttttcattcttagtaaagttgtaaaatggacaacattaaaagg

SEQ ID NO: 21082 - protein, 481 aa, Glycine max
PQSWNDSETCCSKYGGHLVSLTSLQELQFAQSLCGESINSCWIGGQRLNSTAGYQWMWSNNSPWNNSIFSMVNVPPHCNGTGPSCHRNSTDNLCTVVTNNSNSLITERCDNPHASLCILDIDTKRNQMHRRREYLIILTVVSTLILSTTLSVVVWLLVYKRGKKRRRSRKLSIPGASLPSWKVFTKEELRSITKNFSEGNRLVGDAKTGGTYSGVLSDGSKVAVKRLKRSSFQRKKEFYSEISRVARLRHPNLVAVMGCCYDHGDRYIVYEFVANGPLDKWLHHIPRGGRNLDWAMRMKIATTLAQGIAFLHDKVKPQVVHRDIRASNVLLDEEFGAQLMGVGLSKFVPYEVMHERTVMAGGTYGYLAPEFVYRNELTTKSDVYSFGVLLLEIVSGRRPAQAVDSVGWQSIFEWATPLVQAHRYHELLDLHITSSSIIPEASTIQKVVDLVYSCTQHVPSMRPRMSHVVHQLQQIAQPPAK

SEQ ID NO: 21083 - protein, 425 aa, Glycine max
MWSNNSPWNNSIFSMVNVPPHCNGTGPSCHRNSTDNLCTVVTNNSNSLITERCDNPHASLCILDIDTKRNQMHRRREYLIILTVVSTLILSTTLSVVVWLLVYKRGKKRRRSRKLSIPGASLPSWKVFTKEELRSITKNFSEGNRLVGDAKTGGTYSGVLSDGSKVAVKRLKRSSFQRKKEFYSEISRVARLRHPNLVAVMGCCYDHGDRYIVYEFVANGPLDKWLHHIPRGGRNLDWAMRMKIATTLAQGIAFLHDKVKPQVVHRDIRASNVLLDEEFGAQLMGVGLSKFVPYEVMHERTVMAGGTYGYLAPEFVYRNELTTKSDVYSFGVLLLEIVSGRRPAQAVDSVGWQSIFEWATPLVQAHRYHELLDLHITSSSIIPEASTIQKVVDLVYSCTQHVPSMRPRMSHVVHQLQQIAQPPAK

SEQ ID NO: 21084 - protein, 411 aa, Glycine max
MVNVPPHCNGTGPSCHRNSTDNLCTVVTNNSNSLITERCDNPHASLCILDIDTKRNQMHRRREYLIILTVVSTLILSTTLSVVVWLLVYKRGKKRRRSRKLSIPGASLPSWKVFTKEELRSITKNFSEGNRLVGDAKTGGTYSGVLSDGSKVAVKRLKRSSFQRKKEFYSEISRVARLRHPNLVAVMGCCYDHGDRYIVYEFVANGPLDKWLHHIPRGGRNLDWAMRMKIATTLAQGIAFLHDKVKPQVVHRDIRASNVLLDEEFGAQLMGVGLSKFVPYEVMHERTVMAGGTYGYLAPEFVYRNELTTKSDVYSFGVLLLEIVSGRRPAQAVDSVGWQSIFEWATPLVQAHRYHELLDLHITSSSIIPEASTIQKVVDLVYSCTQHVPSMRPRMSHVVHQLQQIAQPPAK

SEQ ID NO: 21085 - DNA, 1759 bp, Glycine max
aaacatgttcttgcgcagatttgggcatttgcaaaccaaagccagagtggtttccttgggcgggcagagttttacaatgcccttaagcttgttaccgtggcacagagtaagcgggaactaactcccgaaatggtaaaagcagcattgtatggcccggctgcatctaagattcctgctcctcagattaatttcagtgccacagtatctgcacctgcgcctgcacctgcacctgcacctgtaccacagattggtcctgttagtcctttatcccaccaaaatcttggaccaaggggggcagttccaaatttgagtggtaaccagcaaaccctcccttctcagggaaatcagtttgcgaggcctccagctactgttgccactcaaggaatggctcgccctgaaacccctggcatttccagttatggcaagatgggtggaactccagaagtaacttcctctccagtagcagttagaggaactagtcccccatcagcgcaggaggggtttgggtttggatcaaatgtggcacggccacctggccaatatcctgcctcccccataaagtcatcagatcaattggttaaggattctaaaccagtggatgcttctgttaacggtgattcttccgattcattttttggaggagatttattctcagctagctcatttcagcccaagcaagcttcttctccacaaggattttcttctggcacttcagcgctttcttcagctattgttcctgtatctggaggaaaccagcattctactaggactagtacccctgattctttgcagcgctcacttgcaacccagcctgttggtgcacagcttcagcaagcccagccggtggtaaaacaggaccagcatgcgtcagtccagacacataataagccgaattcatctggacttccagggagattacaggattctgcttccagtcaatcccaagctccatggccaaggatgactcaaactgatgttcagaaatatatgaaagtattcatggaagtagacacagatagagatgggaaaatcacgggggaacaagcgcggaacttgtttcttagttggagattaccaagagaggttttaaagcaggtttgggacttatcggatcaagataatgatagcatgctttctctcagggagttttgtattgcattgtacctaatggagcgacacagggaaggacgtgttcttccagcagtacttccaagtaacattgtgcttgatttaccaactactggtcaacctgctgctcactatagtagttggggaaatccatcagcttttcaacaacagccagggacaactggttctggtgctcgacaagtgaaccctgctgcaggtcggccgccaaggccggctgctgtctctcagtctgatgaaggacctcagaacaagccgcagaaatctagaattccagtcttggagaagcacctcattaatcagctgagttcagatgagcaaaattcaattaattcaaagtttcaagaagcgacagaagctgataagaaggtggaagaacttgagaaggaaattatggagtccagagagaaaatagaattttaccgtgcaaaaatgcaggaacttgttctgtacaaaagcagatgtgacaatcgtcttaatgaggtcatagaaaggatagctgctgataagcatgaggttgagattttagcaaagaaatatgaagataaatataagcaagtgggagatttatcatccaagttaactaccgaggaagccacgtttcgtgacatac

SEQ ID NO: 21086 - protein, 586 aa, Glycine max
KHVLAQIWAFANQSQSGFLGRAEFYNALKLVTVAQSKRELTPEMVKAALYGPAASKIPAPQINFSATVSAPAPAPAPAPVPQIGPVSPLSHQNLGPRGAVPNLSGNQQTLPSQGNQFARPPATVATQGMARPETPGISSYGKMGGTPEVTSSPVAVRGTSPPSAQEGFGFGSNVARPPGQYPASPIKSSDQLVKDSKPVDASVNGDSSDSFFGGDLFSASSFQPKQASSPQGFSSGTSALSSAIVPVSGGNQHSTRTSTPDSLQRSLATQPVGAQLQQAQPVVKQDQHASVQTHNKPNSSGLPGRLQDSASSQSQAPWPRMTQTDVQKYMKVFMEVDTDRDGKITGEQARNLFLSWRLPREVLKQVWDLSDQDNDSMLSLREFCIALYLMERHREGRVLPAVLPSNIVLDLPTTGQPAAHYSSWGNPSAFQQQPGTTGSGARQVNPAAGRPPRPAAVSQSDEGPQNKPQKSRIPVLEKHLINQLSSDEQNSINSKFQEATEADKKVEELEKEIMESREKIEFYRAKMQELVLYKSRCDNRLNEVIERIAADKHEVEILAKKYEDKYKQVGDLSSKLTTEEATFRDI

SEQ ID NO: 21087 - protein, 543 aa, Glycine max
MVKAALYGPAASKIPAPQINFSATVSAPAPAPAPAPVPQIGPVSPLSHQNLGPRGAVPNLSGNQQTLPSQGNQFARPPATVATQGMARPETPGISSYGKMGGTPEVTSSPVAVRGTSPPSAQEGFGFGSNVARPPGQYPASPIKSSDQLVKDSKPVDASVNGDSSDSFFGGDLFSASSFQPKQASSPQGFSSGTSALSSAIVPVSGGNQHSTRTSTPDSLQRSLATQPVGAQLQQAQPVVKQDQHASVQTHNKPNSSGLPGRLQDSASSQSQAPWPRMTQTDVQKYMKVFMEVDTDRDGKITGEQARNLFLSWRLPREVLKQVWDLSDQDNDSMLSLREFCIALYLMERHREGRVLPAVLPSNIVLDLPTTGQPAAHYSSWGNPSAFQQQPGTTGSGARQVNPAAGRPPRPAAVSQSDEGPQNKPQKSRIPVLEKHLINQLSSDEQNSINSKFQEATEADKKVEELEKEIMESREKIEFYRAKMQELVLYKSRCDNRLNEVIERIAADKHEVEILAKKYEDKYKQVGDLSSKLTTEEATFRDI

SEQ ID NO: 21088 - protein, 458 aa, Glycine max
MARPETPGISSYGKMGGTPEVTSSPVAVRGTSPPSAQEGFGFGSNVARPPGQYPASPIKSSDQLVKDSKPVDASVNGDSSDSFFGGDLFSASSFQPKQASSPQGFSSGTSALSSAIVPVSGGNQHSTRTSTPDSLQRSLATQPVGAQLQQAQPVVKQDQHASVQTHNKPNSSGLPGRLQDSASSQSQAPWPRMTQTDVQKYMKVFMEVDTDRDGKITGEQARNLFLSWRLPREVLKQVWDLSDQDNDSMLSLREFCIALYLMERHREGRVLPAVLPSNIVLDLPTTGQPAAHYSSWGNPSAFQQQPGTTGSGARQVNPAAGRPPRPAAVSQSDEGPQNKPQKSRIPVLEKHLINQLSSDEQNSINSKFQEATEADKKVEELEKEIMESREKIEFYRAKMQELVLYKSRCDNRLNEVIERIAADKHEVEILAKKYEDKYKQVGDLSSKLTTEEATFRDI

SEQ ID NO: 21089 - DNA, 1809 bp, Glycine max
aagtcacatggccattcacaacaatctaccacccccggcaaggatcacgttgtggcgcattcgaagatggtgaaattggtgtgcagctccgcggactacaaggaaaaatgtgaagaccctcttaacaaggcaatggaggatgaccccaaactcacgcaaccaaaagaccttctcaaggcatatgtcaaatttgctgaggatgaggttagcaaggccttcaacaaaaccatctccatgaagtttgaaaatgagcaagagaaaggtgcatttgaagattgcaagaagctctttgaggatgccaaggacgacattgcaacctccatatccgaacttgaaaaaattgagatgaagaacctttctcaaaggactcctgatttcaacagctggctcagtgctgtcatctccttccaacagaattgtgttgatggctttcccgagggaaacacaaagactgaacttcagactctcttcaacgattccaaggaattcgttagcaactcccttgccattctgtctcaggttgcatcggctctttcaacaatccaaacactagcacgcggcagccgttcgttgctgtctgagaacagcaactccccagttgcttctctagacaaagctgatggccttccttcttggatgaaccatgaggaccgaagggtattgaaggctatggataacaaacctgcacctaatgtcaccgtggctaaagatggcagcggagacttcaaaaccatctctgaatgtttaaatgctgtccctcaaaattttgaaggacgttatgtgatttttgttaaagaaggagtatacgatgagactgtgaccataacaaagaaaatgcaaaatataaccatgtatggtgatggatcccaaaagagcatcatcactggcaacaaaaactttagggacggtgtcaggactttcctaactgcaagttttgtggtagagggagatggattcataggcctagcaatgggattcagaaacactgcaggccctgatggccaccaagcagtggctgcaagagtgcaggcggatcgtgcagtgtttgccaactgtcggttcgagggctaccaagacactctatacacccaagcccacagacaattctacaggagctgcatcgttacaggaacaatcgatttcatctttggcgacgcagctgtcgtgttccagaactgcatcatggtagttaggaagccattggaaaaccagcagaacatggtgactgctcaagggagagtcgacaagcaacaagtcactggaattgtgctgcagaaatgcacaatcaaggctgatgattcactggttccagagaaggacaagatcaggagctaccttgggaggccgtggaaggagttctcgagaacaattgtgatggaatcggaaataggtgacttcattcaccccgatggatggacagcttgggagggagactttgctctcaagacattgtactatgctgagtatggcaacacaggacctggtgccagcaccaatgctaggatcaagtggcctggttaccaagtcattaacaaggatgaggctagccagttcactgtgggatctttcttgagaggcacatggctccagaacacgggcgtgcctgccacgcaaggcttgtacaattaaacgcctttgcttcaaatttcataccacttgagttcttgcttcagcctttgagctgctgctgctacatgttaattaggcacaccggaaaataaacttgatggtcttgctcattttgatgaattgtatttttctttctttcttttaccgtaaattttttaaaaacatttaatcttgaattgt

SEQ ID NO: 21090 - protein, 542 aa, Glycine max
KSHGHSQQSTTPGKDHVVAHSKMVKLVCSSADYKEKCEDPLNKAMEDDPKLTQPKDLLKAYVKFAEDEVSKAFNKTISMKFENEQEKGAFEDCKKLFEDAKDDIATSISELEKIEMKNLSQRTPDFNSWLSAVISFQQNCVDGFPEGNTKTELQTLFNDSKEFVSNSLAILSQVASALSTIQTLARGSRSLLSENSNSPVASLDKADGLPSWMNHEDRRVLKAMDNKPAPNVTVAKDGSGDFKTISECLNAVPQNFEGRYVIFVKEGVYDETVTITKKMQNITMYGDGSQKSIITGNKNFRDGVRTFLTASFVVEGDGFIGLAMGFRNTAGPDGHQAVAARVQADRAVFANCRFEGYQDTLYTQAHRQFYRSCIVTGTIDFIFGDAAVVFQNCIMVVRKPLENQQNMVTAQGRVDKQQVTGIVLQKCTIKADDSLVPEKDKIRSYLGRPWKEFSRTIVMESEIGDFIHPDGWTAWEGDFALKTLYYAEYGNTGPGASTNARIKWPGYQVINKDEASQFTVGSFLRGTWLQNTGVPATQGLYN

SEQ ID NO: 21091 - protein, 520 aa, Glycine max
MVKLVCSSADYKEKCEDPLNKAMEDDPKLTQPKDLLKAYVKFAEDEVSKAFNKTISMKFENEQEKGAFEDCKKLFEDAKDDIATSISELEKIEMKNLSQRTPDFNSWLSAVISFQQNCVDGFPEGNTKTELQTLFNDSKEFVSNSLAILSQVASALSTIQTLARGSRSLLSENSNSPVASLDKADGLPSWMNHEDRRVLKAMDNKPAPNVTVAKDGSGDFKTISECLNAVPQNFEGRYVIFVKEGVYDETVTITKKMQNITMYGDGSQKSIITGNKNFRDGVRTFLTASFVVEGDGFIGLAMGFRNTAGPDGHQAVAARVQADRAVFANCRFEGYQDTLYTQAHRQFYRSCIVTGTIDFIFGDAAVVFQNCIMVVRKPLENQQNMVTAQGRVDKQQVTGIVLQKCTIKADDSLVPEKDKIRSYLGRPWKEFSRTIVMESEIGDFIHPDGWTAWEGDFALKTLYYAEYGNTGPGASTNARIKWPGYQVINKDEASQFTVGSFLRGTWLQNTGVPATQGLYN

SEQ ID NO: 21092 - protein, 498 aa, Glycine max
MEDDPKLTQPKDLLKAYVKFAEDEVSKAFNKTISMKFENEQEKGAFEDCKKLFEDAKDDIATSISELEKIEMKNLSQRTPDFNSWLSAVISFQQNCVDGFPEGNTKTELQTLFNDSKEFVSNSLAILSQVASALSTIQTLARGSRSLLSENSNSPVASLDKADGLPSWMNHEDRRVLKAMDNKPAPNVTVAKDGSGDFKTISECLNAVPQNFEGRYVIFVKEGVYDETVTITKKMQNITMYGDGSQKSIITGNKNFRDGVRTFLTASFVVEGDGFIGLAMGFRNTAGPDGHQAVAARVQADRAVFANCRFEGYQDTLYTQAHRQFYRSCIVTGTIDFIFGDAAVVFQNCIMVVRKPLENQQNMVTAQGRVDKQQVTGIVLQKCTIKADDSLVPEKDKIRSYLGRPWKEFSRTIVMESEIGDFIHPDGWTAWEGDFALKTLYYAEYGNTGPGASTNARIKWPGYQVINKDEASQFTVGSFLRGTWLQNTGVPATQGLYN

SEQ ID NO: 21093 - DNA, 1457 bp, Glycine max
gattaaagataaaccagaaacactgcacactgcattatctcccgacgaacagaacaatggcacatgccaatgagatggtgaaacatgtcatcgacattggagaactacaagaactaaggttgtctcagcgtagcatctacaaggttcctcacaatctccgaaaggtaaaggaagaaccctacactcctcagtgcatctcaattggcccaattcacttcaacaaacaagaattcatgccaatgcaagagcacaaactgagatacttccagttcttctggaaccgtgtctcaaatgagcaagccatgatgaactacaaagactacctcaagacgaaagaacaagagattcgacaatgctatgcagagaagttccctgacatggccaatgagaaattcgtggatatgatgctgttggatgctgtgttcatcatggaacttttcttgagaaactgtcacaataattcgtttggagagagtgatgatctcatcttgacacaatcctggctcggcaggaacatcactagggacttgatcctgttggagaatcaaatacccttttttgtgctgcagaagctttatgataatgttgtccctgatgaaaacaagaagaaagaacacacttgctttgtgcaccttgccattgagtactttgcattctatgacaaccaaacgtgttcttctcatgaaagtgatgaaaccaagaaagataggtttgaggagccaaaacacttcactgatctgataaggtgtttctaccttcccgccgagcgcgaaagcggttgtgctcgccatgttctaagaacagcaacaaagttgcacgaatcaggagtgtgctttgagaaaggtgatgtgaagagaaggttgctagacataacctttgagaagacaccaattctgagtttgtttctttgctttggttgctttccatacttggaccatttcaaggcacgttttaggatcccccaattgaagttggaccacacaactgaatgtgttttcaggaacctcattgcctttgaacagtgtcactatcccgagaagccttacatttgcaactatgtttctttgcttgattctcttatacacactaagcttgatgtggagtttctggttgagaaggaagtgattgtgcatgaattagggagtgataaggaagtggcaactcttgttaatggtctatgcaaacatgttgtgacaaactcaacgtcttactatgaaacaataaataagctcaacgagcattacgtgagcaattggaaccacactgtggctgcattgaggttggtgtacttcaaagacctttggagggcaagttccactgtggtggggattgctgtgctcgttttcgctgtgttccaattcctacgtctagtgggtgttgtcttctactctcctagaatgtccaaaatgtaattactaaactcagtttggattattatgttaagagtttaatttaac

SEQ ID NO: 21094 - protein, 469 aa, Glycine max
LKINQKHCTLHYLPTNRTMAHANEMVKHVIDIGELQELRLSQRSIYKVPHNLRKVKEEPYTPQCISIGPIHFNKQEFMPMQEHKLRYFQFFWNRVSNEQAMMNYKDYLKTKEQEIRQCYAEKFPDMANEKFVDMMLLDAVFIMELFLRNCHNNSFGESDDLILTQSWLGRNITRDLILLENQIPFFVLQKLYDNVVPDENKKKEHTCFVHLAIEYFAFYDNQTCSSHESDETKKDRFEEPKHFTDLIRCFYLPAERESGCARHVLRTATKLHESGVCFEKGDVKRRLLDITFEKTPILSLFLCFGCFPYLDHFKARFRIPQLKLDHTTECVFRNLIAFEQCHYPEKPYICNYVSLLDSLIHTKLDVEFLVEKEVIVHELGSDKEVATLVNGLCKHVVTNSTSYYETINKLNEHYVSNWNHTVAALRLVYFKDLWRASSTVVGIAVLVFAVFQFLRLVGVVFYSPRMSKM

SEQ ID NO: 21095 - protein, 451 aa, Glycine max
MAHANEMVKHVIDIGELQELRLSQRSIYKVPHNLRKVKEEPYTPQCISIGPIHFNKQEFMPMQEHKLRYFQFFWNRVSNEQAMMNYKDYLKTKEQEIRQCYAEKFPDMANEKFVDMMLLDAVFIMELFLRNCHNNSFGESDDLILTQSWLGRNITRDLILLENQIPFFVLQKLYDNVVPDENKKKEHTCFVHLAIEYFAFYDNQTCSSHESDETKKDRFEEPKHFTDLIRCFYLPAERESGCARHVLRTATKLHESGVCFEKGDVKRRLLDITFEKTPILSLFLCFGCFPYLDHFKARFRIPQLKLDHTTECVFRNLIAFEQCHYPEKPYICNYVSLLDSLIHTKLDVEFLVEKEVIVHELGSDKEVATLVNGLCKHVVTNSTSYYETINKLNEHYVSNWNHTVAALRLVYFKDLWRASSTVVGIAVLVFAVFQFLRLVGVVFYSPRMSKM

SEQ ID NO: 21096 - protein, 445 aa, Glycine max
MVKHVIDIGELQELRLSQRSIYKVPHNLRKVKEEPYTPQCISIGPIHFNKQEFMPMQEHKLRYFQFFWNRVSNEQAMMNYKDYLKTKEQEIRQCYAEKFPDMANEKFVDMMLLDAVFIMELFLRNCHNNSFGESDDLILTQSWLGRNITRDLILLENQIPFFVLQKLYDNVVPDENKKKEHTCFVHLAIEYFAFYDNQTCSSHESDETKKDRFEEPKHFTDLIRCFYLPAERESGCARHVLRTATKLHESGVCFEKGDVKRRLLDITFEKTPILSLFLCFGCFPYLDHFKARFRIPQLKLDHTTECVFRNLIAFEQCHYPEKPYICNYVSLLDSLIHTKLDVEFLVEKEVIVHELGSDKEVATLVNGLCKHVVTNSTSYYETINKLNEHYVSNWNHTVAALRLVYFKDLWRASSTVVGIAVLVFAVFQFLRLVGVVFYSPRMSKM

SEQ ID NO: 21097 - DNA, 1401 bp, Glycine max
aaattgtaggtgttttacagtcaaaggacccactccaatcattttcaacccgtaagaacccttcaccagcattcacatccattcttacacgcggctttcgcctttctagacgtaaaaacactgaagttgacccaatgaggaagttcataagagagttgtacagtgatttggaaatggtttatgtggggcagttgtgcctttcttgggaatttcttcagtgggaatatgagaaggccttgaagctatgggaatctgaccaatacgggttgctaaggttcaatgaagtagcaggggaatttcaacaattccatgtccttctccaaaggtttatagagaacgaaccattcctccaaggtccacgggttgaaaactatgctaggaatcgttgtgcaatgcgcaatcttcttcaagttccagtaataagaggtgagaactttctaagtagaatgtgaattcggttagtgtctttattcaaagggaatttgattgttaccttttttcatgcccactttcatatgtggggaaccatatacagtttcatacattagagacaaaaaattcctcatggttatagaatcttaattggatgcagaagacaataaggataaaaggaaattcagaaaaagagaggctgataaagatgcaatcacaagtgacatgctagtggagattttggaagaatccatcagaacaatttggcgtttcataagagctgataaagatgcatccagcttggcacttaaaggtcaaagagaaaaccaagtagagctccaagacccttcagattcacagattttggtggagattagaacggatcttcaaaaggtaatctctaaagcttcaaatgtcacattttttaatgtcaaatgtaaataaactttcttcttgaaaaagggttgtgttgtgtagtgttgcttattctttttgtttggatttggcagaaggaaaagagactgagagagcttttgaggagtggaagctgcatattgaagaagttccaaaagcatcatcgtgaagatggggcagatcaagtgctttattttttctctcaagtggacatgaaattggtttggagagtgttgaacatgtcaagaataacgaccgaccaacttgcatggtgtcgtagcaaactaaacaagatcaattttgttaacagaaggatacatgtagagccatcattcttacttttccctagttaatagttaattgcaaaagatttgtgcatatgttccttcacatttagaaggccattattaaattagtaaaaaaatttgcatataacttttcaacaaattggtggtcctgatctatatttcatgtggtgtggtcaactcagataattaggtagaattctttaaaataattcaacatataataaatatggaacactttctaatagtg

SEQ ID NO: 21098 - protein, 149 aa, Glycine max
IVGVLQSKDPLQSFSTRKNPSPAFTSILTRGFRLSRRKNTEVDPMRKFIRELYSDLEMVYVGQLCLSWEFLQWEYEKALKLWESDQYGLLRFNEVAGEFQQFHVLLQRFIENEPFLQGPRVENYARNRCAMRNLLQVPVIRGENFLSRM

SEQ ID NO: 21099 - protein, 105 aa, Glycine max
MRKFIRELYSDLEMVYVGQLCLSWEFLQWEYEKALKLWESDQYGLLRFNEVAGEFQQFHVLLQRFIENEPFLQGPRVENYARNRCAMRNLLQVPVIRGENFLSRM

SEQ ID NO: 21100 - protein, 92 aa, Glycine max
MVYVGQLCLSWEFLQWEYEKALKLWESDQYGLLRFNEVAGEFQQFHVLLQRFIENEPFLQGPRVENYARNRCAMRNLLQVPVIRGENFLSRM

SEQ ID NO: 21101 - DNA, 1232 bp, Glycine max
gttgccaacgtcgaccaacttctcgtacttttctcgctcgaacagcccaagcctgaacccttcaccctaacgcgctttctggtggaagctgaatccactggaatccctcttacgctcgcactcaacaagaccgagcttgtggataatgaaatcattagttcgtggaaggctaggttgcgcagctgggggtatgagccggttttttgcagtgttgaatctggacatggacttgatcttcttggtttcaagttgagggatcaaacaacggtgattgtggggcctagtggagttgggaagtctagtttgatcaatgcccttagaagcaatccttccaatgctgcagaaggggagaattggtttgagcctgtgggttttgtttggtttgtttttatgtcttctacagtgcatattagagtttgatatttgttgcttgtggatgggtgttgcttttcaggttctgggaagcaagtggcttgaggatcagcgagttggggaggtttcaacaagaagcggtagagggaagcatactactcgccatgtctctctgcttccattgtctgaagggggttttcttgctgatactcctggatttaaccagcctagtttattgaaagtgacaaagcagtctcttgcacagacttttcctgaaatcaggaaaatgcttagtgccagtgagattgagaaatgttcgtttaacaattgcttgcatctgggtgaacctgggtgcattgtgaagggagattgggaaagatattcctactatttccaacttcttgatgaaatcagaatcagggaggagttccagctcaggacgtttggaactaaaagagaaggggatgtaaggttgaaaatgggagacatgggtgttcagcaagcagaaccacgtttggaacctaagaagcatagaagacaatctcggaagaggattaaccagtcaattttagatgaattggatgatgatgacgacaatttgcttgatgaggagaatgatcccattttaagggcgctaaggaatgaaaactcttagaatttcgttaatccccagagtactcattgtaaatagttcctttccgcgctttcgcttgtatctcggagtcagctagttcctattactgaagttcattatgttttgtttgacccaagtctgtgtcaggtaggctcaatcgtgtatagtctgtacaaattttcaccgatggacacactgtggaattctgatgactgataggttgatc

SEQ ID NO: 21102 - protein, 238 aa, Glycine max
MPLEAILPMLQKGRIGLSLWVLFGLFLCLLQCILEFDICCLWMGVAFQVLGSKWLEDQRVGEVSTRSGRGKHTTRHVSLLPLSEGGFLADTPGFNQPSLLKVTKQSLAQTFPEIRKMLSASEIEKCSFNNCLHLGEPGCIVKGDWERYSYYFQLLDEIRIREEFQLRTFGTKREGDVRLKMGDMGVQQAEPRLEPKKHRRQSRKRINQSILDELDDDDDNLLDEENDPILRALRNENS

SEQ ID NO: 21103 - protein, 230 aa, Glycine max
MLQKGRIGLSLWVLFGLFLCLLQCILEFDICCLWMGVAFQVLGSKWLEDQRVGEVSTRSGRGKHTTRHVSLLPLSEGGFLADTPGFNQPSLLKVTKQSLAQTFPEIRKMLSASEIEKCSFNNCLHLGEPGCIVKGDWERYSYYFQLLDEIRIREEFQLRTFGTKREGDVRLKMGDMGVQQAEPRLEPKKHRRQSRKRINQSILDELDDDDDNLLDEENDPILRALRNENS

SEQ ID NO: 21104 - protein, 196 aa, Glycine max
MGVAFQVLGSKWLEDQRVGEVSTRSGRGKHTTRHVSLLPLSEGGFLADTPGFNQPSLLKVTKQSLAQTFPEIRKMLSASEIEKCSFNNCLHLGEPGCIVKGDWERYSYYFQLLDEIRIREEFQLRTFGTKREGDVRLKMGDMGVQQAEPRLEPKKHRRQSRKRINQSILDELDDDDDNLLDEENDPILRALRNENS

SEQ ID NO: 21105 - DNA, 1336 bp, Glycine max
aaaagatgcatggcaattttttgagaaaatgaacagaaaaggggtcagatggagtgaagaagtcttaggtgcattaataaattcattttgtgttgagggtctgaggaggcaagctctcatcatccaatctgaaatggagaaaaaaggggtttcttcaagtgcaattgtgtacaacactctgatggatgcattttgtaaatccaaccacatagaagcagccgaaggcctttttgttgagatgaaagctaaaggtattaaacctattgcagctacctacaacatcctaatgcatgcatacagcagaagaatgcaacccaagattgtagaaaagctattggaagaaatgcaggatgttggcttgaagccaaatgccacatcatatacttgtctaatcattgcatatggcaagcaaaagaatatgagtgacatggctgcagccgatgcattctcgaagatgaagaaagttggtgtaaaacccacttcacagtcttatacagcactgatccatgcatattcggttagtggcttgcacgagaaagcttatgcagcatttgaaaacatgcaaaacgaaggtattaaaccttccatagaaacctacactactttactaaatgcatttaggcatgcaggtgatgctcaaacattaatggaaatatggaagttgatgatcagtgagaaagttgaaggaacaggggcgacattcaacattcttgttgatggttttgcgaaacaaggtctcttcatggaagcaagagaggtaatatctgaatttgggaaagttggattgaaaccaacagtggtgacttacaatatgctgataaatgcatacgcacgtggagggcaacactcaaagctgccacaactattgaaagagatggcagttcttaaattaaaacccgattctgtaacttattcaactatgatatttgcctttgtccgagttcgagattttcggcgggcatttttttatcacaagcagatgatcaagagtgggcagatgatggatggtggttcataccagacgcttcaggcccttctggagaccagacctgcacggaaaaacaaggattggagttccttgcttggtataattaaaagtaaaatgggtgtgaaagtgaggaggcagaaagatgagttttggaagttcaagaaaaggcatgtaagaaaaaatagttctgatgttagtgtatagtattagtaagttaaggatacaatgccctgtaagaattgaaagttcaattttgacccacttttgttttctcaaataacacaaggagcttcttgttgttaactgtaaagaatatatgcccttaccttatacattgcctcttcaacg

SEQ ID NO: 21106 - protein, 396 aa, Glycine max
KDAWQFFEKMNRKGVRWSEEVLGALINSFCVEGLRRQALIIQSEMEKKGVSSSAIVYNTLMDAFCKSNHIEAAEGLFVEMKAKGIKPIAATYNILMHAYSRRMQPKIVEKLLEEMQDVGLKPNATSYTCLIIAYGKQKNMSDMAAADAFSKMKKVGVKPTSQSYTALIHAYSVSGLHEKAYAAFENMQNEGIKPSIETYTTLLNAFRHAGDAQTLMEIWKLMISEKVEGTGATFNILVDGFAKQGLFMEAREVISEFGKVGLKPTVVTYNMLINAYARGGQHSKLPQLLKEMAVLKLKPDSVTYSTMIFAFVRVRDFRRAFFYHKQMIKSGQMMDGGSYQTLQALLETRPARKNKDWSSLLGIIKSKMGVKVRRQKDEFWKFKKRHVRKNSSDVSV

SEQ ID NO: 21107 - protein, 387 aa, Glycine max
MNRKGVRWSEEVLGALINSFCVEGLRRQALIIQSEMEKKGVSSSAIVYNTLMDAFCKSNHIEAAEGLFVEMKAKGIKPIAATYNILMHAYSRRMQPKIVEKLLEEMQDVGLKPNATSYTCLIIAYGKQKNMSDMAAADAFSKMKKVGVKPTSQSYTALIHAYSVSGLHEKAYAAFENMQNEGIKPSIETYTTLLNAFRHAGDAQTLMEIWKLMISEKVEGTGATFNILVDGFAKQGLFMEAREVISEFGKVGLKPTVVTYNMLINAYARGGQHSKLPQLLKEMAVLKLKPDSVTYSTMIFAFVRVRDFRRAFFYHKQMIKSGQMMDGGSYQTLQALLETRPARKNKDWSSLLGIIKSKMGVKVRRQKDEFWKFKKRHVRKNSSDVSV

SEQ ID NO: 21108 - protein, 352 aa, Glycine max
MEKKGVSSSAIVYNTLMDAFCKSNHIEAAEGLFVEMKAKGIKPIAATYNILMHAYSRRMQPKIVEKLLEEMQDVGLKPNATSYTCLIIAYGKQKNMSDMAAADAFSKMKKVGVKPTSQSYTALIHAYSVSGLHEKAYAAFENMQNEGIKPSIETYTTLLNAFRHAGDAQTLMEIWKLMISEKVEGTGATFNILVDGFAKQGLFMEAREVISEFGKVGLKPTVVTYNMLINAYARGGQHSKLPQLLKEMAVLKLKPDSVTYSTMIFAFVRVRDFRRAFFYHKQMIKSGQMMDGGSYQTLQALLETRPARKNKDWSSLLGIIKSKMGVKVRRQKDEFWKFKKRHVRKNSSDVSV

SEQ ID NO: 21109 - DNA, 1474 bp, Glycine max
aaaaacttgacaagtgtaataaagagaagttactggagttctgtgatgtgcttgacttaacaattgccaggccaacaacgaggaaggaagatattattgctgtgctgatagactttttagttgcccctcatgcaaccacaactgtgttacttgcagaaaaagacaagtccagtaagggcaaaaagcgcaaacatgttgtaaaacagggttcatcaagatctgcaacaacttcaagacgttctgcaaagagtcagaagaaaaatgaagattcttcagtagtacggagaaagagtacaagtgacacagaagatgagtcagaggaagacgagaaagatgaagaaaatgaggaggaaaatgaaaatggtgttcctgacaaatctgaggatgaaacaccagagaaatctgaaagtgaagacaaaagtgattctggaagtgaatctgaagatacgaaagaaaagaaaaaacctaaaacatcatccacaaagaaagaatctgctaagaaaagtaaaattgagaaaattaaagttgcaactaaatctcgctcaccacaaaaaagaacacctaagaaatcatcatccaacctctcaaagtctgatgatgacagtgatgaaagtccaaatccaaaggtcttttcaaggaagaagaaaaatgagaaaggaggaaagcagaagattgatgatagtgatgaaagtccaaatccaaaggtattttcaaggaagaagaaaaatgagaaaggaggaaagaagaagattgatgatgatagtgatgaaagtccaaatccaaaggtcttttcaaggaaaaaaaaggagaaaggaggaaagcagaagaggtcaacaccaacaaagtctgcctccaaagagagaactgaaaaggtcactaaaggaaaaggaaagaagaaagagaagtccagcctcagtgataatcagttacgtgatgcaatctgtgaaattcttaaagaagttgacttcaatacggcgacatttactgacattctgaggcaacttgctaagcaatttgatatggatctcactccaagaaaggcatctataaagctgatgattcaggaagagctgacaaaactggctgaggaagcagatgatgaggatggagaagaggatgctgagaaagatgaagccccgtctacaggccaggaggttaaagcctaattgaggagtagaccggactgcttggagataggtttagcaatgtaatactataacccaagttatgcatgcttcatctgtacactttgatgggtggtagtggctgtaacttatttttagcatccatccattctgaagaaacttgtattttgtcaatttaagcttttggtgggctgccattgtgcagttttttgtttacatacacctcaacagaatctgtaggcttttatactgttcatgaatagtactgaccaaatctacaacagtttcaacaatctgtctagttaaataaatatttgacctttgtagtt

SEQ ID NO: 21110 - protein, 387 aa, Glycine max
KLDKCNKEKLLEFCDVLDLTIARPTTRKEDIIAVLIDFLVAPHATTTVLLAEKDKSSKGKKRKHVVKQGSSRSATTSRRSAKSQKKNEDSSVVRRKSTSDTEDESEEDEKDEENEEENENGVPDKSEDETPEKSESEDKSDSGSESEDTKEKKKPKTSSTKKESAKKSKIEKIKVATKSRSPQKRTPKKSSSNLSKSDDDSDESPNPKVFSRKKKNEKGGKQKIDDSDESPNPKVFSRKKKNEKGGKKKIDDDSDESPNPKVFSRKKKEKGGKQKRSTPTKSASKERTEKVTKGKGKKKEKSSLSDNQLRDAICEILKEVDFNTATFTDILRQLAKQFDMDLTPRKASIKLMIQEELTKLAEEADDEDGEEDAEKDEAPSTGQEVKA

SEQ ID NO: 21111 - protein, 228 aa, Glycine max
MSQRKTRKMKKMRRKMKMVFLTNLRMKHQRNLKVKTKVILEVNLKIRKKRKNLKHHPQRKNLLRKVKLRKLKLQLNLAHHKKEHLRNHHPTSQSLMMTVMKVQIQRSFQGRRKMRKEESRRLMIVMKVQIQRYFQGRRKMRKEERRRLMMIVMKVQIQRSFQGKKRRKEESRRGQHQQSLPPKRELKRSLKEKERRKRSPASVIISYVMQSVKFLKKLTSIRRHLLTF

SEQ ID NO: 21112 - protein, 220 aa, Glycine max
MKKMRRKMKMVFLTNLRMKHQRNLKVKTKVILEVNLKIRKKRKNLKHHPQRKNLLRKVKLRKLKLQLNLAHHKKEHLRNHHPTSQSLMMTVMKVQIQRSFQGRRKMRKEESRRLMIVMKVQIQRYFQGRRKMRKEERRRLMMIVMKVQIQRSFQGKKRRKEESRRGQHQQSLPPKRELKRSLKEKERRKRSPASVIISYVMQSVKFLKKLTSIRRHLLTF

SEQ ID NO: 21113 - DNA, 1637 bp, Glycine max
aaaaatggccttaacacattcaacatctttcccacgaatgtttcagagggctggttcagctcagtttagaaggcctctccttcatttggtgtccactcaagaatcaaggcacaggtacctcacccaatgtgttccccttcacaaagcagcactggaaggagactggaaagaggccaagaaaatccttgaccaagacccggcgctgctgaactccgccataacaaaaggatgggcaacagtgctccacattgcggtcggagcaaaccacgaaagcttcgtggaggagttgctgaaactaatgtcgcgtgaagacttagaactgcaagatatcaagggtaacactgcattctgctttgctgcagcggttggaaacgtgcacattgctgagagaatgcgcagaaaaaatgcatcattgccaatgataaggggtggagaaggagtcactcctcttcacttggctgtgttacaaggaagaagtgaaatggcttggtatctgtttgataaaactagagaaacactgtacgatgatgattggtttcaagtgtttctcatttgtgtaaactctcgactttatgaactggccctggaaatgctcaatcagaaggaatcgctagcttttgctcggggtgataacgatgagacagctttgcatgttttggctcgaaagcctttggattgtggttgccgaagtccgctacgatatccaaaacacgtcctgcatttgtgcaagaacatgaaggaccctccggtcctcaaacttacaagacgcgtgtgggatatatttcttaccctcgatgactctaagatgatgactgcaattagagaaccatctcaagtaacatttattgccgcagaagttggcaatttcgagtttctatctgtgattatgagcacttatccggatttgatttgggaattgaatacgatgggtcagagtataattcacgttgctgccttgcaccgccacgctagcatattcaatttgatacacgaaattggcccaagcaaagatctcctgttaacattttgggatgatgaaggcagcacgttactccattctgtcgcagaaatagcaccaacagatcgacttaatgtagtttctggagcagctcttcaaatgatgcttgagttgacatggtttgaggaggtaaaaaagaacatgcaaccatcatatatagagaggccaaatcatgaaggaattgttcctagagaactattcaccgagaagcataaggagttgttgaaaaagggagaatcttggatgaagcgaacagcaagttcttgcatggttgtttcaaccctaattgccacaggagtgttttctgccgccttcagcgtcccaggtggtaccaaagacgattcaggatctcccaattatttgaagaaacatttgttcacggtatttgcaatatcagatgccttggcattaactctttctaccgcctcaaccctaattttcttgtccatactcatctcaagatatgctgaggaagattttcttaggtcattgccattcaagttgatatttggactagtgtcactatttctctcaatagtcagcatgatgggagcattcagtagtgctttcttcataacatattaccatgctaaaacgtgggttgttcctatcaccaaag

SEQ ID NO: 21114 - protein, 545 aa, Glycine max
KMALTHSTSFPRMFQRAGSAQFRRPLLHLVSTQESRHRYLTQCVPLHKAALEGDWKEAKKILDQDPALLNSAITKGWATVLHIAVGANHESFVEELLKLMSREDLELQDIKGNTAFCFAAAVGNVHIAERMRRKNASLPMIRGGEGVTPLHLAVLQGRSEMAWYLFDKTRETLYDDDWFQVFLICVNSRLYELALEMLNQKESLAFARGDNDETALHVLARKPLDCGCRSPLRYPKHVLHLCKNMKDPPVLKLTRRVWDIFLTLDDSKMMTAIREPSQVTFIAAEVGNFEFLSVIMSTYPDLIWELNTMGQSIIHVAALHRHASIFNLIHEIGPSKDLLLTFWDDEGSTLLHSVAEIAPTDRLNVVSGAALQMMLELTWFEEVKKNMQPSYIERPNHEGIVPRELFTEKHKELLKKGESWMKRTASSCMVVSTLIATGVFSAAFSVPGGTKDDSGSPNYLKKHLFTVFAISDALALTLSTASTLIFLSILISRYAEEDFLRSLPFKLIFGLVSLFLSIVSMMGAFSSAFFITYYHAKTWVVPITK

SEQ ID NO: 21115 - protein, 544 aa, Glycine max
MALTHSTSFPRMFQRAGSAQFRRPLLHLVSTQESRHRYLTQCVPLHKAALEGDWKEAKKILDQDPALLNSAITKGWATVLHIAVGANHESFVEELLKLMSREDLELQDIKGNTAFCFAAAVGNVHIAERMRRKNASLPMIRGGEGVTPLHLAVLQGRSEMAWYLFDKTRETLYDDDWFQVFLICVNSRLYELALEMLNQKESLAFARGDNDETALHVLARKPLDCGCRSPLRYPKHVLHLCKNMKDPPVLKLTRRVWDIFLTLDDSKMMTAIREPSQVTFIAAEVGNFEFLSVIMSTYPDLIWELNTMGQSIIHVAALHRHASIFNLIHEIGPSKDLLLTFWDDEGSTLLHSVAEIAPTDRLNVVSGAALQMMLELTWFEEVKKNMQPSYIERPNHEGIVPRELFTEKHKELLKKGESWMKRTASSCMVVSTLIATGVFSAAFSVPGGTKDDSGSPNYLKKHLFTVFAISDALALTLSTASTLIFLSILISRYAEEDFLRSLPFKLIFGLVSLFLSIVSMMGAFSSAFFITYYHAKTWVVPITK

SEQ ID NO: 21116 - protein, 533 aa, Glycine max
MFQRAGSAQFRRPLLHLVSTQESRHRYLTQCVPLHKAALEGDWKEAKKILDQDPALLNSAITKGWATVLHIAVGANHESFVEELLKLMSREDLELQDIKGNTAFCFAAAVGNVHIAERMRRKNASLPMIRGGEGVTPLHLAVLQGRSEMAWYLFDKTRETLYDDDWFQVFLICVNSRLYELALEMLNQKESLAFARGDNDETALHVLARKPLDCGCRSPLRYPKHVLHLCKNMKDPPVLKLTRRVWDIFLTLDDSKMMTAIREPSQVTFIAAEVGNFEFLSVIMSTYPDLIWELNTMGQSIIHVAALHRHASIFNLIHEIGPSKDLLLTFWDDEGSTLLHSVAEIAPTDRLNVVSGAALQMMLELTWFEEVKKNMQPSYIERPNHEGIVPRELFTEKHKELLKKGESWMKRTASSCMVVSTLIATGVFSAAFSVPGGTKDDSGSPNYLKKHLFTVFAISDALALTLSTASTLIFLSILISRYAEEDFLRSLPFKLIFGLVSLFLSIVSMMGAFSSAFFITYYHAKTWVVPITK

SEQ ID NO: 21117 - DNA, 1386 bp, Glycine max
agggtttgagcagaaaagagattgtgttggattggtttccattcccaattcccaatcgtgttgggtggccatggattctctactggcgaactatgcctcttcagatgaagaagaagatcaacagccatccccaccaaaaacgacgacgttttcctcccttcctcaacccaaactttctctgtttcaatcccttcctcaacccaaatcttctctgtttcaatcccttcctccacccaaacaaccttccaccgaaagctcttccctccctaaccctaaccctaaccctgaccctaaaccccaaatcgaaaagacacaacccaaacgcgtcgtgcaattcaggcccccaatcatccctctcccacacccttcacaacacgacgatgacgacgatgacgacgacgacgacgaagaagaagaacgaaacagaagaaagaaaaagttagagtcctccacgcaaacctcatcggtcaagtccttcctcgccagcattccagcacccaggaacaccgccactctcggcgttcaagcaagttccggttcaggccggaaatccatcctcgaaaccgaaacaccgccaccggcatcgaattccggtggtttcagcaatgttcccgtcgatcaaagtacaggggattatgaaaattttgatgattaccaatatgccactgaccagtatgctagttattatggcaattttggttcgggtgccgagccagggagttcgggtactgaaccaaaggctggggttgctgcttatggaactgaacagtatgggaattatggtgatgcctatgcttcctatggggattatggacagtatgggaataattggggtgacgtgtcggcgccaccggtgctggaagcttctgggattgatgtcagtgtggtaaggattcctgggaagagagggaggcatgagattccgacggaagtgattgaggtgaagcaagaagagttgattaagaatcggccaagagaggatcaggtcaagctaactgggattgcattcggacccacttatcagcctgcttcgacaaaggggaagcctacaaagctgcacaagaggaaacatcaaattggttcattgtactttgatatgaaacaaaatgaaatgaaacttgctgagcggcgtgtaaagggcatgcttaccaaagctgaaacacaagcgaaatatggatggtgatttgagatgatgatattggaaatacttacattgaaacgtgaaaaagcaaagtcgaagttttcatatttagttgcaatccttgtgtttcactgttctgtgtacatttgctccgtctttaagtgcaaattatgtatttctattcttatagccagtggaattttataccgtacatttttttatgacaaaaaaaatcatttctttcg

SEQ ID NO: 21118 - protein, 393 aa, Glycine max
GFEQKRDCVGLVSIPNSQSCWVAMDSLLANYASSDEEEDQQPSPPKTTTFSSLPQPKLSLFQSLPQPKSSLFQSLPPPKQPSTESSSLPNPNPNPDPKPQIEKTQPKRVVQFRPPIIPLPHPSQHDDDDDDDDDDEEEERNRRKKKLESSTQTSSVKSFLASIPAPRNTATLGVQASSGSGRKSILETETPPPASNSGGFSNVPVDQSTGDYENFDDYQYATDQYASYYGNFGSGAEPGSSGTEPKAGVAAYGTEQYGNYGDAYASYGDYGQYGNNWGDVSAPPVLEASGIDVSVVRIPGKRGRHEIPTEVIEVKQEELIKNRPREDQVKLTGIAFGPTYQPASTKGKPTKLHKRKHQIGSLYFDMKQNEMKLAERRVKGMLTKAETQAKYGW

SEQ ID NO: 21119 - protein, 370 aa, Glycine max
MDSLLANYASSDEEEDQQPSPPKTTTFSSLPQPKLSLFQSLPQPKSSLFQSLPPPKQPSTESSSLPNPNPNPDPKPQIEKTQPKRVVQFRPPIIPLPHPSQHDDDDDDDDDDEEEERNRRKKKLESSTQTSSVKSFLASIPAPRNTATLGVQASSGSGRKSILETETPPPASNSGGFSNVPVDQSTGDYENFDDYQYATDQYASYYGNFGSGAEPGSSGTEPKAGVAAYGTEQYGNYGDAYASYGDYGQYGNNWGDVSAPPVLEASGIDVSVVRIPGKRGRHEIPTEVIEVKQEELIKNRPREDQVKLTGIAFGPTYQPASTKGKPTKLHKRKHQIGSLYFDMKQNEMKLAERRVKGMLTKAETQAKYGW

SEQ ID NO: 21120 - DNA, 1451 bp, Glycine max
tttgtttctgctcctggtcgcagaattcttgctgttggagatctacatggagatcttaagcaagctaggtctgcacttgaaatggctggtgtattgagctctgatggtcgagacttatggactggtggagaaactgtgttggttcaacttggagacatactagatcgaggtgaagatgaaattgccatcttgtccatgctgcgatcattggatagacaggcaaaagaaaaaggtggagcagtgtttcaggtaaatggaaatcatgagaccatgaatgtggaaggggattatagatatgttgagtctgggggatttgatgagtgtaatgatttcttagaatatatcaatggttctgaaggtgactgggaagaaacttttacttcttgggttgatgtctctaaaaggtggaaagaagatcgaacaatgtcaaaaagttattggggaccttggaatttattgaagttttccaattattaggacagagacaaaagggagtcattgccagatcaatcctctttaggcctggtgggcttcttgcacgtgagcttgcaaggcatgctgttgtactaaaggtcaatgactgggtcttctgtcatggtggacttcttcctcaccatgttgcatatggcttagagaggatgaataaagaagtgtctgagtggatgagaggtcagcatgaggatgacaatactcacaaaatgcctttcattgccactaggggttatgatagtgttgtttggaatcgtttatactcaagagacacaccagatttagtggactatcaggctaaacaggtatgttccattcttgacgagacaatgcaagcagttggtgctaaggcaatggtggttggacatactcctcaaactataggtgtaaattgtaaatacaattgtagcatatggcgcgtagatgttggaatgtccagtggagttctgaattcaaaaccagaggttctagaaattatagacgataaagcaagagttataaggtgcaaaagggacagacacagtgaacttcaagctgctgcatatacttaagagaaaaacaaattattcaacaggaggtaggggaatccaactagtgaagtctaacattggcaaatatatgcaatacccgatgaccaatgcaagttacttgttacttgtgaagaaaggaaacagtatacctattttggcaaccaaaaaaatcctgagagagaaattccaaggcagaagatattgaaacatttgaaaatgggttatacaacaagagaaagaagggaagaggagaagggtaaataatgtaaatattgtatgcttctgaatcagttgcattttcacatattacattaaccagtcccattcgaaactgctcgaatgtttgtgattaacctcatctcactagatctagcttcctctggcactctttaactaatgatatttgttctatttcaaactcttgacatgacc

SEQ ID NO: 21121 - protein, 158 aa, Glycine max
FVSAPGRRILAVGDLHGDLKQARSALEMAGVLSSDGRDLWTGGETVLVQLGDILDRGEDEIAILSMLRSLDRQAKEKGGAVFQVNGNHETMNVEGDYRYVESGGFDECNDFLEYINGSEGDWEETFTSWVDVSKRWKEDRTMSKSYWGPWNLLKFSNY

SEQ ID NO: 21122 - protein, 133 aa, Glycine max
MNKEVSEWMRGQHEDDNTHKMPFIATRGYDSVVWNRLYSRDTPDLVDYQAKQVCSILDETMQAVGAKAMVVGHTPQTIGVNCKYNCSIWRVDVGMSSGVLNSKPEVLEIIDDKARVIRCKRDRHSELQAAAYT

SEQ ID NO: 21123 - protein, 131 aa, Glycine max
MAGVLSSDGRDLWTGGETVLVQLGDILDRGEDEIAILSMLRSLDRQAKEKGGAVFQVNGNHETMNVEGDYRYVESGGFDECNDFLEYINGSEGDWEETFTSWVDVSKRWKEDRTMSKSYWGPWNLLKFSNY

SEQ ID NO: 21124 - DNA, 1270 bp, Glycine max
aaagaaactgcgatcttaggtctcctgcaccatgaaaatctggtttcactttatggccgcacttctcgcaattgcaacaaacacatgctagtttacgagtacatctccaatggcactcttactaaacatcttcatgaatcttctggtggtaaactaccatggcataatagattgaatattgccattgaaactgctactgccttggtatttcttcatgaatcaggtatcatccaccgtgatgtaaaagggagtaatattctgttggatgaaaattttactgtcaaagttgcagattttggattctcacggtctcttccagatcatgctactcatgtttcaactattccagtaggaactcgtgcttacatagatcctgactactatgaatctggaagggtcagtgacaaaagtgatgtctatagttttggggttgtcttgttcgaactcatatcatccatccgcccaagtttaatggaaggcacagattatgttactcttgcacagtttgcaaagagaaaaattttaaacaaggaattaaccgctgtagtggatcaaagtttttggcttggtgttgacaaaaacatgatggaaatgataacagcagtggcagagttagcatttcagtgtgtgcagtgtcccaaggaactcagaccatccatgaaacaggtgctagatacccttgagggcataaggaaaggaacatggggattcaaccagataacatagtccttattcatgctaccaacattcctggttctatcaaaccattcatttggtttgtggtctagtaattggattttggcttaacagagatgattttgttctgcagtataggaatttcaggttagccctattgtaggttagaaatttacttgactatttagggtgtgtttgttttagctggattacactttgaggcacgttgaacatggatccttatgtcacttggattcacgttcaacgtggtttaacagcaatacaaacatgctgttacatgatacatgtaaatgcattccatgttctaaatgtataagaaagaccaaaagctggaaaccatctcagaattgcagtacatcacttcaaacattatcctcctcctcctctttaaagtaaaaacatggataattccttagtagagataaagggagttgtcaaatgtcaatattaaaaataaaaggcgtaacccgtcggcagctgttgtacatggataatggactcttcatagtactctgtatagtgtccattgaattaaagagtctaatattctccc

SEQ ID NO: 21125 - protein, 241 aa, Glycine max
KETAILGLLHHENLVSLYGRTSRNCNKHMLVYEYISNGTLTKHLHESSGGKLPWHNRLNIAIETATALVFLHESGIIHRDVKGSNILLDENFTVKVADFGFSRSLPDHATHVSTIPVGTRAYIDPDYYESGRVSDKSDVYSFGVVLFELISSIRPSLMEGTDYVTLAQFAKRKILNKELTAVVDQSFWLGVDKNMMEMITAVAELAFQCVQCPKELRPSMKQVLDTLEGIRKGTWGFNQIT

SEQ ID NO: 21126 - protein, 213 aa, Glycine max
MLVYEYISNGTLTKHLHESSGGKLPWHNRLNIAIETATALVFLHESGIIHRDVKGSNILLDENFTVKVADFGFSRSLPDHATHVSTIPVGTRAYIDPDYYESGRVSDKSDVYSFGVVLFELISSIRPSLMEGTDYVTLAQFAKRKILNKELTAVVDQSFWLGVDKNMMEMITAVAELAFQCVQCPKELRPSMKQVLDTLEGIRKGTWGFNQIT

SEQ ID NO: 21127 - DNA, 1383 bp, Glycine max
tcgagtcagtacataaggccccccccccgctgatagtgataccgacatgtacccatcttcgccagtcccaaatagtggagttgtaattgaggagatagtggatgatgataaacctgaaaatggatatgatccaactaagaaattaaagaaaaagaaacaggtagctcaattgaaagagaaagacaacaaaagttctgggcttccaattgtcgctaagggtgatactgaccttgtggaaagtgaagacgaagacggctttccaattcccactgcagagaaaggggtgtctgtctctcagaaggcagaagcagaaacgaaaggagaacaagcacgtaagaaagcagagaaagccaagaaggaaaaagatgttgatcattctgctagcgtaaaacgaaaagttgatactgctgatgaagatgagccacaggatgggaaaaaaaagaagaaaagaaacaagttgaaagagcatattaaaggggaaagtgatcatgcaactggcaatagcaatgagacaaaaattactgaaccagatgaaaagcatcctgaggagattaaaactacaatcaacctgagtgatgtttctcatgcaaaggatgaagatgatggaaagctatccaataacgaggtccttgccgagaagaaaaacaagaagaaaaagaagaaaaagaccaaagagtctgaaggggaagttgctgcaaatcaaattactataactcctgaaaagcagaatttgtccacctcagagaaaaaggggcagaaacaaactgaaaccaagccatcccaagtgagaacttttccaaatggattgattatagaggaggtatttatgggtaaacccgatggcaaaaaagctgctcctggaaagaaggtcagtgttaaatatattggcaaactgcaaaaagatgggaaaatatttgactcaaatgtgggaagggcaccctttaaatttcgcctgggtgtaggacaagtcatcaaagggtgggaggttgggatcaatgggatgagaattggggacaaacgaaggatcacaattccaccgtctatgggatacgcagacaaacgcgttgggagtataccaccaaattcgtggcttgtatttgatgtcgagttggttgatgttgatcgctgatttctatccctcattgtttcggtttcgaaatgatctggtcccttcgggctgagagaacgttaaactcacatttaccatttttggtcccaagtgtggatcttgagaccaaattagagctcaagttttgtaggaaattttggattgaattagggaattcacagtcttacgagcttaaatatgcaacaaatatagtgtttgctttccttatcaatagtgttgatcattaaatgtgggtttcatttggattgtacaat

SEQ ID NO: 21128 - protein, 360 aa, Glycine max
MYPSSPVPNSGVVIEEIVDDDKPENGYDPTKKLKKKKQVAQLKEKDNKSSGLPIVAKGDTDLVESEDEDGFPIPTAEKGVSVSQKAEAETKGEQARKKAEKAKKEKDVDHSASVKRKVDTADEDEPQDGKKKKKRNKLKEHIKGESDHATGNSNETKITEPDEKHPEEIKTTINLSDVSHAKDEDDGKLSNNEVLAEKKNKKKKKKKTKESEGEVAANQITITPEKQNLSTSEKKGQKQTETKPSQVRTFPNGLIIEEVFMGKPDGKKAAPGKKVSVKYIGKLQKDGKIFDSNVGRAPFKFRLGVGQVIKGWEVGINGMRIGDKRRITIPPSMGYADKRVGSIPPNSWLVFDVELVDVDR

SEQ ID NO: 21129 - DNA, 1287 bp, Glycine max
agccaatatttgcattccatcgaagttctacaacagtgcttttgctccatgcactagatctgagattgatgaagaaatggaagacaacagctctgaagagcgtaaattattgatggcttcttcttatccacacttagttagaaggatgttgaatagcagcacctgcaaagagggttatgaaccttttgtttcgtatgaaggtctagagcagttgcaccgattcatttttgtcatggcggtaacgcatatatcttacagttgcctaactatgttgttggccattgtgaagattcacagttggagagtgtgggaggatgaggctcatatggatcggcataattcattaactgaaattacaaaagagttgaccatgcgaaggcaatcaacctttgtcaagtctcatgcatcaaacccattgaacaaaaatagttccctcatttgggtgacatgctttttccgtcaatttgggcattctgtggttcttgcggattatcttacgcttcgcaaaggcttcatcatgaatcacaacctttcattcaaatatgattttcacagctacatgattcgatcaatggaagaggaattccaaaggatagttggtgtgagtggtccactctggggatttgttattgccttcatgcttttcaacattaaaggatctaatctatatttctggatagctatcattcctgtatctcttgtgctcttggtgggaacaaaactacagcatgttattgcaaccttggcattggagaatgctggaattacaaggttcttcccagaagcaaagttgaggcctcgtgatgaacttttctggtttaataagcctggactattgctatcgttgatccatttcattctcttccagaatgcatttgagctggcttcattcttttggttctggtggcagttcggatattattcctgctttattaggaatcaccttctcctttatataaggctaatattggggttagcaggacagtttctttgcagctacagcaccttgccactctatgcacttgttacacagatgggaacaaactacaaggcagcattaatcccacagaggataagagaaacaattcatggttggggcaaggcagctaggaggaagagaagacatggcatgttcactgatgactccaccattcacacagacacaagcactgtgttgtctattgaagaagatgatcaattaattgatacccctgaagtagaattacaaccagcaacagctgttacagctaccccttctcccattgctaatgaaacttcaagtagggc

SEQ ID NO: 21130 - protein, 428 aa, Glycine max
ANICIPSKFYNSAFAPCTRSEIDEEMEDNSSEERKLLMASSYPHLVRRMLNSSTCKEGYEPFVSYEGLEQLHRFIFVMAVTHISYSCLTMLLAIVKIHSWRVWEDEAHMDRHNSLTEITKELTMRRQSTFVKSHASNPLNKNSSLIWVTCFFRQFGHSVVLADYLTLRKGFIMNHNLSFKYDFHSYMIRSMEEEFQRIVGVSGPLWGFVIAFMLFNIKGSNLYFWIAIIPVSLVLLVGTKLQHVIATLALENAGITRFFPEAKLRPRDELFWFNKPGLLLSLIHFILFQNAFELASFFWFWWQFGYYSCFIRNHLLLYIRLILGLAGQFLCSYSTLPLYALVTQMGTNYKAALIPQRIRETIHGWGKAARRKRRHGMFTDDSTIHTDTSTVLSIEEDDQLIDTPEVELQPATAVTATPSPIANETSSR

SEQ ID NO: 21131 - protein, 403 aa, Glycine max
MEDNSSEERKLLMASSYPHLVRRMLNSSTCKEGYEPFVSYEGLEQLHRFIFVMAVTHISYSCLTMLLAIVKIHSWRVWEDEAHMDRHNSLTEITKELTMRRQSTFVKSHASNPLNKNSSLIWVTCFFRQFGHSVVLADYLTLRKGFIMNHNLSFKYDFHSYMIRSMEEEFQRIVGVSGPLWGFVIAFMLFNIKGSNLYFWIAIIPVSLVLLVGTKLQHVIATLALENAGITRFFPEAKLRPRDELFWFNKPGLLLSLIHFILFQNAFELASFFWFWWQFGYYSCFIRNHLLLYIRLILGLAGQFLCSYSTLPLYALVTQMGTNYKAALIPQRIRETIHGWGKAARRKRRHGMFTDDSTIHTDTSTVLSIEEDDQLIDTPEVELQPATAVTATPSPIANETSSR

SEQ ID NO: 21132 - protein, 391 aa, Glycine max
MASSYPHLVRRMLNSSTCKEGYEPFVSYEGLEQLHRFIFVMAVTHISYSCLTMLLAIVKIHSWRVWEDEAHMDRHNSLTEITKELTMRRQSTFVKSHASNPLNKNSSLIWVTCFFRQFGHSVVLADYLTLRKGFIMNHNLSFKYDFHSYMIRSMEEEFQRIVGVSGPLWGFVIAFMLFNIKGSNLYFWIAIIPVSLVLLVGTKLQHVIATLALENAGITRFFPEAKLRPRDELFWFNKPGLLLSLIHFILFQNAFELASFFWFWWQFGYYSCFIRNHLLLYIRLILGLAGQFLCSYSTLPLYALVTQMGTNYKAALIPQRIRETIHGWGKAARRKRRHGMFTDDSTIHTDTSTVLSIEEDDQLIDTPEVELQPATAVTATPSPIANETSSR

SEQ ID NO: 21133 - DNA, 1600 bp, Glycine max
gctaatacaaaggccaatcaaagtgagtctagtgcaacctcaccaaatgagacctctaagaggcaaagaatgtcacctgcctctgttgaagaatgtccaagacttattcctaatatcccggatgagttatcccttcagattattgctagacttcctagaatttgttactaccatgtaaggctggtgtctaggaggtggaaaacaactataacgagtttggaattatataaagtaagaaaagagcttggtacaactgaagaatggctatatctgttggttaggattggacaaaataaactcttatggcatgctctagacccccgttctcgaatatggcagagattgcctattatgcccagagttgtcgatgaagaagattcccaaaaggtttcttctaggctttggatgtggaacatggtcgaaggtatcagaattgctgaaattattagaggtctgcttggacagaaggatgtattggatgacatgcccttttgtggttgtgcttttggagctgttgatggatgtctttatattctaggtggattctctaaagcttcaactatgaaatgtgtatggcgatttgatccgatacaaaactcatggaagaaggtgaattctatgtctacaggtagggcatattgtaagacaggtgtcttgaataacatgctttatgttgttggaggggttagtcaaggtcaagctggattgattcctcttcaatctgctgaagtttttgaccccttcaaggatacatggtccgacgtacctagtatgccattctcaagagctggagtcctgcccacagcttttttggctgacatgttaaagcctattgccaccgggttaagctcgtacaagggaaggttatatgttccccaaagtttgtattcatggccattttttgttgatgttggaggagaaatatatgatcctgaaacaaattcatggatggaaatgccaaatggaatgggtgagggatggcccattaagcaagcaggaaccaaactgagtgttgtagtgaatggtgaattatatgcttttgatccttcaaattctgtggatagtggaaggatcaaggtatatgatcaaggagaggatgcatggaaagttgttattggaaaagtccctgtatatgattttacggaattggagtatccatatctactagctggtttccatggaaagcttcatttcatcacaaaagatgccaatcatgatatttctgttctgcaggctgacctgtgcagtaatttggattcttcacaatcaacctcgacacctcaatcacccaaatccatggaggatgaattgttgcaagaatcaactgaaacagatgaagttatttggaaactagttgcaagtaagggttttgggcaggccgaacttatcaattgccaagttattgatatctaggctgataccaagcaacaaatctgacagccaagatgtcagtttactgttagttatgcataattttgatgaattctgtaatagtttttatttaggtaatatttttatctcaggtaaatatgtcccatagaaattgtcatccttgacaatgatttgcttgttgctaggaaaatactctaatttatcaacg

SEQ ID NO: 21134 - protein, 470 aa, Glycine max
ANTKANQSESSATSPNETSKRQRMSPASVEECPRLIPNIPDELSLQIIARLPRICYYHVRLVSRRWKTTITSLELYKVRKELGTTEEWLYLLVRIGQNKLLWHALDPRSRIWQRLPIMPRVVDEEDSQKVSSRLWMWNMVEGIRIAEIIRGLLGQKDVLDDMPFCGCAFGAVDGCLYILGGFSKASTMKCVWRFDPIQNSWKKVNSMSTGRAYCKTGVLNNMLYVVGGVSQGQAGLIPLQSAEVFDPFKDTWSDVPSMPFSRAGVLPTAFLADMLKPIATGLSSYKGRLYVPQSLYSWPFFVDVGGEIYDPETNSWMEMPNGMGEGWPIKQAGTKLSVVVNGELYAFDPSNSVDSGRIKVYDQGEDAWKVVIGKVPVYDFTELEYPYLLAGFHGKLHFITKDANHDISVLQADLCSNLDSSQSTSTPQSPKSMEDELLQESTETDEVIWKLVASKGFGQAELINCQVIDI

SEQ ID NO: 21135 - protein, 447 aa, Glycine max
MSPASVEECPRLIPNIPDELSLQIIARLPRICYYHVRLVSRRWKTTITSLELYKVRKELGTTEEWLYLLVRIGQNKLLWHALDPRSRIWQRLPIMPRVVDEEDSQKVSSRLWMWNMVEGIRIAEIIRGLLGQKDVLDDMPFCGCAFGAVDGCLYILGGFSKASTMKCVWRFDPIQNSWKKVNSMSTGRAYCKTGVLNNMLYVVGGVSQGQAGLIPLQSAEVFDPFKDTWSDVPSMPFSRAGVLPTAFLADMLKPIATGLSSYKGRLYVPQSLYSWPFFVDVGGEIYDPETNSWMEMPNGMGEGWPIKQAGTKLSVVVNGELYAFDPSNSVDSGRIKVYDQGEDAWKVVIGKVPVYDFTELEYPYLLAGFHGKLHFITKDANHDISVLQADLCSNLDSSQSTSTPQSPKSMEDELLQESTETDEVIWKLVASKGFGQAELINCQVIDI

SEQ ID NO: 21136 - protein, 353 aa, Glycine max
MPRVVDEEDSQKVSSRLWMWNMVEGIRIAEIIRGLLGQKDVLDDMPFCGCAFGAVDGCLYILGGFSKASTMKCVWRFDPIQNSWKKVNSMSTGRAYCKTGVLNNMLYVVGGVSQGQAGLIPLQSAEVFDPFKDTWSDVPSMPFSRAGVLPTAFLADMLKPIATGLSSYKGRLYVPQSLYSWPFFVDVGGEIYDPETNSWMEMPNGMGEGWPIKQAGTKLSVVVNGELYAFDPSNSVDSGRIKVYDQGEDAWKVVIGKVPVYDFTELEYPYLLAGFHGKLHFITKDANHDISVLQADLCSNLDSSQSTSTPQSPKSMEDELLQESTETDEVIWKLVASKGFGQAELINCQVIDI

SEQ ID NO: 21137 - DNA, 1785 bp, Glycine max
gaacagcacaaggaaacaaaaccaacccttttgagcttgcacaactctgatggtagttgcacaactacttcagactctctctctctgagtgcctcaccacacagattctgtgatataccaatggaggccctcaatgctgctggcttgacccctctatctgtgctctctgatagaacaaaaacaagaactaaacacccttctgtttctgcatgcaaagtctcaaacttttccacctccaccaacaagaaacaagcattgctgcaaagttgcatatcaaaaactttgcatggggggctgattcttgcagcttcggctgttaatggtggagctgccacagccttaacgtacgatgaggcactgggacaacctttgagcctccctggtactggggactttgatgtgaatggctttgtggagagtgtcgctggctttgcagctgagaaccctgcaattgttgccgggggagtggttgttttggcagtgccattggttttgtctcaggttttcaagaagcctaaggcttggggtgttgagtctgctaagaacgcgtatgctaaacttggggctgatgggaatgctcagctgcttgacataagggcactggtggagattaggcaagtggggtccccagatgttgggggtctaaagaagaaagccgtgtcaataccttataagggtgatgataagccagggttcttgaagaagcttgcattgaagtttaaggagccagagaataccacattgtttattcttgacaaatttgatgggaactctgaactggttgcagagttggttaccattaatggatttaaagcagcttatgcaattaaggatggtgcagaaggaccgcgaggatggaagagtagtggtcttccttggatagcaccacggaaaacattgagtttggacaatctgacagatgctatatctgaagcaataggagatacctctgatggtgtggcagttactcttgggattgctgcagctgctgctggacttagtatattagctttttctgagatagaatcaatcctccaagttgtaggatcagctgcgctcattcagtttgcaagcaagaagcttttgtttgctgaggaccgaaagcaaaccgtgaaacaacttgatgagttcttgaacaccaaggttgcccctaaagaacttgttgatgaaataaaggatattggaaaggctcttctaccatcctctaccaataataaggctcttcctgctccagaagagaaaagttcagagcttgctacagctgatagcactgtacagaatgcagtagctactcccgagcccaaagcggatgcagtagctcctgaagtaaactcagtgcccaaaactgaagtgaaggcagaagaatcatttcctgcacaaccaaggccactttcaccatacccatattatccagatttcaagcctccaacatctcctaccccttcacagccctagaccttcacttcttttaatcttgaacataattccatagaaggcaaatcaattgtccaaatatccagcatgtatcaagaggtgtacaatactacaatctataatcctatcagaaaaagtcatgcatcttaatttgcagataagatccgtgacataagttgtataattttaaagtttgttatgattatccatccacttgtgctactgggtacactttttgtaattgatggatgtgttgtagaggtaggtgtcaagttaacattgtagttattttaacatttagtataacattcaatctttcagttttggagtaagcaaataaggtttatgtac

SEQ ID NO: 21138 - protein, 484 aa, Glycine max
EQHKETKPTLLSLHNSDGSCTTTSDSLSLSASPHRFCDIPMEALNAAGLTPLSVLSDRTKTRTKHPSVSACKVSNFSTSTNKKQALLQSCISKTLHGGLILAASAVNGGAATALTYDEALGQPLSLPGTGDFDVNGFVESVAGFAAENPAIVAGGVVVLAVPLVLSQVFKKPKAWGVESAKNAYAKLGADGNAQLLDIRALVEIRQVGSPDVGGLKKKAVSIPYKGDDKPGFLKKLALKFKEPENTTLFILDKFDGNSELVAELVTINGFKAAYAIKDGAEGPRGWKSSGLPWIAPRKTLSLDNLTDAISEAIGDTSDGVAVTLGIAAAAAGLSILAFSEIESILQVVGSAALIQFASKKLLFAEDRKQTVKQLDEFLNTKVAPKELVDEIKDIGKALLPSSTNNKALPAPEEKSSELATADSTVQNAVATPEPKADAVAPEVNSVPKTEVKAEESFPAQPRPLSPYPYYPDFKPPTSPTPSQP

SEQ ID NO: 21139 - protein, 444 aa, Glycine max
MEALNAAGLTPLSVLSDRTKTRTKHPSVSACKVSNFSTSTNKKQALLQSCISKTLHGGLILAASAVNGGAATALTYDEALGQPLSLPGTGDFDVNGFVESVAGFAAENPAIVAGGVVVLAVPLVLSQVFKKPKAWGVESAKNAYAKLGADGNAQLLDIRALVEIRQVGSPDVGGLKKKAVSIPYKGDDKPGFLKKLALKFKEPENTTLFILDKFDGNSELVAELVTINGFKAAYAIKDGAEGPRGWKSSGLPWIAPRKTLSLDNLTDAISEAIGDTSDGVAVTLGIAAAAAGLSILAFSEIESILQVVGSAALIQFASKKLLFAEDRKQTVKQLDEFLNTKVAPKELVDEIKDIGKALLPSSTNNKALPAPEEKSSELATADSTVQNAVATPEPKADAVAPEVNSVPKTEVKAEESFPAQPRPLSPYPYYPDFKPPTSPTPSQP

SEQ ID NO: 21140 - DNA, 1352 bp, Glycine max
ttttttttagtttttcgatggacccgaagttcatcggaaagccgctggcgatggtggacctggaccgggaccggatgtcggagcgtgggtcccaccaccggcgttcccactccgacacctccttccgcttccctgccaacttcgacgagcttctcctcttcgacccctccgacctcgacatctccggcctcccgtcgccgctccctctgccgtcgcagggcgccggcggcgtggttccgatgtccgtcgtctccgaggagtctggcggacggccgaggccgtccggggcttccgccggcgggcacctgcggagtctgtcggtggattctgacttcttcgatgggctcgggtccggcgtcggcggcgatgagagaggtgccgggaatggcggcggcgagcggcacagcaactcgatggaggggtcgtcgacgacgtcgtttgaggcggactcggcgacgatgatggatggcatgaagaaagctacggcccctgataaacttgctgagcttgctcttacggatcccaaaatagctaagaggatgcttgctaacaggcaatctgctgcaagatctaaggagaggaagattcgttacacaagtgagttggagaagaaggtgcagactcttcagactgaagcaactaacctttctgcacagcttaccatgcttcagagagacactacagatttgactgcacagaataaggagctcaaactgcgcttacaggcttttgagcaagaagcacagcttagagaagatctcaatgaggcattgaagaaagaactgcagcgccttagggtacaaagtgcttgctggggtgctatgactggtggtaacccttcttttggtgggatattcaaccagttggcttcccagttagccatgcaacagttgtctaattctgtgccccatcagcaccagacacaacaccagccacaggttggcatgcctcctcccccctctggacagaagcaccctaagttcatggacttcaatcagcagaagtagctaataatagttgtagcagtaaatgattgattacatgcaatattcatcacaagtaacatcctgtgcatatgaatgtataactaactggtgagacttgtgaaggatatattgtgcagttcagtgtctttagtcatgtgttgtttatctttagttctaggatatgtgtactttctgcagttctaggtgagaagcatagcctttgaaatgtaagcgtcatagctcttgggtgaatgagggtaacataaaggtgtagaaagactagttgataatagtatagatggtgaatgaagtttattaactagcttctggacttaaatagcatgctatatatgttaaaagttaaag

SEQ ID NO: 21141 - protein, 334 aa, Glycine max
FFSFSMDPKFIGKPLAMVDLDRDRMSERGSHHRRSHSDTSFRFPANFDELLLFDPSDLDISGLPSPLPLPSQGAGGVVPMSVVSEESGGRPRPSGASAGGHLRSLSVDSDFFDGLGSGVGGDERGAGNGGGERHSNSMEGSSTTSFEADSATMMDGMKKATAPDKLAELALTDPKIAKRMLANRQSAARSKERKIRYTSELEKKVQTLQTEATNLSAQLTMLQRDTTDLTAQNKELKLRLQAFEQEAQLREDLNEALKKELQRLRVQSACWGAMTGGNPSFGGIFNQLASQLAMQQLSNSVPHQHQTQHQPQVGMPPPPSGQKHPKFMDFNQQK

SEQ ID NO: 21142 - protein, 329 aa, Glycine max
MDPKFIGKPLAMVDLDRDRMSERGSHHRRSHSDTSFRFPANFDELLLFDPSDLDISGLPSPLPLPSQGAGGVVPMSVVSEESGGRPRPSGASAGGHLRSLSVDSDFFDGLGSGVGGDERGAGNGGGERHSNSMEGSSTTSFEADSATMMDGMKKATAPDKLAELALTDPKIAKRMLANRQSAARSKERKIRYTSELEKKVQTLQTEATNLSAQLTMLQRDTTDLTAQNKELKLRLQAFEQEAQLREDLNEALKKELQRLRVQSACWGAMTGGNPSFGGIFNQLASQLAMQQLSNSVPHQHQTQHQPQVGMPPPPSGQKHPKFMDFNQQK

SEQ ID NO: 21143 - protein, 318 aa, Glycine max
MVDLDRDRMSERGSHHRRSHSDTSFRFPANFDELLLFDPSDLDISGLPSPLPLPSQGAGGVVPMSVVSEESGGRPRPSGASAGGHLRSLSVDSDFFDGLGSGVGGDERGAGNGGGERHSNSMEGSSTTSFEADSATMMDGMKKATAPDKLAELALTDPKIAKRMLANRQSAARSKERKIRYTSELEKKVQTLQTEATNLSAQLTMLQRDTTDLTAQNKELKLRLQAFEQEAQLREDLNEALKKELQRLRVQSACWGAMTGGNPSFGGIFNQLASQLAMQQLSNSVPHQHQTQHQPQVGMPPPPSGQKHPKFMDFNQQK

SEQ ID NO: 21144 - DNA, 1371 bp, Glycine max
ttaactctgcatctggccaaaatgtccaggagtcagttgactgagattatctctgagctgaagggaatggctacacagaacaaggaactggctcgtcagctgttgctttcaaggccacagttgcccaaggctctttttcaggctcagataatgctaggaatggtgacttcccaagtgttacaaatgccgaaccttaggctggtttcagatcaaacctcacagtctttaatgaatgaaggccagctgggtcagccatcattggttcaaactctgtcaggccttcctcctcctgggcagggcaagttgcagcctggtttgacaccttatgctcaagaaggccaagtcaacaccatacctcataatcctttggctcctaatcaattaactgcacatccaaagcctccagtgcagcctcggattccccttcagcaacatccaaacaatcttgtactgccaggaacattgtcagggcagtctaatttaatgcttccttctgcacgtcctccaggtttgggcagtttgtctgttaggcctctaattcaaccgggaacttcaactgctctgaaccagcaaatgcatccctctttgctacagcattctgtacatgttggaaactcaactgtaggacataatattcaaatgcattgcccctccatgtcatcagcaaattctcagttactgagtaaaggtgataaatcttctaaagttattgaggatttaaattgggccaagagagctaatacacattcaaaatcaaacattcctttgggagtagagaaaacaaacatggttcatgattcttcagaatcttttactcggccgtcaaaggtcatgaaattggatgagggaaggagtgcccctctttcttcaggaatttcagacatgcctttcaccgatggatcatctcatatcctgggaagaagttcattacctgtacatgcagctcctaaagcggaagggcaatactctgagcaacaattttctcagcttccacctgatgtggagtctgttttgctgcaacaagtattgaatctgacaccagaacaattgagttccttgccaccagatcagcaacaacaggtcattcagctccagcaggctctacggcgagatcagatacagccctcataacaaacagggaactcatcaacagttcaaatagcataaacttatttgtatactagcattttctgtagattagcatcagaatatccaaattctttcaaccactattgcttctttttgtaatttgttttctaattccttgtccaaatattcgatgtagcattgaggggctccagatgggcgtataaatcatttagaagagatgtacaataataattttgacgataaatttttttccgttgacac

SEQ ID NO: 21145 - protein, 376 aa, Glycine max
LTLHLAKMSRSQLTEIISELKGMATQNKELARQLLLSRPQLPKALFQAQIMLGMVTSQVLQMPNLRLVSDQTSQSLMNEGQLGQPSLVQTLSGLPPPGQGKLQPGLTPYAQEGQVNTIPHNPLAPNQLTAHPKPPVQPRIPLQQHPNNLVLPGTLSGQSNLMLPSARPPGLGSLSVRPLIQPGTSTALNQQMHPSLLQHSVHVGNSTVGHNIQMHCPSMSSANSQLLSKGDKSSKVIEDLNWAKRANTHSKSNIPLGVEKTNMVHDSSESFTRPSKVMKLDEGRSAPLSSGISDMPFTDGSSHILGRSSLPVHAAPKAEGQYSEQQFSQLPPDVESVLLQQVLNLTPEQLSSLPPDQQQQVIQLQQALRRDQIQPS

SEQ ID NO: 21146 - protein, 369 aa, Glycine max
MSRSQLTEIISELKGMATQNKELARQLLLSRPQLPKALFQAQIMLGMVTSQVLQMPNLRLVSDQTSQSLMNEGQLGQPSLVQTLSGLPPPGQGKLQPGLTPYAQEGQVNTIPHNPLAPNQLTAHPKPPVQPRIPLQQHPNNLVLPGTLSGQSNLMLPSARPPGLGSLSVRPLIQPGTSTALNQQMHPSLLQHSVHVGNSTVGHNIQMHCPSMSSANSQLLSKGDKSSKVIEDLNWAKRANTHSKSNIPLGVEKTNMVHDSSESFTRPSKVMKLDEGRSAPLSSGISDMPFTDGSSHILGRSSLPVHAAPKAEGQYSEQQFSQLPPDVESVLLQQVLNLTPEQLSSLPPDQQQQVIQLQQALRRDQIQPS

SEQ ID NO: 21147 - protein, 354 aa, Glycine max
MATQNKELARQLLLSRPQLPKALFQAQIMLGMVTSQVLQMPNLRLVSDQTSQSLMNEGQLGQPSLVQTLSGLPPPGQGKLQPGLTPYAQEGQVNTIPHNPLAPNQLTAHPKPPVQPRIPLQQHPNNLVLPGTLSGQSNLMLPSARPPGLGSLSVRPLIQPGTSTALNQQMHPSLLQHSVHVGNSTVGHNIQMHCPSMSSANSQLLSKGDKSSKVIEDLNWAKRANTHSKSNIPLGVEKTNMVHDSSESFTRPSKVMKLDEGRSAPLSSGISDMPFTDGSSHILGRSSLPVHAAPKAEGQYSEQQFSQLPPDVESVLLQQVLNLTPEQLSSLPPDQQQQVIQLQQALRRDQIQPS

SEQ ID NO: 21148 - protein, 300 aa, Glycine max
MNEGQLGQPSLVQTLSGLPPPGQGKLQPGLTPYAQEGQVNTIPHNPLAPNQLTAHPKPPVQPRIPLQQHPNNLVLPGTLSGQSNLMLPSARPPGLGSLSVRPLIQPGTSTALNQQMHPSLLQHSVHVGNSTVGHNIQMHCPSMSSANSQLLSKGDKSSKVIEDLNWAKRANTHSKSNIPLGVEKTNMVHDSSESFTRPSKVMKLDEGRSAPLSSGISDMPFTDGSSHILGRSSLPVHAAPKAEGQYSEQQFSQLPPDVESVLLQQVLNLTPEQLSSLPPDQQQQVIQLQQALRRDQIQPS

SEQ ID NO: 21149 - DNA, 1550 bp, Glycine max
aagatggcccttgatgattgcaaggacctcttgcaatccgctatcgagagcctccaactcagcattgacatggttcacaacaacaacttgcaggccgtgcataaccaacaggctgacttcaagaactggctcagcgctgttatctcgtaccaacaggcctgcatggagggttttgacgatggcaaagaaggtgagaagaagatcaaggagcagtttcataccgagaccttggacaatgttcagaaactcactggcatcacccttgacattgtgagtggtttgtccaacatcctcgagaagttcgggttgaagtttaatcttaaacccgcgtctcgccgtcttctcggcaaggatgggttgcccacttggttctctgctgctgatcgtaagcttttgggtcgtggatggagatcacgtgtcaagcccaatgttgtggttgcccaggatggcactggtcagttcaaaaccgttgccgatgctattgcttcctacccaaaggataacaaaggtagatacattatctacgttaaggctggtgtctatgacgagtacatcaccgttcccaagagttcaaagaacattctcatgtacggtgatggccctgctaagaccatcatcaccggtcgcaagaacttcgtcgatggtgtcaagaccatgcaaactgccactttcgccaacactgcagaagggttcattgccaaggcaatgacattccagaacactgccggtgctgagggacaccaagccgttgcattcaggaaccaaggagacatgtccgctctcgttggttgccacatcttgggttaccaagacaccttgtacgtccagaccaacaggcaattctaccgcaactgcgtcatctccggcacagtcgacttcatcttcggcacctcctccaccgtgatccagcactccgttatcatcgtgaggaagcccctggacaaccagttcaacacagtcaccgccgacggaacatcccagaagaacatggctacaggaatcgtgatccagggttgcaacatcgtcccagaagccgaacttttccctacaaggttccaagtgaagtcataccttggaaggccatggaagcaattctcaaggacggttgtgatggaatccaccgtgggtgacttccttcaccccgaaggatggtgcccatgggccggtgaacacttcgaagacaccttgtactatgctgaatacaacaacgatggacctggtgccaacgttaacggaaggatcaagtggaagggttaccgtggtcttattagccgcgaagaagctacccaattcacccctgcccagttcctacaggctggagccaacggtggaagcgactggttgaaagctctccgtgttcctcacgcacttagcttcatgaaggcttaattgaaattacacaaacacatatccatgcatcatcaattgagtactgttagagagtgtgatgatgagggtcatagtccgtagacaatttgttattctttgtatttatctttggaggtctaccggaaatatttttaatgaaaatttttaaaattgctttgatt

SEQ ID NO: 21150 - protein, 462 aa, Glycine max
KMALDDCKDLLQSAIESLQLSIDMVHNNNLQAVHNQQADFKNWLSAVISYQQACMEGFDDGKEGEKKIKEQFHTETLDNVQKLTGITLDIVSGLSNILEKFGLKFNLKPASRRLLGKDGLPTWFSAADRKLLGRGWRSRVKPNVVVAQDGTGQFKTVADAIASYPKDNKGRYIIYVKAGVYDEYITVPKSSKNILMYGDGPAKTIITGRKNFVDGVKTMQTATFANTAEGFIAKAMTFQNTAGAEGHQAVAFRNQGDMSALVGCHILGYQDTLYVQTNRQFYRNCVISGTVDFIFGTSSTVIQHSVIIVRKPLDNQFNTVTADGTSQKNMATGIVIQGCNIVPEAELFPTRFQVKSYLGRPWKQFSRTVVMESTVGDFLHPEGWCPWAGEHFEDTLYYAEYNNDGPGANVNGRIKWKGYRGLISREEATQFTPAQFLQAGANGGSDWLKALRVPHALSFMKA

SEQ ID NO: 21151 - protein, 461 aa, Glycine max
MALDDCKDLLQSAIESLQLSIDMVHNNNLQAVHNQQADFKNWLSAVISYQQACMEGFDDGKEGEKKIKEQFHTETLDNVQKLTGITLDIVSGLSNILEKFGLKFNLKPASRRLLGKDGLPTWFSAADRKLLGRGWRSRVKPNVVVAQDGTGQFKTVADAIASYPKDNKGRYIIYVKAGVYDEYITVPKSSKNILMYGDGPAKTIITGRKNFVDGVKTMQTATFANTAEGFIAKAMTFQNTAGAEGHQAVAFRNQGDMSALVGCHILGYQDTLYVQTNRQFYRNCVISGTVDFIFGTSSTVIQHSVIIVRKPLDNQFNTVTADGTSQKNMATGIVIQGCNIVPEAELFPTRFQVKSYLGRPWKQFSRTVVMESTVGDFLHPEGWCPWAGEHFEDTLYYAEYNNDGPGANVNGRIKWKGYRGLISREEATQFTPAQFLQAGANGGSDWLKALRVPHALSFMKA

SEQ ID NO: 21152 - protein, 439 aa, Glycine max
MVHNNNLQAVHNQQADFKNWLSAVISYQQACMEGFDDGKEGEKKIKEQFHTETLDNVQKLTGITLDIVSGLSNILEKFGLKFNLKPASRRLLGKDGLPTWFSAADRKLLGRGWRSRVKPNVVVAQDGTGQFKTVADAIASYPKDNKGRYIIYVKAGVYDEYITVPKSSKNILMYGDGPAKTIITGRKNFVDGVKTMQTATFANTAEGFIAKAMTFQNTAGAEGHQAVAFRNQGDMSALVGCHILGYQDTLYVQTNRQFYRNCVISGTVDFIFGTSSTVIQHSVIIVRKPLDNQFNTVTADGTSQKNMATGIVIQGCNIVPEAELFPTRFQVKSYLGRPWKQFSRTVVMESTVGDFLHPEGWCPWAGEHFEDTLYYAEYNNDGPGANVNGRIKWKGYRGLISREEATQFTPAQFLQAGANGGSDWLKALRVPHALSFMKA

SEQ ID NO: 21153 - DNA, 1230 bp, Glycine max
aagagaagaagatggatagtgaaattgaaaagaagaagaacctgttttcggaactaaccgacgacatcgttctgaacatcttctacaaactcgaagacgatcctcgccactgggctcgcttagcctgtgtctgcaccaaattctcttccctcgttagggatttctgttggaagaccaaatgctccctcaccatcccccaagacctcctctccgccgccgcctccgacccccctctctccctccacaaactctccttctgctgccccggcctccgccacgccggcctcctgttcgacacctccgatttcggcctcgaacgcgacctcggccccggcaacttcaacgtcatcaccgatgattctccttcgaacaccactccaccaccaccaccaccaccaccacaacaacaacaacaacaacctcctcaatccgatgattgttcttcctcttgttggtccctttacgatgacctctactacgacacgctctacgtcccaaccgagtccgagtcgccgcgattaacggaatccgttagcgtaagagcgggcgtggatgtggcttcgatcagcgcgtgcagcaagaagcgcaagctctcccgcgcgtggagctcacacctggcttcgggaagctggacactaagccgtgaacaaggaagcaagctcctggcgcgtaagttccggtacgattgcttgtacgtgtgcgagtggccagggtgcgtgcacaaggaggagaagcgcaagtactgcctcttcagaggggttttcaagaacttcaggcgaactatggtttggaggactattcaggatgggaagaagaggaagatggatctgccttgcgccttctgcgcgtgtgagttcacgtgggatctgcactcttccttttgcttgaggcctggctttggcttccatgacgatggggagcctatggttagggcttatgtttgtgagaatggacatgtctctggtgcctggaccgatcttcccatctacacttgaactctctactgcattttatgcctaatttatgtcattttcattttcgcaatcttagtttctcctttaaataactcctgagaaggccgctatacgctgttttcacattccattccattatttcaactattacttaagattggaaatctgctttgtgaaattccgatcgcagtgtgattgcagtggaaaagcctttttaggtttttcttttatgagattcaaaacccattcgcgtttg

SEQ ID NO: 21154 - protein, 330 aa, Glycine max
EKKMDSEIEKKKNLFSELTDDIVLNIFYKLEDDPRHWARLACVCTKFSSLVRDFCWKTKCSLTIPQDLLSAAASDPPLSLHKLSFCCPGLRHAGLLFDTSDFGLERDLGPGNFNVITDDSPSNTTPPPPPPPPQQQQQQPPQSDDCSSSCWSLYDDLYYDTLYVPTESESPRLTESVSVRAGVDVASISACSKKRKLSRAWSSHLASGSWTLSREQGSKLLARKFRYDCLYVCEWPGCVHKEEKRKYCLFRGVFKNFRRTMVWRTIQDGKKRKMDLPCAFCACEFTWDLHSSFCLRPGFGFHDDGEPMVRAYVCENGHVSGAWTDLPIYT

SEQ ID NO: 21155 - protein, 327 aa, Glycine max
MDSEIEKKKNLFSELTDDIVLNIFYKLEDDPRHWARLACVCTKFSSLVRDFCWKTKCSLTIPQDLLSAAASDPPLSLHKLSFCCPGLRHAGLLFDTSDFGLERDLGPGNFNVITDDSPSNTTPPPPPPPPQQQQQQPPQSDDCSSSCWSLYDDLYYDTLYVPTESESPRLTESVSVRAGVDVASISACSKKRKLSRAWSSHLASGSWTLSREQGSKLLARKFRYDCLYVCEWPGCVHKEEKRKYCLFRGVFKNFRRTMVWRTIQDGKKRKMDLPCAFCACEFTWDLHSSFCLRPGFGFHDDGEPMVRAYVCENGHVSGAWTDLPIYT

SEQ ID NO: 21156 - DNA, 1508 bp, Glycine max
agaatcagctggtgtcttcagtcatacagtcttctccctcttcaattcttgggcagtggaatgagcttcaaggacctgagacactataccaggacatcacaaatacatatgtgacatcctctgcatatgggaaccttacaaatacatattcttctatgtcaatgctaccacaggctcagtcaggagttcttatgcgacagcctctgctttctcgctatgaagcatctcttggtgttatgaatcctgtgagcaagtctgtggacttagttaagcctcttacaatgactccccaggaaaaaattgaaaaattgaggaggcggcaacaaatgcaagcaatgcttgctattcagaaacaacagcaagaattcggccatcaagttcctagcactaataaatcaatgaatgaaaaatgtgccatagaaatccatagtcaactctgtgatggggctgatcctgaaattgaagatttaagaacagctctagatccaccaactgagcaagatgattctaatacaatgtctctggcaattgatgatcattttgttgaagacaccatactgtacatgcttcaggatgctatatcaaagttagatgtcaaaataagactatgcattagagatagcttgttccggttggctcaaagtgcaatgcaaaggaattatgctaatgatacaagcagtacaaacaacactagcagagaagaacttaaagttgctgcaagagaagaaagcaatagccaaaacagatatgctaggattgctgatgttgaaaccaagacaaatcccattgatcgaactgtggctcatttgctctttcataggcctttggagttaactgggaattatcctgataagcttgagtcacctatttctgctaagatacaatttgaaagcagagaagctaacatggagaagtttcatatgggatgcttgccagatgaggacttgaaaagtaatcaacaattttctcaccaagggcttgaggcccagcctgaggaccaatttaaaaacagtcgttgcatagacacctcagagaatgcttctaacaatgttctagctgatgctggagatcaggtgcttgaagccttgcaatgaagaaaaagtctcccctggaattggaggctgtctggatcataatcaaggcaaccgttgaagtctatcatcacataactgaacacctgtttctcatgtgtatgttatcattaatatttatgtttcgtctgtcaaaatcttgacagtatatgtatctcagcatatgaacttattcagcttggtgagtgacttatgttaataatgactttgtcagacttgtctagtagtaagtaaatgccaataatgttaaagactacgccagatttgtgcagtagtaatgccactcatgtcaaatagtcaagtcttcaccagactggtttggaccaagcttaaagttggtgttgtattcctgtactatttaactcgttttagttgccccacatcaatagctaacctgtggactgtcatattgagatt

SEQ ID NO: 21157 - protein, 363 aa, Glycine max
NQLVSSVIQSSPSSILGQWNELQGPETLYQDITNTYVTSSAYGNLTNTYSSMSMLPQAQSGVLMRQPLLSRYEASLGVMNPVSKSVDLVKPLTMTPQEKIEKLRRRQQMQAMLAIQKQQQEFGHQVPSTNKSMNEKCAIEIHSQLCDGADPEIEDLRTALDPPTEQDDSNTMSLAIDDHFVEDTILYMLQDAISKLDVKIRLCIRDSLFRLAQSAMQRNYANDTSSTNNTSREELKVAAREESNSQNRYARIADVETKTNPIDRTVAHLLFHRPLELTGNYPDKLESPISAKIQFESREANMEKFHMGCLPDEDLKSNQQFSHQGLEAQPEDQFKNSRCIDTSENASNNVLADAGDQVLEALQ

SEQ ID NO: 21158 - protein, 312 aa, Glycine max
MSMLPQAQSGVLMRQPLLSRYEASLGVMNPVSKSVDLVKPLTMTPQEKIEKLRRRQQMQAMLAIQKQQQEFGHQVPSTNKSMNEKCAIEIHSQLCDGADPEIEDLRTALDPPTEQDDSNTMSLAIDDHFVEDTILYMLQDAISKLDVKIRLCIRDSLFRLAQSAMQRNYANDTSSTNNTSREELKVAAREESNSQNRYARIADVETKTNPIDRTVAHLLFHRPLELTGNYPDKLESPISAKIQFESREANMEKFHMGCLPDEDLKSNQQFSHQGLEAQPEDQFKNSRCIDTSENASNNVLADAGDQVLEALQ

SEQ ID NO: 21159 - protein, 310 aa, Glycine max
MLPQAQSGVLMRQPLLSRYEASLGVMNPVSKSVDLVKPLTMTPQEKIEKLRRRQQMQAMLAIQKQQQEFGHQVPSTNKSMNEKCAIEIHSQLCDGADPEIEDLRTALDPPTEQDDSNTMSLAIDDHFVEDTILYMLQDAISKLDVKIRLCIRDSLFRLAQSAMQRNYANDTSSTNNTSREELKVAAREESNSQNRYARIADVETKTNPIDRTVAHLLFHRPLELTGNYPDKLESPISAKIQFESREANMEKFHMGCLPDEDLKSNQQFSHQGLEAQPEDQFKNSRCIDTSENASNNVLADAGDQVLEALQ

SEQ ID NO: 21160 - DNA, 1409 bp, Glycine max
gctttgccccttgttttcgttctgctatggcacccgatgccgccgccgccgtcgccgccaacggcaaaaagagaagacgctatcttcctcacaataaggcagtgaagaagaagggttcgtaccctctgcggcctggcgtgcaaggctttttcatcacttgcgatggcggcagagaacaccaagcctctcgtgaagctctcaatattctcgattccttttatgaagagctagttgatggggaaaaggagttacccagcaaacctttaaataaaaaaatcacgtttgctgattctgactcttctagtagtgatggtgaggaagaggaggaggaggaggaggaggaggaggaggaggaggaggaggccgtgcatgatggggatgaggaaaagggggacaaaaagccaaaattggatacttctagtgacgacaatgccagtcatgacgatggagcaggtgaaaaatcagatcctcataacgttgatgaaccgcacactcaggaagaaaataaaacttgtgataataaagggaataatggcaatcttaagactacaaaagggacagcagatgatctaccagctgtgaaacagtgctgcaaaacaaacgtgcctgcatgtaattttagtgacaaagtggaacacaagtctattgataagttaattgaagaagaattcaaagaattgggagacaagaataagaggcgctttgtcaagcttgattctggttgtaatggtgtagtatttgttcaaatgcggaagaaagatggagaccgaagccccaaggatatagttcaccggatagtgacatcagcagcatcaacagggaaacatatgtcaaggtttattttgagaattttgccaattgaagtctcatgttatgcttcaaaggaggaaatttcaagaacaatcaagcctcttgtggaacagtactttcctgtggaaactcaaaatccactcaagtttgctgtactgtatgaggcacgggcaaatactggtgttgacaggatggaaatcatcgatgctgtggcaaagtcagttcctggaccccataaagttgatctcaaaaatcctgataaaactatagtagttgaaattgccaggactgtgtgcttgatcggggtcattgagaaatataaggagctttccaagtacaatctgaggcagttaacatcacgtaaagactaagccttcttgcagcattatagtacctttcccttttgcttcatgttgatactctggtctgtgactgttgttgtcatttggttaagtgttagattagatgactcttgcagctagtctcctttgactgagtgtagttagtaagttctcacaaatcaaacgagaaacccttacatggaagtagagttatatacgctcaatccatttaaatatcatagttggatttacaataag

SEQ ID NO: 21161 - protein, 392 aa, Glycine max
FAPCFRSAMAPDAAAAVAANGKKRRRYLPHNKAVKKKGSYPLRPGVQGFFITCDGGREHQASREALNILDSFYEELVDGEKELPSKPLNKKITFADSDSSSSDGEEEEEEEEEEEEEEEEAVHDGDEEKGDKKPKLDTSSDDNASHDDGAGEKSDPHNVDEPHTQEENKTCDNKGNNGNLKTTKGTADDLPAVKQCCKTNVPACNFSDKVEHKSIDKLIEEEFKELGDKNKRRFVKLDSGCNGVVFVQMRKKDGDRSPKDIVHRIVTSAASTGKHMSRFILRILPIEVSCYASKEEISRTIKPLVEQYFPVETQNPLKFAVLYEARANTGVDRMEIIDAVAKSVPGPHKVDLKNPDKTIVVEIARTVCLIGVIEKYKELSKYNLRQLTSRKD

SEQ ID NO: 21162 - protein, 384 aa, Glycine max
MAPDAAAAVAANGKKRRRYLPHNKAVKKKGSYPLRPGVQGFFITCDGGREHQASREALNILDSFYEELVDGEKELPSKPLNKKITFADSDSSSSDGEEEEEEEEEEEEEEEEAVHDGDEEKGDKKPKLDTSSDDNASHDDGAGEKSDPHNVDEPHTQEENKTCDNKGNNGNLKTTKGTADDLPAVKQCCKTNVPACNFSDKVEHKSIDKLIEEEFKELGDKNKRRFVKLDSGCNGVVFVQMRKKDGDRSPKDIVHRIVTSAASTGKHMSRFILRILPIEVSCYASKEEISRTIKPLVEQYFPVETQNPLKFAVLYEARANTGVDRMEIIDAVAKSVPGPHKVDLKNPDKTIVVEIARTVCLIGVIEKYKELSKYNLRQLTSRKD

SEQ ID NO: 21163 - DNA, 1839 bp, Glycine max
gaaaacaatctgaagcagatggttataatttcaaaagctcaagagtggagttattcatgttaaagtgaattgctgaaggcttgaagcttaattcttaacaaattcactatcagtgaccacaccagaattgaaaatattaaggaatggacggagcttcatcagtgattccagaatattcggagataggcagcacaagtagttcagagagtcaagctcaggctcagtatttggagacacaattaaccaacatgcttcgaaaagtggatccagaaattacagaactcaatgagaaatgcatttatagagtaccagaaaaatttcgccgtgttaatccaaaagcctatactcctcgggttgtttcaattggcccgtttcacaatccacggtactctaacggaggtgacaatttgaaactaatggaagaacgaaagctgaaatatcttgagaaatttctaaatagaaacaagcacttgagcatgaagggtttatttctcagacttattgagaaggaaaagcagataagaggttattatgcagagcctgtcagttatagcagcgacgatttcttaacgatgattctagttgatgcttgttttataattgagcattttcttagatactatacaggcttaactttaacagaaagagacaccttatcagaaccatgcttgttaagtgatatttatcatgatatgattctgcttgaaaatcaacttccttttttcgttcttgaagacatattcaactctgctcacccgggtatgattgttgaatttccctacaaggatgttaaaggcataaacgacgactacgctggccctattacagatgttgagtctctctcctttattgctattactttccactattttcgaaaatacaaccactatatcatagaacctgcccatattgatcgtccatatcatttcattgatcttctaagaatcttttggcttccaattccaattcctcctgaaagtctaaaatcaggttttatggataaacttataccaagtgcaagccaactatcagaggtaggtctgatattcaaagctagtttaactccaggcttgtttgacataaaatatgatcatcatatgggtgttatggaaattccatgcatacttataaatcacaagacggagacggagttgagaaatatactggcattagagcaatgtcgctacatactttcacccaacatgactcagtacttgttcatcctagattgtcttgtcaacaccgacaaagacgcaagcatactaattgataacaaaatttttatcaattggttgggtgatgccaatgctgtggctaaaatgtttaacagtctttgttcaaatgttggtctgccatttatcagtgaagagtgtttttctctctgtgataacttggttaaattctatgaaaatcctcgcaacaagtacaaggctatcttttatcatgagtacttcaacactccatggaaaaaagcatctacatctgctgcagttctactccttttgctcactctgattcagactatatgttccgtcatctcgtttttttgaaggtaatggtaatgattcagttgatcaccctcaagctactatcatctgaagaagatcatggaaatcattctagttgtattgtttttataaaacttttaactattatgtgtttgatgtccaactttggaacataaaatttgtatgactttttttaaatgttttttttaataatttcttaacaaggttgcaccgctagcaataattaggacaaatggtgacagttggaacacatcatcaatttcattaaattaatccataaaggacaatgtcgattactaatagtctaaag

SEQ ID NO: 21164 - protein, 468 aa, Glycine max
MDGASSVIPEYSEIGSTSSSESQAQAQYLETQLTNMLRKVDPEITELNEKCIYRVPEKFRRVNPKAYTPRVVSIGPFHNPRYSNGGDNLKLMEERKLKYLEKFLNRNKHLSMKGLFLRLIEKEKQIRGYYAEPVSYSSDDFLTMILVDACFIIEHFLRYYTGLTLTERDTLSEPCLLSDIYHDMILLENQLPFFVLEDIFNSAHPGMIVEFPYKDVKGINDDYAGPITDVESLSFIAITFHYFRKYNHYIIEPAHIDRPYHFIDLLRIFWLPIPIPPESLKSGFMDKLIPSASQLSEVGLIFKASLTPGLFDIKYDHHMGVMEIPCILINHKTETELRNILALEQCRYILSPNMTQYLFILDCLVNTDKDASILIDNKIFINWLGDANAVAKMFNSLCSNVGLPFISEECFSLCDNLVKFYENPRNKYKAIFYHEYFNTPWKKASTSAAVLLLLLTLIQTICSVISFF

SEQ ID NO: 21165 - protein, 433 aa, Glycine max
MLRKVDPEITELNEKCIYRVPEKFRRVNPKAYTPRVVSIGPFHNPRYSNGGDNLKLMEERKLKYLEKFLNRNKHLSMKGLFLRLIEKEKQIRGYYAEPVSYSSDDFLTMILVDACFIIEHFLRYYTGLTLTERDTLSEPCLLSDIYHDMILLENQLPFFVLEDIFNSAHPGMIVEFPYKDVKGINDDYAGPITDVESLSFIAITFHYFRKYNHYIIEPAHIDRPYHFIDLLRIFWLPIPIPPESLKSGFMDKLIPSASQLSEVGLIFKASLTPGLFDIKYDHHMGVMEIPCILINHKTETELRNILALEQCRYILSPNMTQYLFILDCLVNTDKDASILIDNKIFINWLGDANAVAKMFNSLCSNVGLPFISEECFSLCDNLVKFYENPRNKYKAIFYHEYFNTPWKKASTSAAVLLLLLTLIQTICSVISFF

SEQ ID NO: 21166 - protein, 377 aa, Glycine max
MEERKLKYLEKFLNRNKHLSMKGLFLRLIEKEKQIRGYYAEPVSYSSDDFLTMILVDACFIIEHFLRYYTGLTLTERDTLSEPCLLSDIYHDMILLENQLPFFVLEDIFNSAHPGMIVEFPYKDVKGINDDYAGPITDVESLSFIAITFHYFRKYNHYIIEPAHIDRPYHFIDLLRIFWLPIPIPPESLKSGFMDKLIPSASQLSEVGLIFKASLTPGLFDIKYDHHMGVMEIPCILINHKTETELRNILALEQCRYILSPNMTQYLFILDCLVNTDKDASILIDNKIFINWLGDANAVAKMFNSLCSNVGLPFISEECFSLCDNLVKFYENPRNKYKAIFYHEYFNTPWKKASTSAAVLLLLLTLIQTICSVISFF

SEQ ID NO: 21167 - DNA, 1299 bp, Glycine max
gaaaagtacgtgtcccattcttgtcaacaaacgtggcgcgcttcttaacataagcacttgcaatggcggattcagagcgaatccaaaattcgtggatggcttcggatcaaactgcaattgaaatgagcggcgagggcacaggttccagggaatgctcttctctccctccgccgccgcaaaaaccattcaattctgatcaattgggaatcggagaacgagctttctccgccgccggcgccgccttcctctccgccatcattgtcaatcccctcgacgttgccaagacaaggttgcaagcacaagcggcaggggtcgcatattctcatccactcagtaatatgaccagtagaatggcttgttttgggccaaatatgatatttgctgatttaaaatgttctccatcatgccaccgggctggattccagggcacagtgtccatttgtcctcccgagtgttttcgctacaaaggaacactagatgttatctacaaaattataaaacaggagggaatttctaggctatggagaggcacaaatgctggcctggctcttgcagtaccaactgtgggaatataccttccttgctatgacatactccgcaattggttggaggaattcacagctaaaaaggcaccaaccacaactacttatgtacctctagtagctggttcattggcacgctctctagcttgcactacttgctaccctattgaacttgctaaaactcgtatgcaggcatttaaagagactcaaattggtaaaaagcctcctggagtgatccagactctgctaggtgttgtttcaaatgtcaagagcacaaacactccacagaacagcttgcaaggttatcgtgttttgtggactggcatgggagctcaacttgcccgtgatgtacccttctctgctatttgttggtcgacacttgaaccgactagaagaaaacttcttggtttgattggaggtgatgatgccaatgcattgagtgttcttggggcaaattttggagctgggtttgttgcaggaaccttagcagctggagccacatgtccgctagatgttgtaaaaactcgaaggcagatagagagggatcctgttagggcattgaaaatgactacaagacagacactgatggaggtgtggagagatggaggcttgaaaggattgtttacaggtgttggtccacgagttggtcgagcaggcccctctgttggaattgtgatttcattttatgaagttgtaaagtttgttctacatcatcagtacacataatcatgattttctgcacactttttttgctgcc

SEQ ID NO: 21168 - protein, 401 aa, Glycine max
MADSERIQNSWMASDQTAIEMSGEGTGSRECSSLPPPPQKPFNSDQLGIGERAFSAAGAAFLSAIIVNPLDVAKTRLQAQAAGVAYSHPLSNMTSRMACFGPNMIFADLKCSPSCHRAGFQGTVSICPPECFRYKGTLDVIYKIIKQEGISRLWRGTNAGLALAVPTVGIYLPCYDILRNWLEEFTAKKAPTTTTYVPLVAGSLARSLACTTCYPIELAKTRMQAFKETQIGKKPPGVIQTLLGVVSNVKSTNTPQNSLQGYRVLWTGMGAQLARDVPFSAICWSTLEPTRRKLLGLIGGDDANALSVLGANFGAGFVAGTLAAGATCPLDVVKTRRQIERDPVRALKMTTRQTLMEVWRDGGLKGLFTGVGPRVGRAGPSVGIVISFYEVVKFVLHHQYT

SEQ ID NO: 21169 - protein, 390 aa, Glycine max
MASDQTAIEMSGEGTGSRECSSLPPPPQKPFNSDQLGIGERAFSAAGAAFLSAIIVNPLDVAKTRLQAQAAGVAYSHPLSNMTSRMACFGPNMIFADLKCSPSCHRAGFQGTVSICPPECFRYKGTLDVIYKIIKQEGISRLWRGTNAGLALAVPTVGIYLPCYDILRNWLEEFTAKKAPTTTTYVPLVAGSLARSLACTTCYPIELAKTRMQAFKETQIGKKPPGVIQTLLGVVSNVKSTNTPQNSLQGYRVLWTGMGAQLARDVPFSAICWSTLEPTRRKLLGLIGGDDANALSVLGANFGAGFVAGTLAAGATCPLDVVKTRRQIERDPVRALKMTTRQTLMEVWRDGGLKGLFTGVGPRVGRAGPSVGIVISFYEVVKFVLHHQYT

SEQ ID NO: 21170 - protein, 381 aa, Glycine max
MSGEGTGSRECSSLPPPPQKPFNSDQLGIGERAFSAAGAAFLSAIIVNPLDVAKTRLQAQAAGVAYSHPLSNMTSRMACFGPNMIFADLKCSPSCHRAGFQGTVSICPPECFRYKGTLDVIYKIIKQEGISRLWRGTNAGLALAVPTVGIYLPCYDILRNWLEEFTAKKAPTTTTYVPLVAGSLARSLACTTCYPIELAKTRMQAFKETQIGKKPPGVIQTLLGVVSNVKSTNTPQNSLQGYRVLWTGMGAQLARDVPFSAICWSTLEPTRRKLLGLIGGDDANALSVLGANFGAGFVAGTLAAGATCPLDVVKTRRQIERDPVRALKMTTRQTLMEVWRDGGLKGLFTGVGPRVGRAGPSVGIVISFYEVVKFVLHHQYT

SEQ ID NO: 21171 - DNA, 1471 bp, Glycine max
aatttttcctacattttcttgatcaagttgagcgagctaatactgggaaaactgaactggatccatcgaggagtttcaaatttggtattgaagatagaattttgtgttcatctggaaaagttacatataatagaaggaatgactacattctttccctcaatatcccattacatgaggcaactaatgaagaagaattagaatcctttcacaaactgaaagcagagaaacttgcagaaggaaaggaaataaatgccaatgagattgtgcgcccaagggtacctttagaaacttgccttgtgaacttctcagctcctgaggagatacaagatttttacagtactgctttgaaggcaaagacaacagcactgaagactgcaggtctgacctcatttcctgattacctggtgttacatatgcggaggtttgttatggaggcaggacgggaacctaaaaagcttgatgtgcacattgatgttcctgatatcatagatatcagtcacatgcgcagcaaaggtcagcagtctggggaagagctattacctgatggtgttcctggagagcaagattctaacaaaatttcggccaacgaagaaattgttgcccagctggtttccatgggctttaaccatctccattgtcagaaagctgctataaatacatcaaatgttggagtagaagaggcaatgaattggttgttatctcacatggatgatccagacattgacaatcctatttccaaaggccatggctctgagacaattgttgaccaatcaaaagttgatattctaatttcttttggatttgaagaagaaattgctaggaatgctctgaaggcatcgggtggtgacattgagaaagcaacagattggatatttaacaatcctgatgcatcagtctccagtatggatgcttccccatcaaacgctgaatccactaccaatgatgttaacctacctgatggaggagggaaatatcgacttatggggattttgagccacagtggaacctctttgcagtgtggtcactatgttgctcacattttaaaagatggaagatgggcaattttcaacgacaacaaggtcggggcatccattgatcctccaaaggaaatgggctatctttatttcttcgagaggctttgattggttttaggcgctgaacaaggtgaatatttcaaccattaagaggcgcacgggtcgtttttgaatggcgttaacatgccacctacttggtgatatttatatatgttacccttttcttggtggcatggtaaacaatcctctagttggccgaatcttcttttcttggttctcagctgtattgaagcattttggaactttacattgcattcatcttctataaattgcatgtttaggaattcaaataacaatggagcaatggatggtcagttctaggaattcaaataactatacaacgaatgatctgttttagtgaatatttatacctgcag

SEQ ID NO: 21172 - protein, 379 aa, Glycine max
FFLHFLDQVERANTGKTELDPSRSFKFGIEDRILCSSGKVTYNRRNDYILSLNIPLHEATNEEELESFHKLKAEKLAEGKEINANEIVRPRVPLETCLVNFSAPEEIQDFYSTALKAKTTALKTAGLTSFPDYLVLHMRRFVMEAGREPKKLDVHIDVPDIIDISHMRSKGQQSGEELLPDGVPGEQDSNKISANEEIVAQLVSMGFNHLHCQKAAINTSNVGVEEAMNWLLSHMDDPDIDNPISKGHGSETIVDQSKVDILISFGFEEEIARNALKASGGDIEKATDWIFNNPDASVSSMDASPSNAESTTNDVNLPDGGGKYRLMGILSHSGTSLQCGHYVAHILKDGRWAIFNDNKVGASIDPPKEMGYLYFFERL

SEQ ID NO: 21173 - protein, 242 aa, Glycine max
MRRFVMEAGREPKKLDVHIDVPDIIDISHMRSKGQQSGEELLPDGVPGEQDSNKISANEEIVAQLVSMGFNHLHCQKAAINTSNVGVEEAMNWLLSHMDDPDIDNPISKGHGSETIVDQSKVDILISFGFEEEIARNALKASGGDIEKATDWIFNNPDASVSSMDASPSNAESTTNDVNLPDGGGKYRLMGILSHSGTSLQCGHYVAHILKDGRWAIFNDNKVGASIDPPKEMGYLYFFERL

SEQ ID NO: 21174 - protein, 237 aa, Glycine max
MEAGREPKKLDVHIDVPDIIDISHMRSKGQQSGEELLPDGVPGEQDSNKISANEEIVAQLVSMGFNHLHCQKAAINTSNVGVEEAMNWLLSHMDDPDIDNPISKGHGSETIVDQSKVDILISFGFEEEIARNALKASGGDIEKATDWIFNNPDASVSSMDASPSNAESTTNDVNLPDGGGKYRLMGILSHSGTSLQCGHYVAHILKDGRWAIFNDNKVGASIDPPKEMGYLYFFERL

SEQ ID NO: 21175 - DNA, 1277 bp, Glycine max
acgtgtgaatcaggttcatgatagggaagaaactgagacagaaccagaagggaataaagaaaaggagggaaaggttcgggataatgaagaactcgtggaagaaagagaaagaaaaacagtgacagaagcacaatctcaagagaataaagctgaggaggataagtttcaagatgatagtgaagaactcgtggtggaaacagaaacagaaacagaagttcagtgtgaagagaataaagaggagggtaaggttcgggatagtgaagaacatgtggaggaaatggaaacagaaacaggagcagaagcgcaacctgaagagaagaaagatgagggtaaggttcgggacagtgaaaaactcgtggaggaaacgcaaacggaaacagaaggacaatctgaagagaagaaagatgaggagggaaaggtggctgtgatgagtagttctgtgagtgagacctatgattcggattctgtggctgtatcgatgaagaaaaggaaggataagaagaagaaggttacttccgcaaggaaatctttgtcgttacaacaagagcataagaataagcattataagactagagggaaagttgccaacgaggaggaagttaccagcttcaaaactacgagtttggggcagcaaccacagagaatgaagcagagttcactggctgcaaagcgtaagagattactttggacagcagaagaagaaaaagttctcaaggaaggagtatcaaagttctccacagaaaatcagaatatcccttggaggaaaattttggaatttggctgtcgtgtatttgatgagactcgtactcctgttgatctcaaggataaatggaagaacattatctccaagaaaagtagaagtactgattgtagttatacttttgatttataagaagtgatatttaggcaacacccccttacaccacgtttgttgactttgatgtctatttcgtccaagaggtcctctgcttcaaacacagcatctttgacatcatctagccaagctttcagatatcgatttctgattttgttctgcttcatcaaccacagcattggtggacacttgcttgatgttcaacatctgcagcagcgtctcgtagttttcttcctcgaaaaaagtccagaacaagattttgtgcatatttttagacaattttgtggatggtgtgcatatattatgtgttgacacatttatttgttatttaaaggcttcaaaatgttggaataatgctttttttattatatgttgattataaagtttttttatgaacattatt

SEQ ID NO: 21176 - protein, 296 aa, Glycine max
RVNQVHDREETETEPEGNKEKEGKVRDNEELVEERERKTVTEAQSQENKAEEDKFQDDSEELVVETETETEVQCEENKEEGKVRDSEEHVEEMETETGAEAQPEEKKDEGKVRDSEKLVEETQTETEGQSEEKKDEEGKVAVMSSSVSETYDSDSVAVSMKKRKDKKKKVTSARKSLSLQQEHKNKHYKTRGKVANEEEVTSFKTTSLGQQPQRMKQSSLAAKRKRLLWTAEEEKVLKEGVSKFSTENQNIPWRKILEFGCRVFDETRTPVDLKDKWKNIISKKSRSTDCSYTFDL

SEQ ID NO: 21177 - protein, 204 aa, Glycine max
METETGAEAQPEEKKDEGKVRDSEKLVEETQTETEGQSEEKKDEEGKVAVMSSSVSETYDSDSVAVSMKKRKDKKKKVTSARKSLSLQQEHKNKHYKTRGKVANEEEVTSFKTTSLGQQPQRMKQSSLAAKRKRLLWTAEEEKVLKEGVSKFSTENQNIPWRKILEFGCRVFDETRTPVDLKDKWKNIISKKSRSTDCSYTFDL

SEQ ID NO: 21178 - protein, 154 aa, Glycine max
MSSSVSETYDSDSVAVSMKKRKDKKKKVTSARKSLSLQQEHKNKHYKTRGKVANEEEVTSFKTTSLGQQPQRMKQSSLAAKRKRLLWTAEEEKVLKEGVSKFSTENQNIPWRKILEFGCRVFDETRTPVDLKDKWKNIISKKSRSTDCSYTFDL

SEQ ID NO: 21179 - DNA, 1197 bp, Glycine max
gctgtgaagtgtgaattaaaatatattcaattttgcgtttctctgcctaaaaggattgaaagatgggtcaagcattcggttgctaccaagtcgatcagtcaaatgtggctatcaaggagcattttggaaaatttgatgatgtcctagagcctggatgtcactgcctgccttggtgtcttgggtaccagattgctggtagtctgtcgctgcgagtgcagcaacttgatgttcgatgtgagacgaaaaccaaggacaatgtctttgtcaatgtggttgcatctgtgcaataccgagctgtgtctgagaaagcatctgatgcattctataggcttaccaacactagggagcagatccaatcatatgtttttgatgtcatcagggccagtgtaccaaagttggagttggattctgtctttgagcagaaaaatgatatagcaaaggctgtggaggaggagcttgagaaggccatgtcaacctatggatttgagatagttcagactctcattgttgatatagagcctgatgttaatgtcaagagagcaatgaacgagataaacgcagctgctagattgaggttggctgcaaatgagaaggctgaagctgagaaaatactgcagatcaagaaagcggagggagaagcagaatccaaatatctgtcaggactcggtatcgctcgtcaacgtcaggccattgtggatggactgagggacagcgtgcttgctttctctgagaacgtgcccgggacatcagctaaagatgtcatggacatggtgctggtgactcaatactttgacaccatgaaagagataggagcatcgtcaaggtcctcgtctgtgttcatacctcacggtcctggggcagttaaagacattgccgtgcaaattcgggatggtctccttcaggccactgcctcacagaattaagctttcttggagttgtaaataacaaatagtatgtgtgtcaggtttttttcaggaaatgcttcttttgtttgaacttataaagtctgcatctttactcttcttatatttgatagattcatagcagtgtctattttatgtgtaagtactgatgtgcagttttgaatacttgtttaaggatagtcttaatgtcaagttgcttgtgaatcattaaggaatttgttatgtaagaattacttcccaaaagatgtgtttttcttttagtgtcctatcttgt

SEQ ID NO: 21180 - protein, 286 aa, Glycine max
MGQAFGCYQVDQSNVAIKEHFGKFDDVLEPGCHCLPWCLGYQIAGSLSLRVQQLDVRCETKTKDNVFVNVVASVQYRAVSEKASDAFYRLTNTREQIQSYVFDVIRASVPKLELDSVFEQKNDIAKAVEEELEKAMSTYGFEIVQTLIVDIEPDVNVKRAMNEINAAARLRLAANEKAEAEKILQIKKAEGEAESKYLSGLGIARQRQAIVDGLRDSVLAFSENVPGTSAKDVMDMVLVTQYFDTMKEIGASSRSSSVFIPHGPGAVKDIAVQIRDGLLQATASQN

SEQ ID NO: 21181 - protein, 151 aa, Glycine max
MSTYGFEIVQTLIVDIEPDVNVKRAMNEINAAARLRLAANEKAEAEKILQIKKAEGEAESKYLSGLGIARQRQAIVDGLRDSVLAFSENVPGTSAKDVMDMVLVTQYFDTMKEIGASSRSSSVFIPHGPGAVKDIAVQIRDGLLQATASQN

SEQ ID NO: 21182 - DNA, 1297 bp, Glycine max
atggaagaaggatttgctctcagaagaatccaggaagaactctgctagagttaagaatgatgaagcctctggtgattcggctgcagaaggtggtactaacaccattggcattagggtgaacaaatcagcagagttttcatatgaggaactagccaatgccacaaataacttcagtttggctaataaaattggtcaaggtggttttggggtagtctattatgcagagctgaatggagagaaagctgcaataaaaaagatggacatacaagcaacaagagaatttcttgcggaattgaaagtgttgacacatgttcatcacttgaacctggtgcgcttgattggatattgtgttgagggctccctttttcttgtctatgagtacattgagaatggcaacttaggacaacatctacgtaaatcaggttatataagcacataacatgacaaatatctatgttcagcactggttcattaatttgatggattaatggtaaagagtaatggcttagtgagttaacgatcaagtcaaagtgtgtttacaggtttcaatcctttgccatggtctacccgagttcaaattgctctggattcagccagaggtcttcaatacattcatgagcatacggtacctgtatatatccatcgtgacataaagtcggaaaacattttaatagacaaaaacttcggtgcaaaggttgcagactttggattaaccaagttgattgatgttggaagttcatcacttcccactgttaatatgaagggcacatttggttacatgccaccagaatatgcatatggcaatgtttctcccaaaatagatgtctatgcttttggagttgttctttatgaactaatttctggtaaagaagcattgagcagaggtggtgtctctggtgctgaactaaagggccttgtatctttgtttgatgaagtatttgatcagcaagataccacagaaggtcttaaaaaactggtggatcctaggcttggagataactacccaattgattcagtttgcaagatggcacaacttgctagagcatgcacagagagcgatccacaacaacgtccaaatatgagttctgttgtggttactctcacagcacttacttcaactactgaggattgggatattgcttccatcattgaaaatccaactcttgcaaatctaatgtctggtaaataagaaaaggaatgtagaatacaactgttaccattttttttatttttacaatggtgtagtgaaattcgaacctatgaactatgcatactataaggccgactttagtgattt

SEQ ID NO: 21183 - protein, 145 aa, Glycine max
WKKDLLSEESRKNSARVKNDEASGDSAAEGGTNTIGIRVNKSAEFSYEELANATNNFSLANKIGQGGFGVVYYAELNGEKAAIKKMDIQATREFLAELKVLTHVHHLNLVRLIGYCVEGSLFLVYEYIENGNLGQHLRKSGYIST

SEQ ID NO: 21184 - protein, 143 aa, Glycine max
MKGTFGYMPPEYAYGNVSPKIDVYAFGVVLYELISGKEALSRGGVSGAELKGLVSLFDEVFDQQDTTEGLKKLVDPRLGDNYPIDSVCKMAQLARACTESDPQQRPNMSSVVVTLTALTSTTEDWDIASIIENPTLANLMSGK

SEQ ID NO: 21185 - protein, 136 aa, Glycine max
MPPEYAYGNVSPKIDVYAFGVVLYELISGKEALSRGGVSGAELKGLVSLFDEVFDQQDTTEGLKKLVDPRLGDNYPIDSVCKMAQLARACTESDPQQRPNMSSVVVTLTALTSTTEDWDIASIIENPTLANLMSGK

SEQ ID NO: 21186 - DNA, 1721 bp, Glycine max
gtaccgggccccgccaccgcaccggctttcagggtgttaccatccatcacacaggcgtccagttcatgggtttcatcacgcgtaaagacagcgccaattccggcgttaaacagtggacactcttccagcagacgcaccgcttccgtcaccacatccagcgcactttcgcccgcttccagcattttctgcccggtttcaacaatggcagacaacgcctcgatgtagcgtaattcctgttgcagactcatctgcgcgcggctaattgcacctgcgccaccatgaattgcaatgactgctttgcccatagtattcgtccattaagggtggttcgccacttttgctataaatatcagaatttttatgaattactcattcaatttttgaatatagaaagatggatatggcatgtaaaggcaggacccagcgctacgcccgaggtggcatacagtctgtggcgtttttctgacataataggcaaattcgattttgcctccgcaggagtgttttcatggaatttaccaccggattgatgtcgctcgacaccgcgcttaatgagatgctttctcgcgtcaccccactgaccgcccaggaaacgctgccactggtacagtgttttggtcgtattctggcgagcgatgtcgtttcgccgcttgatgttccggggtttgataactccgcaatggacggctacgcggtgcgtttagccgatattgcctccgggcaaccgctgcccgttgccggtaaatcctttgccggtcagccataccatggtgaatggcctgcgggtacctgcattcgtattatgaccggtgcgccggtgccggaaggctgcgaagcggtggtgatgcaggagcagactgaacaaatggacaatggcgtgcgttttactgctgaagtgcgtagcgggcaaaatattcgccgtcgcggtgaagatatctctgcaggtgcggttgttttcccggcgggaactcgcctgactaccgcagagctgccagtaattgcttcactggggattgccgaagttccggtgattcgtaaagttcgggtaacgatccctgcaccagcgtggtaaacgcgaccacgcctttggggcgcaccacccgatacagctcgcggagtgccgtggataaattaccgcaccactgcactgcgagattgctccatgcaagatcgaacgtcgcagtcgctaacggcagggattcgatatctcccgccagataatggtctgcggcatccttctggcgtgcctgaacaagcattggcggcgagagatctaaggccgtcacctgcgcgtgacgttcccgccagtggcggctcatccagccaggtccacaacccgcgtccagtacgtgggtgtatttacgctgtggaagcattgccagtaaggcgtcagcactctggcgctgtagatctgcatgttgctcatagtgtgcggctgcccgaccaaatgccgctgcaatggcttgtttattaaccgttgccatgcagcacctccagcagacggtcgatatcctgcatttcatgcgcagcggttagcgttaagcgcagtcgcgcagtaccagcgggtacggttggcgggcgaatcgccgtgacccagcagccttgctgacgcagtttttctgccagttgtaacgcacggctgttatcaccgacaatcaatggctggatggcgctgcatgaatcagcaagcgtaaacggcaaatcctgtactccggcacgaa

SEQ ID NO: 21187 - protein, 187 aa, Glycine max
MEFTTGLMSLDTALNEMLSRVTPLTAQETLPLVQCFGRILASDVVSPLDVPGFDNSAMDGYAVRLADIASGQPLPVAGKSFAGQPYHGEWPAGTCIRIMTGAPVPEGCEAVVMQEQTEQMDNGVRFTAEVRSGQNIRRRGEDISAGAVVFPAGTRLTTAELPVIASLGIAEVPVIRKVRVTIPAPAW

SEQ ID NO: 21188 - protein, 180 aa, Glycine max
MSLDTALNEMLSRVTPLTAQETLPLVQCFGRILASDVVSPLDVPGFDNSAMDGYAVRLADIASGQPLPVAGKSFAGQPYHGEWPAGTCIRIMTGAPVPEGCEAVVMQEQTEQMDNGVRFTAEVRSGQNIRRRGEDISAGAVVFPAGTRLTTAELPVIASLGIAEVPVIRKVRVTIPAPAW

SEQ ID NO: 21189 - protein, 171 aa, Glycine max
MLSRVTPLTAQETLPLVQCFGRILASDVVSPLDVPGFDNSAMDGYAVRLADIASGQPLPVAGKSFAGQPYHGEWPAGTCIRIMTGAPVPEGCEAVVMQEQTEQMDNGVRFTAEVRSGQNIRRRGEDISAGAVVFPAGTRLTTAELPVIASLGIAEVPVIRKVRVTIPAPAW

SEQ ID NO: 21190 - DNA, 1495 bp, Glycine max
ggagaaaccattgattcaagttaacaacagagaagtagctatgccgaagccttgtgacttgaaaatcaacattgatggtcagcagatattccttttgaaagagaaggttatatcaaaatactgtggagggttgaagaagatcttgaatcaccaaaagagaagatgtcatgtgaaggagttggggattagaatcaatgatttccctggaggaccaaaagggtttgagctagtttcaatgttctgttacaacaatggaaaaatccaaatcactgtggctaatgtgtctctcctccactgttgtgctgtttatcttggaatgactgaggaggcattcagcaacaatctcttgcaacaaacagaaacttttcttgagagaatctattactggaaatggaatgacatacttgcaagtctcaagagttgccagctgttttatacatatgcagatggctatggtctcttggagaagatcattagtgccttagcaaagtttgtccagaattcagattcaaacctcctcacttcctcgccttcggcatcatcatggtcatcttcaccagaaagcaactttgccaagagattctctttctcatccaagaaaactaccccagaaaaaatcaagtcatgtttgccgcgcaaggcatggtggtttgatgatttggcaactttaccaccaacgatcattgagaaactcttccagactattggagcatacaaagctgataacaaggatttaatcctcacaagatttctgttgcattatctgaaaatagctactcaaaccaaaatggttaattgcagaaacagcaatgagtatgctgctcttgcagaaacagctgcttatggggtcatatctgttggtaaagagacattttcttgcagaggccttttttgggtactaaggattgtatctaagtttgggttgagtagagactgcagaactgaattggagaaattgattggtggaatgcttgagcaagctacactggatgatcttctagtctctgggcatgacatgggagtttattatgatgttaatttggtgataagattggttagattatttgttgatatcaatggttctgatggactgtctttacagaaagtgaaaagggttggtagattaattgacaagtatttgagagagatatctcctgaccagaacctcaagatctctaaatttcttggagtagcagaatgcttgccagactctgcaagggattgctatgatggggtctacaaggccattgacatctatcttgaggtgaataacacatacccttcttccattgcttttcatatgaatcatcttcctaaagaaaaggaaatggaaaagagcaaatagattacaggacttgttttgcttgagagagcaattttttgtttttagtttagtttttttttatgaataattacaaaaatgttactttgttttgattttgttttctgacactaaaaatttgtaaaaaaaacaataaagaacactgtttatttt

SEQ ID NO: 21191 - protein, 447 aa, Glycine max
EKPLIQVNNREVAMPKPCDLKINIDGQQIFLLKEKVISKYCGGLKKILNHQKRRCHVKELGIRINDFPGGPKGFELVSMFCYNNGKIQITVANVSLLHCCAVYLGMTEEAFSNNLLQQTETFLERIYYWKWNDILASLKSCQLFYTYADGYGLLEKIISALAKFVQNSDSNLLTSSPSASSWSSSPESNFAKRFSFSSKKTTPEKIKSCLPRKAWWFDDLATLPPTIIEKLFQTIGAYKADNKDLILTRFLLHYLKIATQTKMVNCRNSNEYAALAETAAYGVISVGKETFSCRGLFWVLRIVSKFGLSRDCRTELEKLIGGMLEQATLDDLLVSGHDMGVYYDVNLVIRLVRLFVDINGSDGLSLQKVKRVGRLIDKYLREISPDQNLKISKFLGVAECLPDSARDCYDGVYKAIDIYLEVNNTYPSSIAFHMNHLPKEKEMEKSK

SEQ ID NO: 21192 - protein, 434 aa, Glycine max
MPKPCDLKINIDGQQIFLLKEKVISKYCGGLKKILNHQKRRCHVKELGIRINDFPGGPKGFELVSMFCYNNGKIQITVANVSLLHCCAVYLGMTEEAFSNNLLQQTETFLERIYYWKWNDILASLKSCQLFYTYADGYGLLEKIISALAKFVQNSDSNLLTSSPSASSWSSSPESNFAKRFSFSSKKTTPEKIKSCLPRKAWWFDDLATLPPTIIEKLFQTIGAYKADNKDLILTRFLLHYLKIATQTKMVNCRNSNEYAALAETAAYGVISVGKETFSCRGLFWVLRIVSKFGLSRDCRTELEKLIGGMLEQATLDDLLVSGHDMGVYYDVNLVIRLVRLFVDINGSDGLSLQKVKRVGRLIDKYLREISPDQNLKISKFLGVAECLPDSARDCYDGVYKAIDIYLEVNNTYPSSIAFHMNHLPKEKEMEKSK

SEQ ID NO: 21193 - protein, 369 aa, Glycine max
MFCYNNGKIQITVANVSLLHCCAVYLGMTEEAFSNNLLQQTETFLERIYYWKWNDILASLKSCQLFYTYADGYGLLEKIISALAKFVQNSDSNLLTSSPSASSWSSSPESNFAKRFSFSSKKTTPEKIKSCLPRKAWWFDDLATLPPTIIEKLFQTIGAYKADNKDLILTRFLLHYLKIATQTKMVNCRNSNEYAALAETAAYGVISVGKETFSCRGLFWVLRIVSKFGLSRDCRTELEKLIGGMLEQATLDDLLVSGHDMGVYYDVNLVIRLVRLFVDINGSDGLSLQKVKRVGRLIDKYLREISPDQNLKISKFLGVAECLPDSARDCYDGVYKAIDIYLEVNNTYPSSIAFHMNHLPKEKEMEKSK

SEQ ID NO: 21194 - DNA, 1433 bp, Glycine max
acacagtagttacttcaaagtctaatgatagagttcagaagagagctagttctgttgaagaacctgacagactaggtaaacgacggaaaggggatgtggagctaagagattttgaaactgaactcagattctctgaaagagagaagatgatggatcctcgatttgctgatgacaaattgggaccagaggaacatggtctgtacagggcaagtgataagccattggaaaggacaaaagacaaaggcaacgaaagatatgaaagggatcacagggaaagaatggaccgtctggataagtctcgtggtgatgactttgttgcagaaaaacctagggataggtcaattgaaagatatggaagagaacgatctgttgagagaatgcaagagaggggtagtgataggagttttaatagactccctgagaaagccaaggatgaaagaaacaaggatgatagaaataaattacgatacaatgatgcatcagcagaaaaatctcatggtgatgatcgcttccatgggcaaagcttgcctccacctccccctttacctcctaatgtggttcctcaatctgtaggagctggtaggcgtgatgaagatgttgatagaaggtatggagctacaaggcactctcaaagactttctccaaggcatgaagaaaaagaacggagatggtctgaagagactgtggtttctcaggatgatgccaaacgccgaaaagaagacgattttcgagatcgaaaacgtgaggaaattaaggtggaagagagggagcgggaaagagagaaagcaaacattctaaaggaagagttggacttaaatgccgcatccaagagacgtaaactcaagagggagcatttaccaactgatgaacctggcgagtactctgcagtggcccatccaccttcttccgctggtactggcatgccgctggcatatgatggaagggacagaggagacagaaagggacccatcatgcagcatccaagttacatagatgaatcaagtctcaggattcacggtaaagaggcggccagcaagttgaatcgccgtgattcagatcccttgtatgaccgtgaatgggaggatgagaagagacaaagagctgatcagaagcgaaggcaccggaagtaacaaatcaaaaggggatttcaccagtaaacttttttgaaggttgtgtccgtttcatgcacgtgctataatgctaactttttgcgtgagttgaggtggtgggttcacaacacttttaactgtcagccccctcatttttctggcaacttgtgccaaatttcagcagttcaaattattagtcttctttctaaagtcagcatgaagaagttatgaaaattcttatacacttgtatatagtgttgtatattctggatagctgatgatcaaatatactctgaaaaatccgattatttcgtttgaactttc

SEQ ID NO: 21195 - protein, 375 aa, Glycine max
TVVTSKSNDRVQKRASSVEEPDRLGKRRKGDVELRDFETELRFSEREKMMDPRFADDKLGPEEHGLYRASDKPLERTKDKGNERYERDHRERMDRLDKSRGDDFVAEKPRDRSIERYGRERSVERMQERGSDRSFNRLPEKAKDERNKDDRNKLRYNDASAEKSHGDDRFHGQSLPPPPPLPPNVVPQSVGAGRRDEDVDRRYGATRHSQRLSPRHEEKERRWSEETVVSQDDAKRRKEDDFRDRKREEIKVEEREREREKANILKEELDLNAASKRRKLKREHLPTDEPGEYSAVAHPPSSAGTGMPLAYDGRDRGDRKGPIMQHPSYIDESSLRIHGKEAASKLNRRDSDPLYDREWEDEKRQRADQKRRHRK

SEQ ID NO: 21196 - protein, 327 aa, Glycine max
MMDPRFADDKLGPEEHGLYRASDKPLERTKDKGNERYERDHRERMDRLDKSRGDDFVAEKPRDRSIERYGRERSVERMQERGSDRSFNRLPEKAKDERNKDDRNKLRYNDASAEKSHGDDRFHGQSLPPPPPLPPNVVPQSVGAGRRDEDVDRRYGATRHSQRLSPRHEEKERRWSEETVVSQDDAKRRKEDDFRDRKREEIKVEEREREREKANILKEELDLNAASKRRKLKREHLPTDEPGEYSAVAHPPSSAGTGMPLAYDGRDRGDRKGPIMQHPSYIDESSLRIHGKEAASKLNRRDSDPLYDREWEDEKRQRADQKRRHRK

SEQ ID NO: 21197 - protein, 326 aa, Glycine max
MDPRFADDKLGPEEHGLYRASDKPLERTKDKGNERYERDHRERMDRLDKSRGDDFVAEKPRDRSIERYGRERSVERMQERGSDRSFNRLPEKAKDERNKDDRNKLRYNDASAEKSHGDDRFHGQSLPPPPPLPPNVVPQSVGAGRRDEDVDRRYGATRHSQRLSPRHEEKERRWSEETVVSQDDAKRRKEDDFRDRKREEIKVEEREREREKANILKEELDLNAASKRRKLKREHLPTDEPGEYSAVAHPPSSAGTGMPLAYDGRDRGDRKGPIMQHPSYIDESSLRIHGKEAASKLNRRDSDPLYDREWEDEKRQRADQKRRHRK

SEQ ID NO: 21198 - DNA, 1476 bp, Glycine max
ttaaaatcttggatgctcaagattgcccaaagcttaagagttttccaccgttgaagttgacctctcttgaaaggcttgaactttggtattgttggagtctcgagagtttttctgaaatattaggaaagatggaaaatataacagaacttttcttgactgattgtcccataacaaaactcccaccttcatttcgaaatcttactcggcttcgatccttatgtcttggaccccatcaccgaactgagcagttaattgactttgatgctgccaccctcattccgaacatctgcatgatgccagaactaagtcaaattgagtttggcggtttgcaattgaggctattgcctgacgatgttttgaaattgacctcagttgtgtgtccaagcattcgatttgtttgtttctattactgcgacctgtcagatgagcttcttcggctatttctctcatgttttgtaaatgtgataaatttaaagctaacaagttgtaaattcacagttattcccgaatgcatcaaagaatgccgctttttaactttccttactttggattattgcgatcgtctacaagaaattagagggattcctccaaacttgataagattccgtgcaaggacatgcccagccttgacttcctcaagcataagcatgttgctgaatcaggaactgcttgaggctcgagacattcacttaataagtttgccaatagtaaagattccagagtggtttgagtgccagagtcggggaccgtcaatttttttctggttccctaacaaattcccagtaataactgtttgcattgttacctcaggtcctaagaaatattccaattatctggttctcaacgtgattattaataagaaacataaacatcgacatcaacgtttttatagtaacggttccaacgcaataccttctacaactgtttttcgtcttcaaatgaaagataatttagatgaagaactatcaaagagtgaatggaaccttgcagagattgtatgcgaagattcgtgggccgcatacggaatccatgtactgaaagagaaaagtagcatggaggatattcgattcagtgatccttgcagaaaaagaaaaatttgtagttcagaggttggggttggggaaaaagcaaagattagtaggcagtgaagttgttgagacacaatttgtagagcagcaacaacatatgggttttttctcacacgtgtggaactgggcactatcacttgtaatttcttgctgctccggcaatcaataattggatgaaagagaattcaagttaagcatatggtaacaacgctgataaaagacaacagtgtaagtagccctactgattcttgtagtctagtcaagtttggttttagatattgtattttgctttggattcaatgaaaatagatccagcatttcaatctcttaatacattcctctgaatctgtattttttttttaaagaactgaaagaaaggaattttatc

SEQ ID NO: 21199 - protein, 381 aa, Glycine max
KILDAQDCPKLKSFPPLKLTSLERLELWYCWSLESFSEILGKMENITELFLTDCPITKLPPSFRNLTRLRSLCLGPHHRTEQLIDFDAATLIPNICMMPELSQIEFGGLQLRLLPDDVLKLTSVVCPSIRFVCFYYCDLSDELLRLFLSCFVNVINLKLTSCKFTVIPECIKECRFLTFLTLDYCDRLQEIRGIPPNLIRFRARTCPALTSSSISMLLNQELLEARDIHLISLPIVKIPEWFECQSRGPSIFFWFPNKFPVITVCIVTSGPKKYSNYLVLNVIINKKHKHRHQRFYSNGSNAIPSTTVFRLQMKDNLDEELSKSEWNLAEIVCEDSWAAYGIHVLKEKSSMEDIRFSDPCRKRKICSSEVGVGEKAKISRQ

SEQ ID NO: 21200 - protein, 339 aa, Glycine max
MENITELFLTDCPITKLPPSFRNLTRLRSLCLGPHHRTEQLIDFDAATLIPNICMMPELSQIEFGGLQLRLLPDDVLKLTSVVCPSIRFVCFYYCDLSDELLRLFLSCFVNVINLKLTSCKFTVIPECIKECRFLTFLTLDYCDRLQEIRGIPPNLIRFRARTCPALTSSSISMLLNQELLEARDIHLISLPIVKIPEWFECQSRGPSIFFWFPNKFPVITVCIVTSGPKKYSNYLVLNVIINKKHKHRHQRFYSNGSNAIPSTTVFRLQMKDNLDEELSKSEWNLAEIVCEDSWAAYGIHVLKEKSSMEDIRFSDPCRKRKICSSEVGVGEKAKISRQ

SEQ ID NO: 21201 - protein, 285 aa, Glycine max
MMPELSQIEFGGLQLRLLPDDVLKLTSVVCPSIRFVCFYYCDLSDELLRLFLSCFVNVINLKLTSCKFTVIPECIKECRFLTFLTLDYCDRLQEIRGIPPNLIRFRARTCPALTSSSISMLLNQELLEARDIHLISLPIVKIPEWFECQSRGPSIFFWFPNKFPVITVCIVTSGPKKYSNYLVLNVIINKKHKHRHQRFYSNGSNAIPSTTVFRLQMKDNLDEELSKSEWNLAEIVCEDSWAAYGIHVLKEKSSMEDIRFSDPCRKRKICSSEVGVGEKAKISRQ

SEQ ID NO: 21202 - DNA, 1203 bp, Glycine max
atattgaatcccttggtcatgcccttcatgctttcataaatgggaagcttgtagggagtggaactggcaacagtggcaaagctaaggtcaatgtagacatccccgtcccactagtggctgagaagaacgcaattgatctcctgagtttaactgtggaacttcagaactatggagctttttttgacacatggggtgcggggatcactggcctagtgatatcgaaaggtttgaagaatggaagcactgttgatctttcctcccaacagtggacatatctggttggccttaaatatgaagatttaggtccatctagtggcagttctggacagtggaattcacaatctaccttaccaacaaatcaatcgttgacttggtacaagacaatccagttgcaattgacttcacggggatgggaaaaggtgaggcttgggtgaatggacagtgcattggacggtactggcctacatatgtttctcctaatggtggttgtaccgactcatgcaattatagaggggcctatagttcatccaaatgtctcaagaactgcagaaagccatcacagacattataccatgtaccacaatcatggttacaaccagataccaacacacttgtattgtttgaggagagtggaggcgaccctacgcaaatctctttcgctacaaagcagataggaagcgtgtgttcacatgtatctgaatctcaccctccacctgtagacttgtggaattcagataaaggaagaaaagtctggcctgtattggcactggagtgtccttatcctaatcaggtgatctcttccattaaatttgcaagttttcgaacgccttatgggacttgcgggaacttcaaacatggatggtgcagaagtaataaggctctatccattgtgcaaaaggtctgcattggatcaagcagttgtagaattggactatcaattaacacagtcggagatcagtgtaaaggagtaacaaaaagtttagctgttgaagcttcttgtgcatagacatgttgcttcaagccttccctcttcctagcttggacttggctgaagagcactctgcactccaagtgtcttagactcattatggaagatgatccctggttagccaatgtaaaatgctattctggtagtaaaccaggagaaaaatgtcaaacaaaacagtgtatatttgcttaataaaaaaggaaggtctcacaaac

SEQ ID NO: 21203 - protein, 198 aa, Glycine max
MGKGEAWVNGQCIGRYWPTYVSPNGGCTDSCNYRGAYSSSKCLKNCRKPSQTLYHVPQSWLQPDTNTLVLFEESGGDPTQISFATKQIGSVCSHVSESHPPPVDLWNSDKGRKVWPVLALECPYPNQVISSIKFASFRTPYGTCGNFKHGWCRSNKALSIVQKVCIGSSSCRIGLSINTVGDQCKGVTKSLAVEASCA

SEQ ID NO: 21204 - protein, 143 aa, Glycine max
IESLGHALHAFINGKLVGSGTGNSGKAKVNVDIPVPLVAEKNAIDLLSLTVELQNYGAFFDTWGAGITGLVISKGLKNGSTVDLSSQQWTYLVGLKYEDLGPSSGSSGQWNSQSTLPTNQSLTWYKTIQLQLTSRGWEKVRLG

SEQ ID NO: 21205 - DNA, 1627 bp, Glycine max
agtatcccaatgccgtttccctttctcaccgattggaactcaagggaattgttccaagccttgttactttgaacattctcattaattgtttctgtcatatgggtcaaatcacattcggcttctctgtatttcggcctaagattctcaagaggaaccagccagacaccataaccttgaacacactcatcaaaggtttctgtcttaagggacacatcaagaaagcactgacaaggactttagttatggtattttgatcaatgggatatgcaagacaggagacacaagagctctcgtccagttgctgagaaagattgatgactctaatgtggtaatgtacagcacaattattgactgtttatgtaaacataaacttgtatggtttatttcctgaaatggctgtcaaagggatttctgttaatgttgtcacttgtaatactttattgtgtggcttcattgttggtaagctgaaagaagcaactaatttcttaaatgaaatggtattgaaaaccatcaacccaagtgtttatacctatgatatactggttgatgcattatgtaaaaaaaggaaaggtgaaagaagccaaaagtatgataactgtgatgatgaaatcttttgtgaaacctgatatcagaaaaacatggttcctaacatggtgacatgcaattctcttatcgattgtttgtgcaagatagggagaatctcttatgtttgggatcttattgatgagatgcatgatagagggaattcgaccagatgtgtacacattaaatatacttcttgatggattatgcaaaggcaaaagacttaagattgcacaaggggtttttcaagatcttttggttaaaggctatcgtataaatgtctacacgtatactattatgattaatgggctttgtaatcagggcttgcttgatgaagcattggccatgctgtcaaaaatggaagacaaaggttgcatccctaatgctgttacttttgaaatactcatttgtgctctctttgaaaaagatggaaatgataaggcagagaaacttcttcatgaaatgattgctagaggcttgttgtaagactaaattagattcagatgataaattttttcctagtaaaatcatgaccatgtagtggcagtttttaaatggagttacagtattgagttgtttgtggaataggtggaagtgtgggaaattgctccttttgccaatctaatacattttcatggccacctcacgttttgtttcccaatctctcacattgtcactcaggctcagacaatttttgagtcttgaatcatgcgcgactttgagttggtggagaatgctgttgtctctatcccacttctctataaagctttgctcatcatctgcttcaagattatcaagcactgataactccgaggagtttacttcatcgaggctgaagcactgataatctttgaccagtgatcaccatagagaatgagctaatacccctcacgcacaacctcttgtttgagcatgaatcagatttggatgttgatttttttttccttttggtctgctgggtctgtcatgctttaatttgatcctctgtttgctgaattagatactgatattcattcaatacagtttggatacttcattccttttt

SEQ ID NO: 21206 - protein, 120 aa, Glycine max
MFGILLMRCMIEGIRPDVYTLNILLDGLCKGKRLKIAQGVFQDLLVKGYRINVYTYTIMINGLCNQGLLDEALAMLSKMEDKGCIPNAVTFEILICALFEKDGNDKAEKLLHEMIARGLL

SEQ ID NO: 21207 - protein, 114 aa, Glycine max
MRCMIEGIRPDVYTLNILLDGLCKGKRLKIAQGVFQDLLVKGYRINVYTYTIMINGLCNQGLLDEALAMLSKMEDKGCIPNAVTFEILICALFEKDGNDKAEKLLHEMIARGLL

SEQ ID NO: 21208 - protein, 111 aa, Glycine max
MIEGIRPDVYTLNILLDGLCKGKRLKIAQGVFQDLLVKGYRINVYTYTIMINGLCNQGLLDEALAMLSKMEDKGCIPNAVTFEILICALFEKDGNDKAEKLLHEMIARGLL

SEQ ID NO: 21209 - DNA, 1718 bp, Glycine max
actactactacattagtgaagaccatttttcaattagtctcctctctctctctctctctctcacacacacactttggccttaacagaaccgaacacaacacgagagagatagagatacaacagaagaacaaactccgacatctctcgctttctctactttgccctgtttttattcggaagcaagcaaggcttaaatatatagatccctctttcccgtgtttttccttggatgaatctcaatctgaatggtataaggaataaaaaattcatcgtcataatcaggtatggaagttgggagcgtggtgttagtatggtggtggattagtctgatcccgaggattttatcagatccaagcgacgaagcatgcctgacgaacctaagcaagtccttggaagacccaaacaaactgctccataactggaaggaagagaacttcgccaagccctgcaacgactcctcctcgaatctccgaggcgcaatctgcaacaacggacgcatctacaagctctccctcaacaacctctctctccgcggcaccatatcccctttcctctcaaactgtaccaatctccaaaccctagacctctcctccaacttcctcacaggcccaatccccccagaactacagtccctggtcaacctcgccgttctgaacctctcttcgaacagtctccaaggggtgatccccccggtgctcacaatgtgcgcctacctcaacatcatcgacctccacgataatttgcttactgggcccatccctcagcaattgggcctgctcgttcgcctctccgctttcgatgtgtccaataaccgcctctcagggcccatcccggcttcgctttccaaccggagcgggaacttgcccagattcaacgccagctcattcctagagaataaggatctctacggttacccgttgccgccgcttaggaatagagggttgtccgttttggccattgttgggatcggcttgggaagtggccttgctagcttggtgcttagcttcaccggggtttgtatttggttgaaatttaccgagcgcaagatggcgctcgaggaaggcaaaatcagccaccttatgcctgattattgaatattgaaacaacaccttttaatcaccaattactacaatagtttcaaattattccaattccaagctagtactagtatctttcattattcaacttgattgatcggatcgctgatgcttcttcacctcagaaaaaaaaaaaaaatagtacccgtaccaggagggtagggtaggttagtgggtgcggtgctgctactgctacatgaagtcttgaagatgcgctgcgccgttgaactgctaaaatatatactacaaactcatcaaacagctggtgccatctttctaatctgcacaagagtcacattatcggaaggagccgctgggggacaccaacggtactacacagccacatggattgggacttgttgttgttctactcttgttcacttgttagtccaacgtcaactagtcaaccctctttatttactatatgtaaccctccctacttagcttaggattaggatcactatttttagatcatgcaaaacttactaacttagtatattagattattttattttaatttgaatctgaataaaatattcagatgatgaattttgtcattgtttctactctaatgagattatatttaacaatgggtaattaaatgatagtattattatactt

SEQ ID NO: 21210 - protein, 269 aa, Glycine max
MEVGSVVLVWWWISLIPRILSDPSDEACLTNLSKSLEDPNKLLHNWKEENFAKPCNDSSSNLRGAICNNGRIYKLSLNNLSLRGTISPFLSNCTNLQTLDLSSNFLTGPIPPELQSLVNLAVLNLSSNSLQGVIPPVLTMCAYLNIIDLHDNLLTGPIPQQLGLLVRLSAFDVSNNRLSGPIPASLSNRSGNLPRFNASSFLENKDLYGYPLPPLRNRGLSVLAIVGIGLGSGLASLVLSFTGVCIWLKFTERKMALEEGKISHLMPDY

SEQ ID NO: 21211 - DNA, 1696 bp, Glycine max
agcacaggagttgatgtgtaaatcacctgaaaagatgaataagatttttgcaatgtctgaagaagaaattatgtcagaccaagcaaaggtcattatgaagaaatctactaacttttgttggccaagtattcaggacctgaatgcagctgcccacaaagaaaaatgtgggtggtgctttacttgcaaaggtgaaaatgaagacagggattgcttgtttaattctgtggtgaagcctatttgggaagtgcctaataatactttagttgggcttcaacccaggaagatccagaatggacgtcttagagatatcatatgtcttatcttctctcttgaggttcgattacgtgggcttttgttgggtccatggttgaatctgcatcaaactgatctttggcataaggatcttttgaaggcatctgattttcttcctgttaaacgattattgcttcttttagaatccaatttgcggcttcttgcactttcagcagattggttaaagcatgtggattctgttgctacaatgggatctgctactcatattgtggtcagttcatcacgcacatcttcaaggcatggtattggaaggaaaagggccaggaatacagatattgaaacaagttcatcttcaaacactgctagtggtttggggatgtactggtggagaggtggcagactctcccgaaagttgtttaattgtaaggctttgcctcactccctggttaccaaggctgctagacaaggtgggtatagaaagataccaggcattttatatcctgagaattcagattttgcacgtagaagcagatttgttgcctggcgagctgctgttgagatgtcaacaagtgccgagcagcttgctttacaggttagagagctttattcaaacataaggtggcatgatattgagaacaaccattccctatatgtgttggacaaggaatctagaaaatcagtgaggctgttcaaaaaatcaatcatacgcaggaagtgcactgaagggcaatctgtgaaataccttattgattttgggaagagaagggctattccagatgttgttattaaacagggttctttgttggaacaatcctctagtgagagaaaaaaatattggctggaggagacttatgttccattgcatcttctaaagaattttgaggaaaaaagaattgtccgcaagtccacggataagaaacttggaaaaattcttgagattggtagagtaaacaagaaaattcctcaacaaaagggattttcatatttgtttaccagattggaaagatctgattgccatcaatgtgggcactgcaacaaagatgttgcaatgagggatgctgtgaggtgccttcattgcaaaggatatttccacaagaggcatgtcaggaaatcaagtggcacaagaaccactggaagctcttattcatgtcacagatgtcaagatgggttgcaagcaaagactaatactaataaaaggaaagttgactcaaaactgcagaagattcaagcaaagaaacgtaaaattgtgccttcagtttgtaaatcattgaacctcaagggcaataaaaaggcatcgagtaagaataagattcgacaggtgagatctcgaaacagtaagaatatcccatcaagtatacctcttcgccgttctactaggaaggccaaatcgttgtatatgcatagtcaattgaatgggggacat

SEQ ID NO: 21212 - protein, 565 aa, Glycine max
AQELMCKSPEKMNKIFAMSEEEIMSDQAKVIMKKSTNFCWPSIQDLNAAAHKEKCGWCFTCKGENEDRDCLFNSVVKPIWEVPNNTLVGLQPRKIQNGRLRDIICLIFSLEVRLRGLLLGPWLNLHQTDLWHKDLLKASDFLPVKRLLLLLESNLRLLALSADWLKHVDSVATMGSATHIVVSSSRTSSRHGIGRKRARNTDIETSSSSNTASGLGMYWWRGGRLSRKLFNCKALPHSLVTKAARQGGYRKIPGILYPENSDFARRSRFVAWRAAVEMSTSAEQLALQVRELYSNIRWHDIENNHSLYVLDKESRKSVRLFKKSIIRRKCTEGQSVKYLIDFGKRRAIPDVVIKQGSLLEQSSSERKKYWLEETYVPLHLLKNFEEKRIVRKSTDKKLGKILEIGRVNKKIPQQKGFSYLFTRLERSDCHQCGHCNKDVAMRDAVRCLHCKGYFHKRHVRKSSGTRTTGSSYSCHRCQDGLQAKTNTNKRKVDSKLQKIQAKKRKIVPSVCKSLNLKGNKKASSKNKIRQVRSRNSKNIPSSIPLRRSTRKAKSLYMHSQLNGGH

SEQ ID NO: 21213 - protein, 561 aa, Glycine max
MCKSPEKMNKIFAMSEEEIMSDQAKVIMKKSTNFCWPSIQDLNAAAHKEKCGWCFTCKGENEDRDCLFNSVVKPIWEVPNNTLVGLQPRKIQNGRLRDIICLIFSLEVRLRGLLLGPWLNLHQTDLWHKDLLKASDFLPVKRLLLLLESNLRLLALSADWLKHVDSVATMGSATHIVVSSSRTSSRHGIGRKRARNTDIETSSSSNTASGLGMYWWRGGRLSRKLFNCKALPHSLVTKAARQGGYRKIPGILYPENSDFARRSRFVAWRAAVEMSTSAEQLALQVRELYSNIRWHDIENNHSLYVLDKESRKSVRLFKKSIIRRKCTEGQSVKYLIDFGKRRAIPDVVIKQGSLLEQSSSERKKYWLEETYVPLHLLKNFEEKRIVRKSTDKKLGKILEIGRVNKKIPQQKGFSYLFTRLERSDCHQCGHCNKDVAMRDAVRCLHCKGYFHKRHVRKSSGTRTTGSSYSCHRCQDGLQAKTNTNKRKVDSKLQKIQAKKRKIVPSVCKSLNLKGNKKASSKNKIRQVRSRNSKNIPSSIPLRRSTRKAKSLYMHSQLNGGH

SEQ ID NO: 21214 - protein, 554 aa, Glycine max
MNKIFAMSEEEIMSDQAKVIMKKSTNFCWPSIQDLNAAAHKEKCGWCFTCKGENEDRDCLFNSVVKPIWEVPNNTLVGLQPRKIQNGRLRDIICLIFSLEVRLRGLLLGPWLNLHQTDLWHKDLLKASDFLPVKRLLLLLESNLRLLALSADWLKHVDSVATMGSATHIVVSSSRTSSRHGIGRKRARNTDIETSSSSNTASGLGMYWWRGGRLSRKLFNCKALPHSLVTKAARQGGYRKIPGILYPENSDFARRSRFVAWRAAVEMSTSAEQLALQVRELYSNIRWHDIENNHSLYVLDKESRKSVRLFKKSIIRRKCTEGQSVKYLIDFGKRRAIPDVVIKQGSLLEQSSSERKKYWLEETYVPLHLLKNFEEKRIVRKSTDKKLGKILEIGRVNKKIPQQKGFSYLFTRLERSDCHQCGHCNKDVAMRDAVRCLHCKGYFHKRHVRKSSGTRTTGSSYSCHRCQDGLQAKTNTNKRKVDSKLQKIQAKKRKIVPSVCKSLNLKGNKKASSKNKIRQVRSRNSKNIPSSIPLRRSTRKAKSLYMHSQLNGGH

SEQ ID NO: 21215 - DNA, 1575 bp, Glycine max
tcacttgcttccagaaatcagaagttctctgatctagtcgtgaaatgccttatcaagcttacaaaggttcttcagagcactatctatgatgttgaccttgatcgcatacttcaaagcatccatttgtacctgcaagacttgggaatggaggaaattaggagaagggctggtgctgatgacaaacctttacgaatggtaaaaactgtactgcatgaacttgtcaagcttcgtggtgcagcaataaagggtcatctttcaatggttcctatcgatgctaaacctcaacccatcatccttgcctacattgaacttaatcttgagactttggctgctgcaagaatgttgactgcatctggtcctgggggacaaaaccattggggtgattcagcaaccaataattcagcctcgggcacccattcagctgatgcccagttaaagcaagagctggctgctatatttaagaagattggggagaagcaaacttgcacaattggtctatatgaactatatcgtattacccaattgtacccaaaggttgacatatttgctcagcttcaaaatgctagtgaggcatttcgcacctacattagagatggtcttgctcagatggagaagaatgctgcagctggaagaactccttcaagtttaccgatgcctacccctccaccggcatctttaaatatatcttctccggattttgcacctctctcacctgtaaacacaaatccactgggtgatgctaaattaaatgtgaaacctgatccgacaaattttaatttacccccatcatcatacaatgaggagaatagggccgtgaatgccattacttctagagcattaaattctgactatacattaggtgaccaaagaaatgatagatttatgacaggagtaaccagtggaacattggatgcaatcagagagaggatgaagagcatgcaattagcagctgctgctgggagtacagaatctggtggtaggcacttaacaagtgcaaatgacaacttgaatcatggacttcctcctcctagccagattcctcatgcatcagagcatgttggtactgagaatacaatgcacggtggggtacttcctatggatgagaaagcattgtctgggcttcaagcacggatggaaagattgaaaagtggatctcttgaacctctgtaaaggtaaagagaaaaaattccttactatagtcagagacattattcccattgatgcagtggcatacaagcatgtcgtggtcataattttcaatacgggtgggtatagatgagaaatatgtataataatcaatcgaagctattatcgcctgcaaactatggaactgtgacgttgcagagcgtcggaggattagttgctgtccggttatcacacttgcaattatttcacctcatgatttgccctcttggccgttgtatattgtagtggagctgtgtctttgtaacatgaattatgtaggtgcgtcaattaaatgcaattttacaaagtcatttgttagtgatgctgagcagctgtgcttggtgttgtcacattagcttgtttcaggaattttgacagtggtatttcaag

SEQ ID NO: 21216 - protein, 389 aa, Glycine max
SLASRNQKFSDLVVKCLIKLTKVLQSTIYDVDLDRILQSIHLYLQDLGMEEIRRRAGADDKPLRMVKTVLHELVKLRGAAIKGHLSMVPIDAKPQPIILAYIELNLETLAAARMLTASGPGGQNHWGDSATNNSASGTHSADAQLKQELAAIFKKIGEKQTCTIGLYELYRITQLYPKVDIFAQLQNASEAFRTYIRDGLAQMEKNAAAGRTPSSLPMPTPPPASLNISSPDFAPLSPVNTNPLGDAKLNVKPDPTNFNLPPSSYNEENRAVNAITSRALNSDYTLGDQRNDRFMTGVTSGTLDAIRERMKSMQLAAAAGSTESGGRHLTSANDNLNHGLPPPSQIPHASEHVGTENTMHGGVLPMDEKALSGLQARMERLKSGSLEPL

SEQ ID NO: 21217 - protein, 341 aa, Glycine max
MEEIRRRAGADDKPLRMVKTVLHELVKLRGAAIKGHLSMVPIDAKPQPIILAYIELNLETLAAARMLTASGPGGQNHWGDSATNNSASGTHSADAQLKQELAAIFKKIGEKQTCTIGLYELYRITQLYPKVDIFAQLQNASEAFRTYIRDGLAQMEKNAAAGRTPSSLPMPTPPPASLNISSPDFAPLSPVNTNPLGDAKLNVKPDPTNFNLPPSSYNEENRAVNAITSRALNSDYTLGDQRNDRFMTGVTSGTLDAIRERMKSMQLAAAAGSTESGGRHLTSANDNLNHGLPPPSQIPHASEHVGTENTMHGGVLPMDEKALSGLQARMERLKSGSLEPL

SEQ ID NO: 21218 - protein, 325 aa, Glycine max
MVKTVLHELVKLRGAAIKGHLSMVPIDAKPQPIILAYIELNLETLAAARMLTASGPGGQNHWGDSATNNSASGTHSADAQLKQELAAIFKKIGEKQTCTIGLYELYRITQLYPKVDIFAQLQNASEAFRTYIRDGLAQMEKNAAAGRTPSSLPMPTPPPASLNISSPDFAPLSPVNTNPLGDAKLNVKPDPTNFNLPPSSYNEENRAVNAITSRALNSDYTLGDQRNDRFMTGVTSGTLDAIRERMKSMQLAAAAGSTESGGRHLTSANDNLNHGLPPPSQIPHASEHVGTENTMHGGVLPMDEKALSGLQARMERLKSGSLEPL

SEQ ID NO: 21219 - DNA, 1393 bp, Glycine max
acattactcaactcatcctttctggttctggttcaacacagcacaccatttctaatgctgtaaaatttgtaccatgcagcaaggggctctgcttctgcttttgtgcttggtctctctgttccccctcactcactatgcctgactttcttgccacaaacccacttaccttttcagctgcagaatctccaagattccccttcctcaattcacgcccaactcttacaccaagaacccaactcaacccaaattcccgtgtcctcttttctcccaaaccatccaaaaccagttgcaataacaagagtgtctctttggcactgagctccaggtcgaatgaagggccatcaaggggttatggcttttacaacgagcttgagtttgaggacagaaatgaggaaactttggggttggagataaaccctgttgttgctgaggattcccagagtgaaactgagtctctcccatttgatggggtggaaggtgatgataattataagggagaggatgatttggttcgggttcagggggatgcagatggagatggggatggtttgaagaaagattatgatgatgacgatgatcaaggtgagaatgagaaatttggaggtaaacttagagtcagaagaggtaaacaggtaattagaaggtcgaatttgttggccaagcaagtgatcagtattcgctctgcgcttagcttggggttcgtttcacagctttgggtggacacttcctcttggatggtgttgtttgtggaggttagaccaaacttgctctctggggattcagagaaattccttctggaggacattagtcagattggagatgttgtccttgtccaggatgaaagtgtgatagacaatgaatttaaaatggttggattggagacactggttggatacaaagttgtaacaccctctcgaaggaatattggaaaggtgcgagggtacactttcagtatcaattcaggtgctgttgaagaacttgaacttgattcatttggactatccattattccatcaagtttggtgagtacctacgctttgctggttgaggacgtgctggaagtagtatttgacgcagttgttgtgcatgaagctgcagctttacgaattcaaaggctttctaaggggtttttgggcaaccagaatgtgagaatttcagtggatgattttgaagatttagactctgaacaatctgatacatacggtcctatttcaatgagaagaaaaagtaccggaggaaagaaacctaatcaaagagattgggatgatgaagataattgggagcttccgatggactatccttgattctaatggattttctactaaatttcatgtaaaacacatttttgtttattaaaaataatgaaaatttgaataaacctattaaatacacc

SEQ ID NO: 21220 - protein, 433 aa, Glycine max
ITQLILSGSGSTQHTISNAVKFVPCSKGLCFCFCAWSLCSPSLTMPDFLATNPLTFSAAESPRFPFLNSRPTLTPRTQLNPNSRVLFSPKPSKTSCNNKSVSLALSSRSNEGPSRGYGFYNELEFEDRNEETLGLEINPVVAEDSQSETESLPFDGVEGDDNYKGEDDLVRVQGDADGDGDGLKKDYDDDDDQGENEKFGGKLRVRRGKQVIRRSNLLAKQVISIRSALSLGFVSQLWVDTSSWMVLFVEVRPNLLSGDSEKFLLEDISQIGDVVLVQDESVIDNEFKMVGLETLVGYKVVTPSRRNIGKVRGYTFSINSGAVEELELDSFGLSIIPSSLVSTYALLVEDVLEVVFDAVVVHEAAALRIQRLSKGFLGNQNVRISVDDFEDLDSEQSDTYGPISMRRKSTGGKKPNQRDWDDEDNWELPMDYP

SEQ ID NO: 21221 - protein, 389 aa, Glycine max
MPDFLATNPLTFSAAESPRFPFLNSRPTLTPRTQLNPNSRVLFSPKPSKTSCNNKSVSLALSSRSNEGPSRGYGFYNELEFEDRNEETLGLEINPVVAEDSQSETESLPFDGVEGDDNYKGEDDLVRVQGDADGDGDGLKKDYDDDDDQGENEKFGGKLRVRRGKQVIRRSNLLAKQVISIRSALSLGFVSQLWVDTSSWMVLFVEVRPNLLSGDSEKFLLEDISQIGDVVLVQDESVIDNEFKMVGLETLVGYKVVTPSRRNIGKVRGYTFSINSGAVEELELDSFGLSIIPSSLVSTYALLVEDVLEVVFDAVVVHEAAALRIQRLSKGFLGNQNVRISVDDFEDLDSEQSDTYGPISMRRKSTGGKKPNQRDWDDEDNWELPMDYP

SEQ ID NO: 21222 - DNA, 2064 bp, Glycine max
gaacagtgtctgcactcacacagaaccagagcgcgcaagagagagaaaccaaaaagaagaagcgagcgaatagagagagagataaatagaaagcgaaagcgtaagaacaacacaacaaccctaacgtttctcatggaaagcgtggcgcattctcggcaaccaccacacaagaaaatcaccaccggcgccggcggtttcccagcggaaactctatacgaccacgtctacggaggtgcggcgaagttctccggcggcggccaccaccactccctctccccgcgcttcgaggactacggggagatttttgcgagcttccacgcgccacgcgcctccgccattccggtgttggatcttccggcgctcgacgctgccggcgaggttttcttcgacttccgaaacgccgcctgcgactactccgaaatcttccgcggcttcgacggcctcaacttttggctctcctacgaggacttgtttcgcggcagcgtttccgaagaagacgatgaagaagaagaagaagcctggtcaccagtggaaactgattcattttctggagactttgaccattttggaattaacgaagggatgccaaatggagatcatttgcggccttttgatggaagtacagagttcaacgtttcgtatcataaagttgatggttcaagcaatgaagatatgtcaaaggggaaaactcatataagtcagctgcgcgctgatcctgaattcactcatgtattcgacgaaatcatgcactttcataagactgatccttccttacaggttgttgatgatgttgaccttgatatggaatttaatgcaagccaggcaaagagaaaccatctgagacaaacggactcatatccgggtaattttgattctggtgaacaggttcttggtagtgatctagatctgcacgatggatgcaacagaaatggttctcattccagtgagacattcgtaactgtgtctgacatcagcctcagaactctaccctctcaagtgccaccgccttctcgcccaccacctgcactggatgcaaaactggggcacaccagtggattttgttcaaacaatgagtgggttgattctgaagagactctaggtgacacttcgccacccttccttgatgtggaggttgatacaaattcatctactgctgctatcaaagaagtcatgcatagacctgaagcaaaacataggagtgctgaagaagtgaaggagagaaagaaggggtttttagaaagcaatgtaaattcaagttatgatgtaaaaaatagtgaagcaaagatgagtatgaatataagtatatttaatagtttgaatgatgagggaatgcagacaacttgtgatcagagaattggcaaaaagaaagtttctgctacagatgaaaggcagaaaactaggaaggctaccccagaaactgtggaattgttagaaggggaaagacttcaaaacatgtttgaggaaatgcacatcaaggaatccagagcatctcaagaatcagatagaagtaccggagttgggatgtggaaagaagcaactgaattttttgaactggtgggaacagtagaatctggaacagtaattcagcccataaaccatagtaatactaagagtttggtacaagataccagaacacatgagtgtggcaagaaagagcgagaaacatttaacattaaagaagaatacagaaatgttaaagaagttgtagaaggttatcagctggaggaaagcaagaagaaatcgaaagcaggaaatggggcttgtgaacagggaaaaaacattaggaaatctaaatcatctaacgaggaatgcaggcagagagagcatgtgaagaatgaggaaatggccgaaatctttgagcttgaaaagagtgagaaggcaagaatggtccacttgcatggaaaaactgaaaagaaagtacctaaggctgaccaatcaggaagcttaaaagatgtgtctgagaaacaatgcaaggagcataaacgagtagagagcgaggaatcaaaagagattgataggcaaaagctaagtgaagttcagtggagcacgaagcatatggaacat

SEQ ID NO: 21223 - protein, 688 aa, Glycine max
EQCLHSHRTRARKREKPKRRSERIEREINRKRKRKNNTTTLTFLMESVAHSRQPPHKKITTGAGGFPAETLYDHVYGGAAKFSGGGHHHSLSPRFEDYGEIFASFHAPRASAIPVLDLPALDAAGEVFFDFRNAACDYSEIFRGFDGLNFWLSYEDLFRGSVSEEDDEEEEEAWSPVETDSFSGDFDHFGINEGMPNGDHLRPFDGSTEFNVSYHKVDGSSNEDMSKGKTHISQLRADPEFTHVFDEIMHFHKTDPSLQVVDDVDLDMEFNASQAKRNHLRQTDSYPGNFDSGEQVLGSDLDLHDGCNRNGSHSSETFVTVSDISLRTLPSQVPPPSRPPPALDAKLGHTSGFCSNNEWVDSEETLGDTSPPFLDVEVDTNSSTAAIKEVMHRPEAKHRSAEEVKERKKGFLESNVNSSYDVKNSEAKMSMNISIFNSLNDEGMQTTCDQRIGKKKVSATDERQKTRKATPETVELLEGERLQNMFEEMHIKESRASQESDRSTGVGMWKEATEFFELVGTVESGTVIQPINHSNTKSLVQDTRTHECGKKERETFNIKEEYRNVKEVVEGYQLEESKKKSKAGNGACEQGKNIRKSKSSNEECRQREHVKNEEMAEIFELEKSEKARMVHLHGKTEKKVPKADQSGSLKDVSEKQCKEHKRVESEESKEIDRQKLSEVQWSTKHMEH

SEQ ID NO: 21224 - protein, 644 aa, Glycine max
MESVAHSRQPPHKKITTGAGGFPAETLYDHVYGGAAKFSGGGHHHSLSPRFEDYGEIFASFHAPRASAIPVLDLPALDAAGEVFFDFRNAACDYSEIFRGFDGLNFWLSYEDLFRGSVSEEDDEEEEEAWSPVETDSFSGDFDHFGINEGMPNGDHLRPFDGSTEFNVSYHKVDGSSNEDMSKGKTHISQLRADPEFTHVFDEIMHFHKTDPSLQVVDDVDLDMEFNASQAKRNHLRQTDSYPGNFDSGEQVLGSDLDLHDGCNRNGSHSSETFVTVSDISLRTLPSQVPPPSRPPPALDAKLGHTSGFCSNNEWVDSEETLGDTSPPFLDVEVDTNSSTAAIKEVMHRPEAKHRSAEEVKERKKGFLESNVNSSYDVKNSEAKMSMNISIFNSLNDEGMQTTCDQRIGKKKVSATDERQKTRKATPETVELLEGERLQNMFEEMHIKESRASQESDRSTGVGMWKEATEFFELVGTVESGTVIQPINHSNTKSLVQDTRTHECGKKERETFNIKEEYRNVKEVVEGYQLEESKKKSKAGNGACEQGKNIRKSKSSNEECRQREHVKNEEMAEIFELEKSEKARMVHLHGKTEKKVPKADQSGSLKDVSEKQCKEHKRVESEESKEIDRQKLSEVQWSTKHMEH

SEQ ID NO: 21225 - protein, 494 aa, Glycine max
MPNGDHLRPFDGSTEFNVSYHKVDGSSNEDMSKGKTHISQLRADPEFTHVFDEIMHFHKTDPSLQVVDDVDLDMEFNASQAKRNHLRQTDSYPGNFDSGEQVLGSDLDLHDGCNRNGSHSSETFVTVSDISLRTLPSQVPPPSRPPPALDAKLGHTSGFCSNNEWVDSEETLGDTSPPFLDVEVDTNSSTAAIKEVMHRPEAKHRSAEEVKERKKGFLESNVNSSYDVKNSEAKMSMNISIFNSLNDEGMQTTCDQRIGKKKVSATDERQKTRKATPETVELLEGERLQNMFEEMHIKESRASQESDRSTGVGMWKEATEFFELVGTVESGTVIQPINHSNTKSLVQDTRTHECGKKERETFNIKEEYRNVKEVVEGYQLEESKKKSKAGNGACEQGKNIRKSKSSNEECRQREHVKNEEMAEIFELEKSEKARMVHLHGKTEKKVPKADQSGSLKDVSEKQCKEHKRVESEESKEIDRQKLSEVQWSTKHMEH

SEQ ID NO: 21226 - DNA, 1613 bp, Glycine max
ggtatcagcataaaccacaacacattcaattccaccatgagaacttctttggggagtttttcttcacccttcacaagcttccgttccgcctcatcatggttcgaggtgtacgccgctttctccacattcatgatgcttctgagaaccgcgatcaacgatctcataccccaccaagttcgcaccttcatagtcacaaagataaaggctttgttctcagatcgccaaaatattaaccaggtctcactccagatcaacgagatttgggatggccaaatcaaccagctcttccaagccgcccaagagtatctccctgctcaaatatcccactcttacaagtccctcaaagttggaaagctcccaaagcacaagaacattgcggtggcagtggatggaacacaagaggtcgtggatcttttccaaggcatcaagctcagctggaagctcgttgagaaaagccccaaaagcgattctgatcaccgcgatcatcatcctaagtctagcggtgttggttacgagaggaagtcatttactctaagctttgatgagaagcatagagatgtagtaatgaacaagtacattaaccacgttctaagcacttaccaggacatgcagacagagcagaaaaccatcaagatccattccattggtggaaggtgttggcagaagagtgacttaactcatccagcttcctttgactcgcttgcattggaacctgagcagaaacaagccattattgatgatttgaatcggtttttgcgacggaaggagctttacaagaaggtggggaagccttggaaacgtggctacctcctttatgggcctcccgggacaggaaaatctagccttattgctgctatagccaactacttgaagtttgatgtgtatgatttggagctaagctctatgttttctaactcggaactcatgcgagtcatgagggaaacaaccaaccgctccatcatcgtcatcgaagacatagactgcaacaaagaggtgcatgctcgaccaacaacgaaacctttttcagattcagattcagacttcgaccgcaagcgtgttaaggttaagccttacaggtttactctgtcgggtctgcttaacaacatggatggtttgtggtcaagtggtggagaggagcgaattataatattcactactaaccacagagagagaattgaccctgcattgctgcgccctggtcgtatggacatgcacattcacttgtccttcctcaaaggcaaggcctttcgagtcttggcttccaattatttaggaattgaagatcattcactttttgaagaaattgatggactattggagaaattagaagtcacccctgcagtagtagcagagcaactgatgagaaatgaggatcctgaagttgctttggaaggacttgttgaatttctcaaagaaaaggacaaagaaagcctacttagatttatgaatgagactgcagactaaatagcatgttttagagtcttttcatctgtatcaccaccagtataagatgcagaataaaaatgaatgccctttgcttttgtaatgtttaggatttgtacttatgtatggaattgttgtacaatttcaatgcaaaaaagatttgaagattt

SEQ ID NO: 21227 - protein, 487 aa, Glycine max
GISINHNTFNSTMRTSLGSFSSPFTSFRSASSWFEVYAAFSTFMMLLRTAINDLIPHQVRTFIVTKIKALFSDRQNINQVSLQINEIWDGQINQLFQAAQEYLPAQISHSYKSLKVGKLPKHKNIAVAVDGTQEVVDLFQGIKLSWKLVEKSPKSDSDHRDHHPKSSGVGYERKSFTLSFDEKHRDVVMNKYINHVLSTYQDMQTEQKTIKIHSIGGRCWQKSDLTHPASFDSLALEPEQKQAIIDDLNRFLRRKELYKKVGKPWKRGYLLYGPPGTGKSSLIAAIANYLKFDVYDLELSSMFSNSELMRVMRETTNRSIIVIEDIDCNKEVHARPTTKPFSDSDSDFDRKRVKVKPYRFTLSGLLNNMDGLWSSGGEERIIIFTTNHRERIDPALLRPGRMDMHIHLSFLKGKAFRVLASNYLGIEDHSLFEEIDGLLEKLEVTPAVVAEQLMRNEDPEVALEGLVEFLKEKDKESLLRFMNETAD

SEQ ID NO: 21228 - protein, 475 aa, Glycine max
MRTSLGSFSSPFTSFRSASSWFEVYAAFSTFMMLLRTAINDLIPHQVRTFIVTKIKALFSDRQNINQVSLQINEIWDGQINQLFQAAQEYLPAQISHSYKSLKVGKLPKHKNIAVAVDGTQEVVDLFQGIKLSWKLVEKSPKSDSDHRDHHPKSSGVGYERKSFTLSFDEKHRDVVMNKYINHVLSTYQDMQTEQKTIKIHSIGGRCWQKSDLTHPASFDSLALEPEQKQAIIDDLNRFLRRKELYKKVGKPWKRGYLLYGPPGTGKSSLIAAIANYLKFDVYDLELSSMFSNSELMRVMRETTNRSIIVIEDIDCNKEVHARPTTKPFSDSDSDFDRKRVKVKPYRFTLSGLLNNMDGLWSSGGEERIIIFTTNHRERIDPALLRPGRMDMHIHLSFLKGKAFRVLASNYLGIEDHSLFEEIDGLLEKLEVTPAVVAEQLMRNEDPEVALEGLVEFLKEKDKESLLRFMNETAD

SEQ ID NO: 21229 - protein, 444 aa, Glycine max
MMLLRTAINDLIPHQVRTFIVTKIKALFSDRQNINQVSLQINEIWDGQINQLFQAAQEYLPAQISHSYKSLKVGKLPKHKNIAVAVDGTQEVVDLFQGIKLSWKLVEKSPKSDSDHRDHHPKSSGVGYERKSFTLSFDEKHRDVVMNKYINHVLSTYQDMQTEQKTIKIHSIGGRCWQKSDLTHPASFDSLALEPEQKQAIIDDLNRFLRRKELYKKVGKPWKRGYLLYGPPGTGKSSLIAAIANYLKFDVYDLELSSMFSNSELMRVMRETTNRSIIVIEDIDCNKEVHARPTTKPFSDSDSDFDRKRVKVKPYRFTLSGLLNNMDGLWSSGGEERIIIFTTNHRERIDPALLRPGRMDMHIHLSFLKGKAFRVLASNYLGIEDHSLFEEIDGLLEKLEVTPAVVAEQLMRNEDPEVALEGLVEFLKEKDKESLLRFMNETAD
